United States Patent Application Publication US 2015/0376612 A1 - sequence listing, part 9

SEQ ID NO: 21171 - DNA, 1017 bp, Homo sapiens
cccgagaatcgcttgaacccgggaggcggaggctgcagtgagctgagatcgtgccactgtactccagcctgggcaactgagcgagactccatctcaaaaaaaaaaaaaaaaaaaagaaagaaagaaagaaaagagaaacactgtggccaactgtgcctggattatcagagatcatagagagtgttccctgaagaagggcaggtaatgtgtagcggtgtgtaacatagactctccttgatcacagataggctatgcattcatttgatttgttcttggaaaattctgatgattagctgggcatggtggtgtgcacctgtcatcccagcttacttgggaggtttgaggtgggaggattacttgagcccaggagttcaaggctgccaagagccatgatcacaccactgcactccagcctggatgacacagcgagcccctgcctcaaaattaagaataaaaataaataaaataaaattatggcgaatattcaatgtagcctgatacagggaaatgatatgatttgttccacaatccaatccaaaaactttgaaaatcatctgctaatttagatttttttttttgagacaaggtcttgctttgttgccaaggctggagtgcagtagtgcaatttcggctcactgcaacctccacctccccggttcaagcgattctcctgcctcagcctcccaagtagctgggatcacaggtgtatgccaccacacacagctaatttttgtatttttactagagacggggtttcaccatgttggccaggctggtctcaaactcctgacctcaggtgatccacccgcctcagcctcccagtgctggtaactcatgtctataatgagccgctatgcctggccactaatgtagatattatacaaggcagcctacatcctcttagagaagagagaacttggtggtaactgaaaacatctgtagtatggcctgtccttgcccccagagaggctgcatggacagtgccctctgcactgtcttccccagagctcctgtcag

SEQ ID NO: 21172 - DNA, 1086 bp, Homo sapiens
tgttacagggaagagaaaactcaggtcagaaaggtaggcctatttatacaccttccagaagcccatggctgagcagaccctcttagattgcagtacagagcagattttggacactctgtacaagaactcttgtctgcgtcgctgttagccatagagtagacccaggaggaagaaacattctctgaatttggctagaactcccttccgtcaaatctgacccaagtctgtgtggtttagaaagccccttcatccccctttgagggaagctgccggactcctttggctattttgtttctaccttaagagtgcgggccaggcgtggtgcctcacgcctgtaaccccagcactttgggaggccaaggcgggcagatcacgaggtcaagagatcaagaccatcctgaccaacatggtgaaaccccgtctctactaaaaatacaaaaattagccgggcttggtggcacacacctgtagtcctagctgctcgggaggctgaggcaggagaatcacctgaacccaggaggtggaggttgcagtgagccaagattgcaccactgcactccagcctggcaagagagtgagactgcatctcaaaaaaaaaaaaaaaaggagtatgcaaagtttgccttgcacagttggtatttgtaacccagcctgaacctaataaaacatgcgcctgtagttgggtttgtttgacagctccaggcctgagtctctgttggtctctttttttgtgttacaaattcaggttcccaaagatgtatactaagtctaagataagctgagaaatctcagctagatgtatagcttagactgggagaccagtgtgttcaaccattctatctcagggatgtagagaggaggtcagcgaattttttctataaagcgccagatagcaaatgttttcagcctcaggccatatgctgtctgttgcaactactcaattctgcagttgcagtgcaaatgcagtcatcgaccatgtatatctgcattgcagtacaattttattcacagaaacagacagcagacaggctttggcccacaggtgaagcttgcagtggattgatttcctcatttgcatgcttttaa

SEQ ID NO: 21173 - DNA, 1032 bp, Homo sapiens
gtctgccccgccccccccgcccactaccacagtgctttgtacaaagcaggcattcaactgcatgatcagtaaatacagtagtaatacattccataaggttttagaccctgagttggctgacaatcagattcataattctgaagtagtatctacttagttttcattaatccttaaaactgctaaatttttggttcggtgtatactgacctttttagtgaagcttgtgaaaaactgattgtagcatatgtgaaaattaatatgtaatatgtattgattgatggtagcatctgtgaaaattaagttggttaattgttgcaggctctatttctctgtgagctgtgatattttggagcttctaagtctagaggaaggtggggttaaggtgaagcctgaagaatgcatgatgggttttaaaagttgacacttgttgttattcagtttttaaataggggacaaagaataataaatgtgtttgcatttgtgtatattaatatactgccagtaaatagaaaagttcttgagaatttcaattatgagggtttttttttttagttacaactgagttataaaaatatacagaaagtaacaggacccaaacagtgagttgaaatcctgcctgttgggaaattctagctatgatacctatataactattagggtataattagagggtattttgaaaatgacagaacacaaaagtttcagaccctcttttaagcatcagttaaaaaaaaaacaacaacaacaacaaaaacaaaaaaacctcaaagaacatatgccccactgaagggacaaacaggttatttttaaaaagagaaggcacttattcagcaaacatttattcagcacctactatgtgccaggagccattagccttcgactgtaagataaataagagagtctttttcctgaaggagctcatagccaagtagaagagattcccaaggttaatttgcattgacttcttaccccagcataattctatttttctctctttttttttttttttttcaagacgaagtctcgctctgt

SEQ ID NO: 21174 - DNA, 1029 bp, Homo sapiens
agaaatcgaatttcagtagcccgtgtccttaatagaaaccaagtcaagtgctcaggagaagcacagcttttcctagcactgacaccagagaggaatttcagctgtaggaccctcatgaagggtgcactgtataagtgcttctcacacctgaatgtgcctgcaggtcacctgggaattttgttaagatgtaggctctgatgctgtcagtctggggtagggctcaagatcctacaacgctgctggctctcagagcaggcgttgagtagcaagtatatatgccatgcttaggggtctgaaattattctgtagatagagcagaactactgatgatttttcagcagaggatctcagtcaggtttgttttggaaagatcattggtagcaatgtagaagacattgcagagcaaagaaagatcagtggaagaaaaactgtaagatgtagctgatgttcttaagaatattcttaaaggaaaagcagtatcaagtttctcagagctattttgtataatgccgctcaatgtggactgatggcacacacctaaagcacatgcttccacctggaaccagatgatggttttatccatgaattaaaatttgaatattgatatggttttgcagtgtccctgcccaaatctcatcttgaattgtagctcctataattcccacgtgttgtgggagggacccagtgggagataattgaatcatgggggcagttcccccatacggttctcatggtagtgaataagtctcacgagatccgatggtttcataaggggaaacccctttcacttggctctcattctctctcttttctgcctccatgtaagatgtcccttgctcttccgccgtgattgtgaggctgccccagccatgtggaactgtgagtcaattaaacctctttcctttataaattatccagtctcaggtatgtctttatcagcagtgtgaaaccagactgatacaaatatctaagaattgttgtaacatatatattgcaaatctttattaatgttagttaattaaagtaatc

SEQ ID NO: 21175 - DNA, 1034 bp, Homo sapiens
ttgttataaattttctaaatatttttgctggtaggatggtgcggagttttaccaggctggccataactggattcatagtgttacatgaaaggggactccatccagaccccaagagagggttcttggatctcgcgcaagaaagaattcagggttgagtccgcaaagtaaaagcaaatttatcaaggaaatagaagaataaaagaatggttactccatagacagagcagcccctagggttgctggttgcccacttttatggttatttcttgattacatgctaaacaaggggtggattattcatgcctcccctttttagacaatatagggtaacttcctggcattgccttggcatttgtaaactgtcagggtgccagtgggagtgtagcagcaaggacgaccagaggtcactcttatcaccatcttggttttggtgggttttggctggcttctttactgcaacttgttttatcagcaaggtctgtatgacctgtatcttgtgcctacctcctctctcattctgtgacttcgactgccttaacctcctgggaatgtagctcagtaggtctccgcctcattttacccatcccctattcaagatggagttgctctggttcatacgcctctgacaatagtgttccaagaaggttcaaatagatgcctacaaagcttttgaatagaaagtagtagtgcataattatctgagctttatgccatgtttctaggatctgggaagcattcttgctttctttcagcctaaaacaactattttattcagaaacttatgctattatattttaaagatatttgaagattttaaagacatagctattatattttaaagctatcatagtaagatctgggcttgccttaaatataaatattttagacaaatctcctaattttcttctctccaaatcactttcctggaaatcatgaatgcctgaaccttcaccattaatgataggaaatggaaaatgaaggaatgaaggactttttaaaaattgaggcataatgcaaagaaaagggtagcacat

SEQ ID NO: 21176 - DNA, 1049 bp, Homo sapiens
gatgcatctatgtccagaagctaccattgtaatcagtggacatctcaacaatccctttgcagatgaatatcaacaagttgtgtccgggcttgggtggtgagtgtatgactccagatgttatgctgctccagcagaaccagtcactcttgtggaagccaaggaatgggaacagaagaatatgaaatctgtggtactgatcatcagtcttaatatccaaatgaatatcatggtacataccatgatggctatcaaagatgggttttgttgttgttgttgttgttgttgttgttgtttttgagacagagtcttactccatcactcaggctggtgtgcagtggcacaatcacagcttactccatcctcgacttccccaggctcaggtgttcctcctacctcaggctcccaagcagctggaactacaggtgtgcaccaccaagcccagctaattttttttcttgtctttttttttttttttttttttgtagagatggggttttaccatattgccaaggctgctcttgaactcctggactcaatcagtccacccacctcagcttcccaaagtgctgggattacaggcgtgagccaccatgcccaacccaagatattattaatataatgaatgaccaaggcaccaatattaaagacacatacatttttacaatattcgactttaactgatattttcaaactgtatgaggtgtttgaggcatttttgtttttgttttgcttttagagtcagggtcaatcagagctcactgcagccttgaattcctcagctcaagggatcttcccgcttcagtgaggttttttaaaaaatagagtttagtatctgatttctacgtagaagaaatttaaatgtttatattgcttaagtattgtttgctaatttttaaagtaatgatcaatgagtacaaaagaaaaataccctcatatacagagttgatgtattatcctacctgcaacagatgagccccaggccattctctcagttcattcggcaggctgcagtggttgattttgcacaaagaactgtgctaatcttataa

SEQ ID NO: 21177 - DNA, 1051 bp, Homo sapiens
acacatttataatcaatcaatttttgacaaaaatgtgctaagataatgaatgggggaaggatagtctttccacaaatagttctgaacaattgggtattcacatggagataaagaagacctcaacttttacctcacagttacacaaaagttaccttgaaattaattgtagacctcaacataaatgctgcaagtataaaacccttggaagaaacatagggcaccttagtgatgttgatttagacaaacatttcttcaattggactcagaaattatgaactatggaagaaaaaattgataaattagaaatcatcagaaataaaacttttactcttcagaagacactcttaagaaaataaaaagacaaactagtcttggagaaaatatttgcaaaatatatacctgaaaaagtatttttatacagcatatataaagaactcaataagaagaaaacatacttttaaaaatcagaaaatggtttaataggctcttcaccacagaagatagactgtggtaactgaaattttaactatgttggtagggcactgagtttgtttaaactaaaccatgaaaactgaaatttgtgccaattggaactgcctttatttagcaaacataatcacacaactactttcaaagtttattaattttataggtttgcaattcctctgagggtttgacaggggacacatcctgtgctatctttggggagagcaccactctgtgttggacatccagtattaaacactccttgccttaattatccttactaataatacaaatggccaacatttattgcactgtgtcaagcattgttgtaaaggtttattgtctcctcactacatctctgtaaattaagtgcttttattctttttggatgcttaaatcgtttgaataatttggagagacaagattcaaacagtttgacaccagaacctatgcttttaaccactcactccattatccacatggtaacaatatgcctgatgactgtgttgaaaagggaaatagagaaagctatgagagcatacagagcagacagcttggttttggg

SEQ ID NO: 21178 - DNA, 1023 bp, Homo sapiens
tagccctgtagtatagtttgaagttgagtaaggtgattcttccagctttgttctctttactttggattgcttggggtattcaggctctgttttggtttcatatgaatattgaaatagttttttctaattgtgtgaaaaatatcattggcagtttggtaggtatagcattgaatttataaattgctttggccattttaatgatattggttcttccaatccatgagcatgggatgtttttccatttgtttgtgtcttctctcatttcttcaagcactcttttgtaattttcattgtagagactttttacctccgtggttagctgtattcctaggtatattatgtattttattctttttgtggcattgtgaatggattgctttctgattgggctcttggcttggctgttgttggtgtacaggaatactagtgattttagtacattgattttacatcctaaaattttgctgaagttttttatcagctgaaggagctttggggccaaaactgtggggttttctagatatagaatcatgtctgcaaacagagaaagtttgacttcctcttttcttattcggatgtcctttatttctgtctcttgcctgattgctctggctaggacttccaatacagtggtgaataggagtggtgagagggaattcttgtcttgttttgtttttcaagggaaatgcttctggcttttacccattcagcataatattggtggtgggtttgttatagatggctcttattattttgaggtatggtcctttaatgcctggtttatcgagagtttttaacatgaaggggtgttgaattttattgaaagcctttttttgcatctactgagataatcatgtggtttttgtctttagttctgtttatgtgatgaattgcattcattgatttgtgtaggttgaaccaaccttgcattctggggatgacgtctacttgatcgtggtggattagctttttgatgtgctgctggattcagtttgccagtattttgttgaggatttttgcaac

SEQ ID NO: 21179 - DNA, 1091 bp, Homo sapiens
ttgcttgtgcttttgaagtcttaccaaaaaaaatctttgcctagaccaatatcttcttcaagtagtttcatactctcaggtcttacatttaagtcttcaatccatgttgattcaatttttgtatatggtgagagatagggtcctggtttcattcttctaaatatgggtatccagttttgccagtactgtttattgaagggactgtcctttctccaaggtatgttcttggcacctttgtcaaaaatgagttagctgtaaaggtgtggtgggttctctattctgttccattggtcagtgtgtatatttctctgccagtaccatgctgttttggttatgatagctttgcagtatattttgaagcctgatggtgcaattcctctagctttataacttttgcacaagatcactttggctatttggggtcttctgtggttccatacaaattttagaattgttttttatatttctctgaagaatctcattggtgttttgatacagattgcaatcaacccgtagattgttatgggtagtgtgggcattttatcattgttaattcttccaatccatgagcatggagtatctttccatttttgtgttctctttaatttctttgatcagtgttttaagttttcagtgtagaaacttttactacttttggttaaatttattcctagattttttttatcgctgctgtaaataggattgctttcttgattttttttcatgattgttcactgttggtgtatagaattgctacagatttttgcatgttgattttatgtcctgcaaccttactgaatttgtttactggttctaacattattttggtggagtctttaggtttttcttaatatatgatcatgttgtctgtgaataaggataatttgacttcttcctttctaatttggatgccccttatttttttctcttgcctaattgctctgactaggactcccaatactatctgtgttgaatagaaatggtgaaagtgagcatccttgtttaatttcagattttagagaaaaggctctcaatttttcccttttcactatgatgttagctctgggtttgtcatatatggcctttactgt

SEQ ID NO: 21180 - DNA, 1072 bp, Homo sapiens
cagtggccttgagagtgagtgggactgttaaagcaagggggaaagaggcagggagggagggagagagagggcaactgtgaaggaagaacttaggggtacagctccatttgagaggccagggaggaaacagttgaagaagggtcacgaaggtagaaggaacatgagaagaatgcatttttatggaaatagaggaaaagactatttggaaagggggattgtcaagaatgtgacccaaactcaggaaggatgagggttgaagaaaggtcactggatgtgaaaccacaaagtcattgatgatcttggacagtgcgctgaaaatgattgtgtgcccagaaacagggtttcaaaagataagtctggaagtggaagtgagggaacatcctgttgtttgggaaaatacgatgttaaaagaaagatgtagttccaaagagcagcaggagttaaagagaatatattttggggctgaacatgggttgagcattttgaagtacacaaagggactaatggagaggaacagcttaatgacgtgaagaatcagagatcattgatggcttgtgatctgtgaggtggtgcaggtgggaatggcatccccagcacagacgcagcacaggcctacctcagccctcggctacaaggctgcaagggtccattggtcttttcccagaatgtgccacactctcccctgcctccaggtctttgcagctgctgtcaccctcttccagaatgcttctccacatgattttttcaatggccaacctccttgacatcattctacactcctcagagcatccttccccgaccttttcatccaaagtctggcctacctatgccacctttttttgtcccattgtcttcatagctcatagcattacctgaaatcatccttttatttgttcgcttgtttcctcccacccactagaacataagctctgttagcaggaccttgtctagcttgtttacttctgtaccaccagtgcctagaaaacccagctcggggcaggtgccctccgggtatgacatgaatgagtgacaggaggcatgaccttcaccaatggaggaaggaagtcaagca

SEQ ID NO: 21181 - DNA, 1070 bp, Homo sapiens
taggaaaaaggactgtaaataggcaggagtgagcctgacttcttggcagaacagcagggaaagtggtgtgtctggaaatgatgagtgagaagaagagggaaagtgatgaggccagagaagaaacctcagggtgtgggtccaggtcacgtaggtctgagtaggccagtgagagggctttgctttgactctctatgagtagaggaagttggcagattttgagcataggagtgacatgatttgactcacacttgaataggatgtcatcatctgctgtgctgagaatagactgaattgatggcaaaggaggaagtagagagaacagttaaaacgctgttgcaaaaatatagaggaaaggtaatagagagctgggtctagccaatagcaatgaaggtagtaaaacctgatcagatttgggatatgttctgaaggtagacctgacagcattcactgttggttcgtggaatatgctggggggtgggaagtagggtggaacagtcacgggcagcaccaaggctattttcccaagccagtggacagatggaattcctctttgccgaaaggaagaagactacaagaccaataggttgggcctctcgggacatgttcaggctaagtgggatgttagtgataattccctcacagcaggataaaataataatgtctcgatgctaaaatatacagttcaggaattagggaaatattcttttttttttttttttttttttttgagacagagtctcactctgtcgcccaggctggagtgcagtggcatgatctcggctcactgcaacttccggcacctgggttcaagcaactctcctgcctcagcctcctgagtagctgggattataggcacccgccagcacgtctggctaatttttgtatttttagtagagatggggttttaccatgttggccaggatggtctcaaactcctgacttcggacaatccacccaactcgacctcccaaagtactgggattacaggcgtaagccaccgcgccaggccaggaaatattcttatatggtatagtctcagactttgacaatagcagataaaagagagactg

SEQ ID NO: 21182 - DNA, 1035 bp, Homo sapiens
cgtgctctcagaagcctgaatgaagcagttctgataatgcctgaccaaaggttagtcacttccatactgtatcactaactaattgtgtttgtgaccagctgaagaatgtcgaggaaggtggaagaatggcgtcagggctccagttattagggtccttgccctttcactgtgggaagaaatttccagtgatgaggaagtcaggagcttggactgcttctcttgaaatctaatccacatcttgaaaattctgcttccttgctacatcgtgggtataaacaaggctacagctcttctgaaagggacacttaggcacattaacatagacaacccagcatcttaaaatatgactcgaagaggtaatggatagttaggtggacacatggagtggcaaactgcccgaggatcaaaaatctgaaagatctgaaacctgtgtcaaatccagagttcccaggaggcactcactttttttttttttttgaggagtctcactctgtcgcccaggctggagtgtagtggcgcaatcttggctcactgcaacctctgcctcccgggttcaagcgattctcctgcctcagcctcccgagtagctgggactacaggtgcgtgccccctgtcaagctaatttttgtatttttagtagagacggggtttcaccatgttggccaggttggtctcgatctcttcacctcatgatctgcttgccttggcctcccaaagtgctgggattacaggcgtgagccactgtgcctggccgtggaggcactcatctttctaggaacacctctgcctcagactgtgctgaattaaaacctcctaatagtctgtcttctaccattttgtttcttttttttttctttttttttttgagacagagtcttgctctgtcacccaggctggaatgcagtggcgctcactgcaagctccacctcccagattcacgccattctcctgcctcggtctcccgagtagctgggactacaggcacccgccactgcacccggctaattttttttttgtatttttagtagagacggg

SEQ ID NO: 21183 - DNA, 1023 bp, Homo sapiens
acattcagacgtttaactgatgttgagcactggccacatgtgtccatactctggtcagaggtgtgagctagccccagcctcagagcacgtcttcacacctcacaattacaaggtggttcattgcctctgtcagttatgttctaactctaaatcaaggaacttagcagacaaggaactcagaaagcagacaatgctaccttctttagaagagaccatgagcctaacttagaaaggtctttgatagtaaatagtcatcacattttacaagaaagaagtcatagcttgcacagtcagttgaattaatggaaactgccttcagcacattgtctgcctccataagatagccccccccattttttaaatttgatgtttgttggtttttaacctgtttttaatacatatgttcttgaaaatagtatttgctcatagtaacagaaatcgtgatgatatccattatcatgactttatctcatattttaaagaagtccctgtctccatagtaagatgagaaaaaataaggtaagattggaaatcaagaaacagaactattgttattataggtcatctaaataatagtttgacagttcctaaatctattaacaattaggcaaaataactagatataaaatcaattctgtatacaaaatcaactgtatttttatacatgagtaacaatatacaacatattttttaaaaaataccgtttacaatagcacaaaaccacaaggttcccagaaataaatctaacaaaatatgtgggcttctaaagtttcattattgatgtgacttggtacaggttcctttccatgtctggaaaattcccctggatgatttctttgataatttttctatcctagctttgttgttgtttattgtcttttctgggcttctgtcagttgtatattgaacctcctggatttgcctgcatgactttttttttttttttgcaaattttttttttcattttgtcttttcactcaatgtttttttagatttgctttcccttatgtgctggaatcatat

SEQ ID NO: 21184 - DNA, 1029 bp, Homo sapiens
taactcatgaatgcattccaaaattcaaaatggataaatatatacagtaaaatggatacctgaatagataattcctgaacagtattaaaacttaaatgaataatgatatatggtaaaaaaaaaagatcatcttaaagatgaaattgaatcttctttcattgatctctttgttccttcatttgttgaacacctttgtgtagcagtcactgcgctaagaggaggtatacaaaaacaagacaaaggcctcccctgcaaggattcttagcagaaaatttagcaagtggatgtagcatgataagtaggataaaggctatctgccctgtaccccaagccagaagactgattgcctgaaggaaacgggggagtcttcatagcaaagggaagatctgaacaacattgaattgggcaggaaaatagctattgtacgtaccatattgtgaaattatttctaattaaattgctctcatcaagctgaaatccattacactcaagaaatgggagttctgatgtatggaaagactgtaaagggagaaggaagagtgatattgccggaagataacctcctggtgggatgccctgggggagtttttggaagacgtggacatctggaggtgggttggagcaaggcaagaaaaaaaacagggaagtgcaaacaagggggtagaaagacgcttaaggcaaactttacctgctttgaaattgtccccagtgttagtgatacaaaactatagtcacatagagacctgaaagaggaaacaccccctccatgaggaaggtaaaccccaagatgctcctgtttccagagaaagcctgaggggtggcaagaggactgcaggtcagcttcttcaggatcaggctgcagggctcctgcctgctgcaagatctgctctctctgggttgggggcactgcctactccacctctctgcttcctaggtctcttgcctgatcttgcgtgagaatattatctctctcctgcatccctgcctgagccctagcaccgcatttgctgagctgcttccatgggtgtg

SEQ ID NO: 21185 - DNA, 1102 bp, Homo sapiens
tcaccacattagaaaatctatactgaagaaaaaatattacagttaagcggaaattttagctctgcgcttgcctggaagccacagcaaagagggaaactttgctgtgaattgtataattctaattatgtaatgacaaaaatcatagcagttcttttttttctagttctcagttctgagagaaatttatgccattagacttaatataaaggacattgaccaatataattgatgatattttccatatgttaaaacattggaaataaaatctggtggggaaactttagattctttagtactttcataaaatgtaattactagattttattttaatgtgctaaaatttcattttaatttattgagaatattattattctcaaatcaaaaaacaaagtgctttaagaaatataattttgtagatattatgagtcataagaaagtatattttaagtcacagcctagcaaattctaggacagttgtttcatcactgtgccaggaatacttacaaagtgtctttaggaagtagaaattagaaacatagctgagattagaaattatttaggagttaatgcctaatattaatttccaagtgttattatctctttcttatatctgattttcttgtctctgaatttgttatgaaaaactataaaaagaaattataaaatcaaatgataattcactccaagagtaaaagatacttacacctgtattaaaatgattcatatcctacctgcataaccaaaatagtatttcatcactaatatttatccattaatgccatttgcttggtcctgaggtagtatatatttttgtttctttggatcaaactggactgattgcttggaaaaaccaagctatgtaaactctatttttcccccagcctaatgaagctgttgctgttaatgtaaccctgttttttgttcccctcttctccctagtgacacacatggtcacatcagagtggtggcctggtgttccagctgtgtacacaccaagctgtgctactcatcccctgatggactgagttatttgtattagagagggcagagtgtgttttaagtattaagtgggctttactgcaatgtacaaagtttaatgtta

SEQ ID NO: 21186 - DNA, 1030 bp, Homo sapiens
cacataaaggaacagggatttagtggaaaaactgttttgtttatcatgggattgcaatgattattgtcaccttcaggtagatggatacatgggatatgaaaagataaatagacacaaggtggtgtttaaaatgacaaataaacatgcacgatatgctctttcagcctgtcaacaaaaatgtgcctgtttgcggatcccaaatacaggggtggggatgggatatgggtgcgaggagagaacacacacacacacacacacacacacacacccctatctatatctatatctatatcgatatctatatatctatattgttgataacctcattgtaaagggacaagagagtcttgctgaagtagaaattaggtgacactttttttcttatcagtcttttgaccacttaagctttgaaagaggttttcaatttggtgggggagagggagaaagtttggtattttgatatatgatatgtacgttcttattgaaaagcctagaaatttttgtgtcttagagtggattttaaactcagatgagtaacctggaaaaactcgtattactttttgcccaagtcttaaaagattgcatcatcttgttttagaaatgtcttttctcccctttatgatatttctctaaaatttggtttgagtgagttaaattacccacccccgcccagcatccttcagtgttacagctaatagtaagaacatatttttcacttgtgtaagctttcccatttagggaaggtgagctaagttaatcttacctgtggcatctggaagatcaggaaagcagtgtggcatagcagccaacaacaggaactctagaagcacactttcaggactggaatcctggcttgacctgttgttactctaggtgtgtaaccttggaagtattctctaagccctagtttcctgttctgtgtaagtaaggatgtaataacactcttatactggtttactgtgagaataaatgagagaagacataaacttctgtattagtccattttcacactgctgataaagacatactg

SEQ ID NO: 21187 - DNA, 1063 bp, Homo sapiens
gttaggagtttgtgcctaggggacctgggctgttgaacagtcactctgatttggtgtcttttttggccaagttacagaacagagtttccaggactgagaatgatagactcacctctccctttgtctctggctatcctcaggaatatttctcccttcaggaactcacaatgtttcctgtggcttaaggcagagacaggtcctctgccagggaacccaatatgttggagaagctggttgtccaccttgatctttttctagtgtggaaactctgggtcgaggggaaattttctgtatgcctgggcagattggaggggagggacattgtatacatggaagtgtggttctcctactctctgctcagagttgttttttacttccctgtggtcctgggaactgcctcattctcatatttgagttctgtgatattgctggtgataatctcagtgctgtctgtttgtttttggttttctgtgtgggagagtgaagccagcttctatgccgccattttgaaaccagaaatctgaatcagatgtaattctctttttttctgtttgtgctaggatacagtaagacatcaacattttaaattttcccttaaaaagtttaagcttagtttatttctaatattgttttcctttttttagcatttattttccattttcacttttgtagctcttttatcattctttcatatttctagtttctttctcatattttcatgtgttgtttttgtcctctgagtatatgggatggtttacaacatcactgatttgcatttttgctctttgccacttccattatgaatttttattgtgctctgcatttttgcttcttttctatttttcatcttaatcatatccccttttaaatattattctgttctctttttgtcttagctaattcttaagattttaccttgtatttcatagagacggtcttctttacgattcctcatacttttctgatattttcttctggatattagattattttgatggtatatttttattctgtgtttataggatgttgttcttttcccctggttctacaatagcttttagtc

SEQ ID NO: 21188 - DNA, 1031 bp, Homo sapiens
attttggtagacagggaaagctaggttaaattggtcttgtatgggattttaaagtataactgaatagtataaatctgaatttagttttaaaattgccaaagtgaggaattgtgacttgatcattttgtttgtaaggttggtgaaaaatatctcaagaaattaatagtaatatttaaaatggaaaaaaaattgaattaaggagacatctagaaatagcctaaaaggaagcctgcaaacttgaatagtaaacacaaagatttctgtacctaatatgtaagtgaaaacacctttgtagggtctccttcataagaaattttattctgtttagaaaacaaattcgaactttcaaaaagtattcttgaaagattagttctaaatactattctaccagaatataaaagtaacctataacttatgatacttaataaagaagatatggtgctgtttttaactgatgcatatatatttaaagattaattaagtttgtaacttttgaatatattttttctattgctactattactaaaattaggaacacatgcaatttataacgtatcattcaaccaaaatatgtcagattttcatatatgagtataacgttacctctcacaacatagatactgtatagagttggggagcaagagggaaatatttgacatgtatgaaatcaacttggattccacttacctagaattcaatgaattatatcaaagttcgattaaaagtaaccagaaattgctgaattatattatagttaaattatttaaaaagtttattctttgtcgtggccactcaagttctagggtaatccaaaagagaattattttgtataccattgtaatagaaggttgtgataaaatgaacctatccagagttctgaagccaggacatctcagagcctgatgcccaaggtgtattatctgggtattgctgttggttattcagggaccagaggctctttagttagcaggtgatgaatcctgccagatctccgctgtgacagggcagcactgagttcaatgtgaagttcc

SEQ ID NO: 21189 - DNA, 1055 bp, Homo sapiens
ctgctttttattcttcttaaaatccttgtaggcatctagtatgattgaagaattagagcagaatgtctgtcaattaaaacagcagttacaggaatcagaacttcaaagaaagcaacaactaagggtgagtcttgtatttctacacagaagaacaatggtcaaacacagttttcttgattcagatgtatcattgagagtcaattaaaaaaataaaactcagaaatgcaggtcatcttttctgattcttttatcgcattgtataattttacattttatttatcttaatagagattgatgctttgagatgtagagaataaagtacaataatttgaattggaatgatctcttttgagattagttttaaaaataaattttatttaaatatatcattattttagaataatttccttcttttaaattacctgccaatcttcataatttctctctttctttccctctttctttctctgcctctctctctccctctgtctctctcttttgcaccttttagatctcttttctctcgtgatcaaaaaataccaaggactgttacatgatgtaacttcaaatttatcatttccatatttattgacttggtcatttttgaagtaatctcttaatcctaagggtcagaaagattttcttatactgtaaagcaagtgcttttgagaatagtaatatcttcaggtgactaagattttatgcctcgtaatacaaagctactccaatttctacctgtagggcttacttaatcatatgcaaaactctgaactgaagtttgacattaagtagattgattgatttaattaggttgctaattttattgactctagtataatttaaagtataataaatataaacatttatcattcacaggatcaagaaaataagtttcagatggagaaaagtcatttaaaacacatctatgaaaaaaaggtaatatgttttatggaagctataaaatatttaaaatagcaaatgaggcattaatgcagactgatttttatgaaaccatacattctcacctttaaagaacaacttgtttctttgtcttt

SEQ ID NO: 21190 - DNA, 1032 bp, Homo sapiens
tagatgattttgcccatctgtatgctaaagtaaatgttctgaacacatctaagataggccaggctaagctatgatgtttggtaggttaggtgtattaaatgcatttttgaattaatgatatttgaaacttaatgataggtttattgggacatgatctcattttaagtcaaggagcatctgtatgtaatatgacctcatagaatggtcaagtgttgtatcccaggcatgaactctgtctcatttaccattcacaacctccccaggccagcctggcttggtccaagtactttcttgaatttaaagctgtggaatttaaacaagagttgttacgcaggcgtatgacacatatatcttagagtgtgttaccttgcacccttggaccagcactaaggtctacctcacattgaaaaagaaatgagaagtggtatgcacagttgtttggaacctggactttagggtcagacagttgtgggttcaaattccaactccttaatagcttgagtgtcatgtaagctcttcagatgttaattgttcttatttgtggaatagaataacagtagtacaatataatgtaagttgttggaaatattaatatacataaattaagtatataatatatacatatattaatatacataaaatattatattaatatacacaataataaacactcagatcattgttaatattatgttcaaaaatgaaacatacaagaatgacaatcaagagagacacacaaacgaaaaagaaggactcagtttaagaagttcccagcactttgggagactgaggtagttagattgattgagcccaggaattcaagaccatccagggtaacatggtgagaccatgtctcttaaaaaaaaaaaaaattagctaggcccgggggggtgtgcttgtagtcccagttagttgggaggctgaggcaggaggattacttgagcccattaggtcaaggttgcagtgaggtgtgattgtgctactggatgccagcttgggcaatggatccaaaaaaaagaaaaaattaacaca

SEQ ID NO: 21191 - DNA, 1021 bp, Homo sapiens
aaatcactacaatgccaatttgcggcaatattcactagtcaaaaggaggaaagtctcacgatttcaggcaacttggaagcttccaagtgtggcagatcatatagattctacctcctagctgctgcaagagcaaaacgtgaacttctgactaggctagaattattaacatggacatacacaaaaacacacgcatctaactgaaacagcagacagtaaagctgtggataagagatactactttgtgtgtgtgtgtgtgtgtgtgtgtgtgtgtgtgtgtgtgtttataatttcacagtgtagtcatatttgttaaaatcactttttctatttatgttttagaattaaatatatcaggattcaaaaaagtgtcctatatgtaaagtagtacaatatactgaaatattttaaatttatttgcagattttagaaagaaagaataatgaaatagaagaactgaaaactttatacaggagtaaacaacatgaaactgaagagactattagaaagcttgaaaagaaaggtgatgttgtgttgttacatacatcttttaataacatttccattttattttagtgatgtggagaaaaaaatttgatttctgaccttttatagtatgagataggaatgtttatgtggggtttcatcagtggatatatttatataggcttccatatgaaggggcaaaaactgtgtttatttgtgtgtgtgtgtgtgtgtctgtgtgtgtgtttgtgtagtgacagtgatggagtagtactggtggttggtttagatacagagttggaagagtatgttgctttcactccctcttcttaactctagcctcattgggatacagctgccatagagtattgagggcagtcatagaattaggacttactggccttcatgaggaagtcaaaggaaattattcttctttatctagtaaaattcattacattaagtatctacttttatgtctgatagtatttgctggtattgtgattgacagaaaaaaattaaaatgtatttcctatttgca

SEQ ID NO: 21192 - DNA, 1042 bp, Homo sapiens
cttctttatggctattattatccagagatgggatcttgctatgttgctcaagctggaggaggacagtggctattcacaggcatgatccatgatcatggctcacttcagcctcgaattcttgggctcaagtgatctgtaagcctcctgagtagctgactatatgcatgtgctactgtgccccgttcttttctgttgttcttgttaagctgacttttgggtgtatgggaaatataccccagccataagaaaagtagatattcctttttccccttgattagcattttctcttacttgctatcttttttacattttggttatttctgtagtttttgtgagtatagatgtattttgaagtataaaatcacaaattttattaaatgattacatttaaaacttctgacataatataaattaacaatagattttaatgcaatttttgacatattttgagctgatttttctgattcacagtagcagagctagatataaaggaggctgattacatgtcatctcctcatgtatctgggaattcttttactgtgcactaggaggatagaacggtgcttgtgggcggatccagggacatgcccagctgaagaatattctatcccagtgcaatgtgatgaattatactctcccaacctggcaagtttctgatgacttctctctgccactttatgacagcttaatttctgaattatattttagggaatcactgaaattattatttatactgtccttaaaaattattatacaaaaatctcagataacgtatttctttcagataataattattcttgtatatttaataattttcttaatgcactataatataatttttacagtttggggggaaaccatttatgagattagctgagatagacttacaaaaatattatgctcattgaaaagttatatgattggttctttacgagtttctattaatgtatacctactaattcaccattcacttattatctgctggaatttgctagcagataaacaacagtagatatcgtaagtataagaaaaatatgtgaag

SEQ ID NO: 21193 - DNA, 1038 bp, Homo sapiens
gttatgtctccttggttttttatgttgcttgttgctttatgttggtgtctgcacatttgaagaagtaggaaattattatagtctttgtagactggcttcatttgagaaagccagtcatcattgagcctatccagagattctgggcaggctgtttggcctattggtgggctctctcctacagtccccaggcagggtcagaaagtgggtgggcctggtatcttggtcctcatgtttgagcttggagcctggatccactgggtagatgtgttgctttggtccatgggagtgagcttggagtttgggtctgcatggtaagcctgaaatatgtatccaccagggctagcctgaagcctaggtctgcaagggctgacctggttctagggtgggtttaagcctgaatctgcaggggccagacaggttctgggatggacctggttctttggtccactgggacaggccaggggcctgagtgtgcaggggtgggcctgggtcacgattctgtagggatggacctggaatcttattttctgagggctggcttggcaccacagtttattgggatgagcctggaccctgggtctgttagtcaggtctagaccctgagtctcctggtgtatgggaccacaggggttaatatggagattggggccccagtggccgacctggagtctgggccagaggtgttgactgggaggttgggtgggtctaaagcatggggttgtgttggctgacctggctctgaatcctgcgttatgcttggagcctggggccagatgggctggcctgacattgggtatgtctggagcctatattcacatgggccagcatggaggctgagtctgtgagtgctggcctgatgactagggattctggaggctggcctggttcctgggtaggcctgaaacctgaagttgtcggggccagcctcgtgctgtgaatagtctggagcccaaggtcactgggcccgcctggcaatgtggtgagtccagagactgagtctgctgggctggctttggaacctggggctgtgggatcttg

SEQ ID NO: 21194 - DNA, 1737 bp, Homo sapiens
aaatataaaacatgatgcatggtaggcagggttcatctttctgttttgttttttgtttttgtttttccagagatagagtctctatcttttgtccggctggagtgcagtggtgtgatcagagctcactgggatcaagcagtcctcccacctcagcctcctgagtagccaggactacagctgtgccaccatgtccagctaattaaaattttttttttttggtagagatgggatcttactgtttttcccaggctggtcttgagctgttggcctcaagtgatcctcctcctaccttgacttctcaaagcattaggattataggcatgagccaccacacctggacaaaattgtagatgtttattgtgtacaacatgatgttttgaaatatgtatacattgtcaaatggctaaattgagcttgatatatgaatcacctcacagacttatcattattttttgtaatgagaatacttaaaatgtactctcatagtgatttttgaaatacaatccattgttattaactaaagtcactatgctgtacaatagatctctagaacttatttctctcatctaacttaaattttgtatcctttgaccagtatctcccaactccactccttgtcgcctggcctcataaccaccatttctctacttttgtgagttcaccttttttagaatccacatataagtgagatcatgtggtatttgcctttctgtgcctggcttatttcacttaacatcgtgttctctaggttcatccatgttgtactaaatgacaagatttccttctttttaaaaactgaataacatttcattgtgtgtgtgtgtgtatgtgtgtgtgtgtatgtgtatatatatatcacatttttttcatttatttgttgatggacactttatattgattctatatcttggctattgctgcagtgaacatgggggtgcagatagctcttcaatatagcaatttcatttcctttggatttatacctaatagtgagattgctggatcatgtagtagttctatttttaatttttcaaggaaccctcgtactgtttttctataatggctgcactaatctacattactgccaacactgggcaagggttcttttttctccacatcccctccaatactgatcttttttctttttgttgatagccgttctaataggtgtgacgtgatatctcagtattgttttagtcagcatttctctgatgattaggattgttgggcagtttttcatatatctggtggctatttgcgtgtcttcttttgaggaatgtctattcagatcctttgcccattttaaaatcaggttatcagtgttcttaccattgagttgtttgagttccatatatattttggatgttaaccccttattagatatatggcttgcagatatttttctcattgtgtaggctgtctttttactctgttgattgtttcctttgctatgcagaagctttttagtttgatataatctcatttgtctattttttcttttgttgactatgcttttcggttcatatccaaaacatcattgcccagagcaatgtcatggagcttttcccctatttctcttatagtagttttaaaatgtcaggtctcacatttaagtctctgttttaaattgatttttgtatatggtgtgagataagggtctaatttcattcttctgcatgttggatatccagttttccaagcatcatttattgaagacactgtctttccccattgtgt

SEQ ID NO: 21195 - DNA, 1035 bp, Homo sapiens
caacatgcccggatggttttattatatctttataaattgccaattgccccaccttgatttttttcatcaggcatgtcttgactacttttgccctgtttttgtttatatacattttgtaaggtcattataagttttacaaaaaccctgttgaaattctggtttggatcacatttaattgctagatcaacttaagaattgacattttttgcaacatcgagactgtccaaaatggattctactctctatttttttttcagtctttagccctaatcttttgatgaagcttatttgctctataaaggtctagggtatcattttgtcagtttatctaggaattatgcagtatattagaaattatatctttgtaaactcttctcctagatgatttttactcatttcagaaatgcagttgattttttttttattattatactttaagttttagggtacatgttaaatgtaaaaaaaatttaaatttgtatgggagcatagtaggtatgtatatttatgaggtaaatgagatattttgataacaggcatatgatacataataatgacatcaggataaatgggtatctgtcatctcaaacatcgatccttcatttgtgttacaaacaatccaattacactcttatagttatttaaaaatgttcaataaattattcttgactgtatcaccctattgtgctatcaaatactaggtcttattcattctctctaacgatatttttgtacccattaaccatccccactttccccaaccccctctatccttcccaacctctgtgaaccatcatcctactgtcgatctgcagagttcaactgttttaatttttaactcccacaaataattgagaacatgtcaagtttgtctttctgttcctggcttattttgcagaacttaatgatctccagttccatccaggtttttgcaaatgacaggatctcattcttttttatggctgaatagtactgcattacgtgtaagtaacacattttctttttccattcatctgttgatggatacttagcgtg

SEQ ID NO: 21196 - DNA, 1050 bp, Homo sapiens
agtgagaacatacaatatttggttttctgttcctgtgtttttaatagtttgctaagtgtaatagcctctagctccattcatgttcttgcaaaagaaatgatctcatccttttttatcactgcatagtattccgtgggtatatgtacagtattttctttatccaatccgtcattggtgggcatttaggttgattcgatgtctttgctattgtgaatagtactgcaatgaacattcgcgtgtgtctctactgtagaatgatttatattcctctgggtatatatgcagtaatggggttgctgggtcaaatggtaattctgcttttagctgtttgagcaatggccatactgctttccacaatggttgaactaatttgcattcctatcaacagcgtataagtgttctcttctccacaaccttgccagcatctgttattttttgattttgtttatagtagccattctgactggtgtgagattttatctcattgtggttctgatttgcatttctctaatgatcagtgatattgagcttttttttccgtatgcttgttggccacgtgtatgtcttcttttgagaagtgtctgttcatgtcctttgctcactttttaatgggcttgtttttatcttgtaaatttgtttaagttccttattgatgcgggatattagaccctagtcagatgcaaacattttctcccattctgtaggttgtctgtttactctcttgatagtttcttttgctgtgcagatgtgcagaagctcttaagtttaactagatcccacttgtcaatttttgcttttgttgcaattgcttttggtgtctttgtcataaaatctttgctaggactatgtccaggatgtattgcctaggttctcttccagggtttttatagttttgggttttacatttaagtctttaatccatcttgagttgattttttgtatttatgcttttttttttttcatttcttgtttggcaaatcttttctagattgaggccataacatcattcttctaaattgtcttctgaaagtttttgtagttctgctttta

SEQ ID NO: 21197 - DNA, 1032 bp, Homo sapiens
tacccaggctggagtgcaatggtgtgatctcagctcactgcaacgtctacctcccaggttcaagtgattctcctgcctcagcctcctgagtagctgggattatgagacagggtttcactctggcacccaggctggagtgcaatgacatgatcttggctcactgaaacctccgcttctcgggttcaagcgattctcctgcctcagcctctgaagtagctaggattacaggtgtgcaccaccatgctctgctgatttttttatatttttagtagagacagggttttgccatgttggccttgctggtctcgaacgcctgacctcgagtgatccacctgcctcggcctcccaaagtgctgagattacaggcgtgagccaccatgcctggctggcactgtgttatttactgaagaatatgcgcatttctctggtaccatgttgaggtagattgtattattatcttaataattgtttccctgagtaaaagtaccaattcatgtacccactagtagtgtttcacatcttgaacatttttattgtaaatttttaatttatgccaatctataaaattgtaaaatatcaccgcattgtgatattactttatattttttatatttctaagtatattgaccatattttatatgtttatgagccattcataattcctcatcagtgaaatgtgccccaagtttttttcctcaattttctcaagtgtattgacatctttttttcattgtttttttaatttttttatttttttgagacaaagtctcactctcatcccccaggctggagtgcgatggccccatcttggctcactgcaacctccgcctcccgagttcaagtgattctcctgcctcagcctcccgagtagctgggactacaggtgcctgccaccatgcctggctaatttttgtattttcggtagagatggggttttaccatgttggccaggctggtctcaagctcctgacctcaggtgatctgcccgcctcagcctcccaaagtgctgggattacaggtgtgagccaccgc

SEQ ID NO: 21198 - DNA, 1024 bp, Homo sapiens
ttcatgggtctttattgtaattttacttaaggttacagagaagggaaatgtgttcattaatggggtactttgtggtatgattagttgggacaattctcattaagtaagcatctaatttcagctgtcttatctagttttattttaggcaatttcatgctttttttttcatgtaggttagaaacctgcccattttcttattttttcttttttttagagacagggtcttgctctgtcaccaaggctaaagtgcagtggcatgatcatagtgctcactgcagccttgaactcatgggttcaagtgatcgtcttgcctcagcctcttgagtagctggtggtgcacaccaccatgcctgactcctgtccatttcatactacgcaatggtctgggagagaaactgagctgaaaattctgatattttaggcttctcatttggctgtagttttccacaaatgagtgaaagtgtcagattttgagactaggacaaagttacccaaatgaagaagagttatgagagtggtttacataaaaaattaatactttgataagacaaattctctttgtctttctctagagtttaaaaatatctggaagtatctactcaaaatggtagctgataattccacatggtaaaatatcagcacttattttcttaacattttaagtgtttttttaaatagtaaatatttattattcataaaaaacaaacaaagccgtaacagtatttatagcattttccccaaagcttgcttttggggagtgtaactatattcagagttttatttgagaagttgacatttatttcttttaaaagtgaatgtaaacttctggccatgagtaaatctattacagccaggttctcccacaaccaagaattctggacaaaatacaaaaagcaaaccaactggggactctgaaaagtcaataataacaggccgattgagagggaagttggaatatgaagaatcactgatatagtggcaggaagtttcctggttttctgtttgtgttttttttcttccttaa

SEQ ID NO: 21199 - DNA, 1045 bp, Homo sapiens
gagctgagagatcacaccactgtactccagcctaggagacagagtgagactccatctcaaaaaaaaaaaaaaaaaaaaacaaacaaacaaaaaaaaaaaccctaaatttacaccttaaggaactagaaaaagaacaaactaaacctaaagctaacagaaggaaggaaataaaatatgaaacagaaaaacagtagagaaaatgaaactaagagttgggtttttgaaaagatcagcaaaatgagcaaacttttaactacatgggtaagaaaaaaagaaacaagactcattaactaaaatcagagagaaatttaacacaaagaaaaagggttgtaagagaggactatgagcaaccatatgtcaatatatttgataacctaggtgaaatgaacaaatttctcacaacacatgacctaccaagactaaattatgaagaatagaatatctgaacagacctttagtaagcagattgaatcaataatcaaaaacctctcaacagacaaaaactcaggaccaggtggcttcattggtgaatttaccaaacatttaaagaagaattaatgccaatccctcttcaaacttttcaaaaacattgaagaggaaacacttctaaatttatcacgtgaggccagcattaagttgatactaaaactagacaaatgtggtacaaggaaagaaaactataggccaatatcctgacaaatatttgctgcaaaggcctcaggaaaatacttgtaaactgaattcaacagcacattaaaggtttacacatcatgaccaaatgagatttattcgtaacttgcaagaatggttccaaatatgaaaatcagtaaatgtgatatactacattagcattaacagaatcaaaggagaaaaccctcacacaatcatcttaattgaggtagaaaaatcttttcacaaagtttaactcccttttttgataagaagaaacttaaattgggaagataaggaaattacctcagcaaaataaacgccatctatttaaagcctatagacattattcttatagtgaaagactgaaagcttt

SEQ ID NO: 21200 - DNA, 1051 bp, Homo sapiens
tctgtggatgaatgcatagtactctgagatataccatcttttatcttttcgatcttcacaaaatattttacatttatacccttggctttatgtctatgcagtgtccaaagtttgcttggactttcttaatttaggatattttgccatctagagaggctgagaatttttaaaaccatgaagtcttagttccattttctttaactttccttgactcaattttactctactcttgcacctaagagcgacagcacttaaagcaatagcaaatactttgtaaatcttcttagctatattactcacttagttcctcaagcatattttctaatttttgtgttactgaagatgatggtatagctttctatctctatgtaaaaaggatcccccttcttctcatttccgataacagatttcttacttcctcttgagccccactggcaatatcctcaaattccagattcctactaatgacctcttcaaatcaactttgtctttagcacactacacacaaagatgtttccatattcttaggctgtactttactttcagataccaaaatctgtattatctataatacagatatctgcagttatctattgcatgtctttctagctatacctagctatacgtgttttcattatatgcttagtatttgttctaagtatgtgctaggcaacatctaagagaaattccattacaaattactctaaatcttagcagcttaaagcaacatttattttttaatttttttaaaattttttaatttttttctcatggacatggcttagctgggttttctggcttaggttctcctataaggttgcaaacaaagtattgactggggttgtggtcccagctgaagtctagattgggggagaatccacttctattctcactcatatggttaataggattcaggtccttgctggggtattgctctgagggcgtcagtctttgctggctgtcatccaaaagtttctctcagttttttcctatttgggcctctctataggatagcctacagcatggcagctggcttccatcaaagtggaca

SEQ ID NO: 21201 - DNA, 1033 bp, Homo sapiens
taaccaaaccatcatggtactggcgtaaaaacaatcacatggacctatggagcagaattaaaaactcagatacaaatccgtacatttacaggaatttcatttttgacaaaggtgtgaaggacttacactggggaaatgacagtctcttcaataaatggtgccatttacttaagtttatcagtttcacttttgtatcttcttgtacaaagtaatcctgatatttcattagtttgttctgtgattacgtaattttcacagcaaaaatgcaaacatttttaaaggcattcttctgtatacggatatcaagttttcaatatccgtatacagaagaatgaaactagacccttgtctcccaccatatacaaaaataaaaatggattaaagactgaaatctaagacctcaaacaaggaaactgctaaaagaaaacattggggaaaatctccagggtagtggtctgggcagagatttcttgagtaatactccaaaagcacaggcaaccaaagcgacaatggacaaatgggatctcatcatgttaaaaagcttctgcaaaggaaacgatcaacaaagtgaagagacaatccagagaatgagagaaaatcttttcaaactattcatctgacaagggaataaccagaatatataaggagctcaaacaactctatacaaaaaaatcaaataatctgatttaaaaatgggcaaaagatctaaatagacatttctcaatagaagacatacaaatggcaaacaggcatgtgacaagatgttcaacatcactgatcatcagagcaacgcagataaaaactgcagtgagatattatttcaccccagttaaaatggcttttatccaaagacaggcaataacaaacactggcaaggatgtggagaaaaggtaactctcctacacttttggtgttaatgcaaattagtggagtgactacggagaagagtttgaggttcctcagaaaaactagaaaatagagctaccatgtgatccagcaatcccactgctagttatataccccaaagaaagga

SEQ ID NO: 21202 - DNA, 1038 bp, Homo sapiens
tcactgttctctgcttttagcgccacccaagactgtcaaaccccctgaggatcaactgaagtcggagaacctcgaggtgtccagttccttcaactacagtgtgctgcagcatcttggccagtttccaccccttatgcctaacaagcagatcgcggagtcggccaatagcagtagcccccagagctctgcggggggcaagcccgccatgtcctatgccagcgctctgcgggcccctccaaagcccaggccccctcctgagcaggccaagaagagtagcgaccctctgtctctcttccaggaactgagcctagggagctcatctggcagcaatggcttttactcatattttaaataatcactttttttttccctcaagggagaatgttttaatttctgtttgtatcagtagaattaaggtagttggacttcatctatagatgcacagttccctttgttttaatattaaatatgttctcacttaattgctttgctgctagacttgcaactaatttttttaaagtatattccattattttgcatttttgatgtgtcaaaactttgacagcttttatgtagaataaaaaaatttttaaatttgtgtattgttacatatgtttgcatcaagctagcagccaagaggttaattgtgcaactataaaaaaaaaaaaaaaaagaaaagtttgtctaaaatgtatttaaaaagaaaaaaaaattgtaagtagcatttacatttattcaataatattaccacatgctgggtttctgtaccagaaatggccagttgatgtacaaatgtatgttatttttgcttaaattcatttaaattttttttaaaataaaggggcagcatcttctaaataagttttatcagctttttttttttttttggtgacacgatgctgcattctaaaacttttatagttttagactatgtatgatgtgttgttgtaatctccatccaccataggatagagttaaaggcattctttgcaggcatattttgtatgccactgttttttgaaatgtgaaaaaaacgtt

SEQ ID NO: 21203 - DNA, 1038 bp, Homo sapiens
agagtcaactgatgcggcaaactttattattgtcttattttaagaaattgccacagccacctcagccttcagcaaccaccaccctggtcagtgagcattttttagcaatacagtatgtattttttgtgattaagttttttagccagagaatcacaagcaatacattattttaaaattaagccatatacattttaaaaaatgtcttaaagagtgtctcactatgttgcacaggctggaatgcagtggctattcatgggtgtgatcataactcacttaagcctcaaactcatgggctcaaatgatcctccctcttcagcctcccaagtagctgggcctacaggcatgtgacaccatgcttgcctttatacattgtgtttttttaaacatacaatgctattgcacacttaatagattatagtatagtataaatataatttttatatgcactggaaaaccaaaaaatttacgtgactcacattattgcagtattagctgtattgcagtagtttggaaccaaacctgcaatatctccaaggtgtgtctgtatctctctgtctctctcaccaaacctgcaatatctccaaggtatgtctgtatctctctctctctctctctcaccaaacctgcaatatctccaaggtatgcctgtatctctctctctctctctctcttttttttttttcaagaccaggtctccctctgtcacccaggcgcaaggtgcagtatatgatctcagctcactgcaacctctgccttccaggctcaagcgatcatcccacctcagccccctaagtagctgggactacagatgcatgccaccacacccagctaaattttgtattttttggtggagatggggttttcctgtgtcacccagctggtcttgaactcttgaacttaagcactctgcccacctcggcctccaaaagtgctgggactacatgctgtttccagcttttatcttaggttcagtggagtatgcgtgcaggtttgttatatgggtaaattacatgttgcgggagtttggtctgtatcttt

SEQ ID NO: 21204 - DNA, 1050 bp, Homo sapiens
taataaaccatctaatgcatgtaacagtgatcagcaaattaataaattagacctctattcatgcttaaattatcaaagctaatcatttaaatgagatgttctattttaattaaaatttctggcaccatcgttaatgagacttagaatttcaactagtgtatttagctcttacttggtgattagctttgatggcataattataaatagagcccttattaattaagttgctgacctttccccagttatctatttatatacacacaggtgaaatggcttgataacgtcatatattagaggtatatcttataagacagtggtaagcaaattaggagtttttactcaaactaaaactatctttaacagtaaaaatttatacatgagttttgtagtttagttttttccttctttcttagatttcctgtattaaatggcttttgaaatgttagcattacattttaatatttggaaagaaatattagcagaatttgaaaatcgtgattatatgtgtagtaccataatctcacagtaaaacatgaagcatatttataaacacacaatcatatatggagttgatactgaacttcacagaatctctttaagaatctctctggcagggtaaatgagcctttaaacaacattaatgaaattatttaagacctgaggactctaaaattaaacctgagcatcagtcattggtagggttgccatccgaaaataaaggaacaatctgattggctgaagatgtatgtagaaggaatactcacttcccgaaacagaactgggcgaaagcaataggaaacaaagtcaagaaataagaaaagaaaataaaagataagaatagaaacaagaataaataagaaatgagaacagaaaggaaggaaagtatgtttaaacagcctaggggcccacaaagctacagtgttgatagagatgtaaagggatttctctgtcagaaatatttttcttttgtaggctacagatgtttttctaaaattttggtttgggggcctttactgtataggaagtaccctctggcagaggaaaaaagga

SEQ ID NO: 21205 - DNA, 1077 bp, Homo sapiens
tccatggattttccttccccacctcaaacgcagcaaaagccatggcccttggctgcttggctaaggctggacattgtggtctggcagtactgcctgcatcctttcccacttccggtccttacaggtgtgatgggatgaggaggacaacaaagggcaaagtgccatcttctcctgagccaggcagtagaccatccccaattgccaatagattgataaattgctccaatttgattttaaatgccagtgtaagcttgggattagtgtttacattttctctagacgtttagccagttgtcttcctgtctttttggaattattacattctcactaaagagatgtcactttccaaattctttgcaatagcactgtatcatacttgctccgaggggtgggggtagtgcaaaatgaaatgcagagagaaacaacagaagttaattcttgacctctgagcttccaaaagttcagtttttagtaattttggcatgattaaggatttttcaaaggtaatttttatctgtgtgggatttttcactttgcatgataatttaatactctaacctctgagtaagatgtatttcttcattacatattgtgatctatttctggactttgtgtttttcttcatctataagtttctgtgctagaattatactgttttaagttttgagattttgtggcattctaacccagtagtttaaagtctcccttattactttttcccttccagtttctatatgtggggcatggagtggatgggggaggagggtcattctgtggttttactactaaaaaaaaatttaaaataactttatgaactctttcctcctcctctgtcccacctctacacacccttcttggctttttatttgaaatacattaaacttgtagcttaaattgagggaaattttatctttacaaatacttctcatttaatttatttccttctttcctccctccctttttctctcttcttctatttttccttttttttttttttttctgagacggagtctcgctctgtcacccaggctgcagtgcagtggcgctatctgggctcactgcaagctccgcctcccg

SEQ ID NO: 21206 - DNA, 1026 bp, Homo sapiens
ttttatatacatagtatatatatgtatgtagtaagtatgcctagaagtacaaattttgtgtgaaatgagttgccatcagttttgaaaacttattatatgggtaataaaaaagatcattttgaattagtgtggataggtgagtactgaccatattacttgcattgttgagccagaattaatggagagcctgttttatatgtactataatacaaggtatgactgtagtttcaaaatcaaacttctggagtcttgtgatctggtagaaagattttatctcaatcatagatgactattgggtttaaggatttgaggttgggggtggaatttgagattatctttagttatttatattcatttctgtgatctcatccattgaattgtaatctgatcttgtaaatcttttctgtaggaaattttgggaacggtttattgccctgtgtcatgaaaacagtagcctacatggaatcacttttgaacagatcaaagcccagttagaggctttagaactaaagaagacatatgtgttgaatccgctggcacctgaatttatcccccgggctctaagactgcagcattcaggaagtaccaacaaacagcagcaatcaccacccaaggtaaagcctctgttaatgaaattgaagaggttaaagggagaaaacttcgcagaagtgccaaaggtttattgggatgcaagttactttaagtgttggaattgaaggttacatttggcggcaagcggtttctgcaaggagcttgtttagtgtggacatgtaagtgaaaatacagtatggtgtttagtcatgcttaatgttatgatcattctcaaacaatttttaatactgataacttctggtatcatttatataaaataaccttctaatcctctctactgatagagttgttttagtgagatgtgaataaaacaaagaagtttaaaagattatcacacttactaaaacatgtccttatattctttataaggaataatgttataataacgatatttgtataaagcaaataattctg

SEQ ID NO: 21207 - DNA, 1061 bp, Homo sapiens
ttgagctagaggctgcgtacagtagctcatgcccataatcctagcactttgagaggtcaaggtgggaggattacttgaggccaggagtttgaaaccagccctggcatcatagcgagaccccatctctacaaaaaaatttaaaaatttagccaggtgtggtggcacacaactacagtcccagctactctggaggctgaggcgagaggcttgagcccaggagttcaaggttacaatgagctgtgatcatgccactgccctcctgcccttcactctgagtgacagcacaaccctgtctctgaaaaaacaaataactgaactagacagagtaaaagtcaatccattctttccttagcgttttgctttgtcttgaagtccaacgcaaacctgaaatgccactctgtgaaactgatactttatcaattagactaaaaagacctttcttttgaatgtagtatgtaatagaattgtattgataaatatgcagttgaatattgtggctattcttattaaaagggtgggaaagtggatggattttagatcctgagtgctatataagatagtccttccctatattttctcatgttatgatgagaaaaaaagcacaattccttcattggtgttcttaaaaataaaaataaaggacagcttttcagcatgtatttcctggcaacacacatttccagcaactgcatgactgtcttattagccttagtcttatagtcagaagtacatatttaatattttgtagcatttttactttttctgttgtttacatataggtctaaaattttttctgaacccatttgcttattttttatttattcattccatttaaaatttttaattttttttattaaaattcttttttcgacagctttatgggtacaagtggtttttgtttacatggataagttgtatagtaatcaagtctggacttttagtgtacccctcacctgagtagtgtacattgtacccaacagatagtttttcattccttacccctctcccaccccgctaccttctgaatctccagtatctcaattgatttcttaaactcatct

SEQ ID NO: 21208 - DNA, 1032 bp, Homo sapiens
gtgcctcactttttcacttaattgttctaatttttgatgaatttccttctgtagtcttgctctctcaaggcttctcaatgtagataattctttgtatctggttaatccagaagatcttaacattagggggttagacgtggtcattacttgtctttcggtagcattattagtattcattagactttagttttaaggaacagtttctactaaatatggttaaaatatcaacctacacaccaaaatctttctttatacacttgtgacttataccagttaattggaattttaactgtacaaagccagtaatagaagatttggccttttgagtgttgaagaactgtgctagcattaaaaaaaaaaaaagcagtcgaacagttatttataatattcttttgtgaaaaagaaagaaatacactagggattacttaaaattttataagtgtgctagtacctgtcataggaagttcagaatagtaaaaagagatgtaggtagtcctgaatctgccttgggtaattatttctttttgatatgttagaattaaagtagacaaaactattaggacatggcactctttaaatcaggtttttttttcttacaatatagataatgacagcactttattatctatttttgtgttctagcaggaagaaaaattctgggaagggagactatttgggacctttaagaataagtttcatatattagaatttaagacccctcaaaaagttaatatcctttataggggaaagctatcatcaaaggaatcaagtagagttttaatttatgaaaaaaaaatttcttttttaaaaaacaaagcttgaagggtctgtaacttatttatctgtaaacaattctgttgtaacatctttaatttcatactttaaaaatatattgccatgcatttgtagtcactaatgacaaattggagaggggagagtatctttttttttttttgagacagagtttcactcttgttgcccaggctggaatgcaatggtgcagtctcggctcaccgcaacctctgcctcttg

SEQ ID NO: 21209 - DNA, 1046 bp, Homo sapiens
atagttaaaatatgagtcaatgtatttttgtaagaacgttctagaaaaagataattccagaatgggaatgttttgaacttaaaaaattgtagtgcttataaatcttacgtttatgtgccattctgttgcaagattactctgaacacttaaaaataattaggtgtttattttgtggtactgcatatactttctatgtctgtcatttttttggtagagagtcacagtggttatagtggcaattgtgtgttaaattctaattcaatagagtgctaacggttaccagattcatttgtaacttttcagatattaccatcttaaaataacaatgtcagtgttttaataactagatactgttaagaaattagtaaatgtaaatcagaaatattttcttcttttccagggtatatttcagaaatcgctgggtaaagactgtccacccagttgtgcatcagtactgtttgatctcaagcgcacattccacctttcagatgccccagaaagaagatattcttaaacatcgagtggtggttgttaccttgaatacttcccagtacctctgtcagttggaccttgaacctggtatgctgactcaagacacagtctcacaagtttagggcttatgaattcagtttagactgggattggcaaactacagtgtgtgggccaaatctggctcactgactgtttttgtaaataaagttttactggctcatttatttacctatttattgtctatagatgcttttgtgttacagtggctgagttgagttgttgcagcagagattcattatatggtccacaaaatctaaaatatatactgtttggctctttactgaagaaaaatttgccagcctctagttcagacattttagtgactgctattccatttattctctagttggtcagatgatgtttattattgatcatatgaagaattccaatttggagagtgttggtgttttccttttcttttacacttttctcagatttttgttataaaatgcttttgcattatatactgtagagatgataattatgataggttt

SEQ ID NO: 21210 - DNA, 1072 bp, Homo sapiens
agcagtgagccaagatcgtgccactgtactccagcctaggcgacagagtgagactccgtctcaaaaaaacaaaaaaaaaaatttttttttgttgtttccagcttgtattaaaggcagaaaaatacagtttttagctcaatgaagtggaattgatataatggtttaatttttggtatgtttatatttgatttactttgtttcactcttctagtttttatatatttttgatgtaaaatattcaaactagttttctacttctggtttaggttcaaccttaaagtgcaattgcagattctggcaagcttcatgctcactggtgtttctggaggtgcaaagtatgctcagaatggacaactttttggtcgctttaagcttactgaaacactttctgaagatactttggctggacgactggtgatgaccaaagtcaatgctgtttatttattaccagtccctaaacagaagttagtacagacccagggaaccaaagagaaggtttatgaagctactattgaagaaaaaacaaaggaatatatatttttaaggctatctagggaatgctgtgaagaacttaatcttcggcctgactgtgacacacaggtatgtttgaaggttgcagcttaaccatagtggtctgtagcctcattatcagctcgtagtcttcctctggtttagtttttcttctgccgtaaacaaaagcaaagctgactttgaagtctacagtggtgggttgaaaattgcacctgtagtaactcccagagaaaagtgattcttttaaatataagtaacatttagaatgttccagtgttatacaaggttgagctttctgattagagttttaaatcagcaatggaagaaaagatgaaaagaaactatgtaagctacctcctgggacatctctcatctgcagttgtatctgttcctgttctatctttatgggtttttaggtgaattatgtcttcagtctgccatatttaactggaagactaatcttttctctttttaaacataaaacttggtgaacattatttattaattgtaaattgatagagtatcagggctaatcatctct

SEQ ID NO: 21211 - DNA, 1311 bp, Homo sapiens
ctttagctgaagctattgtgtccattaaactgtgcatgcctcattgggtcattgtgcctggcttctcagtgctaacagctggcatgacaggcctagtatggggtgcacatttcatcgttagatgggtgctgcttctgttggtgacaggcctagtgtggggtgcacatttcatcgttagatgggtgtggggtgcacatttcatcgttagatgggtgctgcttctgttggtgacaggtctagtgtggggtgcacatttcatcattagatgggtgctgcttctattggtgacacctcagttctgtcgctctgctttagtaaactcagggattgttttattactttgttagatttttattgttcatatagtcagaaatcacatgaaatgaaaaccctatataggtttgaaattttttgaaagttgcactcaagagatggaattgttactaaggttgatagagccatatttctcattagcatggaagtatctttttcagtctattgagtgttcagttggctgtaattctgtcattccctaaaaggttagggaattatgtaaactttaaggatgattttaaaatgtagcatgcaacaatggaaagatggtttttcttcttattaagaaatatctttcttaattgtaggatatattttctagtttaggtatttctgagttactaaatttcaaaaagtacatattttaatatttaagattactaacataattttagttttagcctgttaatcttttatacaaattaattattagtatagctataacctttactagaaagtctataatgtctgcatcttgaacatgtgatgaattttctgtgggaaaagctgcatttcttaggacttttattttattttatttcttagcacttctggtgcctctacctcaagaattttgttgcaagacacaaccaatgtcacaagaggattctcttgttgctctaaactgtgagattaacttttcatgcctgctaaattgtgatcaagtgttttgggatggtgattctcaaatagacatgagtgaaactttaatatatggcctaaggcctgggcgcagtggctcacacctataatcttagcacttcgggaggcccaggtgggcaggtcttttgagcccaggagtttgagaccagcctcggcaacatggcgagaccccatctctacaaaaaatacaaaaattagctgggcgtgatggtgtgcacctgtggtccctgctactcaggaggctgaggggaggatcgcttgagctcaggaggtcaaggctgcagtgagctaagattgtgctactgcactccagcc

SEQ ID NO: 21212 - DNA, 1051 bp, Homo sapiens
atatttatatgcattttaatgttgccttgaatttaatttacatttgattgttaattctttataaataaaataactaagatatatttttgaaaattttgggggaggtgtctatgcagctactaagctatggtgtagtgcagggctcagtaactttttctgtaaagggtcagataataaatattttaggctttgagaatttcatacaggcctggttgcatttcttcttctttttttgtttttgtaaaatccactgtcagttaagggctatacggaaacagtttgaaggttggctttgggcacatctttgggctgtgctctagtgtgtgtgactgggccattttgcttgtctgttcaatcaataccagtcatcagagcaaacccaaatcaccattagaatcatgaagaatgttttgttgtggtttgagacccaatttaaaggtaggagacaatggtatgcttatatagactcatctctctaaatgacttggacatgtattgacaataataagtgtgttctgaacacattgaagtttgcctctttgtgacatcgtggtcagatctgctgccacacaattagtaggatatttcccaaggtcccgagaatgtatgagtcctctgtgaactttgacagtttaagcagaatatttctttttttcttttcttttcttttaaatggagtttcgttcttgttgcccaggctggagtgcaatggtgcagtctcgctcaccagaacctccgcctcctgggttcaagcgattctcctgcctcagccttctgagtagctgggattacaggcaagtgtcaccatgcccagctaattttgtatttttggtagagatggggtttcaccatgttggccaggctggtcttgaactcctgacctcaggtgatctgcccgcctcggcctaccaaagtgctgggattacaggcgcgagctaccatgcctggccaaagcagaatatttctaatcacgaaagtagtatcaaggggcttcatactagtttcttacattttgatggtaagggttgcaagagactgaggcaggaggatc

SEQ ID NO: 21213 - DNA, 1098 bp, Homo sapiens
atggcttttcaaggagcaaaggttagaaattactaagattatttggataagctatttgccactattgagacattaatcttggtgaatgactaggctcatgtttataatatatatgtaacatttaaatgttgccaaatctctcactaaaaaagacatggcaattgtgcattatgttgtcatttcaaagatagtttaggataatttgtactttggagactgatctttgtctaacttttaattatttcttcctaaaattttaatctgagttgtgaaaccgtttttccaattatgttatgtcaaagtcttggtgtaatgtatcagtaaggttacattttttttttcttttggttaagttttcttttttaggtatatgtatgtttcactcaatagaaaagtaatacgcactacatatagagtgagccaacccagtgctcagagtttatgttactatggatttcatcttgtgctggtattgtgctactttttttcccctggtatgtcagaacttgaacagtcatttgttttgacattgtgccctacttacagtataatttaacgaaggctaacctggattttttggaaatgacatttgaatggcattgtactgcattttaataaggacttagcagtgttttacattaatattttcgaaaagatttttgtttatagtaagttgacttaaagatactgtagtttcattgtgctttatcacacaagaaaagatttaaccttttacagtttttgatcttctctttctataatgggatgggtattggtagtaggaagagaaagtgattatcatctgataaaacctatgaagaatttatcatatctttttcacgcagattcaaatttctcttgactgaagagttaagttctaaatgttaatctgtattttaaaaatgttaatttctagtatgtcctagcctgataaaaagttttttttttaaacatggatttatactaatgttattttgttttgttttgttttttgatatgggggaaatagtcaatgggtatttgcattgttttgtttttaagaatttgagctctagcatatacaattctcatacaaaaatatgtaatatagttaagaat

SEQ ID NO: 21214 - DNA, 1042 bp, Homo sapiens
tgaccaaggaagctacttttcagtgcctcttttggagggccgacgtgaatacctatgccttaggatcccctaattccagagaaagtcagtgaataatatggggagctgatgttttggttaactgttgtaaatgttctctaaacctcttctccctcctttgtacaagacagtacgataaatatggcctttcagcacatgaagttttgtttttattgaagaatcagagggcaaatgctgggagtttatttttaaatggttcaacaaagtatatgataaaacagtctttcctattctacttagatttttagaacaaggaatctgtaggtatggtgcccagtgtacttcagcacattcccaggaagaactagcagaatggcagaaaagatatgcttcacggctgataaaattgaaacagcaaaatgagaataaacagctctcaggcagttacatggaaaccttgatagaaaagtggatgaattcattgtctcctgagaaagtggtgaggaaaataagctacattattttttgtttgtcttaaacaatgaacttgagtcttgactttattgtgtgctctattttggtttatttccttatcttctttgcaaagaacttgattctgatagaatgatgtttttagtagctatagtagacccatttgttaaaatgaagagcagaactaaaccacttgtttggagatttgcctgtactgtattaattaccttcattcaggcagtttttgagtgccatttttgtggtggtggttaattttcttttctctcttattttagctttactatattttgttcttgtcaaaattactgaaaatgaaggtataaaatactttggtctgtaaacagttccatcatcatcttaactgttgacatttattttccatgctaaaagattttgtttgtgcccttagcaataaaaacataacataaattgctgtctgttttcagcttagtgaatgtatagaaggagtaaaggtagagcacaatcctgacctgtcagttactgtcagcaccaaaaaatcccaccagac

SEQ ID NO: 21215 - DNA, 1729 bp, Homo sapiens
attatgtgccagatactttgagaggtgcaagaatatagaaaggcagttacagactgctgacagcagatgtgtatatcgctgataacgatctagcatgtaaaatactacagaatagtttagaaaaagtgctatggttggcgctttgttgaaattggaagtgtagagcttagggtaaagttagagccaaatgcgctgattggtggtttatctgaggatgttagagtgaatggatccctagccttggactcctctgtgggagaagggctcatctcagagtgagtggggtacctagcagtaagtgctcccaggctccaaagtggtagcatgccattagctgcaagaaaaaggaacctctagccgggcgtggtggctcacgcctataattctagcactttaggaggccgaggcgggcggatcacctgaggtcaggagttggagaccagcctggccaacatggtgaaaccccatctctactaaaaatataaaaattagtcaggcgtggtggtgggcatctgtaattccagctactcagaaggctgaggcaggagaatcacttgaacccggggggtggaggttgcagtgagctgagtttgcgccacttcactccagcctgggcaaaagagcaagactttgtcccaaaaaaaaaaaaaaaaagaaaaaaaaaaaaaggaaaagaaacctctgtaatcagacattttctaggtgttatgaagaggagagtaaagtgaataaatggatggaaggtgctagcctgtgaggttcaagactggggacttggacttctcttctgctgccagctaatttctatgtaggaggcctctatcagcttccttaatgagagcctcacaaatatgttttccatatttaattatagtttaacgtagaaaaaaacaaaaatcattggcaacatattaatgttattaaaaatttctgagtattccaacttcacctttgttttaatattgaaaatgttcaagtttagttcagcatcaacgttattcttgtttaaaaaattctttcatttggaaaattgcagacagcaactagtaacgccctctctggatatcacgtggaagacttagatgagggtaagtgccaaatgctgtgtaacttctggtagctgtgaataagggctttgcttttattaattattgggagaaaatttactgagttacagtacatataagtggagatgtaggagagaatataagattttaattttaagaagtaggtgtagttgaaagcaattttctccctggcaccttttcatagaataatggagtaatggaggtaggaggtaacttcagaggtcatttagtttattttcttgcctccgtgtaggactaaatttaaacatcattcttaacaatctatagagggaagacttttcttctctctctgtcctaagctagtacagttattactttttggaagttttgatctgtgagctgagttgttcctgccctaatgaaactctgtgatctcctctcctctcaccagaggaaagggaaaagaagaacattcattgagtgcctgctgaatgctgtgtactatgggcattggctttcacaaaacatgtactgacttagagtccttctgcatctttttgacaggtgatgaaactgacattaaggtttatgagttgccctaaagtcacacagctagtatagagatgaagcacagctttaaactcaacctggctgaatatctttcttttccttttctgggg

SEQ ID NO: 21216 - DNA, 1583 bp, Homo sapiens
catcatggaattaaaaaacagtcttttctttcccttcccttaccttcccccttcccttccccttttcttctttttttgagacagttttgttctgtcgctcaggctggagtgcagtggcgtaatcttggctcactgcaacctctgccttacgggctcaagcaattctcctgtctcagccccctgagtaactgggattacaggcgcctgctaccacgcccagctaatttttgtatttttagtagagaaggggtttcaccatgttggccaggctggtctcaaactcctgacctcaagtggtccacctgccttggcctcccaaagtgctgggattataggcgtgaaccaccgtgcccagcccattatttcttttttaatatgaaaaatgtaagacacacaggaaagtagagtaaatgatataataaacattcatattctcaaaactttggttgaacaactaatgttttgccatatttacttcattttttctgaaatatttaagaataattaaagacatcatgacatttatccctaaatacttcagtatgcctctctaaaaaataagatcaagactgcataaccacaatattattattagcataatagaattgatataattctctaataattccctaacctatctaaagtccagtccataatcaaatttacctgtttttctgtccccaaagttttttttttaaatagctgatttgtttaaaccaggaactgattaaaggttataaaattttaaagttggaattctgcttcaataagagtaaacatactctgagtgaggactcaagggcacctttgtaagttcctgggtttcagttccaagttcattgttgtattctggatagtgaagattgccaagccagcgaccaatggataagtgaggtagttaagtcacttttcattgtctgaacatcagttgtatttggcataacacaaaaactttgatgaaataatggttctatttttgcctttcgaatagtcattatataggaaacttacttttttttttgagtcttgttctgttgctgggctagaatgcagtggcgtgatcacagctcactgcaacctctgcctcctgggttcaagcgattctcctgcctcagcctcccaagtagctgggactacaggcatgcgccaccacgcccagctaatttttgtatttttagtagagacagggtttcaccatgttggccaggatggtctccatctcttgaccttgtgatctgcctgccttggcctcccaaggtgctaggattacaggtgtgagtcactgtgcccggccatttttttacactaaaaaaatgaatgaggtaaatggagaaagtaaaatcaaaagaacgtaatcttatcaactaagagtattgtaccacttgtaatatgtaggttaaacttaaccatcataaacatcaatgaaaattttttatgaggctgtaagatttgtaaagcctagctaagagttttgttaatgtaagaagtcatcattgcaaacaaaggggcttgggtcatctactgatgtttgttgttgtgagacttggcctgtgaagtaaatgattcagtaatcagcaacccct

SEQ ID NO: 21217 - DNA, 1842 bp, Homo sapiens
tacaaaaaattagccgggcgtggtggcaggtgcctgtagtcccagctactcgggagtctgaggcaggagaatggtgtgaacccgggaggtggagcttgcagtgagccgagatagagatagcaccactgcgtacagcctgggcaaaagagggagactccgtctcaaaaaaaaaaaaaaaaaaaaaaaagagtgtgtggtcaaaatggtaaatgatcttgggaagagtgtttgaaggggaacagatggattattccaggattcagttcagcaagtatttattgggcatctgctgtgagcccctttgtatcactgctcctctgagtggttctcaagttcttgtgatggcatgtgctgggttgaagcaggacactgcttgaggcttgaccatttgtgggttctggcttctgttgtctctctcttttttttttttttgtgagggagtctcgctctgttgcccaggctggagtacagtgacacgatctcgactcactgcagcctccgcctccctggttcaagtgattttcctgcctcagcctcctgagtatctgggattacaggtgcgcactaccatgccctgctaatttttgtatttttagtagagacggggtttcaccatgttgttcaggctggtcttgaacttctgacctcgtgatccacccgccttggcctcccaaagtgctgggattacaggtgtgagccaccgcgcccggccttctgttgtctctttgtggctgcttggattgctgagaagaccaccactgtctaggccatctttaactcattcagggcataccagtgtgccatggcacaccctttgagaagctctgttctgagggatccaaacatgaaggaaacattgttccgttgacaaggaactaattatctgtagagagaatggggcaccccaaaatgaaaggactaataggaatttcataggtgccattgaagggggccatacaaggtacttcgggattaagtggagggagcgatactgccttcttggggatatcagggaacacttccactgaagaggtggcatttaaatcacaccaccaggaagccgagaagcaaagggaagagggcattctggagggaagtctgggggttatgtcagaaatgtgggtgtcaggaaattgcatatccaagtttcctgggtcctaggatacataaaggaatataatggaaggtaagactgccaataggtcaggactgggttttggggagttttttttttaatatttaactttttgttatttttattttttataaagttaggggtcttgctatgttccccaggctgtcttgaactcctggcctgaagcacttggcctcccaaagtgctgggattacaggcctgagccaccacgcttggccttggaatttcttgaatgttagagtaaggatgagtatgatggattgtagggaagagaactgagagacagggcctttagttgggttcatagtagtctaagtgagggcgatgagaacctgaattgagttggtggccatggaaaggattcaagagttatcttggaggttgaatggagagatgtggtgactaattagatggggtagggtgggaacaattaattctgtatctctgtgtttttttttttcttttttctttcttttttttttttttttggagtacagtggctccatctcggctctttgtaacctctgcctcctaggttcaagcaattttcctgcttcagcctccctagtagctgggattagaggcacaagctaccacgcccacctaatttttgtattttttgtagagatgggggtctcccacgttgcccagctggtcttgaactcctgagctcaagccatccacct

SEQ ID NO: 21218 - DNA, 1032 bp, Homo sapiens
tctcgaattcctgggctcaagtgtcctcccacctcagcctcccaaagtgctgggattacagtgcgtgagacaccatgcctggccaatgagtgcagtttttgtgctgtatgttggttttggttttatcaaaatgtgtggttcctaataggataacttgttttactcctggtgtattatcatttatgtttatattatttgagttttattgttccaatctctaaatatatagcctagggagaatgttttatttttacatctgagttagagatgtggagaggttagtgtaagttgtcagaaactgtatttcagttgaatcagtatctgctcaagagcatgactttaaggatagcatgtgtgggtgttctcagatgccttcatttccggtaagcatgattactaatttattcttaaagtcattgaaaaattaaaccatagtttcctgtcttttagctccaagcattctttttatttctccttggaactctgtattttaaaatatctgttagggtgacggtaacttcataaaggaatcatttattttcctactttttttttcttttttttcttttctttttttttttttttttttgagacaggttctcactctgtcgcccatgctagagtgcagtggtgcgatcttggcttactgcagccttcacctccatggctcaagccagcctcccacttcagcctccagagtagctgggactacaggtatgcaccacaatgcccagctaatttttgtatttttttgtagagacaggtttcgccatgtagcccagcctggtctcgaactcctgagttcaagatatctgcccccttcggtctcctaaaatgctgtcattacaggcatgagccactgcacctggcctctgtttttattctttaaagacacatgtgactaccacttagagtctctgatcagaacaggatccaccagatgcagtggctcaggcctgtaatcccagcactttgggaggccgaggtgggatgatcgcttgaggtcaggagttcaagaccagcctggccaac

SEQ ID NO: 21219 - DNA, 1053 bp, Homo sapiens
attgtcaacggtatagtttgtcacatcctgcttattgtgacagtaagaatcaggaatcgtaagccattgagatcaactgaatacagatcaggtgagtgccaatccattcaacacgtattatatggaggttggtgcaaagagaagtgacaagtaaacgaggatccagccctaaaggaacttgtagaccacttaggaggtaagctatgtgcatcagtaactgatacaaggatggaaggatggaccatagtgtctgcagaagcagtggcatgtgcttggtgtgatgcagctcactgaactgcagtgatgaacagtatagacatggcatccctgctcttacagagttcgcattctactgagattggaaagacagtaaacaccaaaatagaatatagtttggggtaattgcagagtagagtcagtatggttgagtatgaaaggaagaggtactaagtgactactgatttttagagagtgttatccaaaaatgcctttgtaagaaaatgacgtttaatgttttgttgatactccagactgtggctttaggccaatgtgtgattctctcacatgtatgatgcaatttaatacccatgcttctgaattagaataccatatattaaaccacactttattgatcacagtcacgtgactaatagtaattgcaaatgtgatgggtgactgtcattaaatagtattttgcattttaactatttttgcccttcattttgttgccagatagtaaccatagagatgactttgatcaaagcgaaaggtgagatttaaactagtacagtaggggaagcgctgcactctagtggagagagctttggagcttgaggcaggagccccggatctagtgctgctcatttccttttgtggctaagcaagtcattttaagctgtttagtcctcagtctttttaatctctaaaatgaaatgattgaattaaataatgcctagccgtctttctagttctaagattctttcatcttttaggatttattagccttcaactttggagaatttatagatttgttcattgtttttttcctctgat

SEQ ID NO: 21220 - DNA, 1055 bp, Homo sapiens
agtcccagctgcttgggaggctgaggcaggagaattgcctgaacctgggaggcagaggtttcagggagctgagatcgtgccactgcactccagccagtctcacacacatacaaaaaataataaaacttcatgtatgaagaattatcacaatttgatgattccagaaagtccacatcagtggcttctaacatactttgtgtcacaaaaccctattagaaatggataaatactgtgatcctctaccaaggaaaaaagtatgtatataaacttttgtaatctatttcaatggttcttggactccttgaagtttatataacagaataaaaagactgaagaaaaataatgaagtgcaatgtgtggccttgtttggacctggtttactgctaacagtaaaaaggtatctctaagaaaactagggcaagtggaatatggactgagaatcagatgattaatttgttaattacagttaatttattgagtgtgataatgacatgatggttatggaaaaaatgtctacatagagatacatactgaacttctggtgaaacgtgatttctgggatttgttttaaaacactataggatttcaaaaagtggtcagtgacaactgaaccaagagtgataaatttggctgggagcagtgactcaacgcctgtaatcccagcactttgggaggccaaggcaggcagatcacttgaggtcaggagttcgagaccagcctggccaacatggcgaaaccctgtgtctattaaaaatacaaaaattagctgggcgtggtggcaggtacttgtaatcccagctatttgggaggctgaggcaggagacttgcttgaacccaaaaggtggaggttgcagtcagctgagaccatgccactgcactctagcctgggtgacagagcaaaagtccatctcaaaaaaaaaaaagtgataaactttgataattgtcacagctgaatgatggttgcttgggagttcattattctcttcgtatttgtgtagttttaaatttcccatagtaattaaaaaaaatcaagcctcccaaaacagaactactgt

SEQ ID NO: 21221 - DNA, 1024 bp, Homo sapiens
aagaggtcagaaagtttaccatttagcacaataaaattgccacagctgtaagggaaatcatgctaaataaacttcagggatgaagatgtggtactgtttgatccatgcagttatttcacagttccaaagggaatttagatttttaactatagcatgaaatgtcagacatacagtgtttccaattatttaactacgctttaataaactgggctttaaaaatatatagtgtagtcatcttcattaatctgtatcaatgggtaaattaactttaaaaatagctgagacttttctgttgaaccaataactacacatttccattggagatgctagatttttaggaggatgctttttgtcacacagacactataacatactatttctaaaatttattaaacaattttttttacataaccacaaaatcttttcaaactaagatcccttcctctatcccttctattctttgtcagaaaaatgttcaatcccagttatggatttcaggcctctggccttcagcatactggtgtggacaggctctggtggacattccattatacttcttgattctcttttcaatacatttaatttactacttcatatttctgggattccagctttcatgggaactcatgtttgttttggtaagtgatcattttttccacaagccaattataatagtagaatcaaaatgaaaattcattttcatgaatgttttgtcattagcaaaaggcatgtaatatgcaagaaaataagaaaattgccttaggcagctttatgacctgattatctcccctcctctttccctctatgacctgccatttctaatcttgccattgatcctcattatttgcaggtggtatgcataattggttgtgcagtttctcttatattcctcacatatgtgctttcattcatctttcgcaagtggagaaaaaataatggcttttggtcttttggcttttttattgtaagtatatatacatgcgtgcacatttatattaaatttccttgaagtttttttaaatgc

SEQ ID NO: 21222 - DNA, 1034 bp, Homo sapiens
ttttttttttctttttttgagatggagtttcgctcttgttgcccaggctggagtgcaatggcacgatcttgtctcactgcaacctccacttctggggttcaagtgattctcctgcctcagcctccctagtagttgggattacaggtgcccgccacctcacccagctaattttttgtatttttagtagagatggggttttactatgttggccaggctgttctcgaactcctgactcaggcaatccacctgcctcaacctcccaaagtgctgggattacaggcgtgagccaccgtgcctggcatcataatacctttccttttattttagtttcacatttcttaatagcactatggtattctgattcttaaaaataatacattgtctaatgtccatagccatacaaggataaaaaatgaaatgagctttacttaaattggaaagatttctgttaaacattcagaagaatggtataccttagaaagctttagtataaggaagtttaaaggggagattgtcgttgtttttccactgacattttatatagtcatttaactgaaagaataaaagtatatttaattatattaaatataaaatttgttctacagctatagaggtaattatagtaatggctactttctgtgccacatgctaaactaacatcttcaaaagcattatctcatttatttctcagaacaaccatatgaatagctaccatgaaaaactccattttacagatgagagtgagagaagataaataacttgctaatagtcacaaaatgtgtatggccacccatttagaataaatttagtcctgatttcagagcttttactcttaaccatttcgcacattacctctccaaacatttatgtttgtgacagttgaactaacaccttgtttctactataggctctcctggggattgacatacatttgcttcatcttcattatgtccatttttatggctctggtcataacatcaatcccaattgtatttcatactggcttcatggtgatattcacactctatagctta

SEQ ID NO: 21223 - DNA, 1024 bp, Homo sapiens
cagggactattcttcctgtatgcacagtgtaagctaatagccactttctgtcttagtctcacggaccactggactctgtctctttcttatataaaatatctcattccagctaccatgctcgcctgttccaaccacagctcctctctcactgtcttattctacatttatctaactcttgctttttagcataaatattcatggtttggccttgacagtattttttatacccctagagaaaatcagtgatgttagcactgtcctcataaaagtttcaccgcctgactctatattgggaaggatgaggagttttgaaaggtatggctacagcataaaataaacagctttttcatcttaatgtagatttcaccctgagtgagatacaaagttaataaaatttttagaacataatacataaacgtgaaaaaggaggcactaattggaccagtgattttcaaagcttctgttagtaatagatctattaaacacttagtgggtggattactcctgcagattgtaaactcattcatttatgcactgattactatacacttaattcttagagagtgttcttgacctcagagaatctgtaggtagactatattttttatttttgtactctgattttttgtatacaatttacctctagtgtactattttcatgtgatatcagtttataatcttggcagaaaaagagaaaacaccaaattctgagtatttgtattgcttactttaaatatttttccttttaattcttaaattattttagtcactaaagtaatatctactttaaaaaaagttgaatagtacaaacttgtatgaagcaaaaatatgagagcttttcctttcatcttcaccactacttcctctcctcccctaccccctctcctcccctacccctcattcaaattgtgtatatccttcaaggcaaatatgcacatggtcatatatagagtatgtttctatgcttacataggcacataaattcagttttctttaccaaaatgagatcacactaaaagcaata

SEQ ID NO: 21224 - DNA, 1088 bp, Homo sapiens
gaggttgcagtgagccgagattgcaccactgcattccagtctgggcaacagagggagactctgcctcaaaataaataaataaataaataaatagttaaaaaaatttatactttgtataatagtagaatttccttttttaataataacgttattcttactagcatgttttatgctgataagtccatgatgagcaaaatatacttcaaaagttgaaaaaccctctttacaaagagttgtagtacataatatttatacaggtatgtgtctgcatagaagtgttttaattcttcaaggacagtctgaagaattagttaaaactaagaaaaataagacttaaatataaatatctctaattgaatatattagatttgtaatggatatttttggctttgctattagtattcttaccatgtagttgtcaaatatgaaaaaaatttaaacatacagacttgagcaaagctcaaaacaaaaaactgacatagtgttctgattttcaaaatattaaaagctaatacaaactttattcatatgtgatcagttgttcctataacatctcctattctgtagcagactctttggggtttaacctttctaacacttcacctacattctagtatcattcctttttgattcactaattcaaaaaagactttgcccagtattaaaataataagcatggctaggaatgattataaattagtattaaaataatcactgttaaaatctggtgcgtgttatattacataaccttcattctttctggtaaagatgtatttattgatggataaatgagtgagaacatggaaaattacctggagcatggaaaattaatggaaaattactcgaatggaaaatgttaggttttgcaattttttttctttcattaggaaatttcattatgaattctcgttttggttttaaaatacattttatattgctaatatataatccttacactgtgctaatcttgacattttttatatgtgtccagggaattgtacatgtatctcaaatatttcttttttttttaaaggaacttggattcaaatcatatctttttgctttgagttaattctcattgatctgca

SEQ ID NO: 21225 - DNA, 1081 bp, Homo sapiens
ttaatttgactttaaataagtatattttgtaccttaggctatagccactagtgaacataaagagatcgtgtaaaaagagagcagttttgaaagccttaagtctctagttgatcttaccttggtccttctttatatcagtcttttttaattgaagtattttattttaccctctaaggtctaaaactatgaagtgatcttgtaactcctaccattttctttatctcctgtccacatctatagccaatatagcaaactcctgtagattcaatagtaatattaagtattgagcatatttccttttccacttgtattcctcattacctgtgtctgtattctacacctgtactgtcctgtatggtaactactagccatgtgtggcttttaaaatttaaattgattacaattaaatcaattaacaatttatttttttcagtagcacaggccacattccaagtgctcagtagccatatatggctgttagttactaaattgcatggtgcaatctagatgttctgtagaacattttgaccattataaaagttgtattgtgtaatactagtctagactagaggttcccaacccccaggacacagatcttactagctgcctgtgaggaactgggctgcacagtaggaggcatgtgagtgaagcttcatctgtattcacagctgctcctcattgcttgcattaccacctgagctccacctcctgtcagatcagtggcagcattcaattctcataggagtatgaaccctattgcgaaccgcgcatgtgaaggatctaggttgcatgcttcttatgagaatctaatgcctgatgatctgtcactgtctcccatcacccccagatgggaccgcctagttgcagaaaaacaagctcagggctcccactgattctaccttatagtgagttgtataattgtttcattatatattacaatgtaataataatagaaataaaattcacaataaatgtaatgcatttgaatcatcctgaaactatccttgctccctgtctgtggaaaaattttctatcacaaaaccagtccctggtgccaaaaaggctggggaccactagtcta

SEQ ID NO: 21226 - DNA, 1034 bp, Homo sapiens
aggtgaccacgtttcttatcaggatggctctaaacatcaggatgactcaacttatttattttatagggtataatcttaatttgtttctcacagaaataaacatggatatgtttttaatcaggtctctatgaaaataatttaaaaaatttaaagttattttacctgctacataataaatggattgtttattccacaggtatttagtacctcctctgctgtgcagtgagttgttttactagctgaaaatatttgaaggagataatggtatcattagataagtgatggattttgcgggggaggtgggggaagagagaggctcttctaaggaaagcactgcttttaacaaaggcagtaggtataatagtagaactaccttagattttaaaaaatactttatagctttcaaatttcttattttaattaattaaattcatgcatcctaaataatttttctctaacaattatttctaaaggttatgtacatttttattacttttagtgatgtggaatatgtttcgtaggacttggaacgtagtaaccagcacttttttttttttttttttttttttgagacggaatcttgctctgttgccaggctggattggcacagtgtcagctgactgcaactttcacctcccgggttcgagtgattctcctgcctcagcctcctgagtagctgggattacaggtgcccgccaccacacccagctaatttttgtatttttagtagagacagggtttcaccatgttggccgggatagtttctgtctcctgacctcgtgatcttcccgcctcagcctcccaaagtgctgggattacaggcgtgaaccactgtgcctggccgtagtaaccagtactttaagataaattaagaagtgaatttttgatattgaactttggattatgcaactcctggtctttaagtcaattaatacattagaaaaggaagatgggctttagtaggctttccattttcttgcaacttattggatttagtataaattattttatctagtaaattatttatctaggaa

SEQ ID NO: 21227 - DNA, 1123 bp, Homo sapiens
acagctctgcggctcgggccctgaggtgaggcgggcgtcgcgggcggcggcggcgcttgaggctagcctgggacagccgtccctgggggagttgaggggacgaggaggggctggccagcgagggacggcggggagagaaggggagttcggcgtctgaggtgtggggtgaagcgggctcggaagcgggcagaggcggcgagctgagggaaacagacctccctcagctcccgggaagcgcgggttgccagcctcggggatgcggtgggagcgcccaggatgcggacgtgagggggtcggggccctgcggcgggggctccgcgaggctcccctgggaccgggtccggccgtgggacttcgggacactgcctttgcctggacgctgtcgttccaccctcagcaacctcagggaaagaaggaaaacaaatattgatgtaaatttccgtctgaacagctgggtaatgagcgcttgctcttccctgcgaggttacgcgcggatcattaccttgcgtgttaaaaggagtttcagtgagaagaaaatgcgcagatctcatgacacagtttgggagggaaattccctgatcctaaaacacgaataggagctccaggcatggaaatacttaattggatcggaaagctgggcaggctggagctattaagctgaaggaggttttcccctgggctcctcaggcttcgatttacgttttaaataaataagtccgaaaataatgaagataataaccacgtttactttctacaagggcgttctgaaggaatctaagggaagaggagtatttgctggactacagctttaagccaggctcggtattagctcttttcattctgacagcaaccctgtaggattggagggggttattccagttgggcaggtgtggagaatgggcctcaaagaggttaagtaacttattaaggtctcagctagtaaaaggatggagttgagattccaacccgggctgccagaccctaattctggtgctttatttagtatattttgtgtttgccgggagagcaatattgtatgtgttttagggaagactccatagtagggaacattattagggcagttagggctttgtgggtatttgtgttaaaatcaaactaaaga

SEQ ID NO: 21228 - DNA, 1035 bp, Homo sapiens
acaacatttattagctcacagtttctgtggagcagggatctagatgtggcttagttggggttgctggcctggggtctctcctaaggctgcagtgaaggtggtggccggggctgcagtcatctgaaggctctagtggggcaggatccacttccaggctcactcaatggctgttggctaggtttagttccttgcagtctattggattggggccctagttcctggtatatggcctctctatagggcaggtcaccttgtggcagtagacaccatcaaagtcagagagagagagagagaaagaaagaaagaaagaaagaaagaaagaaaagaggggccagcaagatggaaatcacagccttttataagccagtcttgaaagtggtagctcatcacatttgtcctactctctgtgttacatgttaatttctaggtcgagcccacactccaggggagaggagtatacaaggcatgaatgccaggaggtggtgaccagtggggtcatcttagaaggctgccagttacatttgtattgactcattgaattcttgcaacaatgttaaaagtgggcaatattagccccattttacagatgaagaaactgaggtagagagaagttgaatcagctctcaaggccacagcaccaatgagtagtggcactgggattcaaacccaggcccctggctccaggattccacccttagccatgacctgaacccttgtctgtaggcccttataggtcatactgtggaccacctcactccttgaggccagagccaattgaatagatggctcttggtgcctgcgtttctggaatgctttgtagccagactggacattgaaggttcaccttttgatggctttaaatttatttttattattttattttttttttgagacagggtcttgctttgcctcccaggctggagtgcagtggtgtaatcatacctcactgcagcctcgaccttccaggcttgagtgatcatccagcctcagcctcccaaagtgttgggattacaagtgtgagccattgtgcctggc

SEQ ID NO: 21229 - DNA, 1022 bp, Homo sapiens
ctccctctcttcaggcgaaattccaggtctttaacctcctggaaggcattgttggcagtgccaaaaccatgccaaacatctgggtgagaactgcaaaatgagaccagttcttccaaagtttcccagctctgccactgggatggaatgtgatggaaggtgaatgtggcccccaagcacgtcgtcccatctgagcttggtggagcttcaggctgcaggttgtgcagggcccacgtgtaccacgtgtgtcagcctgatatggcttggctatgttcccacccaaatctcatcttgaattgtagctcccctaattcccttatgttgtgggaggggcccagtgggagataattgaatcatgggggtggtttcccatatgctgttctcatggtagtggataagtctcaggagatctgatggttttataaggggaaacccgtttcgcttggctgtcactcttctcttgtctgccgccatgtgagatgtgcctttcaccttctgccatgactgtgaggcctccccatccacgtggaattgtgagtccattaaatctctttcttttgtacattgcccagtcttgggtatgtctttatgaacagcgtgaaaacggactaatacacagccccacctctgtcttacccctttcttgcccttgccttggattgcttgttctgtctccttcattaaggcctggggaccctgggggcagggctgtgcattctgactcctgtgtcccttccctggcagtccccagccccgcctttcatggcggtgtatcttggagatgttcagaaaccactgaatacatccagatgttggctgttgtatataaaaatagttaaatgtcctcctggcattttaggtttccttcaaactgtatgtgattcagaagcagctgtacttactgcccaaagattagatagaaatgactttatgattctgagatttaaaatgaccgctccaccccaactgttaatggaaaactattaaaaaataaaattgcagtcaagttctttgtcctggtagaa

SEQ ID NO: 21230 - DNA, 1157 bp, Homo sapiens
gcatgccaaactctgcaagcatgtctcttgcagtggccctcatttggcctgagtatagaggaactcctccatcctcagggtgagctctgacaactctccaaggccgttcttggtatggtcgttcttgtctctccgccttccatgggaccactgggggccgagggcaccatttgggaggaactactccttctccagttctgcaagagggtcaggtacttctcagtagagtaacactgtcctgtagaactttctgcagtgatagaaatactcagtatctgcacggtccagtatggtagccatgaatcccctggggcttttgagtacttgaaaggtggctgctatgactgaggaaatggtgtgtaatcttgtttaattaatttaagtgtaaaaagccgcatgtggctactgtattagacatgccgtgttgttctagaatgtagaatgagagggtaatgtcaacagtttttctcagcaacagttctgagaccggataagtcccattatatatcttgctcagctctctcaagaaagcggttctcatggcctcctaacccatcagtgagtagcgctgtcagtgtcacgttttaaatgttgcttcacaaaagcactcttacggaggtagactctagccttcattagtggaatatgcaggtccttctctgccgcctccctctgccccatcctgccttaactaaaggcgttttactcttttgagggtaatatttgaagtcttagctcctggcgtacttttgtaccacctgctaaaaagctcattgctttcctggcagaagtgcccctggcagtgctatgatgggcttttggctgagaggcagagtgatcaacttctgcttttctctccggagaacacttggtagattggatgctgccaagagttccacagcattctgatgatgacatccatgattatagaggaggatagaactagtcccagggtctgatccatgaatgtatttgcccttagttcaggctcagcttcataaagaaccatggtattttaccaggttaatcaagtacagtctaaggtagcagaaaattaatattatgctttagaatgtgcagtagctctgcttattctaattagagaaaatgggtgtcttaattagacaaaaatatcgaaatttttagagcactttaaa

SEQ ID NO: 21231 - DNA, 1046 bp, Homo sapiens
atcttttattttattttattttattttattttattgttttgtttatggagttggagtctcactctgtggcccaggctggagtgcagtggcgcaatctcagctcactgcaacctccgcctcccaggttcaacctattctcctgccttagcttcctcaatagctggaattacaggcgtgtgtcaccatgcgcaggtaatttttgtattttaggtagagatggggtttcaccatattggccaggctggtctcaaactcatgacctcaggtgatccacccgcctcagcttcccaaagtgctgggattataggcgtgagccaccgtgcccagcctagtaagatcttttagacttgctgtgtccaattccatagtccctggccacctgtagttctctaaatttacatgagttaaactggaataaaatgcaaactttagctccttagcatgacttagccacacatcaaatacttgtatctagtggctactgtgttggacaacacaagatgtagaacgcttccatgatcacaggaagttctactggatgacactgcactagacccttagcaaaaaaaagtaacttcacaaattgtttgttgtgtagtgcctacccaagcttgccttgggaggagttccatttctggaagacagtgtaagagagctgttctcagtcatggggtatgtcctacatatattgtgaataaaataatttaaatgtcagccttttcacattgtttctgataaattcaggatgctgcagagtcatcctgtgataccattctcttgctcctgttggttctgagtttttttcttatttcctgagttggggactgaagtgggttgcgagttgtgccgggacttgtgtagcaggctcgagagcatcatgatgtctgatgtcgggggatggaaggagctgcacaagggctgaaatagtagctcatcatcttgtcctctggtgttatgtgttatctgccagtagacaacctctcctcaccccagcccaagccaacatcattggtctatgtcagcttagcccctctcacagaacagcc

SEQ ID NO: 21232 - DNA, 1034 bp, Homo sapiens
cccaggtagctgggattacaggcacctgcccccacgcccggctaacttttgtatttttagtagagacggggtttcgccattttggccaggctgtcctcaaactcgtgacctcaagtgatccgtccaccttggcctcccaaagtgctgggattacaggcatgagccaccgtgcccggcccctgctgtcgttctctccctcagcattctgctacatgagtttttccttgctgctgtctcctttccccagttcgttgatttgcccattgctataatcctgatgatgagaatagcactttataagtggtgaatgtggccggagaggaattgtggtgttagagtaatgaggggaaatgagacaggccatcaagtctatccgacccttgcctttccataagattccttcgctccccacttcaaatgatgatgaaacacaaagaaaatgggacttaagagggtaaaaaaacaatgtaaataattacgattgttggtttcaggataggaaatttaaagtgggcttcagtctgtagttgggtttggcaggtggactccttagggccttttttcttaccctgtatttccaccccagcaagagtggtggcaggggaggggcaaggtggggtacagcaggggcttggggtgggggttgctgctggggaaatggagctgcccttttaccgagcctggagacctgggcaggatctagcccaggcatccttcagcgcagcacagctaatgtccacctctgaaagtcatcacgttttcttttgttcctatttgggtttattaagagccagcggagttcctgcataaagcttaggagagtgcagccgaattacttgggctgatgggggtcggtcaagtggcttttacttaaacagttctgaacacttggcacccacttcaggctgagtcttgcatagtccccgaagggtctcctcctgctccagcaagagcatctgcttcctcttggcagtcgcctccctgagcaactgctgcaggggaaagagtgagggttctgaagtcaggagacgtgg

SEQ ID NO: 21233 - DNA, 1035 bp, Homo sapiens
ctgtttgttgtttctggggaggaaagcgagaaaggatgactatttcagaacttctgtgaggcaggaagatctttcaggttcccacttaagttctgcccgctccacatgggcaggaggtctcataccatcttcctgattcactcatttatttttgtttgtttgtttgagttggagtctcgctccgtcactctgtcacgtggactggagtgccatggtgtgatatcggctcactgcaatctccgcctcctgggttcaagtgattcttgtgcctcagcctcccgagtagctgggattataggcacgtgccactgtgcctggctaatttttgtatttttagtagagacagggtttcatcatgttggccaggctggtctcgaactcctgagctcaaatgatgcgcccgcctcggcctcccgaagtgcaggtattacagttctgagcccccgcacccagcgcgtgactcattcatttctgatggtgttttccttgtgctctccagcaggacaggaagagatatgagcaggagggactcgctgtgtgaaaacacaggaaatatctcactgcttcctaaatgccagctctctcttcccacttatctcctctggtgattgtgggactttaatcagcccattttccttcttctgggatggtcagtgccttatgctttagtggaattggctgttggagccttccaggaaggagcagatgctttgattaggcagccctgatctccggtgcaagagctggcccaggagcactgctggcaggatttgtgacttgaagggtggtctccatgttctcgtacactttaacaaggcaggtttccaggtgagtgtaagcaggtggaagataagacacatcatagtgatctatgaagtttgctgtccagggaaagcatcatttgaaacctaagtgtattttgattttgggcctttaatcggatttgtttaaggaaattctgccagtggatgttatgctgatttgtccattaaagccctgtttcattaaacaaggtctgtttcaggtgagttgcct

SEQ ID NO: 21234 - DNA, 1061 bp, Homo sapiens
gtctgaagcccagcttaagaacccctggaccagttctttcttcgtaattttccagtttgctttctccagagcgtgttgcatggagacccgtctgatgggtgctaataatgagtggtcaagtgagcttggaaaatgggattcaagtcaatgtgtttctgaagtgcaagacccctctaaggttaatttgctaacaggcaacgtgactctccccagaatcgcattcttcatacctactggaccagttagaattttccagaatgggtgggatgcaatggctgacgcctgtaatctcaacactttgggaggccaaggtgggaggatcgcttgagcccaggaggttgaggccacagtgagccataactgccccactttactccagcctcggtgacagaacaagactctgactcccaaaaaacaacaaaacaaaaagatttttccagaatgcactctgaggcaacctgctcttaggaaacggttctctgagattatttctgttgtctgaaaggtatggttttgagatacctctgtttagctttggggttccgtttgaatgtggatgttgttggttaatctttatatcctgtgagatgaccaggcttggctcccgtgccttggagagggagtggaaacatccctggtcatagtataagatctggaaccttctctggccagcatccttgtttgactggggagatacagtcatgcgtcagcgtggggcagttaaaggtaatttctacccatccaattgggatttgccaccctggcagtttggggtgaaggcctcacccatataatgacaccatgctggggtcctttgccctctggtatttggcatgcacctagcatcacccctacagcatgcccgtctcctcccttactgactggtggtcaccccatgggctgtagacgcttcctcagaatcctcctaaagaaacccatccgcctcgatggcctgtgtgacctgttttcatggagaaccagcctggcaagccggggctctctggacagttctcctgcccttggcagagacggcacggtagtgtcctgtcgcaagtcacata

SEQ ID NO: 21235 - DNA, 1089 bp, Homo sapiens
aggggtggtggggcggtatcagatgtatttggtcagctgtctgaatgtagggattttctctgggcggtgtaaacagtcattggctaatttgcactatgcagcagtaatttttttttgtgtgtgtgtgacggcgtctcactctgtcacccaggctggagtgcaatggcgtgatcttggctcaccgcaacctccacctcctgggttcaagtgattctcctgcctcagcctcctgagtagctgggattacaggcacctgctgccatgcctggctaatttttgtatttttagttgagatggggtttcaccatgttggccaggctggtcttgaactcctgacctcaagtgatcctcccaccttagcctcccaaagtgctgggattatagacatgagccaccgtgcccggctgcagcagtgtttttttttttttttttaaaccttttggttcatatttgttctaatatatgctttgaatatggaggagatcccagagggaagccctggatagaatcagtaatggtttgggagcagctggtgaatgtctggggagggattgcagcagctcagaaacagacatcatcaccacaaatgcccagaacctcactacttggcagaaaggtcagcctgacagtaaacatctgttctaggagatttaaaaagaaatgaattcttgctgtcgatgtgagagggggaatttgtcttagaaggtctcatacatggatgagaattacttatgattgctacagtcagtgaatacaaatgttgttgaaagagttgtgcttggaaacagtctgttgaccttcactctgaggctggccaaaggtttcctttggtttcactattaatttgctcaccagacctgaaaagggcagcagcttggatctatcgaagatgctctgtggggtcggagttaatgggttttgatcttgagtcgttgcggttggccaacatcgactgagcacccacgcgtttatagtctaacagggtaggagcagggctagaatttgtgttcaggatgtttgcccttcttgggatctatgaaccagtggcttttgaggctgtgggaagttttgtgggtaaattcagcccca

SEQ ID NO: 21236 - DNA, 1044 bp, Homo sapiens
taaggggtgttgcattgtggttttgatttgcatttccctgatcattagtgatgttgagcgttttttcttatgtttgttggccatttgtatatcttcatttgagaattgtccattcatgtccttaggccacttgttgatgggattgtttgtttttttcttgctgatttgtttgagttccttgtagattctggatattggtcctttgtcagatgtataggttgcaaaggttttctcccactctgtgggttgcctgtttgctgattatttcttttgctgtgaagaagctttttattatttatttatttatttatttatttatttattttattgttttttgacatggagcctcactctgtcgcccaggctggagtgtggtggtgcggtctcagctcactgcatcctctgtcaccagggttcaagcgattctcctgcctcagcctcccaagtagctgggactacaggcgcccaccaccatgcctggctattttttgtattttcagtagagacggagtttcaccatgttggccaggctggtcttaaacgctggacctcaaattatctgcctgtctcagcctcccagagtgctgggaccacaggtgtgagccactgtgcctgacctacagaagctttttagtttaaaagtcttatctgtttatcgttgtttttgttgcatttgcttttgggttcttggtcatgaaatctttgcctaagtcaatgtctagaagggtttttccagtgttatcttctagaatttttatggtttcaggtcttacatttaagtctttgatccatcttaagttgatttttgtataaggtgagagatgaggatccagttttgttcttctatatgtggctttccaatgatcccagcaccatttgttgaataggacgtcctttctccactttgtttttgtttgctttgtagaagatcagttggctgtaagtatttacctttatttctgggttctctattctattccattggtctacatgtctatttttataccagtaccatgctgttttggtgactgtagtcttaaagta

SEQ ID NO: 21237 - DNA, 1106 bp, Homo sapiens
gtatgcttatcaagatagctcctagacaagtacaaaagaaaaaaagaaaaggggccgggaacggtggctcacgtctgtaatcccaacactttgggaggccgaggcaggtggatcacctgaggtcaggagttagagaccagcctggccaacatggtgaaaccccgtgtctactaaaaatacaaagattagccgggtgtggtggcaggtacctgtaatcccagttacttggaaggctgaggcaggagaattgcttgaacccgggaagtggaggttgcagtgagtcaagatcatgccattgcactccagcctgggaaataagagtgaaactccgtctcaaaaaaaaaaaaaaggggaaaaagtagctaacacactgccactctcccctcctatgtccctggcagacatcactaatcaatcttagcactctttcctattgagccaggtagccatctcagaactcatctgacatcagccctccaggcagccctttaccgactgatcagagcggatacttgaggtgaaactgtccttacagaggttctgcctcattcggagggtacagaccctgccttcccatagattgtagcagttagtagggtcccaactggagcaggagatttggagggaggagggggctgagcaccctatatacctgactatctgtgctccagcccagaaagccaaccccttctatgaggagtggtggttcttggtggtcattgccctggtcggcctcatcttcatcctgcttctggtcttcgtgctcatcatccggggccagagcaagaagtacgccaagaagacagactcgggtgagtgagctggcaccagccatgctggctggacttgagttttatgtatctcctttttggccagaacaggggtgatcaggtccctctcctggctcctggcagcgcacctgctctggtgggtggggcagcctagggtttctacacacaatctcaatctcttattttggtctcaactctaccaagagaaagaggggataacccagccaggtggagagtggtatgggagaggggaggccacacagtctaaagggtgtcaatctcccgccgacttcagggaacagtgccaagtctgga

SEQ ID NO: 21238 - DNA, 1050 bp, Homo sapiens
aatccctgggatcccaggtctctggacaggggctcccctggctccctgctgcatcctcccacagctctcagaaaagcagaggccccctgccttgtctcatttccccaccagtccctcccttcacccatttctcaccagattccacaccaggcaatggtatctgtgattcaggggaaaatttcccactgtcgcccagagggtccaccttggattccagcgtgtggaagggttggttgggaggtggcagagcacggtggggctactcctaggcctggcacagagagcaagccgaggtccactctcagctctgcttctgccaagccctacaaccttgagcaagttctgtgtcccctctgtgcctcagtttccccatctgtatatatgggaagttggaccagataaccatgtggtcccatccagatcagtcaggcagtgcttgtttgacctgccagcatccctccacctgctgcgtagatggctgggctgcctgagtctcagccaaagcccagtgataattacagccatgctggcaaataggtatgtagtgttcacggggcatggtgctgggagctttgctcacgttgactcatttaatcctcacaacaaccctgagggaggtgttgctattatcctcttcattaccaaggaggacatggaggcacagagagttggataacttgtgcaaagacacacagcctgtaagtagtggagttagatttaaactcattctgactccagaatctgtgttctttctgttgttcctgagctccaagagccccaggattcctggccagaaaataagcttccccctgtccccacccatcctctcaccttcctgagctgtaattaggcgtaggaggtgtgcaggggtctgggcggatggaagggaggatcggtcccgtttggtttctttctcagcacagcttggttttaatgcagcttttagctgccttatgattacctcactcacatccagaactgccaggaagaaggcggcatcccggcccctgtttcctggccctgagagcctcctctcagccctaggagatc

SEQ ID NO: 21239 - DNA, 1075 bp, Homo sapiens
tttgagaggccaaggcaggcagatcacttgaggtcaggagtttgagaccagcctggccaacatagcaaaaccctgtctttactaaaaatataagaattagccgggtgtggtggcatgcacctgtaatcccagctactcaggaggctgaggcaggaaaatcacttgaaccgggaaggcggaggttgcagtaagccaagatcgtaccattgcacttcagcctgggtaacaagagcaaaactctgtctcaaaaaaaaaaaaaagactgggcacagtggctcacgcctgtaatcccaacactttcggaggccaaggcgggcagatcacaaggtcaggagatcgagaccatcctggctaacaaagtgaaaccctgtccctactaaaaatacaaaaaattagccaggggtagtggcgcgcacctgtagtcctagctactcgggaggctgaggcaggagaatcgcttgaacccgggaggcagaggctgcagtgagccaagatcatgccactgtactccagcctgggcaacagatcgagactgtctcaaaaaaaaaagaggtagaaactgatacccagaaaggggactgaagggagacaggacttccagaagttgatgtcaccaggtgacctgtggcctttgagtccatcaatcctgaacagatttaggattagggttaaggcatggactctggaatggccctgcatttctaaattcattagcattcatttgtcatttacttattcattcaccgacattcactaatccatgctgagaacatttcttcagtgtctggatgtacatcatgcagaaataaccacacacagccatggaggctgtgacctgggaaagggcagaattccaaggggatacctggaagccccttgcccagtcttggggtaggggccagggaagcttcctttgggtggcctcggcgtctgggcatgaacgtgctgtctctgggtctggttgacagcatcagcaccgtgtttagcattctctgcaaactaaacgtggcgggatgtaggcagtaagaggttggggagggggtggcaggaggggccctgggaggctggggactgg

SEQ ID NO: 21240 - DNA, 1070 bp, Homo sapiens
gaagctgctgcacctctctgggccccaggggtctcgtctgtgaagcgagcggttgaacttgtgggtccctgttgctgcttttgcacccccccactactcccaataagttctgaggagagacgggactccctgtggtagagacaaagggccactgctgattggaggggaggaggtccagaagctccttctaaaacggaaagaaagagaggggaagtggccttgaccttggtccagcaaggggcagtgggccaccagacctcgtgggttctctgccaaccatgagagccagtaaaagggataaagaaggtgaccagggcaggagcagagcccagtgtccaggggtgcacaacggcctgcttccctccagattgggtgcagccccagatgggtgacaccaggatggccgtgggccctaggagtgactggggaggaggccgcgtgtgtgtggtgtgtgctggccggcaggcatgtgcaggcttctgtgtataatctggcttgtaaattgctcggggactgtaactgcggaaagggccatagagccgcgtggtgttattatttatgataaagcacagaggtgcctgccagggactagaatgggctgagcactgcgtgcaggatggacggcaaattgaactccaattttctgctcggcagtctttgttacacgccacaaagcgctggtacaccggggtcaccagcctgatgaatgtgtgttcttcctcagcggtggctccatctctcagcctccgtgcagagagcgactcgtgctttgttttttcctccctgcggggcccagccttggaatctgttcctgggctccaaacgcagcctggacagaggggaggtcagaggccttgcatggaggcaggcggctatgggttcaaaacccagctctgccactgacacacatgtgactgggtacctctctcatctgagcttcagatgagagaaataaaagagaagtcctcatagcactcccctaaggaggctgggaggattaaatgggtaaacatgcgctgctcagtgtggagtaggcctttaacaaatacccatctttccttcttgtccct

SEQ ID NO: 21241 - DNA, 1059 bp, Homo sapiens
atctgggtgttgcttgtggggccccggtgcaggcaggagagtccagttgaaatcagtatttaggtttttctttctccccatagagaagagagaaaaggggaggagatggtgcattctttccttcccatgggtggttttcccatctcagctaactttcgtttgtttctcagctacctttttagtctttgaaatgaggccacgtcctgggagccaggctgcagacagagccagggaggcaggcgttttctctccaggccgctactgcagtgagtgagagtacctctcattctgtagggactggtggcccacagttccagaagccaggcaaagagctcctatctagggggagggttgagaccccatttgagagcccatcctccaggatcttgtaggagagacacatggcttggtgcgggggccctgaagttctgttaacttgggcactgacttcccatgtgaggtgggaaaggcactccatctcattgggccttggtttcttcatctgtctaatgaagctggatttgaacctggctgtgtgtgggtcctccatagtccactgcctaataatgctgagctgtgaacttcacaggctggatgataaaaggagatacagtcaatgcaaaagtgcttgaacattttaaagtgccatgaaaaagtgcttgaatattattctgttcctccctcccttcctcccttccttcctttcttcctccctctcccctccctcccttcctccctccctccttcccttccttcctaactgaagttaatttcagaataaggcatccgagtctctttccatctctacctgggcatggtcgttgtcattaatggagaaattctggaaggttccacaggaaatctggcagaaccctaggcagagctagtcacagccacatcttttcagatttgccagcccctctgacatgtgctcagtgaggctgtggggtcagagtctttactccccatcaatctactggcagaactttggggctgcccctttacagcagacctgcacccctcctgcctcagcagaaggcgcttcactcccaggtggca

SEQ ID NO: 21242 - DNA, 1627 bp, Homo sapiens
attacatttcttcaacaagtattgattttactttttgttttagggggaactaacttaattgattcaaactgcaaactctcccttggggcagtagctcaaatctcagttcagtacatttatcctcagctgggttacttgcagtctgccctgagtacatatagttcaggggtcagccagagatttaggcatcatctatacaaagaatttgatgttcccctcactggctctccactttccaggatccatcctcactttctggtgcctgtggttgccctgaattctagactgtgagtttcctcttggaggtttttcttatgttgtaattgaggtgaaattcacatgacataaaattaaccattataaaatgaataattcagtagcgttgagtacattcacaatattgtgcaaccatcacctctatctagtttcaagacattttatcaccccaaaaggaaaccccttacccattaagcagttgctccccactcctttccagcccctggcaacaactcagccacaatctgtatctgtggatttacctattctggatgtttcacataaatggagtcatacaatatgtgaccttttgtatctggcttcttttactgagcataatgttttcaaggtccatccgtgttgaagcttgtagcagtacttcattcctttttaattgctaattactatttcattgcatgtatatgccacgtgcacttgttaatggacttttgtgccatttccccctgttggctgttgttcacagtgcatgaataggtgtgtgcatgtgtttgtttgagaccttgttctcagttcttttgggtctatacctaggagtggaactattgaatcatgtggtaattctatgtttaactttttgaggaacgaacaaactattttccacagttactgaaccattttacaatctcaccagcaatgtacaaaggttttgatttcttcacaccaacacttgttatttttcatttgtttaattatagctgacctggtgggtgtgaagtgttaccttatgggggttttgatttgtatttccctgatgactaatggtgctgaccatcttttcatgtgcttgttggccgtttgtatatcttctctggagaaatttctgttcaagtccattgtctttttttttttttttgagacaggatctcactttgttgcccaggatggagagcagaggtacagacacagttcactgcagcctcaaccccctgggcttaagcaatcctcctacctcagccccccacatagctgggactatgggcacatgccaccacacccagctaatttttgtacgttttgtagagacagggtttcaccatgttgcccaggctggtcttgaactcctgggctcaagcaaactgcctgcctcagtgtcccaaagtgctgagattactggcatgagccagccaccacatccagcctaatttttaattatgttttgttgttgttgttgttgttgttcagttgtaaggtttcattacatattctggatactagacccttgtcagatgtatgatttgcaaatattttctttcattctatagattgcctttcactttcctgatcatgccctttgatacacaaaagattttaattttgatgaagtccacct

SEQ ID NO: 21243 - DNA, 1046 bp, Homo sapiens
cgatgctgagctgagccagttttctcatctgtaaaatgagtaaagttaaaaatagttgtgtctaccagccaggcacagtggctcacgcctgtaatcccagcactttgggaggccgaggccggcagatcacttgaggtcaggagttcgagaccagcctggccaacgtggggaaaccccatctctattaaaaatgaaaaaattagccaggcgtggtagtgggagcctatagtccaaactacttgggagactgaggcaggagaatctcttgaacctgggaggcggaggtggcagtgagctgagatcgtgccactgtactccagcctacacaacagagcgagaccctgtctcattaaaaaaaaaaaaaaaaaagactgttatctaccttttagagttgtcttggataatcaaatgagattgtccagatcactttgaaaatgccctttgtaaatgttaagttcttataatgtgtccattacagtccaggagggtgtcctgatcactgcccctctactccccagacatgaacctcccctcccacctcatctcctcactccccctgcattcactcctgtccccacactgactgcctgttgttcctggaatttaccaggcctccaacctggcacttgaagttcctgcctttccatcagtggtgcccacaccacccagatgtctacaaagttcacccttgtttcctccaggacttcctcctaatatgtcttatccatctcggagcaccctataacgtggcatcttccagcacccactccctcgctctccatcattttctccattgcactcagctccagctgacatatattgacttgtttgtttattattggtgtctctggagggcaggggctttgtttcattcactggtatatttctagccactagggcagtgcctggcacgtaggaggagtcagcataatatgaagactgaatgaatgaatgaatgcttactggaggcatacagcccacggtcatctggcccctcccagctctccagcttcctgccaggcctctcgccccatctccagagctga

SEQ ID NO: 21244 - DNA, 1025 bp, Homo sapiens
acttaacccttggtttggggtagattcaagtatggttagtcccatagttggggtgggctggggaccctcagaaaaaggtctctggagcatgttgtcatattacaggaggaggccctcctgtttctgctccttcatggtcctcagtttcccccaagtggctactgactatccccatgaggcagcatactgactccatgaggtaaagaggtcagctttgaagtcaggttgctgggttgcaagctgtgaggcctttcacacttctttgtgcctgtttcctcgtctgcagaatggtaatgatagtagcaacttcagagttgttgagaattaaatgagatggtgtctgccaagtgcccgcactggagcctggcacacggcgtcagcgccgctcctgttgtctctcctagagcccagctgcaggggtaagggccttggcactgaggccgttctcgcgatgctgtcttacggtaagaaagtgtgagcagacaatgcgggaagtgggcaggccccaggtgaactttgttcaggtgtgagggttgggggcaggtgaaggttcctcctctgcagcttgggacaggagggtgggggcaggcgcctccttacttgcccctgtctcatctcctctgcgaggagtgaccacgctaggtctgaccaagtttgaggctaaaattgggcaaggaaatgaaccaagcatccggatgttccagaaacttcactttgagcaggtaaggatgtcctggggcagagtggggcttagacctgggtggtgggcctggtggtggtaatactgtaacttagcaggctttgttctctctggctcacgtaggtggctacgagcagtgtttttcaggaggtgaccctcagactgacagtgagtgagtccgagcatcagtggcttctggagcagaccagccacgtggaagagaagccttacagagatgggtcggcagagccctgctgatggctgggccttgtgggcagccactctgtgtgagcagggtgttgggcccatacacttcaaagaccag

SEQ ID NO: 21245 - DNA, 1098 bp, Homo sapiens
cttttcatactaagttttcaaaatccagtgtgtatttgtcttggttccgatcagccacattccaagggctcgacagctccttgtggcttgaggctgctgtgtgggactctgcagcttagagaccgggtcggggagtgtgtgacaaatacctcgaagggcagggaggcccagcccacatggggcactcatggactgtgggggacacgtgagcacggggtggggggagggtgtcacacgtgccacgtggcagagttgagtatttgagcaggtagctcccactgggagctgtgttggctgcatagggtctgtgcccggcaggtggcggtcgacctccgccttccagactctggtccctacatgacacgccttattcttcaggtttcctagccttctgttcaaccttccaccctactccagaagagaagggagccaggcgaccccctccaccagccacagtccgaggctggccagagttttctttctcaccagccttatcaggcaaactgccaccctttgtccctcacttaacctctctgggtctcagcttcctcatctgtaagctgagcagcttgaaccctgacatctcttgagtctgagtggagtcattctgtggcttgggagctggttggctgagcgtgggctctgctccctgaggggaagcccaccttctccacaggcctccattcccatctctgaggacccaagggagggtatctgccccttaagaccctaaggggtatgaatgtgtcctaatcatggctctgggcttcccacacccactctttccaagccactccctgacgtggtgctaaaatgcttgttgaatgaggctgaccttcccacgtggccagagaggtgtggccagggggctgggccccagtgcagcctctgcagccttgtccctctcctgctgcagacatgccctgcccctcttcacctccctcctcaacaccgtgtgtgcctatgaccctgtgggctacgggatcccctacaaccacctgctcttctctgactaccgggaacccctggtggaggaggctgcccaggtgctcattgtcactttggaccacgacagtgccagcagtgccagccccactg

SEQ ID NO: 21246 - DNA, 1170 bp, Homo sapiens
tgcggctgggtggcagcgtcgcagggtcccacgcaggcggcgcggcttccggggcggcctggaggccagggcagtgccccgggggcccggcaggtggcgcgggcgagccgacccttccccggcgccgcgcgaggagatgagctcacggcgggccccgcagcgccggacgctggttgcgcgctcccaggcgccgagcggccccgggcacgcgcgcgcgccaccggcccggcaggtgggtcccggctcccacgccgcctctcccgcccgcgggaccctgggccgtgggctccgcagcccgccctgtgcctccgggaggggcgttccgggcgcggggggaacggccgagggctggagaccctaaaggcgcctcctacggccagaggggagcctccggcgggagccacctctccggggcgcatcatcctgccccccagtaagaggaaggctccagaatggagctcaggaattaggagtctcgagtgcgtagggccgggttactgccactcgggagccgatccgaccagcctgtcccagggagaagctggcacgggtctggggagttcaggctgctcccggcaggggcggcggacagggcgcctgcgtccccacccacgcaggccggccccatccgggggatgcagcggcgggtgttgagaccgaaggactcggcgaaagccagaaagagagggttggggagaggggctcggagacctgctggggacagagtcgcaccgcttggagttcccagcctggccctcacccggcatcttcctgggccagcaacgtcaggccggtttatttaagcaactgtaacgtccgcccgcacacaccctgccccagtctactcctgcctcctgctgggactggagggtgggcgctttcctgcttcagcttctcgctcttgtgtaatcccacaagcgagggatttctaaactgagcagcaggtgcctggctgatgcccagtccccaccagaagccaagcctggtgggccttcagccaaccaccgcacgccacggaccgcccaggagtccctgtcccgagcgcgccgtcagccccgtccagggcctgcaggacggaacccgccctgcgctccacacctgaggccgctcccttcgcctcttctcctcaggtgctgtccttattcccagcccagtcaagagctaccgggg

SEQ ID NO: 21247 - DNA, 1111 bp, Homo sapiens
gaaaatagttttcccatacgagggcatatggttgtcctcacaagcagcagtgttctggagctgtttggtgggtgacccgtacttgcggtaacccagagaagccatgaggggatccaggactgtatcactgtagattctggaggtcggttggaagatctctagaggagtctaataaaaggttctgttgctgcttagttctgctgtgacacctctctctcccagaaagtagactttgtcttcgtcaggctcccttattctcctatgtgtttgccattttccagaacctcttctccaggtttctctcttagaaaaaccaaaccaaacaaaaaaactggccgggcacagtggctcacacctataatcccagcaatttgagaggccaaggtgggcagatcacctgaggccaggagttcaagaccagcctggccaacatggtgaaaccccatctctactaaaaatacaaaaattagctgggcaacgtggcatgcgcctgtaatcccagctactcgggaggctgtggcaggagaatcgcctgaacccaggaggtggaggttgcagtgagccaagatcgcgccactgcacttcagcctgggcgacagagcaagactccgtcttaaaaaaaaaaaacaactaatacttgccattcttctttctccttccttactgagggtttcattccagatgtttgggagcctgaattttcattttcagagataatttctgtttcattttaacagagtttaacataatgctggttgtttgaagttaaaaggagtcttatatccgtataactgataatacttcgagtgaaaccgttcacagacctaaaagatagcataattgtcttgtaactatctttttaaagggaaaaggaaatgattgggtttttttgttgtcttatttcttttcaggttttgaacgaagaatgtgatcagaactggtacaaggcagagcttaatggaaaagacggcttcattcccaagaactacatagaaatgaaaccacatccgtaagttaagctccattagtcttggaagggttggacccacctccttgtttcaaacactctttttaaaattgagatcactgggatggatgtcatactttttat

SEQ ID NO: 21248 - DNA, 1029 bp, Homo sapiens
tctggaagtttgaataatagctgtcacatcttttggaagactgcagtgggctcttccagcaattcttgaatccagcagtccccaacctttttgctaccagggactggtttcatggaagacaatttttccatggaagtggggggtcgagatggttcaggatgactgttcaacctcagatcatcaggcattagattcttacaaggagcgggcaacctagatccctcgcgtgagcagtttacagtagggtttgtgttcctacgagaagcactggcaatgtggtgaaaccccatctctactaaaaatagaaaaattagccggttgtggtggcaggcacctgtaatcccagctactcaggaggctgaggcaggagaatcgcttgaacatgggaagtggaggttgttgcagtgagcagagatcgcaccattgcactgcagcctgggagacaagagtgaaactccatctcccccccccccccaaaaaaaaagaccatgaataaactttgcttgtacaactctgaataccagaaaacaatgtctcttccaagttctgagggaaaatgctgttcagcccaggattctgttgaaatctatacccagccgaaatagccttcaagtataaacatagaatcaagacatttccagacatgcaaggactcaaaacatttgcccctcacgcaccctttcgtttttgttttttttttgagacagagtctcgctctgtcacccaggctggagtacagtggtgtgatctcggctcactgcaacctccgcctcccgggtccaagcaattctcctgcctcagcctcccaagtagctgggattacaggcatgcaccaccatgcttggctaattttttgtatttttagtagagacggagtttctccatgttggccaggctggtcttgaactcctgacctcagatgatccgcctgcctcggcctcccaaagtgctgggattacaggcatgagccactgtacctggccagaattttttttgttgttgcccaggctggagtgcagtggcgcagtc

SEQ ID NO: 21249 - DNA, 1094 bp, Homo sapiens
cacagggagggaagtttacatagtggttacagacatggactctggaattggtcagacctgggttccgatcctgcctcttccacttgtaagctctgtctccttgggcaaggtatctggtttttctgggtggaccttagattcttcatctgtaaaatggttatagtacctatacaccttacagagttgtgaagatgaaatggcctaatttgtcatgaattctggtacataataaatctttactaaatgtaagctgctgtttgctaaaggagagactaactcatttctcaaacatgttgagtgtctacataggtatgtaataaaaccacagccactactgtgaaggatatgggctggcgatttaagcccagttggtttgagttcactagtagaggcaatgtacaaggcagcttggtggctatgcgtactattaattgggcaaggtaatatgggagatagaatattttttggaacatactgagttccatttggttatggttaagtttgtggttcttgtgagacatagagggaaagagatgtattgggctgttagatatgctggtttaggctgcagagatttgggcatatccaaatagaatacaggcagcaatgaagtttgtgcagaggttggctctttctaaagtgaaactgtagagttagaacaatatcaaaaagcaaaccttgaggaatgccaaactttttttttttttttttttttttttttttttttttttttgagacggagtcttgctctgtcgcccaggctggagtgcagtggggcgatctccgcttgctgcaatctccacctcccgggttcacgccattctcctgcctcagcctcccgagtagctgggactacaggcacctgctaccatgcccggctaatttttttgtatttttagtagagatggggtttcgccatgttggccaggatggtctcgatctcttgacttggtgatccaccctcctcggcctcccaaagtgctgggattacaggcgtgagccaccatgcccggcccgctagtttgctcttaagctcagcaaaaattcagagttgtgatttaataagcgtgagacttagtaaagcattttgtaaa

SEQ ID NO: 21250 - DNA, 1049 bp, Homo sapiens
catcaactgacatttcagttcttccaggcctggaatagtgggtttcagtcaacaaggcaccaatatctttttaaatttgcccatagtagccagcttttggggtgtatgaatattagtggcagccttggagcttgaacgttgcatcaatgacctctgttaacagctaaccatatgatatccacaaaataatgaatttacatttctcatgggccctggctttagccattacctcgagagtcagtctgagcatcacttttaagcattcattcattgagtgtccctgtctcttagtactgtgatggtccatgttttgagtaagtaatgccatccttcaagcaaaggaacatatatatgctttgagttgtttttctggtagtggtaggtacatttgcatcagagtcagtaagttcttaaataccatcagccatagtcaaaaacagttttttttttttgagacggagtctctgttgcccaggctggagtgcagtggcacgatcttggctcactgcagcctctgcctctctggttcaagcaattatcctgtctcggcctcctgagtagctggggactacaggcatgcacccccacacccggctaatttttttttttttttttttggtggagacggtttcaccatgttgcccagactggtcttgaacccctgacctcaagtgatcagcccgcctcggcctcccaaagtgctgggattacaggtgtaagctactgcgcctggcccagaaacagtttttaaccagtgcaactcatacccatccatccagagtccttgtctcagtctcacattctgatctaacagctgagctcagagcagcaaaggaataaatgggagtttttctcaatataaggttgactatgccttcttatattttgccttcttaaattttcatatctttggctcatggactgtggtgtaaagaaaccttcaattttcctataacattgtgctgctactcctgttccagcttaaaatcatttaaatacgttacttttgatatgtcgcattgtgaactcctaggttaggaatgtctagg

SEQ ID NO: 21251 - DNA, 1116 bp, Homo sapiens
tcagcctcctgagtagctgggattacaagcatctaccaccatgcccagctaatttttgtatttttagtagagacagtgtttcaccatgttggccgggctggtctcaaaatcctgaacgcaggtaatatgcctgcctcagcctcccaaagtgttgggattatagaagtgagccaccacggtcagccttattttcatttttgaaacagggtcttgctctgtcacccaggctgggatgcggtggcatgatcttgactcattgcaaccttgacctctcagtctcaaggaatcctcctacttcagcctcctgaataggtgggactacagctgtgcactaccacacctggataatttaagggtttttttgtttgtttgtttgtttgctttttttttttttttttttttttttttttggtagagccaggaggtctcactgttgcccacgctggtctcgaactcctgggctcaagcgatccgcctgcctcccaaagtgctgggattaccgacatgagctaccgcgcccggcctctgtaaataaagcctttctatacacaaatgaggtcaaactagagagagaggccatttaggaaaaattgctgtcttttcctctttttttatcatatacatagatctctttctgaatggtctcccaaggagtaattgttgtctccaagtaactgaatttcaggtgacttttactcttcatactcttgaattagttaccatatgtatcagttttattatttattttattttatgttatgttatgttattttgagacaagagtctctgttgcccaggctggagtacagtggtgtgatctcacctcactgcaacctccacctcccgggttcaagcgattctcctgccttagcctcttgagtagctgggattataggcatgtgccaccacgcccggcttattttttgtatttttagtagagacagggtttcaccatgtcggccaggctggtctcaaactcccgacctcaggcgatccacccgccttggcctcccaaagtgctgggattacaggggtgagccaccatgcccagctatcagttttattaaaagaaaaaagttacattcagatagtaagcagtttacattctgcatctag

SEQ ID NO: 21252 - DNA, 1050 bp, Homo sapiens
agataggggcattttaataagtctcctaagaaaggaatgccctttgattatgatcctcaatggagaagatcagtggagagccaatccctagtttggttggttagagttttcacaagttataagtcctgagtttcagtgcacaagtcccatttcaggggttcaaattacctaatctaaataaaaagccaggcatgctcgtgcaagcctgaaggccccacctgctcatgaagctgagagaggaagattgcttgagcccaggagttggagcccaacctgggcaacaaagcgagaccccatctccaaattaaaaaaaaaaaaaagtgtttttcttccccccccccactattttaaagtcctagtatcagtatactctgtagaaccatttattttttcctcccaaagtgctgggattacaggtgtgagccattgcacccagcctttgccttttggtaagaattcttatcaatcttgttgactaaaccagaatattgcatttaatctttaagaaggaggttagtttgtggtcaggcgtggtggctcacgcctgaatcccaacactttggggaggccgaggcgcatggatcatttgaggtcaggagttcgagaccagcctggccaacatggtgaaaccccatctctactaaaaatacaaaaaacagccgggcccggtggtgcgcgtgcgtacctgtaatcccagctactcgggaggctgagggaggagaatcgcttgaacccgggatgtggaggttccagtgagccaagattgtgccattccactccagcctgggcaaccgagagagactccatctcaaaaaaacaaaaacaaaaaaggaagggagcagtttgttgtttgagtgctcttaaagcaaataatctgcttgctttttattatattcattttgtcagctgaatggactatttccaaataggtgctgagaatgaactttcatttcctataaaagattctttttgggagactggctgaagatgattcttcctcctgtttggagaaagaaatgagtaaggaaatgtagtattccttcagaatct

SEQ ID NO: 21253 - DNA, 1043 bp, Homo sapiens
ggtcatggccgtgggttgctctgggggtcagggcagggtcctgctctcttttttttttttttttatctctgtcgcccaggctggagtgcagtggtgcgatttcagctcactgcaacctccgcctcccgggttcacgccattctcctgcctcagcctcccgagtagctgggactacaggcacccgccaccacgcctggctaatttttggtatttttagtagagtcagggtttcaccgtgttagccaggatggtctcgatctcctgacctcatgatccgcccgcctcggcctcccaaagtgctgggattacaggcgtgagccactgcgcccggccaccaagggtcctgctctctgcttctcttctccctctcccttccaggagttgtttaaaggctttgcccgccacctctcacacttgctgactcagaagacctctcctggaaggagcggtgagcgctggcattgccagggccaggaggcacttgggagggtggtctacagggaggaggctaacgctcacctcctcatgcccccaccctgaatctgtagtgaaagaagaggcccagaacctcatcaggcacttcttccatggccgggcccggtgcgagagcgaagctgactggcatggcctgtgtggcccccagagatgaccaactgctggctgggcagggcccgcgtcctcccccagattctagcatgggtcatcctgggcctcacctgctgatgccagggccatcgtcttttctcagtccttctcctttccaaccatacttggctttggggatgaccccagacaccccctgaatccaggtcagaggtcagcccacctttctttctgcttgcaaagcctatagacccttctcagagcggtcctcatggctgggttttctgggacacatgtcgaggacagaaggtggagggtggtggagctgctgctggaagaaggggaaggaagagtggcccctccccgagttctaagtcaggatgaggcccacctgtccaaggtatcggaacctacccaggggaccctcagatcctccaccc

SEQ ID NO: 21254 - DNA, 1063 bp, Homo sapiens
ggacacagccaaaccatatcagaggtgaagggtaaagagaacaaggggatgtgcctttccaggcaggataggagcaggacgctgcctggaactgaggctttgagtagcatcaagctggaaggtagaagacaatggagccagcccttgagatcctgggggactggatttccatcctaggattccatgcccagccaaactgtcagtcagggatgaagcccgaacagagacacttgcagacacgtcagcctccatcctcaggaagcacccagagggcagacttttcaaaaatgaagaagtaaatcagtgaagggaaaagggaggtctgggatccaggaaacggggaattcaacacaaaggagaagtaatcaagcatctgcagtctccagaaacatgagcacaaacaagctggctgggcgcggtggctcccgcctgcaatcgcagcacttcgggaggctgcaaacctccctaggaaatgtggtaacacacctctctaccaaaaatacaaaaattagttggccatggtggtgcacacctgtggtcccagctacttgggaggctgaactgggaggattgctggagcccaggatgttaaggctgtagtgagctgtgatctcaccagcctgggtgacagaacaagaccctttctttaactaaataaataaatatttaaaaattaaaaagttacacaaggcttagcaatgtcttgagttaaaaaagggaacctggggctggacacagtggctcacgcctgtaatcccagcactttgggaggccgaggcaggtggatcacgaggtcaggagttcgagaccaacctggccaatatggtgaaaccccgtctctactaaaaatacaaaaattagctgggtgtggtgggcacctatagtcccagctgaggctgaggcagaagaatcgctttaacccgggaggcagaggttgcagtgagccaagattgcaccactgcactcccgcctgggtcacagagcaagactctgtctcaaaaaaaaaaaaaaaaggaactcaagtggggcgaggtggctcacacctgtaatcccaacactttgg

SEQ ID NO: 21255 - DNA, 1033 bp, Homo sapiens
cctggtttggtgtggtgtttgccattgcagagcaagctgccacgaagacccctgggcatgattttgcttgtatttccggaagtggggttgctgggtcatagggcaggtgtaattttttttacttgaaatgttccacttcttgttctgggaggtggttccaagggtgtctgcttttggccaggcgcagtggctcacgcttgtaatcccagcactttgggaggccgaggcaggcggatcacaaggtcaggagttcgagaccagcctggccaacaaggcaaaaccccgtctctactaaaaatacaaaaattagccgggcatggtggtgtgcgcctgtaatcccagctactggggaggctgaggcagaagaatcgcttgaacccaggaggtgaggttgcagtgagctgagattgcaccactggactacagcctgggtgacagagcgagactctgtctcaaaaaaaaaaaaaaaaagggagggctgtctgctttttgtaacttgaaaaactggacatctatgttatatgtactcatggataaatatttcacaataaaactttttaaaaggataatacgtgtaatatacatacccccaatatatataatgtttttatatttgtaaaaaaaaaaaacctcccacgacgaccccaccccgatcactgccgtcattgcagcctccatcttgtggccctgctcctagcctgtggctgtttgttcaagagcagggcagggccttggattggcacagcccaggcaaggactttccagcaagatcctcaggtgggagctccccagacatgggaagggaatctgacatgtgcagccccacagccaggaggcgggcaggaccttgctgaccagctaggggcaatggtgggagctgaaagcccagccaggcaggatgtattggcctggccagatggctgtcattgctgtccccacctcatagtccctcctaatccaaggctgcagcagaagcacccaacgggctgagccgcgctctgaaaggggcagagagaggaagagttggcccctt

SEQ ID NO: 21256 - DNA, 1887 bp, Homo sapiens
ctggccccagccctgccgcgcgctgaccccgccccgggcagctgctggagctcttctgccagaccaagggctgttgtgtttgcagcttgtgcaccatgagtgagggtcacctcctcaagtgggtgctgccgccaggagcaggagggggccggaccccccgcagcctggccaccaccgggtgcagtggctcacgcctgtaatcccagcactttgggaggcggaggccggtggatcacgaggtcaggagattgagaccatcctggctaacatggtgaaaccctgtctctactaaaaatacaaaaaattagccaggcctggtggcgggcgcctgtagtcccagctcctctggtggctgaggctggagaatggcgtgaacccgggaggcggagcttgctgtgagctccaaagctcaggagcggggagctggaagtcgagagctgggaatcattagcgctaggaggaagagaaggttccaagctggagctcccagggagatggggaaggtcgggggaatggcagccctgtgtggcacctggagacaggggtgccaggaagagaacgggcaggatgcccatgctgatcagaggctcagtacgaggacagaaatgaccttcagcatcggtactgtggaggtggtccgtgcccttgacaaaacccatttcagcagcgaagacaggatgtggaatcattcggggacagaggaggcctggggctaaggcgtggatggaggatggcgcagggacgctggatgggacaggaagggaaggggtggccaggaggcctgatgggcagggagggatgggagagtgcacggctgggggtcggtgaggtgggaggactgagacagaggtggctggaacaggagagggcacgaaggcagtggtcagagaaggaagaatcgatgcctagaatggagattttagagctggtgacagggccagggtgagttcacaggagcggctgagatgaggtgaaggaaaagggctccagagtgttgcgggacattccttgtagctgctgaagccgccgaggaggatgagacgagatgtactgctcatgggcgggtgcagaagactgagctaggcacggaagtttgagttggaggccggtagatgagggccatgtggaggaagggagcgacaggggcagccagtagcaccaggggagccaggattttgcaagagagagggaaagggacatgggggtgcctgtccctgggggagggttgggtgccctgggagagcctgccctccggcctcctgtgttcctgtgtgaaatgctggaggctgggggcccggaggagctctgggcttaggaagatctgaggactttgaccaaattatcaacttctctgagcccgtttcctcctctgtgatgtggggatagtaatggtccccatctcagtgcattgcgggaggagcagaaacaaggtggtgaagcttttgaccaggtgctgggaatggagcccctgggacctgcgtggtttgtcctgctctcatgagagcacggtgttttgattcccaagggactcagggagcgcaaccgaataggggtcccttcctcccctctcagtctcaaaactagggccagggactggccggatccccagaagaatctagtttatccagcaagtaactgcccacttgtcagacagctttggtgctttgggaggtccctgcagtcagcttctcaagccccagggcctcctgggccactgacccctctgcagtgagacagggaccaacggctttagtgtttggggtcctccctgcgaggcctcctgagccagcattatcgctttcctgtattgatgggtggggggttaggcccagagaggacaggtgcttggcctcagcttgctcagcatgcaagaggtagaaatgggaa

SEQ ID NO: 21257 - DNA, 1099 bp, Homo sapiens
tcctatttgaacgacctgcccagtcagcgcatccagccacagcaggtagcagtctggccaaccatggtggatatcaacagccccgaaagcctaaccgaagcatataaactccgtgcagccaggtgagctctccctcaagagctagaatacgcagcagtggggctggggccctgacagatggcaagaaggcatgagtactgttgatcatttcctcagacctccaatctatgtcttaacagattagtagaaattgctgcaaaaaaccttcaaaaagaagtgattcacagaaaaagcaaggaggtagcttggaacctaacttctgttgaccttgttcgagcaagtgaggtcagtggtagttctctctttttccccttccctgccctcagcatcccgcattttctggtacagaaaccctagtcactgtatattgaatctttttccaaggttctcaaactctggtgttttctttttaatcttaggcacattgccactatgtggtagttaagctcttttcagaaaaactcctcaaaattcaagataaagccattcaagctgtcttaaggagtttatgtctgctgtattctctgtatggaatcagtcagaacgcgggggatttccttcaggtcagtattttctaagtataagtcttttttgttgttgttttaagaaaaataattgttggctgggcacggtggctcatgcctgtaatcccagcactttgggagcccaaggcgggtacggtgatcacttgaggtcaggagttcaagaccagcctggcctggtgaaaccctgtctctactaaaaatacaaaaattagccaggtgcagtggcacatgcctgtaatcccagctactagggaggctgaggcacgagaatcatttgaaccctggaggcagaggttgcagtgagccaagatgaaaccactgcattccagcctgggtgacagagcaatactctgtctcaaaaaaaaaaaaaaagaaaaagaaaaatagccaggcacagtggctcatgcctgtaatcccaacactttggccaaggcgggcagatcacctgaggtcgggagttcgagaccagcctgaccaacatggagaaaccccat

SEQ ID NO: 21258 - DNA, 1034 bp, Homo sapiens
gtggctcatgcctgtaatcccaccactgtgggaggctgaggcaagagaatcgcttgaacttgggaggcggagcttgcagtgagccaagatcgcaccactgcactaaagcctgggtgacagagggagactccatcacaaaaaaaaaaaaaaaaaaaaaaaagcctcaatttaaatctaagacctgccacatacgagctgtgtgacctcaggcagattcttaacctctcagtttcccatttgtaaaatggagatagtaatagtaactacctcacagtgcccttaagaggactaaataagttaaaataccaagtgcttagattagaacctggcatatagaaagttctgtataaacatttacttactactttttttctttttctatgtcacgtagtgaaccagaaccacagattttggattttcaaacccagcagtataaactctttccactcctggccactgcctatgccttccagtttgtgggcgcatacatgaaggagacctatcaccggattaacgaaggcattggtcaaggggacctgagtgaactgcctgaggtatgagtttggtctcattcactcatgggcacccttctgtttcgtggttgcctgttggatgaggtccagagataactaaatgttggtatttcctgaaaagaagtatgtattctgagaacttcttctggttgaaagtagatcagatatgaagatctgtggggtttgttgttcagtatttttagtgttatcagaaatactgtaccatgttgattatttgtcaatcaaggaaatgtaagtggtgaatgtttagccaagtagaacagcttagatgggcatgggtagtgttctgtattcttctggccagtcggacagctgtgcttcttcagtttgcatgtgtggcagctgtgttttgacagtggccaagatgttagaggaggggtgtgttttctcattggttctcgggctctcagcaccacagatgtcctgacagatctgtgcttgtcctctcagcttcatgccctcaccgctggactgaaggct

SEQ ID NO: 21259 - DNA, 1038 bp, Homo sapiens
acattatatattttatttatttataatttatatgtaagaagccacatgtagctagtgattactgttttggacagcactgccttaagggataacaaggaagtagtttaaattaatattcttatttttatcctaaaattttctctacgtaaatgtatgagaaataagtagaaaagaaagtaataactattagcttaagggaatttctttctgaaagctaggtgtgatgctgtcagcagaaaggctttctggacacatactattggtttagtctagtgttagatttaacatattctttcttcttttttctaccctttaaaaatgtatgaacgtttgcccacccctcccttgttctctttgatattacagttggaaagacttcaaatcatgcaatagttcttgcccagctcatcactaaggggaaatgctatggattacatgcctttatcgtacctattcgtgaaatcgggacccataagcctttgccaggtaagaactgttcatctgatgttgagatgaaaatgaaactgagcactttcttctgcaaaaggtagaatgcccaactgaagaggcggagcaaaagccagaaattccagagcataaacatctcgtgactgtcctttcatctgtggtaggaattaccgttggtgacatcggccccaaatttggttatgatgagatagacaatggctacctcaaaatggacaaccatcgtattcccagagaaaacatgctgatgaagtatgcccaggtatgttttgatagaaaataaagcagaggcatcaaacagtggagttgagtggctgttactcacaatagggttagaatggtctgttcttttagaaggtaataacagcagggcacactggcatattcctgttatcccagcactttgggaggctgagtgcgtggatgacttgagcccaggagctcaagatcagtctgggcaacatagtgagaacccatctctacaaaaagtaaaaaaatctagctgggtatggtggcacacgtgtgtagtcccagctacttgggagactgggg

SEQ ID NO: 21260 - DNA, 1023 bp, Homo sapiens
ttgaactcctgacctcaggcgatctgcccacctcggcctcccaaagtgctgggattagaagtgtaagccactgcacccggcctctttctcgctctctttctgtcttcttcccttcctccattcctttcgttcctttctttctttattcctcacccatggactggggtcacattgccttgtttcgtattaccatctatttaggaatatagagattgtatgatacatagttatccttgaagctgatgcagtatcctggcaaattgccatcattaacacttaaatatgaaataatgcacctttctttgaaactggaaagaggtagtaaacttgatttttaagtcatcagtctttaccgcactccgttgccctctctccctaggcttaacagtctcctcttccctctgcccaagtgattctcttccctgttggacttctcatgagacttgcttccctggggatttgggctaaatttcaccaatattagtgataataatataaactttatgaaagctgtgttctggccaggcacggtggctcacgcctgtaatcccagcactttgggaggccagcgtgggtggatcacctgaggtcgggagttcgagaccagcctgaccaacatggagaaaccccgtccgtactaaaaatacaaaattacctgggtgtgatggtgcgtgcctgtaatcccagctactagggaggctgaggcaggagaagcttttgaacctgggaggtggaagttgtggtgagctgagattgcgccattgcgctctagcctgggtaacaacagtgagactccgtctcaaaaaataaataaataaataaataaataagacgctgtattctttggggtcatacttctggaatacctctcagaaatgaattactatattgagggacatgagcattttagagcttttgctgcatagtttgaggcttttcctgaaacacagaaccagttgacaatatattgagcaagctctgtacctgtatttccacagctccatcaacgtggtcactttaatt

SEQ ID NO: 21261 - DNA, 1055 bp, Homo sapiens
aaatctatgacacagcacagccaaggccaactactgtggattctgttttgtaagaagagagttgaggactaaatttcaatgtgatgtagagttaatccgtagtaatgttcattgaccattggggataaatttttacatgcccacattacttattgtaaaccctgaagacctttagcgatgtatgattctgccctggaatatgtatttactcttttggatatttgcttatattatctagggaaacatagttgaaattatttcttccttggagctcttgttaacagcgctataaataagtgttctatggagttatttttgctctttgaaacaaacaggtaaaacctaaataaagcaaaaaaaaaaaaccacacacattctaaaaaattcaaccaatcaaaccagcaaataacaccaacaacctccccttccaaaaattagagaagtttttatgctaaaacttaggtagaatttgcttagtggattaaatgtaaatacgaaatgaactgtgggaactgtggccttgaaataattagaagaagagagatcatcaggttctgctgctggctttttaggtagtaaaatggtaaatcttatatttaatttcataagaagggggtttacattttcctgaccttctccttgaaggccaaagctgtttggcaagaaggggttgtaggatgcagtttctaaaggaaggctgagatccttttctcttctctcctgtagactacatttggtcaattttgtggaacctgtgggcctcaattactccatgtttattcctaccttgctgaatcagggcaccactgctcagaaagagaaatggctgctttcatccaaaggactccagataattggcacctacgcccagacggaaatgggccacggttagtccacattgagggtctgtgggtaacccacctcaggacatcagttaacagtgattgctggcatttgacttttttctgctgctacctgtttgggattctatttttaagttgttaagtcaaaattcaacttcttgttttctcctagacattttccctggaaactgg

SEQ ID NO: 21262 - DNA, 1036 bp, Homo sapiens
gtggtgggtcatgcttgtaatcccagcactttgggaggctgaggcggggaggtcaccttaggtcaggagtttaagaccagcctggccagcgtggtgaaaccccgtctctacaaaaatacaaaaattagccaggcatgatggcgggttcccgtaatcccaactactcaggaagctgaggcaggagaattgcttaaacccaggaggcagaggttgcagcgagctgagattgcgccattgcactccagcctgggtgacaagagcaagactccatctcaaaaaaaaaaaaaaaaagtttttacttttccttctatggcagtaaaggtcatagtcatgaatggctttgccactgactgactttgtcatgttggttaagacgatggccaatcagtgagtctcaatttccccatctataaaattaccttgcaggaatattttaaggactcaaaaaatgatggcgggacctgatggctgacgcctgtagtcgcagcattttgggagactgaggtgggtggattgcttgaggccaggagtttgagaccagcctggccaacatggcgaaaccctgtctctactaaaaatacaaaaattagccaggcatggtggtgcatgcctgtaatcccagccgcttgggaggctgaggcataagaatcgcttgaacccagaaggcggaggttgcagcgagcggagatcatgccactgcactccagcctgggctggacgagaccctctctcaaaaaaaaagataactattacaatctaatttgcattttagaaaattaattctataaattaattcacagtataggtaatgaatcagagagacagaaaataagaagaccagttaggaagtaatttattttaagaaaaaatacatgaaataactgaataggattaacagcattgcaaataaacatggtgcagactttctaccctagaaccatggaccaatttataaccttgcagagaaggccccagggctgatgatcattgttgtgacttgtttgaagcctcgattggccactttttggtactatgc

SEQ ID NO: 21263 - DNA, 1070 bp, Homo sapiens
tgaagggggaagattgcttgagcccaggagttaaaggttgcagtgagctgtgatcatgccactgcactccagactgagtgacagagtgagaccctgtctctaaagtgtgtgcttgtgtgtgtgtagccataataactgttttaatatccatctctgctaattctaacacatatgccagtgttgagttggtctcagttggttgagttatctcctcattatgggtcatgtcttcctgcctctttgtatgcctggcaatctttgatcaggtgccagccattgtgacttttcctgcattggatggtacatatttttgtattttttttttcttttgagatggagtcttgctgtgtcgcccaggccggagtgcagtggcacaatctctgctcactgcaatctccgcctcctgggttcaagcgattctcctgcctcagcctcctgagtagctgggattacaggtgtgtgccaccatgcctggctaatttttgtatttttagtagagacggggtttcaccatgttggccaggctggttccgaactcctgcactcaggtgatcctcccgcgttggcctcccaaagtgttgggattaccggtgtgggacaccacacccggccatatttttgtattcttatacattttattgagcctgtttcccccaggacacagctacttaaaaacagtttgattgcttcaggccttgcttttatgattttatgatttgttaggtgggtccataggtgtgttcagtctagggctgattattctccatttctgaggcaacacttttctgagtacactctgctctgtgctacttgaatgatgagtttttccaaactggttgataagaacaggcaccatttccagccccatggcaggcagggcactgcttcttcaagccctgcaggtggttctttccccaatcttgggacgtctccccacatgcatgtactcatcaaatgcgtgctcatcactcggaggggatcctccacagacctctggagtgggagtgggctttctgtcatctcccttctttctggttatttttttttttttttttttttgagacagagcc

SEQ ID NO: 21264 - DNA, 1097 bp, Homo sapiens
tgtatttttagcagaggggtttcactatgttggctaggctggccttgaaccccttacctcaggtgatccacccgcctcggcctcccaaagtgctgggattacaggtgtgagccaccaagcctggccgtttttttgagatcaattaatttatggcaggctgggcgcggtggcttacacctgtaatcccagcactttgggaggccgaggtgggtcgatcacttgaggtcgggagttcaagaccagcctggccaacatagtgaaaccccgtctctgctaaaaatacaaaaaattagccgggcatggtaccacgcatctgtaatcccagctactcgggaggctgaggcaggagaatcatgtcaacccgggaggcagaggttgcagtgagccgagatcgtgccattgcactacagcctgggcgacagagcaagactccctctcaaaagtaaaaaaaaaattatggcagcacagaaaagggacaattagccaccagttagtcatctagtggctaattggaactgcctgaatagtgagtgggttgtcttttccaagttgcttcacctttgattgaacaaaatatgtggactgtctgaggggaccagggccccaggactgcatcccttagacatggggccatagacatggggccaccactctggaatggacgcagctgatgacacaaagcatggttgccaggaaaccctcaagtctttccttatgtggccccgccaagagtgagtgaatcctggcctttctaggttaaggggatggatggagtctagctggatcttaggaggcctcctcagcccgttgccaaggctccccttgtgatccttgtggtggcctttacttccccccgcccccgtggctcgcagggaggcgtgttgttacgtggaatcttcagggcacgcgggggcccccacgtttcaaacgtccgccggcgcggggactgggagtccagggctccagctcggggacccgaggccagcgacagacagcggaggggtggccatcgcggaccccgccggggagcggaggcgcagattccctggaggcaggagctctgtccagtgactcggccggacccggggcaggggcgc

SEQ ID NO: 21265 - DNA, 1029 bp, Homo sapiens
ctacttaaaatattttcaacttataatgatgcgtttatccagacataaccctgtcataagttgagagttatgttgagggtctgtatatgtctatttgcataacggtttgcttgggtactttaatttgacaccctaggagcatttctcttgaggctggaattcttcccttatgatctgagagttttgcatagcactggggctcactgtgtttctgcatggagaccatgccattcctaagatttttgtcttgtgttctgaggccatgtaacttttcctttgcataaaattagttaattttggtttataaaaactatactcggtggaacaaggttttgtagtttggaacttaggctgtgggaactcaatgttagataagcttttctgtgtaaccagcttggagaacagacttcagtaacagcgtttgttttccatcactgtgtgactaggtggtggtgacgaatactgtccctcatgaggttcagaagctgcaatgtcccaagataaagactgtggatatcagtttgattctttctgaagccattcggagaatccacaatggagagtccatggcctaccttttccgaaacatcactgtggatgactagctttcacgagggtctcgaccctggacctcctgagggaaacatggaaaaagcagtgccatgagtgatacagtgtttccttgcaagggaggactcgaaacagcctggagttagatatcttcttttgcccggattgatggggaggagggattaaaagagtcaggaagaagacagagctaatggataaatatcataacatggccttacatgtctgctgtcatcagccctgttccttaaaagttctagctgctttcttaaaaataatctgaaaatcttattgatactaaagaggagttaaaggcacataaagtcttaactctataatgttcatttagttgtttcagctccagggaaatggaggtattgatgttgaacctggttagggaagctgagcgcctgtggccctattactatccagttggcctct

SEQ ID NO: 21266 - DNA, 1092 bp, Homo sapiens
gaggcgggcggatcacgaggtcaggagatcgagaccatcctggctaacatggtgaaaccccgtctccactaaaaaatacaaaaaaattagccgggcgtggtggcgggcacctatagtcccagctacttaggaggctgagataggagaaaggcgtgaacccaggaggcagagcttgcagtgagccgagatcgcgccactgcactccagcctgggctacagagcaagactccatctcaaaaaaaaacaaaataaatgaataaaaaacaaaagttagctgggcatggtggcatgcgcctgtagtccagctgtttgagaggctaaggcaggagaagtgcttgaacccaggaggcagaggtgagctgagatcgcgccactgcactctagcctgggcgacagagtgagactgtctcaccaaagaaaaaaaaaagttatacattcgtttgcatgttaaactaaatgcttccccaaatacaattactgtcttctggaattcctaccatttgtcacactgtactgttacctgtttacttctctccaggctttttttggggacagtctcactctgtcaccccggctggagtgcagtggcacagtcttggctcactgcagcctctacctcctgggttcaagtgattctcctgcctcagcctccctagtaggtgggattacaggtgcccaccaccatgcccagttaatttttgtatttttagtagagacagggtttcactatgttggccaggctggtcttgaactcctgacctcaagtgatccatgcacctcagcctcccaaagttttgggatttcaggcgtgagccaccactccccaagctttaaactcctcaaggacaaagggttttcccatggtttgcactgaccccaggccagtgtccgtcagctcagctctgctgaaaagcttctagttgttacgtgtggtgcataaactgctcctggttcatacccatcaagagaggtttttgcactgcattttatcttgcaccgtggcctgtttctagcctatctctgtttcagagatcgtcgcccttgcttccctcagggcagggggctgacacctggggaatcctggcctgcttg

SEQ ID NO: 21267 - DNA, 1038 bp, Homo sapiens
ctaccatagacatgcagagctagatcgtatacctcctcggaggcggacatgttgggtcctggccaaaaagttggaaacacctggggccactaccgaggtaggctgctcctcccaagaaagtgagaccgaaagagctcccgtggaagcggtcaaagcaggggcggggcgaacctgtgacatgcccctcggaagaacaggcttttagagagtcgccaggctccctgccctcatccgagatggcggcctgagggcgctctagccgacgctcttcggatgcccggagggggcggtggccttgcctctggctctgaggcggcggcgccgggcgctgcgaaggctcggccgctgtagtcagtggtgtggggtgcgcaagggcacggacctcggagctctccccgcttgcgccgagtttctcagcgccttccccacccaaaccggggtctcgcagtcggaagcactcagagtgcagccccgcgcggggccggtcgtaaccgcgccgcgggccggacgatgcccaagaagctgctgctgttgcccccgccctccgcgtcctcggctttccgcgtcccgcgcgcccgccccgttcccccgccggccatgaacgccgctcgcaccggctaccgagtcttctcggccaactccacggccgcctgcacggagctggccaagcgcatcacagagtaagggggcggtgggagggccgggccgggggcggcggcgcctagctctccttcgcgcccggagggacccgctcccctccacccgccccacctcctgcacctggggcgggaggcgcgggccttcccagccggacaaagcttggaggtgacggataccgccccccgctccccggttttgcagctgggaggcttggggcggactctcggtgacctcagccccccgccccgtgactgggtccgcggcctgcctgcctttcgtctccgcagtcccacaccccggggcgggccgagctttctggagccccggagtgcgtgtcttggggaaaggggctcagggcttggcttcctttcccacggc

SEQ ID NO: 21268 - DNA, 1056 bp, Homo sapiens
catagagtctgagattgaggagtcagactacgattcggtagaaggcagcaccagcggggcatcctcggatgaatgggaagatgatagtgacagctgggagacggacaatgggctggtggaggacgagcaccccaagatagaggagccccccatcccacccctggagcagccggtggcccctgaggacaagggagtggtgatcagtgaagaggcagccacagctgccgtccagggggctgtggccatggctgcccccatggccgggctgatggagaaggctggcaaggacgggccacccaagagcttccgggagttgaaagaggccatcaagatcctggagagcctcaagaacatgactgtggagcagctgctgacgggctcgcccacctctccgactgtggagcctgagaagccaactcgggagaagaagtttctggatgacatcaagaagctacaggaaaacctcaagaagaccctggacaatgtggccattgtagaggaggagaagatggaagcagtgcccgacgtagagcgcaaggaggacaagcccgaggggcagtcacctgtgaaggctgagtggcccagcgaaaccccggtgctgtgccagcagtgtggcggcaagcctggcgtcaccttcaccagcgccaagggcgaggtcttctccgtactggagtttgcaccctgtgagtcagcccttgcctggtcttcgccttcccccgccttctcggggctcctgtttgtgtcaccagatctgggtgcagggtggttagtcccctcgccagaccccagctactgccccagggcaaaccatttccctgtgtggtcacagtgctgaggccagcagcggcgagtgggaagtctgtgggtgtgctcacctgtccagccaggttggcagatggagctccagggcctctccatgagggactgactattctcttcccccctctagcaaatcattcttttaagaaaattgagttccagcctccagaagccaagaagttcttcagcacagtgcggaaggagatggcgctgctggctacctcactgcctgagggc

SEQ ID NO: 21269 - DNA, 1026 bp, Homo sapiens
acatgattgggcctggtccctgcgtcccctctctggaaggaggaggccggcattaatgagcaatgtctccctgtggcctattatcatggtatagatggggaaatgggtatgtgctttgcggaatatcacggtgtggaggctggggggcttcgaggagctgggtggatcagtgtgggggtgcctggggccctagcctggctcctcacgctcccgtcatcccctgcttctgctcatctggtcactgggctccagccaggggcctcacaggcagatccgccccccacctccctgtaggcacgcgggcacacacgtgccatcaccccttccacacactcaggtgcacaggcgtagacaagcgtatgcccacctgtcccttgtctgcttccgcaggggcgcagcccagtggtttggagtcagcggcgactgggaggggcagcggcagcagtggcagcgccgcagcctgcaccactgcagcatgcgctacggccgcctgaaggcctcgtgccagcgtgacctggagctccccagccaggaggcaccgtccttccagggcactgagtccccaaagccctgcaagatgcccaaggtgggatccatggggaaaggaggcaggggtggggaccctaatggctctgcttaccgcccccctcccttccagattgtggatccgctggcccggggccgggccttccgccacccggaggagatggacaggccccacgccccgcacccaccgctgacccccggagtcctgtccctcacctccttcaccagtgtccgttctggctactcccacctgccacgccgcaagagaatgtctgtggcccacatgagcttgcaagctgccgctgccctcctcaaggtgcggggctccctcctgcagggcccccacctctgcccggcctcccttccttgcccctcccttccactcctcatagtagcatcccctaaagctcacctgggcatctgcctacggtgccaaggacagtggatgtgctgggatccctgggcaaagagggaccccga

SEQ ID NO: 21270 - DNA, 1049 bp, Homo sapiens
atcgtgctttgcagtttgtgaaacacttttttacccagtttatgtcacaagacagacattattcacattttagagaaaaagatccggagctcccatgggccagtagacttgcctgagatcacacagcacgttcgtagcaggacggagactagaacttgggtctcacggttgctttcaactgcactgtgccggatctcttggcaggaagtgagcctcgccagccccaggtcctccccctttcccccgagggtccttccctgcctctggtaacgtttgtccttcccttcctatctcgtccacagcccaccggccacactgccctcttcggggccgtaggacccctaactccacccccctccctggcagcacctcgagcagaaggccgagttctgaagaccctccttgacgctccatttctgggtgccaaggaagctggaggaatccctgactcaacttccccgaaggaggcctctgtggcggccagggtccccccctggagctgctgggaggcggcgctggctgcctggatgctgaccccagcgcggcgggcagagcggggcccactcttcttagcttttctactcactgttagagagagacctagctgagcggctggcaggaagcgggacaggtctaggagtcccttagggaataaaccagccccgtttctatcagcccggccagcatgcaggtctccacatcaccatctagagtatcacgcacacatctaccatatatacagatatattctatatacgagctatatataaatatatatatacatatatatatacacacatacatatctagaatgtgtatccgcggcgcccagaagcctcggtttggcccacctgtgagtggggcagggaggggttccggttgtgcagagaacagagtgttctggcaaagaggaaatcccacagcagcgcagaggacctgggcctggaggggcagggctggggcaacccggcttggcggcaaagcccagccccttctcagaccagctccccacattcctgaattccacttccaggcagaaaggagtgggc

SEQ ID NO: 21271 - DNA, 1068 bp, Homo sapiens
ggtccagagaactaaaggtcacagggacaggcagggttgggctggcagaactaggccaccgaggctggggccttcctataggaccaaccagcagggcagggtctgtctctcctcgagtgtcactcctgacacctgatacagggtttgtacattgcaggttcccaggacacgcttgttaaataaatgaccaaatgaacacattaatttattttaatgcttagttcaaatggcttctgcctctgcatatgatactgtgtgtatttgtgtatgtgtatgtctctctgtgtgtatgtatgtttatgtgtatctgtgtgtgtgactgtgtgtatgtgtatgctatgtgtgtctataagtgtatatgtctgtatgtgtgtaaatgtgtatgtgtcggtgtatatgtgtgtgtgtatgtgtgaatgtgtatgtctgtgtatgcatgtgtatctgtgattatgtgtgtgtgtttctgtgtgtctgttttatttgtgtgtgtacatgtatgtctgtgtgtatgtgtgtgaatgttcgtatatgtgtatgtctgtgtatgcatgtgtatgtgtgaatgtgtgtgtgaatgtgtatgtatgtgtatgtttatgtgtatgtgtgtgtatatgtgtgtgaatatgtttgtatatgtgtatgtgtgtgtgaatgtgttatgtgtgtctgtgtgtatgtgtatgtgtgtgaatatgtatatgtgtatgtctgtgtgtgtgtgaatgtgtgttgtgtgtgtgtgtgtgaatgtgtgtctctgtgaatgtgtgtatgtctgtgtgtgtattatatgtttgtataggtatatgactgtgtttgtgtatgtgtgtgtgtgaatgtatgtgtctctgtgtgtgtgtgtctgtgtgtgtgaatgtgggtgtctctgtgtgtgaatatgtgtgtgtgtgtgtgtgtgaatgtgtgtgtgttcacatagggacaggattggcctctcctccccaggtgcacaggctgagtctgttagtaaatttttaaaaattttctcagtcccccactacagtcatcatccccactagggggcacatgtgtcacacagag

SEQ ID NO: 21272 - DNA, 1059 bp, Homo sapiens
cttctgagtgttatttttcaggcaaacaccttggcttcatttttttttgtttctgggtttttttggtttgtttttgagataaggtttcaccctggcacgcaggctggagtgcagtggtgcaatcataacttattgtagcctggacctcccgggctcaagtgatcctcccgcctcagcctcctgagtggccgggacgacaggcgagcgccaccacgcccagctgattatttttattttgcagagatgaggtctcactatgttgcccgggttggtctcaaactcctggcctcaagcagtcctcctgttttggcctcccaaagtgctgggattacaaaggtgagccactgcgcccggtctggcttcgtttttgaaataaaaataaggcaaaaacgacatcaacaatcagggccagaatttgcacctatttgaaagctagtttaagtttgcaagaccgagagccttttctccattccagtctccctgttctcatccacccattaacagtgatctctgtggccttcggtgtgggttatattgtcctgcagatggtaatatgttgcagatacttatcttcaaattaccacatttgcttatgtttacctcctttcatttgattgtaagctcttcaagagcagaagtctctttttattattattattatttttttttttttttttttttgagatggacttttgctcttgttgcccaggctggaatgcaatggcacgatctcggctcacggcaacctccgcctcccaagctcaagtgattctcctgcctcagcctcctgagtagctgggattacaggcatgcgccaccacgcccagctaattttgtatttttagtagagatggggtttctccatgttaggctgttctcaaactcctgacctcaggtgatccacccgtctcagcctcccaaagtgctgggattacaggcgtgagccaccacgcccagcctctttttatttttatttttttctttttaatttcttaacagtgcagggtttggtatttacctgctatgctcacagtaagtcttcagcaaataatcattaat

SEQ ID NO: 21273 - DNA, 1112 bp, Homo sapiens
accctggactgggatttttcttaccactcaaacttgctatccacacaccctgcacaccttagataaaaagaacattttaaaagcagagttcactttcactccagtctcccctcttttgccctcactgaagccaaaccacagaagactttgaggaatgagagacaaatgaggtagagctcacctgtgctcaccagctccgtcagggtggtcagccgacccctttccctgggaaccccacttctctctgtggctggcttggttgtcgggggtgagatgccatattgattacagggcagcaaagaaccagtaccaggaatttacttgaccattccccttatttttcatctagaggaatctcggattcagccctttcattgctaagacaccttttcactgaggttcttaccagctcagccaaatctccactctgctatagcagaagcaataatgtttgctttaaaaagatttcttgacctatgccttttcttagaaagtttgatagattagttagaacttcagatcatcagatcagtctcaaatgggtttcttggaattttatatttgacaatatttatactataccaaactcatttgcagttcttaggtttgttggttaaaacatttttttaaagcagtaagtttatagaaaatgttttcatttaatggaaggctggggaatgtccagcatcaacccctatggcatgcattcccaggggccttctcatctgggcctggaacctttggttcagggcttaggggagaacaggccacatggcaacagccacacagtcattgccttcaacacagagccacgtgtccccaaacagcaatagtcatgcccttgtccaggctgggatctaattgacacaataggtcgttgactccctcctagtagagctatctaggtttgtctggaaagtttccgaccctggcttataggcaccacacctcatgtactcctcatggcttggatctctgtattcagcctttgttcagtccaataaactttgagtagatgatctcaattactgtgtgttttttcagtttgctttgttttaaaacaaaatcccttttgaacccattgaagtttgacctttctttcattttgatgc

SEQ ID NO: 21274 - DNA, 1033 bp, Homo sapiens
tcgccttggcctcccaaagtactgggattacaggcataagccactgcgcccggccctcaagagattttaaaaactgaccacttgtcttcttcttcttcttcttcttttatttatttatttacttatttatttagagaaccaggctggggtgcattggcacaatcatagctcactgcagccttgacctcttgggctcaagggatcctcatgcctcggcctcctaagtagctgggactacaggtgcacaccaccacagccagctaattgttaaactttttgtagagatggtgtcttgctatgttgcctaggcctggtctcgaactcctggcctcaatccaacctcctgcctctgcctcctgaggctgtgtgattacagatgtgaattgctgtgcccagcccttatcttctattactatatttcaagctggtcatggtcaaaattgttcaacctggttttcccccataaaattaagtcactttcttcaaccctcttccatcagattttattcatctcttagttttcttctctgtcctatattttctctatctcaaaatgtagcacctagaattcgacctgatattccctgataggggttgcggagagtacagattgctgcccaagagtgttttgttgttattgttgttttccttttttgttttttaaatgaagcttttggtgtcctctaaatcctctttgtaggaacttgccagaaactgttaaatctgataggattgaatctggcatgctccagtcatctgagcaagagtttgtttagggcttgtgaatgtgcccttgatcgggatgtgaggttggaatgcaggacgatgcttttggtctggacattggaacgcagcagtcggccctgggcaggggttggggcccggatggggtcggctcctcgcaggaacagtgatcctgtctctccccagacaccccccacccacaacatactccctccttgtctgcggcttacccagcacactccctctgctctttgccctgctggaagagctcatgcccataatatcaact

SEQ ID NO: 21275 - DNA, 1070 bp, Homo sapiens
aatgtaaaaaatgctgtgtaggaggaaggcgtataaggatgccccagctgtaggttctttagattgtctgtagtatttccacgagtaagttgtttttgatgtgtgtactggtattgctggtagatttgaagtggagtctggcggcttcttccacactcccctcccactagcttgtgtcaagatgtgacatcctatgcagcaaaactaggtgagcttgcacccccaggcggtggctctcaactttgtctcattgttcagaaatttcggccaggcgccgtagctcacccctgtaatcccagcactttgggaggccatggcaggtggatcacttgaggtcaggagttcaagaccagcctggccaacacggtgaaaccccgtctctactaaaaatacaaaaattagccaggtgtggtggcacatgcctgtagtcccagctacttggtcaactcaggcaggagaatcacttgaacccaggaggcagaggttgcagtgagctgagatcaagccactccagcctgggtgacagaccgagactctgtctttaaaaaaaaagaaatgtcatctaagccccagtgaacctcctgggaggagagctagccctggccagctgtctccaaagtgactggatgctacagaagaactgggactgtcttctgcacactcgtgcctcctggagttgtcagaacactgagcagtctcctagttctgcgtccgtctagccatggggtctgccatgaaagcctgtggatctgctattgggttggtattttaaactttcacttgggtgaaacttgttcatcattttaaataaagcaacatgatttggagttgtgtttttggcattgttttgtccttattttctttcttactcatttgaaagtcaacaatgtactttgtcagcagaacaggactttaaaaaaatgtatttacactttaaaacaatgggatggagcacaaaattaaggccctgggccaggagcattgatgcacacctgtaatcccagctgcccaagaggctaaggcaggaggatcacttgagcccaggatgtcgaggctgcagaaagctatga

SEQ ID NO: 21276 - DNA, 1209 bp, Homo sapiens
gaaattaaacagattggtaacctaatttgtggcctcctgacttttaaggaaaacgtgtgcagccattacacacagcctaaagctgtcaagagattgactcagcattgccttcattccttaaaattaaaaacctacaaaagttggtgtaaatttgtatatgttatttaccttcagatctaaatggtaatctgaacccaaatttgtataaagacttttcaggtgaaaagacttgattttttgaaaggattgtttatcaaacacaattctaatctcttctcttatgtatttttgtgcactaggcgcagttgtgtagcagttgagtaatgctggttagctgttaaggtggcgtgttgcagtgcagagtgcttggctgtttcctgttttctcccgattgctcctgtgtaaagatgccttgtcgtgcagaaacaaatggctgtccagtttattaaaatgcctgacaactgcacttccagtcacccgggccttgcatataaataacggagcatacagtgagcacatctagctgatgataaatacacctttttttccctcttccccctaaaaatggtaaatctgatcatatctacatgtatgaacttaacatggaaaatgttaaggaagcaaatggttgtaactttgtaagtacttataacatggtgtatctttttgcttatgaatattctgtattataaccattgtttctgtagtttaattaaaacattttcttggtgttagcttttctcagaatatgtctcggtctttttttcccccatttatttgaaggacctattcaattttgtgattgtggctgactgcatagtatggaagtggaatgtttagtgcctatcatttcctaagttaaagtggaaatgccagttgaacacctaaaagcaatgctttaagtggcacttttcttgaggttgtgatacccccttctcaacctaatttatatcctatttaatgactaaggaacaatccaagtacttgtaatacgtattttaatttttgtttcatatgagtttaagtgttgtctaggtgacatcaaaatctaaggcaaacagacttgaccatcttcagacccactgcattctcaagctgaagtggtctgctcatagtttgtgtgccaggttgctcatcagtattgatactgtcccagaacaggttgtaggtataattcagagactgtcctttgcaaaggaaatgaccagc

SEQ ID NO: 21277 - DNA, 1562 bp, Homo sapiens
attaaccccgctgtgcttgctcgtcccgcccgcagccctaggcggcgtcgccgcagccgatcccggagtcggagtcgttccaggtctcgcagccgatctcgctacagccgctcgaagtctcggtcccgcactcgttctcgatctcggtcgacctccaagtccagatccgcacgaaggtccaagtccaagtcctcgtcggtctccagatctcgttcgcggtccaggtcccggtctcggtccaggagtcctcccccagtgtccaagagggaatccaaatccaggtcgcgatcgaagagtccccccaagtctcctgaagaggaaggagcggtgtcctcttaagaaaatggtaatgtctgggaatccgagacacataaccctaattcataaatgggatttggggtaggtctttttgagtcgtgttaatgtaagaatgactcctatcattaggagtgctgctcggaggttactcacctttgggagtaatactgaagagaggggtctgcagaaaggatgtgtatgaagcttagataataatggctgtttcgtaaactgtttgagacctattaatgaaaatgactatttcttgctgtttttatccaacgtctgcattttccccctttaaagctgcggtctcctgtttgataaaagaatattggccagtattgcagattttaactgatttggctgatcctccagggaccagtttctgtgggcgtgtattggagcaggtttgtctttaaatgttaaagatgcactatcctcttagagaaacaatcagttcaactattgttgtactgactgggacttcatattctaatggatgtggcaaaagaattgcaataagaagcagtgaacatttggaaccccaaaagaaagttacaggtattgcactgggtggggaaaggatagtgtgtctttaactcttaaattgtttggtcctattttttaaaaaggaaagggccctaagtagctcagatattaaagtagtattctcaattaccaaatgtttcatttgaaacaatttatcttaatgaaatatagaccaattctctgatctcgagttgtttttgtttggatacagcccttttttttttctttttttttcttccccttacctttcttcaccttggttatttggccaggaatacgtaaattcaaacttgtacatgctgatggtagcctttgtgaaattttcctaattgggccttttaaaaacatggctgggtggaacatttctgtaccctactggtttgaccagagccttagtaagtacgtgcctgaaactgaaaccatgtgcactttaatggaaggtaagctgaacttctttcttttcaaacctagatgtatcggcaagcagtgtaaacggaggacttggggaaaaaggaccacatagtccatcgaagaagagtccttggaacaagcaactggctattgaaaaggttattttgtaacatttgtctaactttttacttgtttaagctttgcctcagttggcaaacttcattttatgtgccattttgttgctgttattcaaatttcttgtaatttagtgaggtgaacga

SEQ ID NO: 21278 - DNA, 1015 bp, Homo sapiens
tggctggagtgcaatggtaccatctcggctcaccgacacctccacctccccggttcaagcgattctcctgcctcaacctcccgagtagctgcgattacaggcacgtaccaccacgccagttcattttgtatttttagtagagacgggtttctccatgttggtcatgctgctctcgaactcccgacctcaggtgatccacctgcctcggcctcccaaagtgctgggattacaggtgtgagccaccgcacctggtccacaacacatttttttaacctttccaccatgtggtaataatgcagtcaaaatatacatcatgttactttgcacagatctaaattacacccagaagaaattgaagacactgtcattcctattttccattctcatctcagccttaccagtcaatatcaacttcaattaaaatggctgtcaaatcagtactaatttgattccttgcactgaagggttgcccatatttaaaaatacttgagccacaataaggagccaatggggcgaagctaccatctgtgggattatgactgaacgcctttaagtcagaatcccacccaggcagacggatacagcagtgcccgtggggcctcggttggcctccaatggcctcagagagccggtccctcccccgccgagcgccaggactggggtccggtgcagaaagcccctcgtcctgggaaaggcagtcgcccccttgcccgttgggccacccatgttcgtggggaacctggctctaaaccattcatagacgacctgcagaattctgggtcggggatttgtatgtagcagagcacctccctcactgcgatctattgaaagtcagccctcaacacaagggtttgtttaaaaaaaaaaaaagaagaagaagaaagaagaaaagaagagaaagaaagagagaaagagaggaaggaaggaagggaggggaggggaggggagggaagggaaacaaacaaaaattaaaatatagtacttgagccaaccaggcactcatgttaaacacaaa

SEQ ID NO: 21279 - DNA, 1041 bp, Homo sapiens
cacacagtgtctcgctgtgttacccaggctggtctcgaactcctgagttcaagtgatcctcccgtcttggcctccccaaagattacgggcatgagctgctgtgtctggccagaatacaggattttaaaaatttatgttttgcaacataattaatataaagacaaatataacccaggcccagttctagttattcattcttctgaattttaaaaggaaacatttggctggcccctaatggtatcatgggccctggtacctgatgaagttggcctagtctgcccccagctcctgaacagtggaagagtttttagtctcattgagctttgtactggacattactaatttctaatccaaagcatcaagtgaagtggcttgtataaataactggttttcctctgggaggctaaggcgggtggatcacttaaaagttaggagtctgagaccagcctggccaacatggtgaaaccccatgtctgctaaaaatacaaaaattagctgggtgtgatggtgtgtgccagtagtcccagctactcttgtggctgaggtgggagaatcgcttgagacccttgagaattgggaggtagagattgcagggagccgagatggcgccactgcactccagcctgggtgacagagcaagactctgtttcataaaaaataaataaataactggttttctggacgagggcctttcccataggtgctaacttctcaaagcccggctgggtgaacactgagcctgctttgcaggtagcaggtggtcacgacagtgccattccctggcccctgcattgtggcttctggcctccctggccctgctcacgctctggctttctcttcccaggaacaccatggaggcactgcccgcctgcctgctccgagacgtggcccaggaggccctgggcgtggctgtcataggcatcgacgaggggcagtttgtaagttggcttgtcttggcatcactcttcctgccagcttccgctctgtcctcccgttttccctcgctgacttggaagttatctgatcttttagtaaaataac

SEQ ID NO: 21280 - DNA, 1068 bp, Homo sapiens
ccctgatccctgatccctgggtgaggcctccctccctgttcctccttgtcttcctgctcttctctccttgacgtcagtcacttgtctccctgtccctgtggccggcccaacccatcgccctcctgtcacctgccatggcctagggagtggtgacatgtggagggtggtggcggatgtgactgatgtctgtgatgtggaaaattccatgccagccaagtgtccggccagaggcccacaggctggacccttctgctattgtttgagatcactcccaccgccagtcacatggggaagctcaccagaagtgatgttttaaaaggcagaggccgcatggacccagtttcctaaaaaggaactcggacatacacatacaggaaatgtcctcaaccgtgtctttaaagctccttttccctgaatggaggattgtggggagttttcctagatggtttttcagtgagtgcgtattacttgtaccatgaggaagaaaggaatgtgaatgttttcagagcctcgcacagtctagggcaagcagctctctgcgggctgcagacacgcacagtgaacagttagcttcccatcacccaggcctccttcgcctcagccatggttggggggtgtaaactcacctgtgtgtctccagagcaaacgtgatccagagaagggttcagcctggtggttcataaaaggcatccagggccgggcgcagcggctcactcctgtaatcccagcactttgggaggccaaggcgggctgatcacctgagatcaggagtttgagaccagcctgaccaacatggtgaaaccctgtctctactaaaagtacaaaaattagccgggtgtggtcatgggcgcctgtaatcccagctacttgggaagctaaggcaagagaatcacttgaaccctgaggcagaggttgcagtgagctgagatcacaccactgcactccagcctcggtgacaagagtgaaactccatctcaaaaaaaaaaaaaccatccaggcccacccatggtcctgaggctagtggggcaggatgtgccaggaacatggagtcacacgtgagtgaccccc

SEQ ID NO: 21281 - DNA, 1025 bp, Homo sapiens
aatctgaaaattcatgcaatgaaaacagacaggaaccagctggagagaggatggatttggcgccaggtcacgctgcgctgagactcctcgctctgtctctctgagcgcagtgcctggtaggtgggtaacctacctcttctgtgtgatagaggtcatttctgcctcatggggctcttttgaggattaaatgagattgtgtagtgggcatggggtttggcagcttccctggcatgacagccatcatgggaagtgtggccctgagcgggggccagcccaccctccattgagcagacgcggtgccacggtgttttcagagtcccctaccagtaatggcaccagccctgtgttctggggaagaaaacagcagtgttgtgggggaccggtatccttttttttaacatactgaaaaaaaaatttattgaatcattatgaaatgtattttttatataagatttgaagtaagggtttaagtttgttctcatgaatgaatagctgatggtccggacaccatttatggattcattggcatcgcccccactgacttcatatgctctccttagagtgtacccagctcccccaccacgcttcatgcacctgttgctccaccgcgcctcccagcgtgagcgccgcccgcccctccccctgtggcatcgtggtgtcctttgactgtgctggctggcgagttccctgtcctccctcactggtctttcaaaacagttttggctggttttgtacatgtgtctttcatatggtttttacttctatagtcagaaaaactaagcatttttcaaagtcacatttagaatcattcaatcctttcatgagcgtgagtgccaagttctcctgtgggcttgctggactcctctgctctgtcccggagcgggctggcctcagcctcgggatctgcagacaccccctttggcactctgcaggcacactgtcctcaaaccttcttgcacccagtgcgaggtgggaccattaggattatccccatttcacagatgagggacactgaggcacagcaa

SEQ ID NO: 21282 - DNA, 1033 bp, Homo sapiens
ctttccacgtggaaatgttccccgtgggcccacagtgatgctttatggtagaggtctctgtaatgcaacaaattgtccaggcataataaccaagcttttgtaatcaggcagagaatttcttctggctttgctttttctccttgatttctttccatcttgtttcttttagcatctgactcgctttttccatgatctcctatgtccgaagggttccccgggtagtgtcctgtgatggagcgcatgggaggtcagcatgggttgatgttccctttgtgccgagcctccgtgggcaaccaatggcccgccaggctggaagaccaaagttctcagactctgaattggtggagggggttcctttttaagaacaaattggcttcaatcctgaatatagtccttgccttctttatcctccttatttaattctgcccgggctttcctgttttccacatgcatgtcatagtatccatttatggttttctcttaattcatgccatctaacctttagggaccagtggcaagggctcacatgaaacttagaagttactggagggagagtctcaatttgcttgatatagcacaggatgggcaggtggagggcacgtgcttgcttacagcaaattccctcgcataacctagatctgtgtcatttggaatcttggcaattaatgatcagtcacgtaagcccgcctagggttcagcatccaagcagggtgctaaaaactggcctgaaagtccagtggtccttttacttgtctgccaggacctacgctggacattttcttttcataacattatttgcatactccccttaggtttctctggtgtgagcatgcaggcaggtcctggcagttagaataatccctgtaaaaccattctcctctttgctcagctatttgtgatgagggcaagagagaaagcatgatcggaggtatgagatttatgccccatgatccttgctatttaggaagattggagaagcggtattgtctgtaggttaagtcttagcaaaagagcaggcacaagaagtgtttct

SEQ ID NO: 21283 - DNA, 1014 bp, Homo sapiens
tgttggtgcctgactcctgctttctctcccattttttgtcttttctcgatagagatgagtttaatatccaggttcttcatgcatttgtggagctgcatgagttcactgatcttaatctcgtccaggcactacggtgagtattcttgaggtgagcccctttggaaggagtgggaggctagcctttgatcatgagtctgtcctggggggcattttattgaaattatatctttgggtatgatttgaatattttgaagtattttggagggaagaaatctattggtctctgactgggaatgactggatggtcaaggggaattcaattctgttacgttctggaggccgattctgtaacactcttccttgagtcttatatttgaggttttagaaattgatgaatacttaaattttgaaatttttcagtttagaaaatcctttaatttcttgccctggaataagtagttatacatttcattttggaaagaaaaaagtaaaccttaattttttattaaatctgttacctcatgccttttaagaaactgtcattctgtattttcactgctgtaggtgtaaataatgacttcatcttttgtgctatcatttagctggatggaaacaatccacaattaaacctgtcagctgtgggtctttctttctttgacttaaagggatcgattgttaatgctttgacaagacaatcttctctttttctgccacccatattgtttccggaaatagcgtttgtttaaaatgagcattatctatgtttcagtcttgtatattattctgaggagggaaaccactcctcagtagggattgtttccctcctaatttttcactttttcctaagaaaaattttacttttgattaaggtaacagtggtgtggatggcaactttgcatctgttcagagttacagtaacagaaggctgcagcccagcagggttccctttgcactttgatgttaaaaaatcattggcagtggtcaggcaccgtggctcacacctgtactcccagc

SEQ ID NO: 21284 - DNA, 1022 bp, Homo sapiens
taggcagaggggtctggtgccagctggatgacctcaaagagacatcctggtcctaaagcatgccttggacacgttcatttgacggtacccacggggatttaggacagtgtggtcctggcagctgctatgtgtctgccaagcagaacctgctgtcagagagctgcgttttccgtggaactttatggcatatccccgggcatctgcctgtggccggtggagcgcgggttgcaggattttagactagagcccgccgtgtgctcatgtatcgtcctctggcttggaaagagggctctgtccctttaagacagtcctcctttgtatgccactggctggaacccatttcagctctgggtttctgccgactgttaaaatctgcaaagcaacatttaaataaataaataaatgaaagcttcccttgtgtggctttcctattcacagccaagcacaatagcgccttgttgtttttgtcactttaatcctcttcattaaattggaaccctggaaaggaatggtgatggggctgatgctggaccgtccccctgactgccagccggacaccttgcagattaacctttgtgggcatggattccgggtgcccctctggcaatgggcgaggagggcgagcgaccgggtggtgtgtcagggcggctccccctctggtttgtctccattgtgctcaggctgccggcagggacaacctgctgccctccccagtggccattcttttaaagagcaaggggttcagccgcctccctggcacaccgcctccctggcacataagcatggctgcagcacgtggcagtgggggagggaggagctgtttgttgtgctgccatctggcccatctgagccgttcttttgcagtttaaccctaatggctacacaggagagaagcggcatgaatagacgggtttcccagggtgcggacggtgctttcccagaaactcccgggctgtgaggtagacatgggtatttctgaccaccacctttcttgttccagctgtggccttcgcagtgtcctg

SEQ ID NO: 21285 - DNA, 1050 bp, Homo sapiens
acagataggcagaagaggaagagtccaggcctcccccactctctttccacagtccttgctttgaaaggtgattcctgctagcagtttcaagtgtgtccttctcagaagctccctgtgtgtttagcaagcgtaggtgttacttgtgagaaggtattctgtgccatcctgtttcaccagatgtgtcttagagatcttttcatgttagcatttacaaatcacctcattcttttaaattaccaagtagtttttaggtagtttaaaatttttggaatttggggagcatatccactcttaagtggaatttaagaatcaaattcataagtttgattcaaatcaaatcaaaaggtgtgtgctctttatgttttgctagtgccaaaaggttgtaccagtttacactctcccagcagcacgggagactgcctgtgtagcccactcccctgacagtatttcgtctcatctggcattctgattcctgccagactaatggaaaatggtatgttattcatgttttaatttgcattaaacacatagtgactgtgagcatcttcttctgtgtgaccatttgtatttctctttttgtaatctgtcttttatatcctttgctcattgtattcatctttgctttactaatttttatgctgctttctttgtgacttaaataaattaaccctagccaggtgtggcacatacttatagtcccagctattctggaggctgaggtgggagtatcgcttgaggccaggagtttgaggctgcagtgagctatgatcacaccactgcactccagcctgggtacagagtgagaccctctctctaaaaataataagttaattaatttaaaaaaagatattaaccctttgtcatatgttttgtgaatttattgtcctagttgtttaccttttagcttatgggatattatttttcactcagaagcttttcattttcatgtcgcaaatgagcagactcaccaatattatgactatactaattcatgctctattctagaattattcaggttttattttacattaacatctttgattaagctag

SEQ ID NO: 21286 - DNA, 1030 bp, Homo sapiens
gatgaggtgggaagctatgtctggatccagcagttctacttgtgagaatttttttctatggagataattaaagagatgtgccgaaacgtgtgcacacgtgtattgagatacgtagaagaattggaaatcacttagaagtcttacaatatgggactggttaaatattatgtctagactgagaagaataataaatgtgatagatgtccatttacagtcatgaaaaaatgttataagtaaaaataagtagctataaaacgacatataaaatatcgtgtgtgtgtgtgtgtgtgtgtgtgtatctatagaagagagagagaatatatataatacttataacaaaagtctggaaaatgtctaccaaaatgtcaccaatggctatctcttggtgataggattaaggtgttttttttccttgttactattttctaatcttcaacaatgaatatgtgtcatgaacatgataggactgtgcaggcaagaatctttgggtgcagcatattagaaatcataatggagatgaaactgaacttagattgggagtttggcccttggattttttttttttttttgcctctaatatctgctttctgcttttagcctgtgacctcataacatgctgtaatgattacgatctcttagtcatgctcttgggaaatgggctattatctcattgtgaggggaccagggattttaatgattccattttaagaaaatgtagtcggctttccatgggctccccatccatggatttaacctattgtggatggaaaatatttggaaaataaaaaaaggtcacacctgtactgaatacatacagacttttttcttttcattttctttaaacaatatagcataacagctgtttacatagcagttacattgtatttggtattagaagtaatctagagatgatttaaagtatatgagtggatttgtgtagcttatgtgcaaataattaaggactcaagcatccgtgggttttggtgtccatcggagttcctggcaccagtcccccttggataccaaggga

SEQ ID NO: 21287 - DNA, 1026 bp, Homo sapiens
tgaagatacagagagcgagtgaaaatctatatttattttaaaaaataccaaccaagaagcagcaccgaaaaagcccgtatatttaactgtgagattcccatcctttcttcctcagtgtagcccccacaaatactggtggtcagttttacactccacacagcccaggtaggggattggagaatacttctttgggtaactagtctaagcaaaaataagctaccgagccccacatgtggggtctctacacattactgccttatcatattacattgccacacatcaatctataggccatgcctaccacacggcttttaaccaggttattagtgtgtcactcttaaatgagaagaagtagactatgcttgctagagacttaaggaaaatcttcagtgttagcaagcaaaagagcaaatagtttaaggaaacaggtcatgggacatgtagaagaaagccttaaaaagtatatacttaagagtctcagatattaaatgaatgaaacaagaataggctgctatcaaaaaggactatgggttgagtatttcttatctgaaatgcttggaaccagacaagttctagatttcagtatttttttggattttggagtacctgcattgtacttgccagagcatccctaacctgaaaactggaaatccaaaatgctccagtgagcatttcctttgagtgtcatgttggcactcacaacgtttaggatttgggcatgtttcagggatttgagatttgggatttgtgttaggtagacagcttcagaggccatgacacgggagcgaagctggaaagtaagactgctggctggagaccagtgtggagtctggtgtactgtggacgagaacagagaaggaggggctggtgagtggacggagatgatgggagaattctctaccatcccaccgcccagagataatgattgttaatgtgtttagtatatattcttcctggcttatttcttttttcatttttatagtctatgcatttttgttacatgattttttcatttaacagtataac

SEQ ID NO: 21288 - DNA, 1057 bp, Homo sapiens
tacttgttaatttatccttcctgacattgaattactatttttttaaacttttttttgaatttttttttttgaggcagagtcttgctctgtcacccatgctggagtgcagtggtgcgatcttggctcactgcaacctccacctccctggttcaagcaattcccctgcctcagcctcccaagtagccatgcctggctaattttttttgtatttttagtagagaaggggtttcaccatgttggccggactggtcttaaactcctgacctcaggcagtctgcccgcctcagcctcccaaagtgctgagattcaggcatgagctactgcacccggctgaatatttttttaatcttttgggttgctgatataattaaaattttttcctgcctctctcagcattggcagaatgaactttgttctaagaacctcggctagtgtttacatgtattagaatgggaaaattatagcagcttctttcccaggtcgttttttattcatctattcaacagatacttattgaacacctataatgagctggacactctatgggccttgcaatttagacatgaatagagttctcaggtaccttacattctaattagaaggagaactttgacctctaaccaagacctgtttaattcataggagggtttcttttcttttttttaaactgcactcacggtcatccccccaaaggatgagggtttcttaagttatgttgaaaattcaaaccttgagtccgggcatggtggctcacgcctgtaatcccagcactttgggaggccaaggcaggtggatcacgaggtcaggagatcaaaaccatcctggctaacacagtgaaaccttgtctctactaaaagtatgaaaaaattagctgggtatggtggcgggcgtctgtagtcccatctactcaggaggctgaggcaggagaatggcgtgaacccaggaagcctgggcgacagagcgagactccatctcaaaaaaaaaaaaaaaaaagaaaaaaaagaaaaaaattcaaaccttgaaattccgccttgtgaataatcttagtctaattttt

SEQ ID NO: 21289 - DNA, 1094 bp, Homo sapiens
atatatatatatatatatatatataaacctgctatttggatagaggccagaattaaaacatcagtagtcaaaagagggaattcagtgtttcttgagtttttagctttatatgtctaaatttgtaaaattcaaccatgtattttccgttccacatgggcaccttttgcaattgtggtagcagatgtcctaggcagatgaacatgcagaagtggtttgtttagccttcccttttaaagttcgtaatctagtaaatttgggttagaatggtggttcccatacttgactaacccgcagaatccctggaggaatctttcaaaaaagccatttattctggttccttactctagccataccaaacgtaccagggcagatccaggaatgagtgaatgaataaatacgtacatacatgcacatgcttgtacacacatgcacacaaatatacttctaatgcccctaaatttggggaccccaggtgtggaaactcacgcttcagaacctctaactgttctctccaaggtcacatcacacaggcaggctctggcttgagttggcctggccagagatgcttcccttcatttcccgtgttgagtgtataaaatgatttcacaagaatttgtgcgtccatgattgtaggaagggatggctgagtgttgaatgcatttcctcagctgtaactatctaatttatgtggttttgctttaagccattcagtattccgcttggagggttttgaacttacagaggtttttaagaagaggctcaacagatgaaagaagcaagaataaccaaccttggatttttgtttttactcctttattatagctaccaagtatatagctacctacccactttagcttccccatgtgtctttgtgtggttttctgttttgttccttttaagagataccgtctctttatgttgcagctgttgctaggcagccagtggccaggtgccagttttagagccctgatctgtacaacagtgaggaagcaacctaaaaagacccctttgcctaccccgttggatgaaagagaggcttggcgctgggatgtagactgctaggcgcatgagacctacgaagaactgaggctgcg

SEQ ID NO: 21290 - DNA, 1077 bp, Homo sapiens
ccaggtggtctcccggtgcatagctggtggctctgggcaagccatcccttgcttctcggggctgacgccaccgttgtgtccgagcccgccctcccctgcttcctcagcgggaccccttcatctgttggccttacctgtcctcagaaaggaagaggtgaccccacccagccacctctcccttttatggaactcgagagggtggccctactgtgcaccccttccttgtgagtagctctcaactgtcctggagagcagaggctatttggggtcggaggagccctcgatacctgcgaatacatctgctttccaggctgctgtttattctgagacgactgtgctgtagcttcccttgcagctgcaataacccgcaggtcttcactgaggtggaggctttggggtagaattctccatttattttactacttaatacaaaacatttatttttgaccagtcctgtggcttccattagcaatatgtttcctttcccaaatatgcaaatagtggctttgtttgctcaattttgtgagtgctttggaatttaaatgattgtataactcaagaagattacttttctatgttgctcaagctgtgcctgccaacttgtaacttaataaatacaggaaatcctcagagaaggtgatattttcaggaaaaagacaaatgccctcatagtagtgggaagtgtgaaggtgaccgtgaacatccttcctcatcgggtctgtccccgtcatttcctcccggagtcgtcgcaggtggagatggacaacgtggtgttggacttagacctccttcagtgtggctctgctgggccagaggcatcctgctgtcccgggtggctgcctcgctgtctgcaccccctctccctggggcagctttgcttcctgcccctgtgctcggggcctgggtggttactggcgtgtagatggaattgcttttttaatatgggaagatacatttatttttttccatgtgggtgggtgtctctttttggattttcttctgtttttacgtttctcttcttagaagggtgggagagaatcaagctcctgtggccacctgtgtcccagcagcagtgag

SEQ ID NO: 21291 - DNA, 1038 bp, Homo sapiens
ctgtgtgaacatcatagagtgcatttacacagacgtagatgacggagccagctgtatggtatagcccattgctcctaggccacaaacctacacagcctgttcctgtcctgaatactgtaggcagttgcaacacaatgggaagtatttgtgtatctaaacatagagaaggtacagtgaaaatgcagtattataatcttatgggatcgctgttgtatatgtggtctgtcattgaccaaaacatgttatgtggcacatgactgatggtatgtgacgtttaagaacaggcaaaattaatggtgacagaaatcagaacagtgaatatttgagatgggggcaatgactgggatgtgggaattttctagttgatgttctgcatgtccatcagtatatacttgtcaaaactctttgatctatatactgaagatctatgcatttcaacaaatcccacaactcagtttaaaaaaatgatttaggctgggcacaatggctcacaactctaatgtcagcacttagggaggctgaggtgggaggattgcttgagactgggagtttaagaccagcttgggcaacatagtgagaccctgtctctacaaaaaaattttggtttttttgtttttttttttgagacggagtcttactctgtcacccaggctagagtgcagtggcaccatctcagctcactgcaatatctgcctcccaagttcaagcgattctcctgcctcagcctcccaagtagctgggaccacaaatgtgtgccaccatgcttggctaaattttgtatttttagtagagacggggttccaccatgttggccaggctggtcttgaactcctgacctcaagtgatccacccacctcggcctcccaaagtgttgggattataggtgtgagccatcatgcccggcctaaaaaatttttattaattggccagtcatggtggcgcgtgcctatagtcccagctacttgggaggtagagataggaggattgcttgagtccaggagtttgaagttacagtgagctatgaatgtaccactgcac

SEQ ID NO: 21292 - DNA, 1023 bp, Homo sapiens
cccgtgcagtgcactttcatggttggcttttcctctggcagcagaagggtcgatagtctaggatagttttgagtttttttcaggaccctgatgtttccccttttgcctctcttgcccttcactgcccttctaaggctgcctgcctgcctctttgccttctccccctgagagcccatgcctgtggagactgctactccagctgcgtgcctgtgagaccccatattcagcacttcacttcagggtgccctttgcagctgtgattccgggtggctctcgggccacctcctgccccctcctccattcttgcccagctgttctctactgccctttgtccccaggctcagtgggatgcctgtgggagctcgctgtcactcagcttgcctttcctcctcctggggaaggtgacagttgtgcttcctctgctttgggttatgcaagaggggattccttgtggccctgcgggcgctggtgcttgcgggcttctggatgacagaggggttgtgggggtggtctggattttggtagccgccatcacacgcagctacccacagttctcagtccatgcagagattacgtccttgctagtatttgcagttaaaaggtcacttttgaagaatggtgggacagtagatggtggcagttgatttttcattttctaactttgcagaataaaaattgaatgatcctgtattggtcccccaagtatttcagagctcccggagtctgggaagtgccatggtaaatagtcacacaggccagatgagagactgaggtgtgcatgttctgtgggaggggaagtgtagcctgcgggtgtggaatggtctgggtggccgtgggaaacgtggagagagccctggaaacagccccgctttgtgccagtgaggagtcggggaagcagctggggagacggggctggagagcctggggagaggggaagctcttctggagggagtgggtgcaccggcgcactgcgcagcctcctagtaaagggcctgcagacccagctggcctcatgcctggagg

SEQ ID NO: 21293 - DNA, 1049 bp, Homo sapiens
ggctagcatccataatgaccaaagaggagatcttaagagatgtttttgtcccgggatttcgttatctatggctctatgtttcttcttgtccccacagtgatgcaccatgccaatagtggataagttgaaggaggccctgaaacccggccgcaaggactcggctgatgatggagaactggggaagcttcttgcctcctctgccaagaaggtccttttacagaaaatcgagttcgagccagccagcaagagcttctcctaccagctggaggccttaaagagcaaatatgtgttgctcaaccccaaaacagagggagctagtcgccacaagagtggagatgacccaccggccaggagacagggtacagatgtgcagtgtgctggcagagaggccctcactccggggtgacgaagtggatggacttaaatattgactaattagtaggaaaaacaagagaatgtggtcaaagagttatgaatttttacatggggtcagtggatttcagttatagaagtaatgatacagggttggtagcaaggaaatctgtgtgcttggtggatctgtgtacttggtgggtccttggacttgctgtccccctatcccaagtataatacagtcgaaagtcaggcttggaactaagaaagagaaatggggtgggctgcatgtgggcacagtgtggtgcagagtgccaggcctggctccttccgccactcagtctctgagctgtgtcctccatctatagaggggcccttgaattctttagccaagcagcctaggaggtccgtgggatggctgggtttactcctgagctttccaggaatgtcctgtaaaccagaacaccagttcttctctggtgccatgttccgagtcactgcatgctaagtgtatgcttcaggagtttctttttgtggacgacctgtgtgtggacttacgtcttcctcttttcttcccttgtccctttcttcctcaggcagtgagcacacgtatgagagctgtggtgacggagtcccagccccgcagaaagtgcttttccccacggagcgactgtctc

SEQ ID NO: 21294 - DNA, 1063 bp, Homo sapiens
ctgtccgggctttcaacagattgagtgatggtgccccacctggcgaggagggatcttcttactcagtcccccggttcagatgccagtctcttcccagagccacccagaaatcacgttttcccagctatctgagcatcccttagcccgtcaagctgacataaaatgaatcatcaagggctgcgaagatggactccaaaagtgggcgggggtaggggggtggtggtggactgtgatcgagaacattcctgcagggagaatgcctcccttccctgagtcagggaccagataacctttccagggtccttccagcccaggacaaagggctttgtctcaggttcagctctcctgagaattcatcctccccgagatttggacacctcagccgaattcctgctgtttaccttcttctctcaagaaacaacaacctgaggattgttgctttcacttcttcggacccaaatcatgatttcccagccacatttctcagttgtcaaatttgtggaggatgctggaagcttctagtgagttgcttacagatgatccaactggcggcttactaaaacatatcttgggctgggggcggtggctcgtgcctataatcctagcactttgggaggtcgaggcaggggaatcgcttgaggtcaggagttcaagacccgcctagccaacatggtaaaaccccgtctctgctaaaacacacacacacacacataaattagctgggcatggtggcatgcacctgtagtcccagctactcagaaagctgaggcactagaatccctgaacccgggaggcagaggttgcagtgagccgagattgcgccaccgtactccagcctgggcaacagagcaagactgtctaaaaaacaaacaaaaaacatatcttgacaatgccagtcatcactttaccacagaccttaagatgccaaccacccagactaggtcaggggcccccatttccagcagctactcctgcttcctggaaaccccctgcaccggccagactcccccagtgtcccatgttcatccccagcctcgccctgccagcttccctcgcccatcct

SEQ ID NO: 21295 - DNA, 1060 bp, Homo sapiens
atttgaaacaagcctggccaacatggcgaaaccccatctctactaaaaatatttttaaaattagctgggcatggtggcgggtacctgtaatcccagctactcgggaggctgaggcaggagaatcacttgaacccaggcggaggttgcagtgagctgagatcacgccactgcactccagcgtgggtgacagagtgagactctgtctcaaaaaacaaaaaacaaaaaacaaaaacaacaaaagcactggaggggctcaatagttagttagtttgtcctagacccttctagaatgttgagatcctggacagtgcttctgagaaacctgcagtctctgtccaaggagcccttaaggaagaaaggcaggagtgtggggcaggaagaccagcttcccctttccattccacacggctggctcgcaatattctgtttctcctgcgacagcctggttcctccctgctccccagctcgcctctgccaccattcttccctcagtccagatcaagagttcaagggacggggacagatgatcagaaaggcccagctcaggcaaggaaggggagaaaagggaactcgtatatgcggtgggtgggaatggaaagtagtacagtcactatggtggaggttcctcaaaaaactacaaatagaacggccatatgatccagcagtcccacgactgggcatttatccaaaggaaagggaatcagtgcatcagagagacacctgcacccccatggtcctggcagcactgttcacaatagccaagatatggaatcaacctcagtgtccaacaacagatgaatggctaaagaatgaaatagtatttcattgtggatgttggtacatctacacaatgaaatactactcagccataaaacagaatgaaatcttgtcatttgcagcaacatgaatggaactggaagacgttaagtgaaataagccaggaacagaaagttaaacatggcatgttctcactcatatgggaaagctaaaaaaaagaaaagttgatctcatcgaagtcaaaagtagaacagagaatactagagtctgggaagggttgggg

SEQ ID NO: 21296 - DNA, 1255 bp, Homo sapiens
ctgccaaaaacaacaacagatacgaaaaagaaggagtgtttttatttggtttggatgtgtttggtattccaatgctgcaggagcctaacccagaggaagtggagactcctttactgcacatctgtctgctccaggccaggcactgttctaggagccaggatacagaggtggagacagaaacaaacaaaccgataactgtatacaatactctaacgtcaggtggggacaagggccaaggacccagggacggagggtgatgtctgcagcagggcagtcagggagggcttcctggatgaggtggcatttgagtaaaatacagacctgtaccctgtctatgatcctatcccacttcaccccgtcagccttcccctcccacctgactctcctgcgcttctctctttagagggaccacagagcaccagcctgcatggaacttccttcctcactcagcttcccacgttgccagctgggacaggggagatggagtaattttgctgtggaaagacttcacgtcttgccgaatgaaagtaagcaaagatactgctagagtcgggaatctagagtcgggaattcattaagccaagggagtaagaatggccacagagtagtgaaatactgtttcttctggaaaagtcagcctccagcgcctgcagcttccggaactaagatgtgactgggcttgcggaggcgctgactcctctcctccctccctggctgtgcaggtcccgcctgtctgtcacgctgatgcccgtgcagctgtctgagcacccggaatggaatgagtctatgcactccctccggatcagtgtggggggccttcctgtgctggcgtccatgaccaaggccgcggacccccgcttccgcccccgctggaaggtgatcctgacgttctttgtgggtgctgccatcctctggctgctctgctcccaccgcccggcccccggcaggccccccacccacaatgcacacaactggaggctcggccaggcgcccgccaactggtacaatgacacctaccccctgtctcccccacaaaggacaccggctgggattcggtatcgaatcgcagttatcgcagacctggacacagagtcaagggcccaagaggaaaacacctggttcagttacctgaaaaagggctacctgaccctgtcagacagtggggacaaggtggccgtggaatgggacaaagaccatggggtcctggagtcccacctggcggagaaggggagaggcatggagctatccgacctga

SEQ ID NO: 21297 - DNA, 1031 bp, Homo sapiens
agggtgctcagtaggaccgtagagcctgatagagaccccagagggagagaaggaggggcccccagagcctgatagagaccccagagggaggggaagaaggggccccccagagcctgatggagaccctggggagagaacaagggaagaggggcctagcactccccgagcctggcactgtgcctggcactgtacctgggcttgttcttggccatgtgcctggcactgtctggaagtctctgacttgagcctccagcagccccaggatatgatcgatcttcccatttcacagaagagaagaactgcggcccagagtagctgagaaggttgcccttgtgagcgcgtctgtcgtgggggtgacgtgcccgccttgccgggggtcttgagagagctgggctctctggatttcctcatggtcctttgtttgaggctgtctctgggcccccggaggcatggccactggtctgttcaccttcttatttttaacagctttattgaggtgtaatttgcatactgtaaaattcactctttggcaggtgtgcaattcggtgacttttaaggaattcacagttgtgcaaccatcccagaaacccgtttttgaattttcatcacccaaaaagtttattggcaacttccctttgtttcgattctcccactgagcccagcctggcatccgcactctgacctggctggggccagccctggcaggaggggtggatgggctctgagtggcctgggggcttccctcggccaggtggatggtgagggtcaagggcctacattccgacctgtgcatgttcataggggctgggctcctcctccggatctcggtgctggggtgttgggccttcaccttccctgaggctctgccctccctcgggacccttccgaagccccctcattcccttcccccatctcagctccccgtgggtggctcttggactccccttcatctgtggctgagagctgagcctacttaagtcttttgatcttggttcagacatcatcccctccggccattcccattgctgcat

SEQ ID NO: 21298 - DNA, 1024 bp, Homo sapiens
aaacacacttcccaaaacgtccccagccacagctgggatgccgatggaaaggcatctgccataaaagaaaagcaaaagataaaaagcccaaccgatgtggggatagagaggcggaagagcagtcaggcttgaggagctggcgcttgtaatgtttatccgtttaaacatttcgtcctcctggtacacgaagggaactgtctgcccaggagcctgagcctcaggctgttggagaagcatctgatgcctttttctttgctgggggtcttctacgtgaggttccttggcgttgtttaaggtcaactccaccaaatacagcaaccagctggggcttgaatgggtcgatgtgtgcgtgtgtccctgcgtgcatgcatgcatgcacacgtgcgtgcgtgtttgtgtttgcaagatcctctgacaatgatctgctttgtcccagggacgtggtagtgtattagctgaccaaccaagacaaggacacctggaaatagttagactcttccacttcccttcaggacctgtgaactcagatatgtaagtcagcttctcaggtggtcggacgtgagagcgaccacagtgaaggagccagcactcagggctctctgccttctatgtgggaatgaggtcttcccaacagactctccctcttccaaaagattgtgtatcagttgctccttctgggatttagagatggacagaaaagggtgtgcgatctatgctgtgagaactcccagccagcttagaagtgtcgagccatttgcacagaaagccactccttgagcgaggagaccaaatccctcctgaaatcctccatcgcgtccttctggggagaaaaacccttgatgtgctgagaaccatcatggggaccaggatagaaggcttcttcccactcaaagcttttctccctggagggtgggcactgctgggccatgccacttcaaagcagtgttcctcagcaggaaagcggaggtcaccacttaccggcctcctccaccttctcggcttctcttttctccatgaacccagg

SEQ ID NO: 21299 - DNA, 1020 bp, Homo sapiens
aaaaatactgggagtgtgggccgggtgcggtgcctcacacctgtaatgccagcactttgggaggccgaagtgggtggatcacctgaggccaggagtttgagaccagcctggccaacatggtgaaaccccatctctactaaaaatacacaaattagccgggcttggtggtgcacgcctgtaatcccagctactcaggaggctgaggcaggagaatgccttgaacccgagaggtggaggttgcagtgagccgagatagcgccactgcactccagcctgggcaatggagacagactccatctcaaaaaaaaataaaaaataaaaatacagggagtgtatattaatgtaaaattatttacaatatgagatcacttccattcccacactgggaggaacgtaaaactcaacaatgcaagagcaaactgcatctctgtttccagagggtggcgctgtttttgcaccgggctgactctccgtttccagggtggcgctgtttttgcactgggactcgtacaaggactggtgctttctctgatgtgcttagcttatttcaggcatgcatttcccctgggctctctgctagctcttcacctttctgcaggcttcactgaggacccccaggtccacctctctagagtggccgtgcccagcccctccacctcccaccctgtgctcattcccttagagcaccccatgacccgtttaccgtttgctgcctgacttcccaccacaatgaagctctacacaggtggcaaccttgtctcgttgtctgcaggttgagagggtgggggacacccagaactttttattgcagaacaaatattttctgaggccatgctttgtacaagaccctttggtgggagatgtacaagataaatcagacgggagagagcgggtgcatagtgaccttttattcacatagcataaaagtcacccttttaaagtgtacaatgcagtggcagttagtacattcatgaagctgtgtaatcacaacctgattccagaacattttcatccccccaa

SEQ ID NO: 21300 - DNA, 1010 bp, Homo sapiens
gaaagcgcttcccggcaggcggagcacacaagccagccggtggccacggccgggacaggcttgtacgcaggacattgaggtccggcgaggatgggggggccaccaggcccccggccctttgcagagtgttgctcgttttctcccaccccagaattgggcttggccaacacggcccccccaaccatccccccacccccgccagctgcccggagcctctgtgaagatggcggcaccgccccttgcaaactccatctgcgtggaggtggcactcctgctccgggagggatcccggtgcccagcagatggcaggcttcccctagatcagcccagggctggccgctgcctgcggtgcacgcccccgccctccccctccccgccccgccccgccccacccccacctgcctgtggctggagggcagcactgcctgcgcgcctccccacctgacctccctcttgcctccctgcctccttccaagcagattttggtgaatcctaaatcacgtggatattaactcgcaagtgcctgcaagcagttctgagggccgggctggggtgcacactcacttgggccaggtccccctggtcagggtcagccagacgccactcctgcatcctgtccactcttagcagccttctgccttccctgctgactttccgcctcttctctgggtgtctggtgggtggagaggtggagagcctccagcacaacctcaccccaccccacctcgcgtcagcctcagcctcccctgagactacacggaacccagacacgtttgacctctggccccaaagcagagatgcctggctgatgggatgggtgggaggcctgacacagccagatgcagcctgctttgtgtcattcctgctctcccggcgtggacgcagggaccgcccccgggacagcccagctgggtctccagggtggctttgtctggaatttactttgtgaacctcttgcttgtcaaaattatttcatagatgattcatggttatatagaagtgtcagaaat

SEQ ID NO: 21301 - DNA, 1051 bp, Homo sapiens
tgcctggctgtgtgctggtgggttattaccctcattgcctcagtttcccctctgcacaatggggctggcgctagtgctccccaccccatagactgtcatgagaagtagcatctggacaggccctgagagcagtgcccatctctgtgccatccgctgggactggtgttggcctggtactgtaccgtctcacccttgtgtccccaggaggggagtggggtcgagaccagccccaggggttacatggacaatggggttacatggacaaatgcctcttgttacattttgttcactggttcccaaaatgaggtgcaggctctgcagagaaagcaggctttccccgaggggctctggagcagaaagagctgtctcaaggtaggtgctggggctggggtgatgtgagagcagagttggaagtgggaatgttctggaaggagggagagggctagtggcagatatgtggtcaccggaggaggagccctgcgatatatatcaggcagggacagggagaggagaggcgacctgggaccccgaaaaccgggtgggtggtcgctgtggcctctcctgggagcctcggactggcggttagggcagactccagtagattgtaaaggcatcaggatctgtcttgcttctgtaaatatttaaacactgggaggattatttttggtagctacggtctctctccgagcctggcgggctgccgggacgggtgtcaagtgacatcgggtgcaaggataccccaccccctggccccaccggccccaggctccgtgtgttcacctttccaacggccacagtttgatgtgggtcacggtttccccttctaggagacgcagagagatggtctcgggcgcgaccagcagggattcctcgtccacacagtttcctgacagcggttgaaagggacgggtctacgcaggccaagaacagcagcggagtgtggggtcaggggcccagcggggggcaccccggggaggggccgcctccgccagacccaccccgggtgaaaggacgcattgtgtgcccgcagcatgaggggagcctgcagaga

SEQ ID NO: 21302 - DNA, 1029 bp, Homo sapiens
actgcaccccagcccgggtgatagagcaacattctatgtctcaaaaaaaaaaaaaaaaaggaaaaaaaaagtttttatctgtggaattatttaatcctctagcaattttggtgattgcgttagtagttcctaattatcatgcatgaattcacttaacccacaaaacaagctcatgaagtcaggactgcagttatgcccatttacagatgggaacactgacgcttagagaagtaacttcccaagctcatgcagttaggagtgacagaattaggccttaggcccaggacgtcccagctccagaaaaccgttgtacaactttgccctctgtcttacagagggtgcccaccattcatatacaaacattcttccaagtggttcataacagtgcaaggaggtgggactaatcccatgtcaccactagctgctaatctcagttcacttcagtatggaaagcatcccccaggcttcaggataaagccattgagtttgcagaacctacctacaattgcactggtctctgtccacagttttgggtaataaggtgcagtggttaagaacatggcgtagaaagatggactgctggcttcaaatacaaatcctggactgggcatagtagctcacacctataatcctgtattttgggagaatcacttgagcccagaagttcaagaccaccttaggcaacctagagagaccctatcgctacaaaaaatgaacaaattagctggacatgctggtgggcacctatggtcccagctatttgggtggctgaggtgggaggatagcttgagcccgggaggtcagggctgcagtgagccatgaccagcctctgcattctagcctgggtgacagagtgagactctgcttaaaaaaaaaacctaaaaaacccaaacaacaacaacaacaaaacaacaacaaaaaccccaactcctctggcacttagttaattctccagtgccttaatttccccatctatactacctacttcagagactttgtgcaaggattatgaaaagcattgaattcctg

SEQ ID NO: 21303 - DNA, 1031 bp, Homo sapiens
cccttctcctcagccatcctccagggcacagggtcctagccctccctctgtcctgtactcctctcctgaaattttttttttttcctgagacagagttttgctcttattgcccaggctggagtgcaatggcaccatctcggctcactgccacctctgcctcccgggttcaggcgattctcctgcctcagcctcccgagtatctgggattacaggtgtgcgccaccacacccagccccatgattcttgaagaccagatcctggcctaaatgagtggcatccccctgccccagctgaccaactagcagcagctcccaaagcccctcacccacttggagccagtggcccctgtgccagctcaccaggcctcaccctccatcctgctggggtccaactggcccctgtcaaaggacaaacgcagagggctggccttggctttgtccatactgacgatgcggaccagcttctgtggtcccccagaagatggctaaaggagggacagagaaaggatgaggaggagctgttgaagccatcaacaggaatgggaattcaggggagatgattggcactagggcgacctgggagtgatgcagaggcgcagatgctctgagaacagcctgaggtgtgtctgcacttgtgcaagagcctgcaggctgggcaggggctgcagaccctgccctggtttgaaggggtgcagaggagagacaggtggggttaccctccaatcagcagcccactctccacacagtgcctcctgccaccctgccagcaccgagcccctcttccagcccaccccagtggggtccaggcccctccctggagcctcaccttgcgggtcacggtgcactgctgagtcatgtcctggatgagggctatgagctgctgctgagccctgcagagaccagcagaggccctgacccagctgcctcctgccaggtgagcagggcaggggagagccgagcaggggagagtgggggagatggccgggtgggagagaagggcctccacctagagctccacacatccctttgctg

SEQ ID NO: 21304 - DNA, 1881 bp, Homo sapiens
cagcgaggcctacgtgagcctcctaggtatgcctttgtctgtctccgtcaggaaaggtgtgggagtggatctgggacggggccatgacctgtcagatgctgctccacacccattacctaatgtggctctcatatcatctgggtgaggaagggactgtcactcccactctacagaggaaaagaatgaggctcagagaggtgaagtaagctgctcaggattgcacagctggtaagcactaagctaggattctcgcctggatcctgctgctttcaaaaccattgccttttccccgcctacctccgatgagcttcagaatcacctgggatgcttgttaatatccaaattgcaaatcccagggtgtccgattcagtagatcttggcgggctcaagaatttgcatgtctgacaagttcccaggtgatgccgatactgtgggcctggggacccctctctgagcatccgtgcaccccatcctgccttcctgggggacccaaagcacctcatgaccctgctcattcctaaaaagacctaggacatctagtcccatgttatggatgtgcagacaaagacacgggtgcaggaagactttgtgaggggctcggggtgaccccttcggcacagggcagaggctcgtgtgtcctgcccactgcctggcagagcctccaggtggggtgggcccgggacagcaggaaactcaggttccctttccctccgagctcgcggcccacatctctcttggggcccacatctctctctggccccaaatgatgagccaggagcactgtggccacacccaccacaggggctggagtacacgagctaccaaaaaggagacttcttttccagtccatgggattttagaaggatcctaaatgtcaccgaatcagggcctcttgttataccattcaaggcactgaggcccagagagatgacgtggcggtgagaggtgtcggctcgacaaggcacctcccgctgctgattggattggagaagggagccgcccagagtggcgtaggttcggcccttccgagggcagctcctgtgtgctgagggctctgctgctctgagatgccgcgtcccttccagacctcacgcccaccatcttggattggttctcgatcccgtaccccagctacgccatctttggctcgaagaccatccacctcactggccggtccctcctgccggcgctggaggccgagcccctctgggccaccgtctttggcagccagagccaccacgaggtcaccatgtcctaccccatgcgctccgtgcagcaccggcacttccgcctcgtgcacaacctcaacttcaagatgccctttcccatcgaccaggacttctacgtctcacccaccttccaggacctcctgaaccgcaccacagctggtcagcccacgggctggtacaaggacctccgtcattactactaccgggcgcgctgggagctctacgaccggagccgggacccccacgagacccagaacctggccaccgacccgcgctttgctcagcttctggagatgcttcgggaccagctggccaagtggcagtgggagacccacgacccctgggtgtgcgcccccgacggcgtcctggaggagaagctctctccccagtgccagcccctccacaatgagctgtgaccatcccaggaggcctgtgcacacatcccaggcatgtcccagacacatcccacacgtgtccgtgtggccggccagcctggggagtagtggcaacagcccttccgtccacactcccatccaaggagggttcttccttcctgtggggtcactcttgccattgcctggagggggaccagagcatgtgaccagagcatgtgcccagcccctccaccaccaggggcactgccgtcatggca

SEQ ID NO: 21305 - DNA, 1025 bp, Homo sapiens
tttagctccctcctgccccttgctagggtctgagccaagcccctcgactccctcactgtgttgacacttggcactttgctggccccgagaaaggtcgatgacacagccgcaaatctaatccacgtagttcccatttactccttaatctgattgatgttccctcttgcactgaataatacatgcctctctcaggtaagccattttataaaacaagaagataaaaagcactgttgaggcagtgtttgcttttgccgagctggtgtccgacagctccctgggtgtccggggtgggagagctgttgacagaagctctccgggccctcaggggcttagatcccacttgagtcgtaagccttcttgcttttgataacacagtattatttctcttactgtagaagaaaaagtttattaccaaacaagagtatttttatgaaagaaaaggacaaacctataaattaactcaacctatatctcccttgaaaatactttcaggctccaccaaaacgtagaactgaaagcatgtattttggaagaaagagatacattttgtatgctttcttttccttttgtagattcccagtttattttctaagactgcaaagatcactttgtcaccagccctgggacctgagaccaagggggtgtcttgtgggcagtgagggggtgaggagaggctggcatgaggttcagtcattccagtgagctccaaagaggggccacctgttctcaaaagcatgttggggaccaggaggtaaaactggccatttatggtgaacctgtgtcttggagctgacttactaagtggaatgagccgaggatttgaatatcagttctaaccttgatagaagaaccttgggttacatgtggttcacattaagaggatagaatcctttggaatcttatggcaaccaaatgtggcttgacgaagtcgtggtttcatctcttaaacacagtgtgtaaatttattcaactaacgatgggaaatgtattacttctgtacacagtggactgaagtgcaatttgtt

SEQ ID NO: 21306 - DNA, 1918 bp, Homo sapiens
ctgttttgtgcgtctcttctctcccttttccccaggaatgaaccgaggccgtcgcccctgcacacgcacacgcacacagcctggttttgtcctcatgcacacgaagcagcccctgctcccatctgtccctgaggaagccccacttctctgtaggagcccggactctctcaggcatgccccattcacagctgaagtgggtgctgcaacgtcttgaacaaggcagaagttggtgagaggatctgtgtgtgcgtgtctacatgtgtgtgtctacgtgtgtgcgtgcgtggctgggggaggccttttctttgaggacgtacctcatttccttctttcttctggctttggaaaaatctcatgatgaaaattcatatttgccaactttgttagctgcgtgcgtgctttggggttggtgcaacctcagtacacgcatttgtctttgtttgcaaacctttctcagagcgacatatctttatattgatgtaataaatgtcttttagtggtttgtcaaaggccgggggcgggggctctctacagagaatttttattttgtaatagaagtgaactgtctctgaagggtgaaggcaggccgtcctgggatggtaccctgtgctctcccgtggaggagaggggatggctgaggacactggcccttaccccagggccagacagcatccatccctgctgtttgcatctgagagcagcatggggcctgggaggtcggcctgtgtgcccagctcagctagctctgccccaggacggccctgccctcgaccttcccacctcctcagatcctgcaaggctggggtctgcccctcccttctcacctctggagctgtgctgcactgcttcagcccagagggccctgagagaggagcgtgccacccacagcccgggaagccgggccccagcacccctctcctttggcctccggcagtgcagaccagaggggaccttttaaggaaagaagccgtgtttcgatgaagacctggccacatggggccactgggacttcaacccagcccatcggtgggaaggtcctttttgggggactttgacagccatatccctcccagcacaccaggcgccaggtgagctggttcagacccctccaggggtactccagagacctcacgtgtggagccaggcctggccagggcaggggcctgaaacccactcctccatctcatggggctcacggcctacagcagcccacaagctgccactggccggcgacactgacacctgagcagtgtccagaacctttttgcctttttttgttccccgtgaaaagcaacatggacatttccttctagtccttccaaggaggggagagaagtgtatgtgcatttgtgtgtgtgtgtgtgtgttgtgtgtgtgtgtgcgctaagtgagaaagagagcaggctcgggaggccctgcccagggtaggaggagcttcctgctttgcaccatctggtggtcgcacgccctgagggcaccccgactctgtctccaggagtctcatcagcaaaccgctgacaagtctttctagaaattctactgcactgcctggctcagctgcagctgcagacatttctgcaggaggagcaggtgtttctgtcttctgttccttctagggccacctgtccccttaaacacaggtccacgttgtgtcaagaacctagtgcatctgtgtgtgtctgtcagtgtctctgtgtcagtgttctcgtgggtgtctgcacggtacccggccgccgttctgcaatgcatcactcccgcagaggggggtgcagatcaggcgccgtgctgcgcgttgttgttcaacagtggctttttcttagataatcgtgcttcctcagcgcccgtcgggttgtggcatccttggatctgcagggatcttctccgtttgcatgttcctcggggtggcgtgttccttgct

SEQ ID NO: 21307 - DNA, 1044 bp, Homo sapiens
tttttctttttctttttcttttttttttttttttgatggagtctcactctatcgatagcccaggcaggagtacagtggcacaatcttgactcactgcattttccaccttgggagttcaagcgattttcccgcctcagcctcctgagtagctgggattacaggcacctgccaccacacctggctaatttgtgtgtttttagtagaggcggagtttcaccatgttggccaggatggtctcgaactcctgacctcaagtgatccactcacctcggcctcccaaagtgttgggattacaggcgtgagccaccgcgcccggcctgaagtcaggcttttcatggagtgtggaatcctctgcgtggccaggcccagattttggtgggtttgtgccccagcactgtgaggttctaattattgtagcttttgacgctggaagggcagatttcctgtctgtgctttctttttccacgctgttagcttctttcacccgggagcttcatctaaggcagtgtctttaatgggcaccagcacgctggacttcgtagcttgtgattcacaggagcgagctgggctctcagactctgccacactctccggtgtggatttgatgaagacagaagctttagtaacagtgaaggcgaactcctcccacgctggaaatgtgaatggccgggggtgcggcactgagagtgggtgggcggctctcaagggagccctgtgggctcctgcgggccccctgcccggcccccttgcccctccattgtcccagctgcagcggccccgcctgggggtgcctccaggggccactgtgtcctctcggccacccacaggcctgctcttccctgatgatgtggccaccctctccccagggtcctggctaccttgccccaggtgtgaacacccgaccagcacagagcgatggggagggcagtgtggggctgggacaaggggccttgacctttacccccaggctcctatctgcagctttgctgatcctgatccatttgtttgtgtgatttggggacattttgggggcatttttgggag

SEQ ID NO: 21308 - DNA, 1050 bp, Homo sapiens
ctccacacctgggcttaagcgatcctccgacctcagcctccggagtagctgggaccacaggtgtgtgccactatgcctggctaattttatttatttattttttaaatggggtttcgccatgctggccaggctagtctcaaactcttaagttcaagcaatccgccagtcttggcatcctgggattacagatgttagccaccttaccaggcctaaaacatagtcttaaattcactttttatggcttattttgcagatataccattgtttttatttcatcattctttcactgttgaacatttaggctcttttttactttttttttttttttttgagatggagtctcgctctgtcacccaggctggagtgcagtggtgagatctcagctcactgcaacctctgccttccgggttcaagcgattctcctgcctcagcctcccgagtagctgggactacaggtacctgccaccacgcctggctaatttttgtatttttagtagagacaaggtttcaccgtgttagccaggatggtctcgatctcccgacttcgtgatctgtctgcctcggcctcccagagtgctgagattacaggcgggagccaccaggcctggcctcttttttgctcttataaataccactgcaatgaacatctttgtgcaaatagctttttccgtctgcggcgttcactttctcattccttactttatttttattctggatgcgtgtgccctctaggttattttcttagtgtaaatttccagacatggaattacttggctggagagaaggcaggtccacaggctgttctgatttaacatccaccaaacggcctgggcagccggttctgatttactggcttctacaaactcccgctgtctggaaactggacatgttataattttgcatttctttatgatcaaggctgaacattttctcacggattgggcagtttggttttttgttgttatttgttttgagacagcgtcttgctctgtcatccaggctggagtgcagtggtgcgatctgggcggctcactacaacctctacctctt

SEQ ID NO: 21309 - DNA, 1003 bp, Homo sapiens
gatcggtgtgactgatgaagcttctgatggaagctcaccctgaacgcccagctccactgaggaaccctggccaggcacagtggtcagatgggggctttgggcctagaaacagagttgctgctagtgcctcagcccctctgtcctcgcgggacctgcctggtctgtgtgcctagcgtcggcttcccggctggtgactctttccttgtgtgccgccctctctcggatgcaggccaacggagcccacagacttcctgatgctcttcgagggcagccccagtgggaaaaagaggcctgccagcctgagcacagcccccagcgagaagggagccacctggaacgtcctggtaaggtggtgcatgcggccccacgtcctggtctctgtgatgggattgtggcctggttcctaatttgttctcactgcctttgcaaaagggcactgcagggagggtgtcaagcttagatctgacatggcagaccccaggacatccacctgtctgtatgggaagttggtggctcctcccgtttgtgggagaggcagggaagggatggggtgtctgggtgtgtgcgggcggtgtcatgggctgagctgtctgacaggatgaccagccccggggcttcaccttgccatccaatgcccggagttccagtgcccttgactcaccagcgggcccgcggaggaaagaatgcaccgtggccctggcccccaacttcactgctaacaacaggtacgacctgtgcaggtgcccacgacgggcaccagtgggaagctcctggagtggagactgtgtgtgtctttgtcttgtttatggctcgttcagggtgctttggaatgaatgaatgagtgagtgagtgaaagaatggctttcattcccaagggcataggcaggaggctgccaggtggcgtcttgcacataaggggctctcggcccaggctttgctcttaaagagtttcaggccttggggaggctcacatggggctgagagggtggggcctggggagggg

SEQ ID NO: 21310 - DNA, 1052 bp, Homo sapiens
cttgatttaccatctgagcatgagtggtgcctttccaccgtggtgtccgtcagtgagtggcagccccttcatccctcccctgacatcccttatcttcctcttggaggctgcgaaactgaccccaggaaaatggagacaggatgaagggcacccataatcccatggccctgatgcaatgactggtgccattttgggggatgatttcaaaattcctaccatgtgttttgaataggccattcacacccaccatttgggaaaagggggctcattgagcagtgagcctgtcctgcccgaccttgcgggcctctcctaggcggccactgttctgtttctcctgcacccacacttactctgggcacacaggcatcagtgatgctggagatgtgttggaacaagtgccgtatccgtcagctgcgtggggctcctgcattctcttttctttttctttttaagacggggtcttgctctgttgcccaggctggagtgcagtggagaaaccacagcttactgcagcctccacctcccggacacaagtgatcctcttacctcagcatcctgagtagcatggattacaggtgctcaccaccctgcccagctaatttttaattttttttttcttttgagacagacttttgctctttttgcccaggctggagtgcatttgtgagatctcggctcactgcagcctctgcctcccgggttcaagggattctcctgcctctgcctcccaagaagctgggattacaggcatgcaccaccatgcccggctaattttgtatttttagtagcgacggggtttcgccatgttggtcaggctggtcttgaactcttgacctcaggtgatcctcctgcctcagcctcccgaagtgctgggattacaggtgtgagccaccacacccagcctactaatttttaatttttttgtagggacaggggtctcactaggttgctggtccttaactcctgggctgaagcgatcctcccacctcggcctcccaaagtgctgggattacgggtgtgggccgctgcacctgaccctgctcccgctttcc

SEQ ID NO: 21311 - DNA, 1052 bp, Homo sapiens
ggtcagtggcagggtcagcctctagggagtaggggtatccatcgctccgtggaagggaccttgggggacctgctgtggggtgccgggctgaaggaagcccagggtgaccttgggcgataggctgggtgcctgctggcctactggaggccaccgtggcagggaggtaattctcgaggttggtccctggcgccagcttctcccgttcatctacgggttcagctgagtgcctttccctgcaggtgctggggttgctcaggagccacacaattcataaaccaactgtgtgcggccacaggaagggagtccgagccggatggggagtgaagagtgatgggtgctcaaggaaggcctctgagtgcagggagggagtgtcctgagacctagaggcaggggactggccggggccaagctggctgagtttgaggagaaccagggaggctgtgttggctaaagccacaacaaaggggcacagcaggggagctggcgaggtcacagagagtacagggccagatcttgcaggagttggatgtgtagactttattctctgtgcctaggaagctgttgcagggtttttggcaggggcacatgcacgagctgagacccgttcagaaagatcagaaagactcgttcagaaagaggtgccatgtggggacgggctgggggccggcagggtttgctctgagaagttccaaagtaaggaagccagcatccccaagctaatcccctcgatcgatcgtcagaacccccgtcccctgctggaataacacattacccagggagtgtttgcccggtgcagccttgaggccttgagaccagcatcttgtctggacctcacaaaaccactcccgcgttttttttttttttttttttttgagatggagtctcgctatgttgcccaggctggagtgcagtgtcacgatcttggctcactgtaaactccgcctaccaggttcaagtaattcccctgcttcagcctcccaagtagttgggattacaggcgctcgccaccacgcccggctaattttttgaagtttttagtagaggtggggttt

SEQ ID NO: 21312 - DNA, 1022 bp, Homo sapiens
cagttgggtagcagcagccccgtctgtgagcctgctggggacaggcttctgtgccatgtcctctcccaggctaggggtccacccgccctctgagggtgtgtggctgggcccccgctcaccaaaagtcacgtgcatttggtggcagtgtccaagccttctctcaagatggtcaaccctgccccatgcggggtccacgtgtgcctcagcattgagagggtctgttccagggatctgtgtgggggtcgcagggcacagccgctccagcctcctgtgccaagcccctgggagcaggtgtgggagctccgggccagccctggcacgggcacctcccaggatgttcgtaagacacacgcttcctgcccgcgcatcttgccctgtggcctcaggacagccggtccgagggagggcaggtgcagcagccacgtcccagtcgctgcggcctggcttctccaggtgcagctcgccctccttgcacctgcagcgcggaaggcagagccaaaaggcgccccctgggctcccggagctctgagccacttcaggagttcgggcatgtggggttttgtctccggttttagtctggccatgtttgttggttccaattcctatgctctgttacctgaacctgtttgattcttttgattttcttctttctgaaaaagacttttcacggtttcctattctgcctttcttccgtatgcctctcaacgggacgagcagctgaaattaaaaagatagtagcaggtacgaacccaaaggagtgtgctgaagtcaagagcctgtctggcgggccacagacctgagcgcagcccctcggtggcacacctgccccagggacagccctgcatggggacacgtgtcaggccccagacctgcgcacgcacccaggctcagccacagcccctcaggcagggtcccgatgcccactctgctcccttgtgttacaaatgccgtggtccttctcagccctgctgtggccttgcctgtcatcagagggcagctggtctctgcaagcgtctgagtgc

SEQ ID NO: 21313 - DNA, 1501 bp, Homo sapiens
taataactgatttttgagggaaaactttcaacttatgtcctattatttgtctcatatgtcctttttctgtttttgcttttactttctttggatcaatcaaacattttaaatatttactctttttttggcttgttggtacatttctattcttctaatgattatactaggcagttgatatcaacccttatttaaaactccacaagacattgttattgttgtttcaaatagtaattattgagccaggcatggtggctcactcctgtaatcccagcactttgggaggctgaggcaggagaatcacttgaacccgggaggtggaggttgcagtgagccgagatagcaccactgcactccagcctgggcaacagagcaaaagactccgtctcaaaaaaaaaagaaaaaaaagaagaagaaaaagaaaaaagtattgatattgattctttgtggcttcttgtttttttgtcctggggtcttgttttctagtgtgcctggtattttgcagatgttgtgtttgagaaatcgtagaagttctgggtgacattgtcattcatccatcatacaggggataggcagaaggcctgtgtcccattgaggcaaatgtgttttcagttggccttgttcctagggtacagcccttctggggtctcagctgggcagtgacaccctcaaatggtgaatcttctgcttggcgttcatcttctgcttggcgttcatcatcttgctggctcctctctgcatagctgatagctggcaagtgctttgggggagatttttgcacacagaatgtggagtggcgtccttctccgaggtttccttctctccctcgagctctggctgctggagcgccctcattcttgcttctcggtgcccagccctgtgagtgtgcccaggctctaggctgttgtgctctcttgtcttgtctgcttagtcccaatgatcgatgagtctccaagggcaacaggcttgacctctctgtgactaagggcttttctctgtcctctgggatctggacctctcaagtctgagctgacagagctgtttaccagtgtctttggttgggtgtttttattgtttttattcagcttttaccattgttttaaataggaagaccagtttgataccagctattatgccatagcttgatgaggaagtttcttggtgagttttaggagcttaagatagcatgagagcctcagcctctgctcatcagatggcacatgtcctgctatgccaggtcccatgttttagtccattgggcttccttagaaaaaacatctgttctgtgagttagcaggagaaagaaggaaagaaagaagggagggagggaggaaggaaggaaggaaagaaagagtcatagttagaatttccacactccagtactattttaaaagaagaaggagggggagggccatagttagaatttccccactccagtattattttaaaataattcctccctcatttttttagtactttaatgacttcatttttttaatttaaa

SEQ ID NO: 21314 - DNA, 1063 bp, Homo sapiens
atgaggagatgcttctgttgacagatgaggaaactgaggcaccgagaagtcacttgcctagggacacacaggtggggctggtgagtggcagagcaaggatttgagccaggtggtctggctcctgtgtcctgtactagagaccacagctgggggtcctggggcaggtggcgtctgaggccatccgtccttggctctgccgcctcctccggaatgaatggccctggcatcccggtgcagatcagtagagtcctggctgcacactggggccaaaacaggcacttgaaattagggcctcatcgtgcccttctctcttcttcttcctggactttgaaattgctcactgcttgttgcacatctgctggagataacacggccatgtgtgcgtgtgtttgggggggttctgcctgcaccctgaaacctgtgggccaggagagtcctggggcatttgtcaggagcggcgctgtgcagcctgtgttttgctctccatacttcctggcacttaaaaaactctcgtggtattgctctaaaagcaaaaaggaaaacggaaggactcgatactcacatttcaaaaggaagttgtaaaatgtacggtctgtgcctggggtgagaagccctcgtgccttcctggcatgctgcaggttcccgtttaagttgctcagccagatctgattgtgctggtcaggctcacctgccaggtgagtgcgcggccggcctcacgtggagatgtgcctggtgtgcctggcagagccctttcaggctttgctttctaggagagtggtggaggaaatcagtcatttcaaaaccttttgtttttcttttgtacagcaaaaagatggcacctttgcagcagggggctacatgccccctctccggtttaaagcacttaccctctctgtggtgtttggaaccatggttggtggcatccttatccccaacggtaaggcgggagggctgccctgttgccggggagtgggacccggggcttcggcatcaaccaagacctgcacagttacgagacctgcacagagaccatcttctctggtctcttaaaaaagtctagaga

SEQ ID NO: 21315 - DNA, 1026 bp, Homo sapiens
aaattagctgggcatggtggcacgtgcatgtaaacccggctactcgggaggctgaggcaggagaattgcttgaaccaggaccggggaggcagaggtacgccgaggccaagatcgcaccactgcactccagcctggtctacagagggagaccccgtctcaaaaaaaaaaaaaaagaaagaaaaagaaagaaatgggcatgttcttacagaaactagagatttttagaaggaggaggcgaaatggtgccttgcccctggaaggccatctcttgcagaagcttcattatgaagtggattgaaggccattctggggggcagggcacaggtcccccccatgccctgcccactgtgacaggtgccactcggctaggatgtctgtctgccacgttgccatttcttattctccaacaggtggggtttttcggctacgtcagcttcaccgaggccacggccggcaacgtgctcatgcactttccctccaacctggtgacggagatgctccgtgtgggcttcatgatgtcagtggctgtgggcttccccatgatgatcctgccatgcaggcaggccctgagcacgctgctgtgtgagcagcaggtaagaccctcggggcactctccggatcgtaatagcacaggtcaggctcgcttcccataagcccccagctgtcccgaaccagagatatagcaggaaagtggggatttgcgtcagaggagtcccgggagggcggaagttgggggagcctagaggaaccagattgatgggcaggagctgataatggccagagtctggagatgggcacatggcgttcactgcacagttctctttttttttgagacggagtttcgctctgtcgcccaggctggagtgcagtggcgcgatctcgactcactgcaagctccgcctcccgggttcacgccattctcctgcctcagcctcccgtgtagctgggactacaggcgcgcgccaccatgcccggctaatttttgtatttttagtagagatggggtttcaccgtgttagccaggat

SEQ ID NO: 21316 - DNA, 1823 bp, Homo sapiens
ttctttccagggatgatcccgggggtccctggggtaggtggtcaggattggagaggagcctggggcttggccttccaccctggccaccccgtgtgcgtgggacaccccttcccacagtgtccgtggcttccttgggggtcactccccacagggtgtattgggggctgggggtaagcacgtgtcatggggcaccaacgctggtcccctcaagccaagactccctggtgtggactcagctgtggcgagaggacagtttagcactgggaagttcatgccgcaacatggccttcttctgtagctgtgggtctagggccgtggagacctcttgggtgtttctcctgattctctgccagcctcctggggctgtgtgcacaggcgttggccacttagctcccttctagcctgggccgaggggaaggctcatgtcctgcggggtcccctgactgctgctgatggcactccatgctgagggcggcctgatgggatggtgtgctaggacctgggcaacgggacaccagcagctgctggcaggaccttctcacttgtcagtctgctgggttttcttttttttggagatggggtcctgctgtgtcacccaagctggagtgcagtgatgcgatcacagctcactgtagcctcgacctcccgggctccagtgatcctcctgcctcggcctcccaaagtgctggtatttgggtgtcagccgctgtgcctggcctggtttgctttttaataaagtcaggatgtcctgtgttttctttcactttcttcaaggcggtttgggatttggctccgctggccgctgtgctggtgatgtcctgtgttttctttcactttcttcaaggcggtttgggatttggctccgctggccgctgtgctggtccatttactggctgctggctttctgcatcccgccctcccccggcccacctagcttcctttgtgcccttgagcccctgccctgggacagccatggccatggccacctggacaccctaggagcacccccctggactcccactccagagtcctcgttcagccccatggcagagcagctctcacctgtgctctggcgtgtgcctggcccaactcccttctccccggctgcacacagatgctccatggccccagcctctcccttgtcgtctcgcccacccctttccagaggcccaggtccctgtgcaggtccctcggatgcgtctgctgcctgtgcagggctgtcatgtccttgcctggctggtggcttgggtccctcccacccctagcagcaccacactcctggcaccaggctgtgggaccgaagccagttttctcatcacacaagtgagaggctgcagtggggaatcgcgccccaggccgcctccttgtctgtgccgactctgatcatgcctgtgcggaggcgccgagatggaggcgccgagatgggccggccgcccaggccagggtgtgtttgtttaactttccctcctcttgacagcgattctctgagcagcctcctccggctgcttgccctgtaaactggctgctttgactctcagcacccgctccctggcgtggagcagcagcctgtcgttctgtagccttggggaatgttcgcatggtgcacgctctggggggtgtcctgagtgggggctgctgcaacgctcctgtcctcagcaacaccaagtcctggcctcagcgctgggacttccagtgtgcagagaatgttgcatgaaggaaggtcagagactctcactgggctgcagagaggtcctagaagtggagccgctggggagggcgtgcctctctcaggtccgctgtgaaatggcctgtttctatacagc

SEQ ID NO: 21317 - DNA, 1053 bp, Homo sapiens
ctcccctatccttgctccttactcccaatcccccagtgtgggaaatacggataattatttgtgtgtgttggtttctaccggggagacaggcgctctgggctccttccccggcgggccagaggcctcgccggccagtgcgcacgcggcgccggttcccgaccaaggctccggcccgctctgctggctcgtttgaaacgtcgacattctcagcgcacgatccggggtctcgggggcacccatggggcccgaagcctctgcctgccggcggcgaccggacagctcccccgggcgcgcagggtagaggaagcgccctcgaaagcccccgcacgcattcacgagccggccctgcgcgggcacagcggcagccgcggcgggacacccggcagggtcttcggcgctactttgtgccaaaaactgcgctcccggagacccgggcaccgccggcgtcggcagctagagcgggacccagctcccaccgcgtcctccactggagcccctttcggcccctcggcgagtgcggcccgtggggagtgggcgtcggcgcgaggaagttccccggcccgggcgaccccggcttctgagcggcccctccccacgtcgccgcccgccaggccgacggaggaccggggcggggacgggggtctcagcggcccattctgctgtcacttctgacctattctccagcaacggcgcgtccccccctcggctttttcgcgaggtttgttgaagacggatttagcccccgcagagctggggaaggacggatggacggaaggcccagcgcggcccaccccttcccctcgtcgtctcccggctggcaggagccgcagcgacagcttcggggagcggggcctgccccaagacccccttcgcggcatcgggagccaggcgtggccggaggcaccgcggctgctccacgtggctcccgccggccgccaccccgcgcggggaggacgcgtgcgtgcggtgcgtggccggcgggctgcggggacgcgcttgaaattaaatcttcgcagtgcctgaccttgttttttcctcggccctgataactgc

SEQ ID NO: 21318 - DNA, 1059 bp, Homo sapiens
accttgttctgtgacctcacatcacagcatgactcttctcagcgactctgatacctgcaaaagatagaaattctctttgtcctgtgaagcattgcacttacaggacaaactgtgagatgctcatggacactgggcatcagcaaatgcacattaaaacaaattagatgccagtttgtggctatcagatgagcagaaatcaggagatgggtagttctgagcactggccagggcatggggaccagggacagtcacgcactctcgaagcgttgaaagctgcagctcttccggaactgcccagtgcaggttccctgggcaacttggcaagaccttgtctctacaaatttttttttttgaaacgcagtttccctctgttgcccaagctggagtccaatggtgtgatcttggctcacaccacaacctccgcctcctgggttcaagcgattgtcttgcctcagcctcccgagtagctgggattacaggcatgcgccaccacacctagctaattttgtatttttagtagaggcggggtttctccatgttgctcgggctgatcttgaactcccaaccgcaggtgatttgcttgccttggcctcccaaagtgctgggattacagacgtgagccaccgcacccagccaatttttttttttttttttttgacatggggtcttgctctgtcacctaggctggagtgcagtggtgtgatctcagctcactgcaagctccacctcccgggttcatgccattctcctgcctcagcctccccagcagctggtactacaagtgcccaccaccacacctagctaatcttttcatattttttagtagagacggggtttcaccgtgttagccaggatggtctcaatctcctgacctcgtgatctgcccgcctcagcctcccaaggtgctgggattacatgtgtgagccagcatgcctggccccaattttttttttattagctgagcatggtggtggcctgcctgtggtcccagctactcaggaggctgaggagaaaggatctcttgataggagtttgaggtttgagactgcagtgagctgt

SEQ ID NO: 21319 - DNA, 3540 bp, Homo sapiens
caagggacgtcccagggagcaaagccccgcagcgtggccggggactcggggacccaccccagctccggcgcggccccgccccgggtcaggcagtttcggggcgcagcagggccctccccacggcgcggcagtcccggggaggggccaggcccgtcagcccttcggccctcccggcgaccctcggagggcgccccaactcagacccgcccgccggcccgcgcagggtcgcgagcgcgcgggggtggcgcgggcggggccgttgggaggcggtgcgggctgggggcggggcgggccggggccccacgtgtccctgcccggcgggccaatgggtgcccggctttcggaaagatcgccatatatggacatgttctggggccgcgcgcgccgccgggccgcgcgggcgcgccgcttccgcttaaataacggcgggggaggccgcggtcggtctcagtcgccgctgccagctctcgcactctgttcttccgccgctccgccgtcgcgtttctctgccggtgagcgccccgccccggggcctgagctggacgtcgcaggcctgcgccccccgaccccggctggccccgcttccagctgccgaggcctcgtcgcgccttccccgggaacaaaaggcggggtgggccgggtcaggcggacggggctgggggggcgccgggggtccagggcggggcccggccgcagtgcagacttccgagccgtggacgttacgtaaaaggcccggccttcggttccaggcggttgcgatcttggaggccacggccgctggggttggggcagggccgaggcttccccgcgggagggcattaggtggctgtggggaggggaccgtgttacagacgcgcccgcctgagtccatccttttccgggcaggtcgcaatggaagaagagatcgccgcgctggtcattgacaatggctccggcatgtgcaaagctggttttgctggggacgacgctccccgagccgtgtttccttccatcgtcgggcgccccagacaccaggtgagtggatggcgccgcggggctcctgggttctgcgttgcggggtgggttcggtgtcgccggcgaggctgacgggtcgtcccctgcagggcgtcatggtgggcatgggccagaaggactcctacgtgggcgacgaggcccagagcaagcgtggcatcctgaccctgaagtaccccattgagcatggcatcgtcaccaactgggacgacatggagaagatctggcaccacaccttctacaacgagctgcgcgtggccccggaggagcacccagtgctgctgaccgaggcccccctgaaccccaaggccaacagagagaagatgactcaggtgaggctcggccgacgcccgtgctcctcccgtcctttccccagtcattttctgcccggcttgatttctgacatttaagtgtttctttcgctgttccaggctctgttcctctcccggcatttcctccctgaagcctccaggtttctcatttggtttctgcctgcgttcttttcttttctccacacatcacactggcatgcagcatgttgtggcgtgtgagcatggggtggccgtgggtctctgtccctgactaagccgccccttgtcccttctcagattatgtttgagaccttcaacaccccggccatgtacgtggccatccaggccgtgctgtccctctacgcctctgggcgcaccactggcattgtcatggactctggagacggggtcacccacacggtgcccatctacgagggctacgccctcccccacgccatcctgcgtctggacctggctggccgggacctgaccgactacctcatgaagatcctcactgagcgaggctacagcttcaccaccacggccgagcgggaaatcgtgcgcgacatcaaggagaagctgtgctacgtcgccctggacttcgagcaggagatggccaccgccgcatcctcctcttctctggagaagagctacgagctgcccgatggccaggtcatcaccattggcaatgagcggttccggtgtccggaggcgctgttccagccttccttcctgggtaggtgttgtgagctaaaggtttctactcttacatcctcggtgacacagcatcactaagggagggctctgtcccctaggtatggaatcttgcggcatccacgagaccaccttcaactccatcatgaagtgtgacgtggacatccgcaaagacctgtacgccaacacggtgctgtcgggcggcaccaccatgtacccgggcattgccgacaggatgcagaaggagatcaccgccctggcgcccagcaccatgaagatcaaggtgagtcgaggggttggtggccctctgcctggctcgggagagctgactggggggcgctctgtgagctgaagccgtgcctggctgtctttgcagatcatcgcacccccagagcgcaagtactcggtgtggatcggtggctccatcctggcctcactgtccaccttccagcagatgtggattagcaagcaggagtacgacgagtcgggcccctccatcgtccaccgcaaatgcttctaaacggactcagcagatgcgtagcatttgctgcatgggttaattgagaatagaaatttgcccctggcaaatgcacacacctcatgctagcctcacgaaactggaataagccttcgaaaagaaattgtccttgaagcttgtatctgatatcagcactggattgtagaacttgttgctgattttgaccttgtattgaagttaactgttccccttggtatttgtttaataccctgtacatatctttgagttcaacctttagtacgtgtggcttggtcacttcgtggctaaggtaagaacgtgcttgtggaagacaagtctgtggcttggtgagtctgtgtggccagcagcctctgatctgtgcagggtattaacgtgtcagggctgagtgttctgggatttctctagaggctggcaagaaccagttgttttgtcttgcgggtctgtcagggttggaaagtccaagccgtaggacccagtttcctttcttagctgatgtctttggccagaacaccgtgggctgttacttgctttgagttggaagcggtttgcatttacgcctgtaaatgtattcattcttaatttatgtaaggttttttttgtacgcaattctcgattctttgaagagatgacaacaaattttggttttctactgttatgtgagaacattaggccccagcaacacgtcattgtgtaaggaaaaataaaagtgctgccgtaaccaatgaatggctcctgtttggggaagtagcaagtgggctgggaaagacagaccaacctggaagtattgggtagtcttgggggtgggggcggtgggtgctgctcagcttggcttcgtgggctggtgagaaaacggcttaacaataaactgagcagttcgatttcttccaaatcgaaagtgcaagaacaaggcagcctagtgggtttgggtgttggagataactgaagcaacatcataagcaggctgggagggaagtcctgagacggctt

SEQ ID NO: 21320 - DNA, 1881 bp, Homo sapiens
cctcagtgctgagattgcagtggtaagccaccatgtccagccaactctttaataataggcagttctgactggtgtaagttctgactggtatctcactgtggttttaatttgcatctctgatgattagtgatgttgggcattttttcatgggttttttgtttgtttgttttgagacaaagtcttgttctgttgcccaggctggagtgcagtagtgtgatctcagctcactgcagcctccacctcccgggttcaagccattgtccagcctctgcctcctaagtagctggaattacaggtggctgccaccacacccagctaatttttttagttttagtagagacagggtttctccatgttggccaggctggtctcaaactcctgacctcaagtgatccacccacctcggcttcccaaagtgctgggattataggtgtgagccaccgcgcccggccctcatgggttgttttgttttgttttgagacggaatctcaccctgtcacccaggctgcagtgcaatctcatgatctccacttactgcaacctccacgtcctgggttcaagtgatactcctgcctcagcctcccgagtagctgggactacaggcgtgcacccacgcctggctaatttttatatttttagtagagatggggtttcaccatgttggtcaggctggtctggaactcctgacctcaggtgatccacctgcctcggtctcccaaagtgctgggattacagacgtgtatacacaagacacaaagatcagctcaggatgggtcataggcctaatggtaaaaggtaaaactatgaagcaggctgggcatgatgtctcatagctataatcctaacactctaggaggccaaagctggaggacactgtagcccagaagtgtgagaccagcccacacagcatagtgaagccccgtctgtacaaaaaaacaatattaaaaaaaaaagaattagctgggcatggtgagtggtccacgcctataatcccagcttctggggaggctgaaatgggaggatcccatgagtcaggaggtcgaggtcacagtgagccatgattataccactccagcctgaatgacagagcaataccctgtcttaaaaaaataaaaactgtaaaacagttattaagttgaatctcttcagggccttggggtacgcaaagattcttttaggcaggatgcaggaccttggggtagaacacagaaaaacactggcataaaaataggtaaattgataaataaatttatctaaacaaaacacttgtgctcatcacagggcactgttagaaacatgaaaaggcaccaatgggggacgcagtattagcagtacatacacacaacatgacttctatctgaaacttaaaaataactctgcctgttgttaatcaaacagaaagcagaagaagaagctgggcggagggtgaaacgtttcacaaaaggaaatgcaggtcgggcatggtagctcacgcctgtaatcccagcactttgggaggccgaggcggtggatcatttgaggtcaggagttcgagacagccaggccaacatggtgaaaacccatctctactaaaaataaaaaaaattagccaggtgtggtggcacgtgcctgtaatcctagctacttgggaggctgaggtaggagaatcgcttgaacccaggaggcagaggttgcagcgagccgagattgcgccattgcactccagcctcggcaacaacaaaaaaaaggagatgcaggaacagtcactatcattagtcatcagggaaatgcaaattaaaacatgagaagccgttacacattcatcagtgtggctgaaatgaaaaaaacgcgacaatgtcaagtgtgagtgaagatgtgaagcagctgggactctcgtacctt

SEQ ID NO: 21321 - DNA, 1077 bp, Homo sapiens
ttccgtggaccgtctgtctgtctgtccttgttactggcgtgctgagtgtgtgtggtgtgctgctcattgtgtatcacaagccagagactccagcagggtgttttcttccagagagggctttcctttcctccatgggaaatgtggtggtggtgagctgtccatctccatccaggtggcaagtagctggtcagagccgagttgcattttgatgagacttcgtctattgttgatccttccctttttctacagtgtaaccccttaggggtgccatctgagagcctggtagagctctttgtgaggtgacagtcttccttaaatctttgtctcattggccctgaaaggctgggagatacagtctgtccagaagtttcttgttttcctcatgcctcatacagcttaaatatgtaggtatcccatgtaccttaaaacttttgcaagcatcttttttttttttttttgagacagttttgctctgttacccaggctggagtacagtggcgcgatctcggcccactgcagcctccgccccttgagttcaagcgattcttgtgcctcagcctcccgagtagttgggactacagatgtgtgccacctgcccggctaattttttgtgtttttagtagagactgtgttttaccatgttggccaggccggtcttgaactcctggactcaagtgatttgcccaccttggctacccaaagtgttgggattataggcgtgaggccacccaaagtgctgggattacaccacacccagctgcaaacatcttgaggggagagaatggctgcatgtttgaaattcctgtgtctccagagtctctgccagaccctcatctcccagcactcacttcctgcaggaggggagggaaggggctttccatctcagtgccacagtcccctttgctgggggtcttcttatctggtttggattcaggcccctgcctccccttcctccctcctaccccgttgggcaggctggtctcgaactcctgatctcaagtgacctacccacctcagcctcacagagtgctgggattacatgcatgagacactgtgcctgacctatatttttctttt

SEQ ID NO: 21322 - DNA, 1035 bp, Homo sapiens
tagagcatgtccttagtggcacctgtttgtggagccaagtgtgtgcggagctgcagggtgtcctgactgtgctaggtcttgtgctaggtcttgtgctgtggccacccatccgttgactactgaatttttttttttttttttgagatggagtctgtcacccaggctggagtgcagcggcacaatctcggctcactgcaagctccacctcccgggttcacgccattcacgccattctcctgcctcagcctcctgagtagctgggactacaggcgcccgccaccgcacccagctaatttttttatttttagtagggacggggtttcaccgtgttatccgggatggtctcgatctcctgacctcgtgatccgcctgtctcagcctcccaaagtgctgggattacaggcatgagccaccgcacccggccgactactgaacattttttaactcttacccccgacaaactcttgagggtttgttttttctgttgatcagaggtgaagagttaacagatatggactggttttgaatgccgtttggtagactctttttaaaggtctctctcttgcaggtggtcctgacaaccaagtccactttgaagggtaccaggtgtccaatcagtgtatggcactggtccgtgatgagtgtttgctgccatgcaaggacgccccggagcttggctacgccaaggagtctagcagtgagcagtacgtgcctgatgtgttttataaggtaaaagtatggtaagaaaaagaactctgtacatggagaatggtgtgaacctgtcttggacctttctaatttgggtgcattctgcctatagcagccgtttgtcagctgtggttgaaccctgcttgtcactaaaggcttctgtcacgtttctggggctggatattcgctactcatgcttccatggcgtagggcttctcaccagaagtggagctacatgcactggctttgagatcagtaacaccaaatccgaccattgcaacacagacagtctcagtttctaaagatgagaagatgggtccttggcat

SEQ ID NO: 21323 - DNA, 1056 bp, Homo sapiens
ccctgagtccacgcacttggctgtagtgagtggttcaaagaacttacctatttattgccctgggcctcatattcccctagtgcaagctgcacacaggacgagcctttatttatgggagtgaccttctcgctggattatgaatggctgaagcatttgtgtggctgtgataaaggggcagcatttacagcgggctccctggacaatccttttccgatctgacacaaagctgagcctgtcggcctccgtgcttatcattgttgatttactttgccttgaatctcacatctcttctactggtttgtcctggtgagactgagagttaccgtaataatgccgactggaactgttaatgctgggtttacagcaggaaggccagcccgattttcttcatgaggcatctcttgcctcatcttgtggcatttctttttgcacaattttcctgaaactcatttgacttagagcgttttgtgtttaatagagattcattttaatcttgaaaagataactggcacacaaagaaaaacttgcttctggctatgtgcagtgacgcctgtagtcccgacactttgggaggccagggccagaggatcatttgagcctaggaattgttcagcctgggcaactctttttttgtataccctgtctctacaaaaaatttaaaaaattagctgggtgtggtggttcacgcctgtagtcccagctactcaggaagctgaggcaagagaatcacttgaggtcgaggctgcagtgagccatgattgcaccaccatactccaacctgggcaacagcatgagaccccatctctaaaacagttaaattggccagactcagtggctcacgcctgtaaagctaacactttgggaggccaaggcgggtggatcatgaggtcaggagtttgagaccagcctggccaatatgctgaaaccccgtctccactaaaaatacaaaaataagctgggcgtggtggcgtgcacctgtagtcctagctacttgggaggcagaggcagaagagttgcttgaacccagaggtggaggttgtagtgagcagagactgt

SEQ ID NO: 21324 - DNA, 1029 bp, Homo sapiens
acttgagtgtctatccctagacactgccagttagtcttgctttttaaggaaatttgtatgtcttacttcttgtaatcttcaggttccccttccatctcttcccttttcttgaaatttatctgttgaggaacttggtccattgacctgtagagtttcccacctctgaggtcttgctgatttcacattcacaagaccctccagcatgaccctctgtgtcctggatttcctgccgatgcaaagcggtaaacagaggcctgacagactcaggccattccctcagcaggaccatggggtgctgtacccccaccttttttttttttttgagacggagtctcaatctgttgcccaggctggagtgcagtggcgcaatctcagctcactgcaacctctgcctcccaggttcaagcgattctcctgcctcagcctcctgagtagctgggattacaggtgcccaccaccattcccaggtaatttttgtatttttagtagagacagggtttcaccgtgttggccaggctgatctcaatctcttgacctcaagtgattcacccgcctcagcctcccaaagtgttggcattacagatgtaagccactgcgcctggcaccccgccttttttcttttcttttctttctttttttttttttttcttgagacagagtttcattcttgttgcccaggctagagtgcagtggcatggtctcagctcaccacaacctctgcccccccgggttcaagcgattctcctgccttagcctcccgagtagctgggattacaggcatgtgccaccacgcccggctaattttgtttttgtttttgttttttgagacggagtctcactgtgttgcccaggctagagtccagtggcgcgatttcagctcactgcaagctccacctcccgggttcatgccattctcctgcctcagcctcccgaatagctgggactacaggcgcccgccaacatgcccggctaattttttgtgtttttttttttttttttaattgatcattcttgggtgtttctcgcaga

SEQ ID NO: 21325 - DNA, 1030 bp, Homo sapiens
tctggggactggccgtggacatggagcggatgatgcccctcgcaggactagttaaataagtgaagttggtagcgtgtcagtccgtgatcctgggtagatagagcagggcagcgacggaagactgcctataggacattcacgctgggatgagaggggcctgagaggcctgggctttgtgacagggaaacttggataaagggtggtgcgattcttccggttggtccctcagaggtggtggggcttggttatactggtagaggtgctgggctggccaggagcttacagggttacacctctcgcatactggtgtccacagagcagccatcttagctggaggtgtcgagtgcctcccccaccccccaccatgtgcttgagtgcacacccggcgccaggccctgatcctggcacttcttgtgaatcacaccgtgtcatacccatgacttccattgcacagtggggaaactgagtctagagaggtgaaataacatgtctaaagtcacaggaagtgaaaaagctgaggacatggagccagttgcccaatgacaggagagctgaaatgtcctcactgctgggggtagaccgggcctcaccagcttcctggagagtcacatgtttgtctgcatcctcagggggctcgccggttctccagcccggactgctgccagaggcttcctggaggtggcagctttcttcaaaggcaccatcccggagcgcaagcccctgatgggcgcagaaaattcgggacagaccacgtagaggtgggctcccaagcaggtgcggacggcaccaggccgcccaaggcatcgctgccacctgagctccagccgcccacaaactgctgcatgagtggctgccccaactgcgtgtgggtggagtacgcggacaggctgctgcagcacttccaggacggtggggagcgggccctggctgccctggaggagcacgtggctgatgagaacctcaaggccttcctcaggatggagatccggctgcacaccaggtgcggaggctgagccatccctgctggact

SEQ ID NO: 21326 - DNA, 1900 bp, Homo sapiens
gggctggagtgcagtgccacgatcttggctccctgcagccttgacctcctgggctcaagcagtcctcccaccccagcctctgagtagctgggactacaagtgcatgctgccacaccaggtgtgttcatatgggtgtgtgccgcatgtgtgtgggcaggtgtgtacagacaggtgtgtgcgggcggttgtatgcatgtgtgtggcagatgtattcagctaaggtgtgtgcaggtaggtatgtgtgggcaggtgtgtgtgtgtgtgtgtgtgtgcacacaaggcaaagggagccccggaagggtagttgcttgggaggatgtggggcaatcagtgggatctggggcaggagtgacaaccgaacccagcagggggatcccaggccaaaggtgtggctgcataaaggccaagtggccactggaggcagaggatgcatggggagaagagccacgggagagggcaggctgggaggcaggtacccctaaagcagcagtcggtcagtggtgagagccagcagggggcgaggcagggggctggccagtctacctgttacctgagctctgcctttctctgtaacgggagcttcccagcaggcagcatgtccctgtgggaccctcaacccaaacaggcctttccctccgtgctctggtgttcgtgggctggagtccctggcaggaggactgggcagagagaccccagagtccaagaaaggagaggtgactttgtgagcaaactgggtgctgccgtgggtggggagcccctggccctttttggacctcactcctggcctgggatggggcacagagttccagggctgggagctggttttctgctctttgctggttttgcccttgagccgtgggattcttatcacgtggtgtttgagggctggaccattgacatgaggcggaatgagccagagaggactcgaagcctcagtgctcctggccctctgtgagggctgcagccgtgtgccctggagtatctgcagccttgggcctctgggtgggcaggggagttgcttgtgctcaaagccccctcctgggaatcctgggactcccctcccccagaacctggagttgccccctctggagcagggcaggctggagaccagccctgtcagcttccccaccttggggttgtgtgtcctcagctggagtggggacactgtccagcctgccagtgtgagcgtctgagcctcaaaatagactccatttttccagagccgtggattcccctgggctgggaggccataaacgggcggcagcccagggtcttggtcaccaggtcaggcccagcagcttcctccagggccaccccctctgcccaccaggggagctggagtttggttccatctccagggtactgatgtggctcatgctctagggaaccaggaagctggacctgggtaggtgccggggagctgggatcacctttaggaagctcatccccgttttacagaaaggaaatcaaggctcagcagaagccgtgtgcccagccctgcaccagggagagcagggtcagttagctgaggggctgcaggccctctgctgcagtgagaggcagctggacatcagagatgctgacggccccaccagcccacgtggggaggggctctggccacagtgctcccggtgctggggctgaggcctccacgtctgagcctgagacgtggaggatcaaggccgctgagcgggcttgatcgcttcaagttgtgtgtgtgtctggctcgtctggccagctctctgctacctcgtagggttgcctggagcccactggctgcctgtggctggaccccagcctgtgggggacaccctggtaggcagagggaccatgcactttgttcacatctgaagggaggaggcaggtgtgccctgcgcctccccctccttctgtgctggag

SEQ ID NO: 21327 - DNA, 1295 bp, Homo sapiens
cggaggagctgacggcagagaggatcacagagttctgccaccgcttcctggagggcaaaatcaaggtgcaggcgcgtccccgggccagggctgcctcccgggtagagccgccaccttggggtctctgggctctcagtgtcctgggcttcgtcctcaaagtaagatcttcagagtaagaggacggagcccaagatggtgtgaagaccaccattcttgtcacacctttggggacctgtaggagccctcttgtccacacggctggcccagatgctcctcagggaaacctcctggccggcgagggtgcggcctgcgtgggctcattgggcccagcccactggcccagccttctctttctggattcttggcactgttggtgtctgcggctgccaccctggtgtgcccagggcagccacgcacctcagtcccgggcagggtgagggttggggagctctgtggtcccccaggcatcgccgcccctcaccgtgccctgcctgccctccagccccacctgatgagccaggagctgccggaggactgggacaagcagcctgtcaaggtgcttgttgggaagaactttgaagacgtggcttttgatgagaaaaaaaacgtctttgtggagttctgtaagtgttgccctttcagctccccaggtccgtgccaccagggcacgcgcaaggtaggcagactcctggggaagcgtctgccagtggctttgtgtccaggacacaccctagaactgctttcttttcagatgccccatggtgtggtcactgcaaacagttggctcccatttgggataaactgggagagacgtacaaggaccatgagaacatcgtcatcgccaagatggactcgactgccaacgaggtggaggccgtcaaagtgcacagcttccccacactcaagttctttcctgccagtgccgacaggacggtgcgccttccctccagacggggctggggcgggctctgggaagagcagtggtccccacgccagcctgggtgcctctctggaaggagcctggggctagtcaggtgggagaagagctgtgggagctccttcagaagcacccacctttgtttttcgagagagatgggatctcactatattgcctaggctgtttttgaactcccaatgtgctggattccgggtgtgagccaccggaccgggcctgctctgcctttctctagggaggaggagccaatgccaggagattggctctgggccgggaccagcccctgcactcatccctgtcttccacaggtcattgattacaacggggaacgcacgctgga

SEQ ID NO: 21328 - DNA, 1004 bp, Homo sapiens
actgtcgaggaacagccatgtcctgtacccattgctggacctgtggctcgaaaccccacgggagggcagggctgctggctgctgtgacttcccacgtccagggagacccgggcccaggggctgtgctcccagcagcaatgctcagtcagggccctctttctgtccacagtttgatgaaggccggaacaactttgaaggggaggtcaccaaggagaacctgctggactttatcaaacacaaccagctgccccttgtcatcgagttcaccgagcaggtgcggctgccctgcagcccccaggctggggatggggaggagtgggttgggggtggcatgaggctcccggtcaccactgctgtccagcgtctgacattggaggccattgggagaatcttctgcattaatagtgtgtgactcagacccagtaacttaagtttataacacagacagccccgaagatttttggaggtgaaatcaagactcacatcctgctgttcttgcccaagagtgtgtctgactatgacggcaaactgagcaacttcaaaacagcagccgagagcttcaagggcaaggtgagctgctcttctgggtggctcgtggggcggtgccagggagcagtacaactcttcccgaggtgacaagtgtggggccttcctgaggctgcctgctggactggatcgggcacctgattcaggacagcctggatgtaggcgaggggccagccaggccagacctctgctcccagtcacctgctggtctggttgggcaaccccggaatccaggttggaggaaaaaggcaccggagcacggtctgcttccgagcaaagtcagggctggaggcagaggccagccgtctcccgcacctgtgcaacctccttttctcccccagatcctgttcatcttcatcgacagcgaccacaccgacaaccagcgcatcctcgagttctttggcctgaagaaggaagagtgcccggccgtgcgcctcatcaccctggaggaggagatg

SEQ ID NO: 21329 - DNA, 1026 bp, Homo sapiens
gttcacgccattctcctgcctcagcctcccgagtagctgggactacagggcacccgccaccacacccagctaatttttttgtatttttagtagagacggggtttcaccgtgttagccagggtggtctcgaactcctgacttcatgatccgcctgccttggcctcccaaagtgctgggattacaggtgtgagccaccgacccattcactttctgtagtaagcacggagcatccagcactccccgggaccaggtaggagggagggtagagccagcttcctggagcgcggtggtgcgggtgggtcaggatggcttgcttccatgttcttgttcttgtcatttagctgtttttgcagccacttcctcaagataactcaagacagtagatgctctttaccaggagacattctcttgatgtcccctgaagggaagagagttgctaaattagtctattgccattgcaaggtgcccaggaaattaaacctctgactagaaaaagccagtgaagtgttggataaagttgaaggaaccaaaggtctttttagagcttttattaaagagaaagttccaagtcttgtcctgaaacttgggttctggggcagactttctccagagcccacgaaactcgcgaaccctgtgttgtcacacagcccacagctccttcagtgccctggatgtctgcagtggccgctgtgactctatggacagtttggtgatatgtgtccgcgaaggctgggagggtggtttcgttgctcttgcctgcaaaggctcacacgtggccatccatgtgggctccccacaggttaacgttctgtctccattctctggagtccactagagctgggcacagacaaacccacttgggtttgatgccagttggtgggtggcgctttcctgcccactgaaggtggctcaggtgtctgtgatggcgaacgtggtcgttgcaggcagctccgggcagaagcccggccccctgtccggtgcacgtggtaggggctgccctggaagtcagagctcaccccgcagctg

SEQ ID NO: 21330 - DNA, 1069 bp, Homo sapiens
gcctcttccatggtgggagaacatcttacttaggttgattcaggtgtcctcagcctggctggcagagagcagagacgggagcaggcgcggcagggcaggcggcactccctgtttgagagtagaacctacatttgtttggggttagctggcagagaggctgatgacatcgtgaactggctgaagaagcgcacgggcccggctgccaccaccctgcctgacggcgcagctgcagagtccttggtggagtccagcgaggtggctgtcatcggcttcttcaaggtagagaccagagcattccagtcttccttccttccgtcatccattgaggaggggtccacagcctgcagctggcagttctgcacgtgtcccccctggcctgggctctacagggtctgccctactgcttggtgctgcgggatcatgacgacctctgcttctccctcctcattcaggacgtggagtcggactctgccaagcagtttttgcaggcagcagaggccatcgatgacataccatttgggatcacttccaacagtgacgtgttctccaaataccagctcgacaaagatggggttgtcctctttaagaaggtgagtggccccaggcagctctgcccaggttagttctggggttggtctgcagagggtggcgttgctctccttatcgttaagggaaccttgctcctggcacctttggcccaataggtatgttctgcagctttgccaagttggggtgttgcgctgatgcctgtggcctggtcttcgcattcagctgtgggctttctggccactctcctgccacagccgcctcagaactgcttttgactgttagcttttttttttttttcaattatgataaaacatgtaacaacatttgccctttttttttttttgggagagtcttgctctgtcacccatgctggagtgcagttgcgtgatctcggctcactgcaccctccgcctcctgggttcaagtgattctcctgcctcggcctcccgagtagctgggactacaggcatgcactaccatgcccagctaatctttgttttagtagagatgagatttcacc

SEQ ID NO: 21331 - DNA, 1854 bp, Homo sapiens
ggcggcccacaagtacctgctggtggagttctgtgagcgccgggcctggcgggcgggcggggctcggggccgctgagccaggctcttgggacgcaggcacggcccggcagcccccggggtcgggacccccggcgcgcccggaactgaagggctcccttgctgcccgccttgggggccatgtcaggggctccctgggggtgagagccgggctgggagccggggggccgtcccgatgcccgccctgcgcacggcaggatcttcctgttagtgcgagaagaacaggatcgacctgtgtgagcaaacagagcaagccagtgtccagccttgccgagtcctccccgggggccgacccggaaggcgccccgctcctgcccaccccaccttcagcttgccacagcagtccttccgatggtgtctcagaggagaatcccaagccttcctcacgtccataaggatttgagctctgtccctggggtgggaaccttgtgcctgacacagctgctaactctattgacagatcgtcttattctcaccctaagcaactcagggtctgtgtgcacggatgtgcatctcatactcacagctagtgctggtacaggccgccacggtcacttcttcacttttgtctgtagtcttaaagggaaagtctaggggagatccttgccttagttgcctgtggggaataagaagtcagcaaccattgaaaggtttgtctggctgtgctgatggtgacatagcagagtgggggctggtgttggttggtggtagtttgtcgttcacggcctctgtcctgatattgcccaagaacaccaggctatcagctcagccttgtgcgttaggaggggttatcttggtgagtagataaggtttttatgaagggaaatgccagaggaaaaagggaagcactgctgagggatcaaggctgctttagggatcaaggctgctttctagcatctcatttccgcttccagatgccccttggtgtggccactgcaaggctctggcccctgagtatgccaaagccgctgggaagctgaaggcagaaggttccgagatcaggttggccaaggtggacgccacggaggagtctgacctggcccagcagtacggcgtgcgcggctatcccaccatcaagttcttcaggaatggagacacggcttcccccaaggaatatacaggtgtggctgtggcactgcccttgaactgtctttagagagggactggcctgccgacttggaagggcaggggcagctgtctgagcggtggggaggccgggttccagaggcttggagggatcccgttcctcaggccgggttctctgtccacttgtgccctgagggtcttgtgaggagttttcatcctggaagaaccttcgaatggagaacctgtcttgtctggtgccatcctgggggcggctggctgaggtctgtttggagactgaccagcgaggagagggagactggtgcctttctggccacatgggctgtttgtgctgccccctgttcctaggagcagcagcatggctgtagctctcggggtgacacctgctagctgtcgtgtgtagcgtgccagctgccgcgtcacgtgcttgcgtgatttctcctcgcatcctctctgtgaggcgggcttttcccagacaaagggctgaggcttagagcagctgagtaacagcatcgagcctgtcggtagcagacctcgaatccaagcccgccctgctccgtctgtagcacgggccctcagctgctcgtctgccgcctctgaagctgccgtagtggaggccgagcccctgtgtagccagatcagtgacggtggcaaaagaaaactcgtctataaaaccggttctgtggcatgtca

SEQ ID NO: 21332 - DNA, 1058 bp, Homo sapiens
atgagcatgtggcctccccgtcccttccccggtggcgaacccagtgacccagggacacgtggggtgtgctgctgctgctccccagcccaccagtgcctggccagcctgcccccttccctggacagggctgtggagatggctccggcggcttggggaaagccaaattgccaaaactcaagtcacctcagtaccatccaggaggctgggtattgtcctgcctctgccttttctgtctcagcgggcagtgcccagagcccacacccccccaagagccctcgatggacagcctcactcaccccacctgggcccagccaggagccccgcctggccatcagtatttattgcctccgtccgtgccgtccctgggccactggcctggcgcctgttcccccaggctctcagtgccaccacccccggcaggccttccctgacccagccaggaacaaacaagggaccaagtgcacacattgctgagagccgtctcctgtgcctcccccgccccatccccggtcttcgtgttgtgtctgccaggctcaggcagaggcgcctgtccctgcttcttttctgaccgggaaataaatgcccctgaaggagctgggggtgtctgctgcttggcttctccagggtgtggcaggggagggcctggctcctctactgcctcacgggctttaggagacaaaggggaagatggggaccctggtggggtggtgggaggggaagggcagggcccccttgaagtgctgtggctgctgggccccttgcaactatctggggagaaaggaatgtgactcccagctacagtagccctaggcagcaacagtctagaacagtgcagaaggccttggctggggttgcccctccttgctaagggaatgggaagacgggcctggcttgtgtagctcatgctgccagagggagagctgcttgattccctggccgggcttggaggtgtcgagttggcccagctgtgcgcgggccctccaatgactggatcccaaggaaacccagggaggaacaggcccaagccagggtcggccttgtggcccctggcgcacgtg

SEQ ID NO: 21333 - DNA, 1077 bp, Homo sapiens
ggggcatcctgtttgaaagatgacgctgagccgaccacacacgtttacatgtgactaccacggccagaggagcaaccctactgagggataccgagccccgttaccccgtagggcgagggcctgggcagctcaagagcggcaagaccctaagagagggtttagtgtgggccccgccggttgattctggggcctgctagccccgccccacacatacagggggctgctgcctcctccatcgtggagggggaggtgtgtcctctctccccatgatcggctgcagttcccattttgtcttagatgttatacctggggtgggggcacctcacactgccccagaggatgcccctgagcaggaatcgcgggggtggagaggagcgaaggtggcccccttggagcccttttggagctccggctgcagcccacactcctgctcagaagtgcgcctccgttggggatccaggtccaaggcctgtcaccgtcccgcccacaggtgtcccgacccaggctaagcttgagcatggctgagcaggagcccacagccgagcagctggcccagattgcagcggagaacgaggaggatgagcactcggtcaactacaagcccccggcccagaagagcatccaggagatccaggagctggacaaggacgacgagagcctgcgaaagtacaaggaggccctgctgggccgcgtggccgtttccgcaggtgagtctgggctgcgggagccgggtggccgcccgttcactccagctgtcttgccgctccccagcccctacttccactggtgggggtggggccctcacctgctgtcactccccagaccccaacgtccccaacgtcgtggtgactggcctgaccctggtgtgcagctcggccccgggccccctggagctggacctgacgggtgagtgccctgcggccgcgggggtccgggcggcccctggtggggatctcgggaagtgcagccagggggccgcgcagggctggggcttcgcgcagggctgctgggcagtcattgagggggaggtccccccaacaggcgacctggagagcttcaagaagcagtcgtttgtgc

SEQ ID NO: 21334 - DNA, 1522 bp, Homo sapiens
gatattctaaatggaattaaatgtcctattatcagtggcattcatcacattcaacaaaatagcatcataaaaggttgatattgttgagcgtaatgaatacctgaactccagttacataaagatgaggatcatgtctcttcatattaccttaatgtcattacattttgtagaaaaacttgtctcaggctgggcgcagtggctcacgcctgtaatcccggcacattgagaggctgaggcaggcagatcacaaagtcaggagatcgagaccatcctggctaacatggtgaaaccccgtctctactataaatacaaaaaattagccaggcgtggtggcgggcccctgtagtcccagctactggggaggctgaggcaggagaatggcgtgaacccaggaggcggagcttgcagtgagccaagattgcaccactgcactccagcctgggtgacagagcgagactgtgtctcaaaaaaaaaaagaaacttgtctcaaaagtgctatgatattcttcctgaaatggacattgtagcatctcaatatcttttttaaaaaactaaatttttgaaaaattgtgttttgagacaaggtctccctctgatgtccaggctagagtgcagtggcgcaaacacagctcactgcatcctggaactcccgggatcaagggatctcccacctcagcctccttagtagctgggactacagacacccaccaccgcgcctggctgatttttaaaactttgtatagatggggtctcactatgttgcccaggttggtcttgaactcttgtgctccagggatcctcctgccttggtctcccaaagtgttggaattacaggcctgagccaccacaccgaacatagcctattaatgtcagcctatttctctatttatgaattttctgaagtgttatttttatattcagatttatagaagcttttgtcttttatgaccttgacacttttaaagggtactctcagctattttgtagaatgtccctcacactggggactctgaccttatgactggacaaggttttgttttttgtttttttttttttttttgagacggagtctttctctgtcttctaagctggagtgcggtggtgtgatctcagctcactgcaatctctgcctcccaggttcaagcgattctccttcctcagcctcctgagtagctgggattttaggcacccgccaccacacccggctaattattgtatttttattagagacaaggtttcaccatgctggccaggctggtcttgaactcctgacctcatgatccatccgccttggcctcccaaaagtgctgggattacaggcctgagccaccacgccctgctggtttattttattttttggcatgaataccacagctgggatgtcatcttctcaatgcatagtggagatatgcaatgtcagtctgtccaactcctggtcctgttagttcaggtggtggcagcggctgccggggcttctcccctacatagttactgttttccctttgtcatccataaatacctt

SEQ ID NO: 21335 - DNA, 1055 bp, Homo sapiens
ggcacccggagaggcacccgcggaggcgcccgtggaagaggcagaggtgccggcaggaattcaaagcagcagctttcggcagaggagctggatgcccagctggacgcctataatgcgagagtgagtcccgggggagccagctgggggcctggtcaaagccgcagtggggagcaggccgcctgtgaatgcaagcctctttctcctctgtgtttcagatggacaccagttaaacagaccagcaaatccgcgtgcggaacaggacccaggcgtctcctcttgctccctggttggggggcggtggctggggctgtgcggccaatgatggatttgtttcttttatgttttaaaataggatttaaaaactcatgtaaaggttttttttttttctttttttttttttttaattctgaaacagacctgttttgtaccgagttatttttgggataaattttactggttgctgttgtggagaaggtggcgtttccaccttttccataataaaatagaaatgtgtgtagaactggaactgtttgattcgtcccactgttggagtccaggcctgggccaggattttggtgtctgtccagctgggagggggtgggagaacctgagttggggatggagggagcagccccatctggtgttggacacctgaagttggcatgggttgtgggggtggcggggggtccccgctcctggagggccgaagctgcctgtcttctttcttatcttctttcctgcctcacacctaacaccttcctctctaactcaccaggtgggaggacacctttgcccgggagccacctgttgacccttgtgcctgtgcctccaggtgaggggaggttggggtgggatggctgccctgtgtgccgtccacaggcttcccacagccagaacatctctgggctgttcctttccttcttgtactctggttttcagagaaacgtggattcagcagttttgactttgtagtgtaattcctttttctgtttgtttttttgttgttgtttttaaccttgccacggagcaaggcatgaggatcctctcttagttgt

SEQ ID NO: 21336 - DNA, 1050 bp, Homo sapiens
tgtaaacttacggacacctctttgtggctgttggagtttagtttttatatacacagagttatcagacattatttataaaacttagtttaaaaaaaagacaaaaaaaaaaaagccaagccgtgagccgaccagaaggccgtcctctttgatatcttttgcaattgtaccgaaagtgacttactcctctgcccttcctgcttccgtctcttgccggtgccgtggtgtcgtccgtgcctggtgaggttttgtgcagcggtaaagtgctggtgcttctggtgacctttgacctgtgggtgtcacttcttgtgtctgttttcccgtgttcgttttttgggtttagttgtgcttttgcttctgctggcttgctggacctgggctggggtgccaagtggcgcctgctgcgtcagagctcaaggaatctgtgcccaccaccagctcctggtccgtaggaggtgagacatggggttctgtcatgcccccctccactgagccttggctacatctgtgtctagggcttgggctgatctagtggcggggtaggtgaaactggggtcccttggggcgccccacgctgcttccacacccaccacctctggccttgggtggtggcattacagggatgagggagtcactgtgggtggccacagggctatggccaagcgttccctggccgtcttcctctggcctcagctttgttcctataggctgcccgcgccgtgggctgcaggtctcgccgcccgcttgatccctgaggtgtttccatgctgcgggtggtgcttccaggcagagtgggtgggggcccaccgggcaccgccctttcttccttgtccctgcctcactctgagagccttgggggtctccaccagtgcagacaagggctacagtctccagggccgggtcttgtccctcttctccgctggtccacgctggcagctcttggcttcgggcctgccttctgcctccctttgggatctgtgtcttccagggatcagctgcttggcttctgctggaggtgcctccctgtgggggcgcagcctgcctcctgctctc

SEQ ID NO: 21337 - DNA, 1048 bp, Homo sapiens
tctcacacacatctgctcattcacgcactcagcagatacgtattgagctccagcccagtgttgcgcaggacacagggggccccgaggttccctgggttactgtgggcagtgcccctccccaccttccgtttcctgcgaggagggaacatccatagagggacccggatgctgtgccctgtgctccccacataggttcaccattgtcatagctaggagtgtcatttgagccaggggccacaccagtggggtggcggggtggccagccacattaggaaacttctgtgggggcccaccttcctcctgccctcgctgtgggattaagttagaccagtaggacacgcagcaacatccaggcacaaggaaaattccatggaaggtgaaagaagcaaagagcaagagaaagacagagtttgctgtttgcctgggatcccacagctggtcaaaggcagagccaggctgggagccgctgtccccagttcaggtctgcagggtgggtgaggacgtctttctcgccacactgcccactctccagtccagacaccctcagactctgcgagtgccaccctgtaacagtgaggggaacacgaggggcctggcctcacctccagcctgcaggggagacaggtgtaaacccacatcccgtggtggggccacgagaactcaggtctggggggcactgcggggagatttggtgatgctgagctgattcgaatgaggtgagaaggagcccagcagctgtgtgggggcgtgtcgctggcagaggggaataaaggtgctgaggtgagggtgacagcatcgcccagggctgactggcactgggagctgtgggcttcactccctcttcctgggtgcacgcttgtgctccaaagccaacctctccctgcctctctagggagctgcagtccatggctgaccaggagcaggtgtcaccagccgccatcaagaagaccatcctggacaaggtgaagctggactcccctgcagggaccgctctgtcaccttctggccacaccaagctgctcccccgcagcctggccccagcgggcaa

SEQ ID NO: 21338 - DNA, 1025 bp, Homo sapiens
gggtccccgtgtctgtcctcagggaccctttcctgcaactctgcagggccaaggcctcgggagggcgggggtatgtctggagcacccagccagagcggtgggtgagggtcccgcataacctccccctgccttgcagtgagcggggacgcgctgcagctcatggtggagttgctgaaggtcttcgttgtgggtgagcccagggcccacgctccctccgggcacagcatccggaattttgcgtttttccagcgggaaaaccaagacgtgttttcccgtttcccacaagggcctaaacttgggtctcctgagcctgtttgtcaggtgctgtggcctggttctgggggctgcccgtgggtgttggggggggcaccggcccaggctgaggccctcactgggctcgggtttaagatccccccagcatcccccacctctcgcgtttctcaccgcagaagcagcagtccgcggcgtgcggcaggcccaggcagaagacgcgctccgtgtggacgtggaccagctggagaaggtgcttccgcagctggtgcgtgagcgtgggtcggggcgcaagtgggggtgcccggctggctggccctaagtgcttctcttccccacagctcctggacttctagggatctcagccgtggctgaggccacccccagaggagcccctggtccacagaagcaggccttgtgtttccagcggcctctgataagaggcagggaaggacctgaaggatttggagttgattcaaacaagatctctgggagtctccagcctgtgcagaaggggcaggactgcagtgcactgcgggccttggagtgtccagtggggacactggtgtgggaaggggcagcacctggggagtccctgcctctcctccctgggacaatagtgtgcatgccacccggggtcctacaggcaggtgctgggaaaggcctggccagcaggtagcctgtgtgtttgacaaacagcagctggcagcgctgcctcctgcccacattcctgccacccgacatcaaagctggcg

SEQ ID NO: 21339 - DNA, 1045 bp, Homo sapiens
gagatgaggccccaggacggggacagtgagatcgtccagcccgaggagccggcaggacctaccccagccgccaggcacagtggtttcccttttgtttgctccccggtgggcgccagcactgggctaggaacgcgtggtttcttcggtgctccacgttacacacacttgacagggattaaccccacctgccagtggagaaactgaggcacgggggcgttaagtgactcagcagggctagggtcagacctaggccgtctgagccaggatccgcccaggctggagggcgtgccctgctcttccctgttcctggaagtggagctctctgggggtgccatgtgcagaggaccccatcggtgcaggcagagtggtttctgaacctttctactgctctacctgaaggttggggcaccgagcttcctcgatgtcagcagggcctcgtgggcctctgtggcctgggaagggagggtctcaggcccttgtgaacccatcctggagggaggacttcagccctgtagaagcagggagaattctgtttctcctgaatcaggcccttctttatcacccaaggcagcaggcgtggggggcggggggtgtcggtgtggggaactctggtggtggagttgaagattcttgccggaattcagaaagagaaagtcactgaggcttgggccacctcactgggtggttgtgagaacaccaggttaaagtagccaaaaggccactgccggagacggggcactgggtacacaccccaggaggtcatgtgttctatcaagcccacctgacaactagaggcccaggggctctggccagagctggagttgtggtcattgcagagaatgagcgtgagaatgacggggagtggggggcccgtagccctggcgtggcgcccacgtcatggggcaaagctggctgtgtcctaggcaccctccacaaccgccccagtgctgggcctgccttccgaggccactgccgatgtacggggaagccccatggattgtcgaggcagacctggcatccgccactctctggcgtggtcttcctt

SEQ ID NO: 21340 - DNA, 1030 bp, Homo sapiens
gcacacacgctttccggaagagtccagcttgcaggtcctctgagaatataatgttgtatccgttttacctaaactccgtcaacactagtcttaaaacctaaagcctgttactgctgtctaacggaaaggagatgatcattcatgtttaagccacactctaaggttgcatagtgcctggtccgggaggtcaccctgtctcatttatcctccccattttttttggcctaagttcaggtccacgaggtcctgaggcttttctcctaagtgaccagttacgctgctcccttttgtattgttgggttatgtttataaacgtttcaaaccagcagttttccgctttgattcaaataaccattcccgggcaggaccagtcccaggctcgctgttctgggcagagcccctggccgtcccaggcccaagtccctgctggacccagttggctccagctgcagagagtcagtgtggacaggggtgaggagggaaccaggggcggccacccctctggaggaaacagggcttggaggagcaggggggctctagggggccggcctggtaagaagcagccagccaaggtcccataggcaggtgctgttaggcccgcaaggcagcgacgtggtcacaggcacaggtcacgtggggtgtgtcatggtacctgatgagacagtgtccacactcagtggacacctcccttcagccctaggagttttgaacaacacaggaaaccaccagctccaacatgtccagagagcacctcccgacagcagcagaacacatgctctcctcgagcgcacgagaactttgtccaggagaggccagatgttagaccacaaatcaagtctcagtgtgttttgaaagatagatactaaaccctgtcacagtggcacgagcctatagtcccagcactttgggaggccgaggcgggaggatcacttgagcccaggaattccagaccagcctgggcaacatagggagacccccatctcttaaacagaataaaatgtattatacaaagtttcatctctgagcccac

SEQ ID NO: 21341 - DNA, 1096 bp, Homo sapiens
agccggctcgctggcctctcctgccccgggagctgttcctcagcgctggggacagatactctagtcacgggtggaaagagccccaccaatgctgaggaggctccctgaagccaggcatgcagggaagccctaggtgctagcagggctgcaaaggacaccccagttcagagcagctcgggctggcagacctgcctcacgcccacagtgacagcagccagaccctgaccacacgtcacccactggcttccccggggcagactttaggcaccacctacacctgtacatgtgcccacaacatcctgcgccctgccagggaagttttccctggctgaggcagggaccagcctactgccctgggctgggaggacttagcaacaggggaacgtggggtcagctgggcgtgacccaggccctcacctgcggcacacttgagcttggtgaggatggcctgggtctggctgtcacgctctcctcgctgctgtaggaggaagccacatgcgtgaggcccatgctccacatttcctagagctcgatgcccagcccccagactgagaggggatgaaggcagattcagatctgggggagaatgaggtgggggaggacaggaggggccagcagtggtcaggaatcctgggggcaaggtctctgaggaggtggcccgtacctcggcaatctctggggtggactcagccttgctgacgtagctgagcacatgagaccaattctgcaagtagacgctgacctggcgggggggcgcagagccaagtgagcccgggcgccccaatggcccagccatgctgcccacccccgcccgccgaggcaggccgaccttgatgacattgaggcacatgttgatgacgtgtttggcgctggtgcagtagtcccgggcccgggaatagcacttgagggcgttgctgaggtccccacagtccaggtagtggtcgcccaggtcgtcgtggccgcgccggatgctctctttgatggagttgcccttgtagttcttcaggtctgtgtccagcttctccagcttcagcagcgccttcttccgcgtggcctccacccaggccgtgtccagggctgggggctccacgccgct

SEQ ID NO: 21342 - DNA, 1052 bp, Homo sapiens
gtgagtgggttcgaggcagggctctggggccgctttaggatataacgggatgaagcccccaatgcgaacttgggggctgggcagcgcagggcctcagcgcccacggtctacccgcggcccgggccttatgtgcgcctcagcgaggcccaatttccacatgcctcgtttccagcgagctgtcggtgagtcccggcgagccccgacccctctctagccacggcctgacgggtacggtggtgacctcagcctctgacctccgaccccgcgccgcgacctctcgtcgccggtcccctcggagccgggcgcggtttccggggaacgcgtttcccgccgcaccgtgggccgcccggaccgcgcaggaccgggcaccttccggtggcggcgcggagccttgggcccggctgcggcccggcggcggccccggcgcggtgcgggcgttcgcggcgccccgggagctgcaggggccccgggcggcggcgaggccggagaggggcgggcccgggacaccggcacccggcgccctcggagccaaaggcgcgcggcggacacggcggggccctcgcgcggtgaggacgcggaggcgtgtgggctcctgtcacttcacacagcaaacgctgcccgccgcgtggctccggaggagtctcgcgaggggcgcccctgtggcgtttcgggccagccgggccgcctggccgggtgcggagaaggaagctctgcccttcccctggcccggcgcggagccgattctcccgggaaggggccgggggtcctaacttcaccgccgggcggcctgctcagggccaggcccgcggggacgctggcgtcaaggtttcttcccccttcacgccagtcccctaccaggccgacatcgagtcccgctccccagggagggtcaagtcccaggggtccagcggctcccccgaggtccgctaggaggtggcggcactggagtggccgttctccagcctgcaccgacccccgcctttagtgcccccgcgtgtgacccaacggtggtactggagcggccttagaagggtgaccgctgcctctgagtt

SEQ ID NO: 21343 - DNA, 3678 bp, Homo sapiens
catcagggtcttgggacatagcagtcgtgcccctgtgcgcctcagtttccccatctgcagagccagggtgcgggcgcaggtgtcactgtggtggtggtgctttgggagatgcacagcccacgcacccctgggtgtcagccctgccgcatacaggccgtccccatgccccctctggagttgccgacccggcgcatcccttccaggcatccgcgacttggctgctgtcaacctggacagctcactggcggacctgggcctggactcgctcatgagcgtggaggtgcgccagacgctggagcgtgagctcaacctggtgctgtccgtgcgcgaggtgcggcaactcacgctccggaaactgcaggagctgtcctcaaaggcggatgaggccagcggtgcgtgtgggtggccaggcgggagtggggtccccgggcctccccagcccttcctccttgttgtctggaccgtgtcccggcaggcataccgcccttcgtcacgggtgccattctgagcgttcccaccccgactcccacctgacgtagcaccgtggggacctgcgtgcgtgtctgtgtgtccttgcgtgggtgccagggctctgcacccagaccagcctggcatctgcccctgtcttcacagagctggcatgccccacgcccaaggaggatggtctggcccagcagcagactcagctgaacctgcgctccctgctggtgaacccggagggccccaccctgatgcggctcaactccgtgcagagctcggagcggcccctgttcctggtgcacccaatcgagggctccaccaccgtgttccacagcctggcctcccggctcagcatccccacctatggcctgcagtgcacccgaggtactcccgggccctcctctggaagcggtggtcagtgctggccatcacggggcccgtggctgccgcctgcacatgctgagtgcccggcactgccattgcagctgcgccccttgacagcatccacagcctggctgcctactacatcgactgcatcaggcaggtgcagcccgagggcccctaccgcgtggccggctactcctacggggcctgcgtggcctttgaaatgtgctcccagctgcaggcccagcagagcccagcccccacccacaacagcctcttcctgttcgacggctcgcccacctacgtactggcctacacccaggtgagagccaggctggtcctagaggcctacggcaaacgtctgggctccccacctgtgccctggctttgggggaccgtcgcttaggaggccccgccccttccatctgctcagcagtccctccttcctctcagagctaccgggcaaagctgaccccaggctgtgaggctgaggctgagacggaggccatatgcttcttcgtgcagcagttcacggacatggagcacaacagggtgggtcctggacacccctgaggccgcaggacccagagtactgggcaggaacggaagggggaagggaaggatgggatgggacgcgaagagcgttaaaggccccccaacttcacccctttaatagccgatcccggccggatgcggttgctcatgcctgtaatcccggcactttgggaggctaaggcgggcagattacctgaggtcgggagttcgagaccagcctgaccaacgtggagaaaccccttctctactaaaaatacaaaaattagccaggcatggtggcactcacctatagtcccacctactcgggaggagaatcgcttgaaccgggtaggtggaggttgcggagggaggagaatcgcttgaaccgggtaggtggaggttgcggtgagctgagatcgccccactccatctagcctgggtaacaaaaatgaaactcgtctcaaaaaaaaaaagcccacccgcagtgtagcacagggcaggccggtgctgtgggtgctgccagcacctgctcagagcccgaccccacaggtgctggaggcgctgctgccgctgaagggcctagaggagcgtgtggcagccgccgtggacctgatcatcaagagccaccagggcctggaccgccaggagctgagctttgcggcccggtccttctactacaagctgcgtgccgctgagcagtacacacccaaggccaagtaccatggcaacgtgatgctactgcgcgccaagacgggtggcgcctacggcgaggacctgggcgcggactacaacctctcccaggtgcgcaaggggcctgacgggaacggggacagggacaggagtggggtgggacggcagctgatcgcatcccctgcaggtatgcgacgggaaagtatccgtccacgtcatcgagggtgaccaccgcacgctgctggagggcagcggcctggagtccatcatcagcatcatccacagctccctggctgagccacgcgtgagcgtgcgggagggctaggcccgtgcccccgcctgccaccggaggtcactccaccatccccaccccaccccaccccacccccgccatgcaacgggattgaagggtcctgccggtgggaccctgtccggcccagtgccactgccccccgaggctgctagatgtaggtgttaggcatgtcccacccacccgccgcctcccacggcacctcggggacaccagagctgccgacttggagactcctggtctgtgaagagccggtggtgcccgtgcccgcaggaactgggctgggcctcgtgcgcccgtggggtctgcgcttggtctttctgtgcttggatttgcatatttattgcattgctggtagagacccccaggcctgtccaccctgccaagactcctcaggcagcgtgtgggtcccgcactctgcccccatttccccgatgtcccctgcgggcgcgggcagccacccaagcctgctggctgcggccccctctcggccaggcattggctcagcccgctgagtggggggtcgtgggccagtccccgaggagctgggcccctgcacaggcacacagggcccggccacacccagcggccccccgcacagccacccgtggggtgctgcccttatgcccggcgccgggcaccaactccatgtttggtgtttgtctgtgtttgtttttcaagaaatgattcaaattgctgcttggattttgaaatttactgtaactgtcagtgtacacgtctggaccccgtttcatttttacaccaatttggtaaaaatgctgctctcagcctcccacaattaaaccgcatgtgatctccaccaccgtcctttcttccctcctccctgacctggcagctgcaagctctccagctccaccccacccagtcacggggccgtgaaggggatgccctctgtcctctggtccccagttcccacacacccctaggccatgtcccagagccggggctgggccggggagtgaggaaggagcccgcgtggcagccccgggcttcccgggaaagcgctgggactggcgggggggggggtaccgaggctctggccaagaaacaccaccagtgagaaacgtgtaggaggtacagacactgggaagttggcttcagctgaggagaggcccctcgtggagaatagtatttgcttgaagtcagtggattgcaggcattcgccctgccaaagatgccgtcacagcctcaccaagacggtgtcaatagcgccactggctggccaggttgacccagaagacttgggtttaggcaaagga

SEQ ID NO: 21344 - DNA, 1028 bp, Homo sapiens
ggctgccctgagagaagggggctttctgctcctgcacacactgctccgggggcaccccctcggggacatcgtggccttcctcacctccactgagccgcagtatggccagggcatcctgagccaggtgcggccgccgggcagggggacagggtgggggccgggtgagggccaggcgggcagggtgctgaccaccgcccccacaggacgcgtgggagagcctcttctccagggtgtcgctgcgcctggtgggcctgaagaagtccttctacggctccacgctcttcctgtgccgccggcccaccccgcaggacagccccatcttcctgccggtggacgataccagcttccgctgggtggagtctctgaaggtcaggccctgccccacctccaggccccaccccacctcccaacttgccgagtgtggcctgaccctccccgacccgctgtagggcatcctggctgacgaagactcttcccggcctgtgtggctgaaggccatcaactgtgccacctcgggcgtggtgggcttggtgaactgtctccgccgagagcccggcgggaaccgcctccggtaggagcacggcccctcaccacttccccttccccaccagcctccccatccccagcctgagctccccgcctctgcccccaggtgtgtgctgctctccaacctcagcagcacctcccacgtcccggaggtggacccgggctccgcagaactgcagaaggtgttgcagggagacctggtgatgaacgtctaccgcgacggggcctggggggctttccgccacttcctgctggaggagggtgagcccccgacactgccctgcccctcccgggagactgcacccgaaggccccgcagcagccccacctccctgtttccctagacaagcctgaggagccgacggcacatgcctttgtgagcaccctcacccggggggacctgtcctccatccgctgggtctgctcctcgctgcgccatgcccagcccacctgccctggcgcccagctctgcacggtctacta

SEQ ID NO: 21345 - DNA, 1022 bp, Homo sapiens
tgttggcacccatctctgagccccatgggccacatgtgggcaggacctggaaagaaccttggctgcagaggactgagggggccaccatctggggactgggctcccaggagctgcccctggagtggcagctctgtaatgacacctccacccacgggtcaaacacagcagggggcgaacctttctcatgaaggctccaaggctgccattaccacacttgtcattactgcccccagctgcaggcagtgtctgggtgggtgggtggctgggagcggctcggtgtccacgctaagcctctgaggctggctctgccataggcttgtcctgggaggagtgtaaacagcgctgccccccgggcgtggtgcccgcctgccacaactccaaggacacagtcaccatctcgggacctcaggtgggtgctgcggcctgggcgggctcctctgtcccctgcgcctgccattgcaagtctggcagggacacgcggccacggtctacgccccaccaagctctgacgggcctggggcatggggcaggtttgtcctcaggtcccttgcccattccctctcggttcccttggggtgaggtgggtgcgccctacctctccgagcctgaggtgggtgcccagccaggatgcttatccaggctcccacgatgtccaggccccggtgtttgagttcgtggagcagctgaggaaggagggtgtgtttgccaaggaggtgcggaccggcggtatggccttccactcctacttcatggaggccatcgcacccccactgctgcaggagctcaagaaggtggactaatacggcctggggggtgcggggcgggccaggggacccacaacccagcactgacctggcccctcatgcaggtgatccgggagccgaagccacgttcagcccgctggctcagcacctctatccccgaggcccagtggcacagcagcctggcacgcacgtcctccgccgagtacaatgtcaacaacctggtgagccctgtgctgttccaggaggccctgtggcacg

SEQ ID NO: 21346 - DNA, 2146 bp, Homo sapiens
ccaggagccgctgctcatcggctccaccaagtccaacatggggcacccggagccagcctcggggctggcagccctggccaaggtaggtggggctgggcttgggggtccctcaggctcctgctccctgggactgggttgcgccatggctgggcactgctgctttctctttgccaagtggaggcgggggcttccccaccaggagcctctgtcccccgggctatgctgcaggtctgagcagaggcactgaggctgacagcagggagagctcgtagccaggctcgctgggccttccctggaggcctgatgccctgcagagcgtctgccggacacggagccgagctggaggagccgcttgggtgggaagagcgaggcaggagcaggcctgggggggtccacggcaccatcagggtctcccgtgtcgcccacccgtccctacagcttcctgacccactagcagaggcctggggacctttagagagaccaggcacaggagccccaacacccatgatcactcacgccctctgccccccaacttctgcagcctctgagatgcaacatctgggccaagggggccttagtgttcaggccacagccaggctttggtgggtccacatcaggctgggaggcagcaaggccggaaggggaggtcttggaccaagctgagggcagggccatggcggctcagtcctcggacccctgtgccatggcagaattaggttggggacaggaagtgcatcggagagggccctggaaccctggccccacatgagagtctcggggaggtgcctgcccccagctcaggcagtggtagagggagtggggcggctgcccatccaccacgtacccccgcaggtgctgctgtccctggagcacgggctctgggcccccaacctgcacttccatagccccaaccctgagatcccagcgctgttggatgggcggctgcaggtggtggaccagcccctgcccgtccgtggcggcaacgtgggcatcaactcctttggcttcgggggctccaacgtgcacatcatcctgaggcccaacacgcagccgccccccgcacccgccccacatgccaccctgccccgtctgctgcgggccagcggacgcacccctgaggccgtgcagaagctgctggagcagggcctccggcacagccaggacctggctttcctgagcatgctgaacgacatcgcggctgtccccgccaccgccatgcccttccgtggctacgctgtgctgggtggtgagcgcggtggcccagaggtgcagcaggtgcccgctggcgagcgcccgctctggttcatctgctctggtgagcccacactctgcccccaaggtggtcccttccctggggaaaggcaggcgaactggagctggtggtcccctgaggtgctctctgggacggggatgggcacacagtggcacgggatggggctgagcctcgtgacgtgctctctgggacagggatgggcacacagtggcgcgggatggggctgagcctcatgcgcctggaccgcttccgagattccatcctacgctccgatgaggctgtgaagccattcggcctgaaggtgtcacagctgctgctgagcacagacgagagcacctttgatgacatcgtccattcgtttgtgagcctgactgccatccaggtagggcccagcctgccagcgtgtgagcaacgccagccccagggctctggctttccctggagcccaggagctgcagtgttgagtccggggcccctgacagcccctttgctaggcagagccttgtgctgggggcaggacgggaggggaggaggggtctcagtggggctgtgtgggggccataggggcttctttcctatcaggagacctgggagggtcgatggggcgcgggggtggagatggcctagtggggccgggggccgcccccaacagctgcacctgctggaggttgcaacctgagtgtcctgttcccaccccagataggcctcatagacctgctgagctgcatggggctgaggccagatggcatcgtcggccactccctgggggaggtggcctgtggctacgccgacggctgcctgtcccaggaggaggccgtcctcgctgcctactggaggggacagtgcatcaaagaagcccatctcccgccgggc

SEQ ID NO: 21347 - DNA, 1976 bp, Homo sapiens
gtcctcagttccaccatggcccctccaggggcctgcagcaccccacagggcccccacctctgggcagcttccgtcagagatttaaacacccgcctgtcccacagggctctacggcctgccccggcggtccggcaagctgaaggacctgtctaggtttgatgcctccttcttcggagtccaccccaagcaggcacacacgatggaccctcagctgcggctgctgctggaagtcacctatgaagccatcgtggacggaggtgggtcgggcattcgcgactgctgcgccgagggctcctgctgctcacgtggaataggcagtgttttctcttcttggttctggtagaaccaggtgctggcaccacctaccctccccggctgtgcccctggcctggccaacgggctcagggaggtgtgggccacggggtaggccgcagtttcccaactgcaccccagaggtgtcgcgggtgtgccctgacctgagcgtaccagtctcctcgcttctgatgtctggctggtgctggggccggggccggggctggagtgacgagaggcaaagcaggaggttcttgaggggccctccaggcccccacccccaccagccaagcagcggacagcaccggccctgctgtctctcccctcccaccctccccactacccttgcccacgtccccccaccccaggcatttcaaccctctcccgccagcctggccctcgctctgactggcatttgacctcggacaagcgccacgccgtttttttatttttatttttatttatttatttatttttaagacggagtctcactctgtcaccaggttggagtgcagtggcgcgatctcagctcactgcaagctctgcctcctgggttcacaccattctcctgcctcagtctcctgagtggccgggactacaggcgcccaccaccacgcccggctaatttttgtatttttagtagagatggggtttcaccatgtttgccaggatggtctcgatctcttgacctcgtgatccatccatctcagcttcccaaagtgctgggattacaggcatgagccaccacgcccagccatgccatttcttaagatccaggtgctccctccccgggcggagaaggacctcctgagggggaggctgagccctgggctgcccttgggtgtgagcggttcacacacccacccaccctagggcagagccagcccaccaggggcgaggaggggccctgctggccgagaggtggaagcccttctcctgcgcccttcctgctgccagaccccaccccaagactaaggttatgctccccgggggtgaccggtgtccctctctccttcccgagcctggacacttggcctttgtctcctcggttccttatcacggcctgttctggtgcaggctgcccttggcgctggagaggccactggccgacgggctcatcagagctgccggtgacaccaggggccaaaggcgtcgcctggggacaatgctgccctctgtccttcctggagccactctggccgtgcctggtgccctcccctgggcccgcctgccccctccgcctcgttccctctgtgacctggttcctgttccaggcctcacctgggctggctgctggccacaggctctgttctggcccctctgcaggacacctcaccctccttaggccccttccagggtcccactgggatggaccccccctcaccccaagccagtgaggccaagatgggaccttcgccccagagccgggtgggtgggtgggctggctgcgctgtggggcccggccgtggcaccttgaccactgtttgtggcaggcatcaacccagattcactccgaggaacacacactggcgtctgggtgggcgtgagcggctctgagacctcggaggccctgagccgagaccccgagacactcgtgggctacagcatggtgggctgccagcgagcgatgatggccaaccggctctccttcttcttcgacttca

SEQ ID NO: 21348 - DNA, 1034 bp, Homo sapiens
ccaccatgcccagataatgtttgtattattaatagaaacagggtttctccatgttggtcaggctggtctccaactcctgacctcaggtgatccgcccgcctcggcctcccaaagtactgggattacaggcgcgagccaccgtgcccggcataaataattcattttatgattttctctataaccaaaaattattcagtagtaggttttacaattttgaagcagaagcaggatgagaggttttgatgttggtttcaaattttattgtgttacatttgaaatgaattgagacttgctctgtggcctggtatgatgagattctaggcatggtctgtttgccgaaagagaaagtgaatcatctacctgtaaggttagacctcctgtgcctcatgactcaagccaaccagtccccgttgatgaatgagtttttgccaggaggacatgggtttgtttgtttttgaggaacatgggtgagttaacagcttcatctactctcagttacctctttcctgcagctctgtccgtcagtacttgacatgttttgaagttgtacctttttatttatttttttcttttttctgcatctgaagtcttaccttttaaaatacagagttctggccaggtatggcagctcacgcctgtaatctcagcattttggaggccgaggagggtggatcacttgaggtcaggagttcaagaccagcctggccaacatggtgaaatcccatctctacaaaaaatacaaaaattatctggccgtggtggcaggcacctgtaatccctgctactcgggaggctgaggcagtagaattgcttgaacccgggaggtggacattgcagtgagctgagatcacaccattgcactccagcctgggtgacagagtgagactctgtctcaaaaaaaaaaaaaacagacttctttgcctcttatgacgttttctgcctaattctattttattttttaatttttactttttctgtctttttaactggatcttttattgttggatcttttgtttttttcattttttattttt

SEQ ID NO: 21349 - DNA, 1036 bp, Homo sapiens
gggctggcctttaataggacagaggcagaggtgggcaccgaagccagaaggttgattgcagccagtgctgtgcacttgcccagcctgcaagctgacaagcaagcctggcgggagacaggaggctcctgggtcagagaccaagggctctgtccacatagcaggcagctgggcaggcagtggctgcaggtgcagtgggtatgcatctcagctgaggaacccaggcctggggaccgagtcctagagcgaccacaagcacctgccctccgagtcctagagcaaccacgagcacctgccctccgagtcctagagcgccacaagcacctgccctgggcctgagggagatgcttgctccgacttctgagctgcttgctggacagacgcccttgcaaagggtctgcagcagtggccagggcagcctccaccgtgcgggagtgcacaggccccagggaggctgtccctggtcccagcagctggcctggtggtgggaaacggttctggcagattcctttcatttcctcttacatgctcagcatccaggctgagagcccgaggccggccacaggctctgaaggaggaaggagcggtgtaggaggcttgagaaagtgggttgtaaaatggtgggttggcgcctcaggaagcagatccgggagagagtgaagagggccaccaagctctctgtgagaccagggagctggtgaccacaggagtcacctggggccgaggccgtgctgcaggaaggagcgttcctgacacagcagcacacgtccaccgaggctgagagtgtgggtggcctgggagggaaggcgggctggtgtggatcagttaagatgcttttagctacaagtcacaggacaggatatgaaagtgacgtgaaccagagcttcccggcctttatctcctcgtggtaactgtggaaaatgacacgcctcactaaaataaggagagaactgaggggtccatatcctgagtgcccaaaatggtctcagcaggcggcatgcacggccccatggcaggacgcgctgactgaggcccagga

SEQ ID NO: 21350 - DNA, 1056 bp, Homo sapiens
ctgcactttgcagatagggcctgttctgttcctggttcactctccctcctctcttccaggaacggaacaaggtcagggaagcacttgctgccagcccatgttcctactcctgaaacaaggaattaggtcctaccctcagggtgtacccttgccttagagaaatgccctctgctctttctggggtctgtaacgaggcatctgtatgtctttgacacagcccttgccgagttcctgcagcctttggtagcccccgccaccaccaccaattctagctcttagttttaatgaaaatgaagtttgcatttttgcttttcattatctttttttttttttttttttttttgcttttggatgatttacaaggatagtggaggagtgctagcttcatgatgccttcttcaagtctgaaatctgtcttgttttctgaccaatgcagccaaagaaatgcatattcctccaagcgttgctttgctttaaccatgtctcataaatctcaacatcctcatgtttcccttgtctttcccttgtaggacttataactcaactcattttgctttaacttaaatggaatttttccttaagtttctagatttgtggaattttatttttttgtctgttactgatttctaatatttttacattctggtcagagaattaaattactatgatgttaactcttctgagagggaaatattagttcttaaactacaattatcaatctatctgtttttgtcaattgttgctttatgtgttttgaggttcgctgttaggtgcatacatgtttaggttttttgccttcttgatcttttcctccctttaccagtatgtaacatccctcataacccctcatgttgtatttcaccaaaaaacctattttgtctgacatgaaaattgctataggccgggcggtggctcactcctgtaattgcagcatttggggaggctaaagtgggaggatcgcttgaactcagaggttccacaccagcctggacaatgtagtgagacatcatctcaaaaaaaaaaaaaaaaaaagggccgggcacactggttcatgcc

SEQ ID NO: 21351 - DNA, 1213 bp, Homo sapiens
gcgtagaagaaactgatgctttacttgagggcccatctcgggatgtccacagggcagagctaatcctgcgatgctcctcagatgttgatcataagcaatatgttcatcatggctaacttcaagttaattgataaaaaagctttaaaatttttctgttttgaccaggcacatggctcacacctgtattcccagcactttgggaggccaaggcgggcagatcacctgaggtcgggaattcgagaccagcctgaccaacatggagaaaccccgtctctactaaaaatacaaaattagccgggcgtggtggcgcatgcctgtaatcccagctacttgggaggctgaggcaggagaattgcttgaacccaggaggtggatgttctgggggtgtcgagatcgcgccactgcactccagcctgggggacaagagcgaaactccatctcaaaaaaaaaaatgtctgtttcaatttccaatatgtgaaatgtcaacagttataaacaccctccaaaaaccttgttggaatcctcagtgagtttaacgaaactgatttgtaatcctgggaaatgttatttcagtaattatgtcttctgatgtgtctgcttagagaaggagcagatctttacataacataacatgaatggaattgatgaaaggatctcgtttgatgtggggtcatttctaagtaagctagcatgccgaagctttgagtagaaccatcatttttaagttgttatacttaagcttttgcttcttttgtttgtttgtttgcttgctttttgagatggagttacccaggatggagtgcagtggcatgatctcggctcgctgcaacctctgcctcccgggttcaagcaattcttctgcctcagcctcccgagtagctgggattacaggtgcccaccaccacgcccagctaatttttgtatttttagtagagacggagtttcaccatgttggccaggctgatctcgaactcctggcctcaagtgagcaacctgcctcagcctcccaaagtgctgggattacagacgtgagcctccgcacctggcaagtttttgcttcttctttgtgcctgccacagaaagggcgtctgggtgcttctgttagcgaatgtgcttgctgcccccgctgtgaggacagcaagggctgtgtgtggcaggggcgtggcattgtgtgtgcaagagctctaccgaaatgctgtgtgtcacagttcac

SEQ ID NO: 21352 - DNA, 1092 bp, Homo sapiens
tctcagactcagcagggctcgttcagggagagccatctcagacgttgggaacatggattttttatcatgttcagatagtatccttgtctctggaaagaaggaaacgtgacgttttaacgtggcagctttggttactaggggaaacttgggcagcacacatccggtgtggttctgggtagtccgatcctgtgtgggctctgggatgctggcactggctgtcgggaagctctgttctactgccggcatctcagccttttagttactaagctagggtcttacgtgcttgtcagtttcatggtttcctttgctctgatttcttgtcttgttttggaagatcttggtgtttgttattgtcagaggtagaattgactcaatggagataaggatttttctttttcttttcttttttttttctgtagcgacagggcctcactgtgttgcccaggctggtcttgaattcctgggctcaagcgatcctcccgcctcggcctcccagagtgctgttaccagtgtcgctgaccccagcttctctcctggacagtgtgtgtggtccttctctgttaaacactgtgtcctgctcacctctggatcccacctcccaggacgtgggtgggggtctttgctgggttcccactgttctttcatcatgaaacctgtttgttccaggaactgctgctggagtttgaatcgaaaatgcggaagagggagcacgaattccgtctgcaggctgacaacatgagcaacacagccttgtcccgggagcttaaggtaactgggggcacccttgggtcgtgaaggtttttcggtttttccttggtcaggtgtggtggctcacacctgtcatctcagcactttgggagaccaaggcaagaggatcccttgggcccaggagttcaagcccagcgagcaggtgggccatgtggatgccctgtgccccatggcagggtgggcactcccgtcaaaggtgggcaccgggtgccagttcacctccgcctgcatctgctgtgtgatttggtcacagccctggacacctgcccgtggtgggcatcacggtgcacagatcagtaggaaaagcaagagctgagtctcgac

SEQ ID NO: 21353 - DNA, 1031 bp, Homo sapiens
aaaaaacctgcagtggtttagtatctagaagttataaagaactactatgaataggaaaaagataccatgatagaaaaacttagccaaaaaaaaaaatacatgccttcagaggagaggcgatacatgtggccagtaaaatgagctgggcatggtggcgcccacctgtagtcctacctactcaggaggctgaggcaggagaattgcttgaatccaggaggcggaggttgccgtgagccgagatggtgccactgcactccagcctgggtgacagcgagacctcgtctcaaaacaataaaataatgaaacaattttttaaatgaattgaatttccctagtggtaccaaaacttgctttaagactaaactaaaaatctgtcttgccatggaaggacataaaaggtttatccaggccgttcacaagccgtatgtgtgtagagccatgtgtatagttgcggatccagtgctgtgaaaacataccgaagagacatgttcttgtggatatgagaaaaaaaaataggaccaaaggacgtattttgggggtggcattttgagaaacccacctgttgctgcagcatttgaatttgactgtggcgtgaggctgcggtgcacattcctgtgcatgtttttaccagcatgtgttttccatctctctgagaatcttcttgtggtcgttgacttttcatacgtaacgtcttgggtgaagtgtccaggtctttcacccattttttctaaaatggatttttttttttttttttgacagggtcttgctctgtggcccaggctggagcacagtggtgccatcacggctcactgcagcctccatttcctgggctcaagtgatcctcttgcctcagcctcccaagtagctgggaccacagaagcgtgccaccacacccacctaatttccagaattttttgtagagacaagggtctccctttgttatccaggctggtctcgaacttctgagctcaagcagtcctcccgtttcagcctcccaaagtgctaggattacaggcatgagccactgcacc

SEQ ID NO: 21354 - DNA, 1035 bp, Homo sapiens
caggaggtaaggccgcagacgctgacgtactgggatgccccaagcccgggaactggcagcccagtgagggggtctcacctgtgtcccctgagcctggcctgtcactctgtccacgcctcagctacctgtcccctcctgcaaagggcaccgcctgtcgcgaggaactcacctggcttcctcgacatctcgggggacacacgaaaagcccccgcgagagcagcaggagcctgcacgtggaaggggctggcggcccgaggtcccggggtaacaggagggcagaggggctgggcacggcgcagggtcgggaggaggcctggagcgctcgccccgcccggccccgcccctggagcgccgcggccccgccccgccgggttgctaggggaagtgacgtcacagcgcgatggcggcggctcctttaggcagctgaaaggggatttaggcccggaagatccgagtccatccgcggcggggagagggcaagcgggaccggtaggggccggagcagcggcggcggcgctcggactgtcccatccgccccgtattgaggcgctgggagcggcggggcgacaggaaagcgatggtgaaagcggggccgtgaggggggcggagccgggagccggacccgcagtagcggcagcagcggcgccgcctcccagagttcagacccaggaagcggccgggagggcaggagcgaatcgggccgccgccgccatggagctgagagtcgggaacaggtaccggctgggccggaagatcggcagcggctccttcggagacatctatctcggtgaggccccgccgcccccgcccgccgcccgaagacccgggccctgcggctgccaagaccaagcgcgatcgcggaaggaagtggtggcccccgcggggtctccgcgcaagtcccggcaccgccggatcgtggccagaacccaacggccactaggctagcgcggccaggggtggggagggcagtggggagcggacgtgggggaggggcaggaccaggtcgggggagcagggtctggagaggggagggtt

SEQ ID NO: 21355 - DNA, 1050 bp, Homo sapiens
ctctgggcagatggggcaggaaccctgaggctcccgcgccctcccatggcctctgatgtgggacactggagcgaggcacgattctgaaggactccatggatctgggaggatgaggcccacctccggttggtggccaaagccgtccttgcggggccggctgcttcacggacactctccgggtcgggctggtgggccccatcgtgggtgggaagtcgcctgagcctgggccgcccttgagcttctcccagtcttgactttccagagggtccgtggctgtggtcatggtcggggcaggtggaaaatgctgcatggaaacctgatcctgtcaccttggagtaaatgatgatgtcgccggcttctcgccacgtctaaaggataaatgcatttgaagaaagtgggtgttgggtttgttatgggttaaagtgcttttgaaataagtaaattattagtttgattttcattcttggctacttacactattcatgataatcacagagatacttggacaaagaaatatatttgggcaaaagcaagaatttccttctttttttttttgagacggagtctaactctgtcgcccaggctggagtgcagtggcgcaatctcggctcactgcaaggtccacctcctgggttcccaccattctcctgcctcaacctcccgagtagctgggactacaggcgcccgccaccatgcccggctaattttttttgtatttttagtagagatgggatttcaccgtgttagccagaatgaagaatttccttctgaagtgggaacatatggctcatgctggtaatcccagcactttgggaggccaaggtaggaagatcacttgagcccaggagttggagacccatctgtgcaacatagtgagacgctgtctgtacaagaaacttttaaaaaatgtagctgggcgtggcagtgtgctcctgtggtcccagctactcggagctgaggcaggacgactgcttgagcccaggaggtcgaggctacagtgagctgtgacggctccactgcattccagcctgggagacagcaagatactgt

SEQ ID NO: 21356 - DNA, 1590 bp, Homo sapiens
gctgggttcagtggctcatgcccgtaatcccagcactttgggaggccaaggtgggtggatcacctgagatcaagagtttgagaccaacctgaccaacaaggtgaaaccctgtctctactaaaaatacaaaattagctgggtgtggtggtgggtgcctgtagccccagctactcgggaggctgaggcaggagaattgcttgaacctgggaggcggagattgcagtgagccgagatcgcatcactgcactccagcctgggtgatggagcaagactctgtctcaaaaaataaataaacaaaaaataagagagagaagcagcacctgccctggtcgcatgctgagagcccattctgccccctcctcccggctctgccctcaggtgacctacggctccttcgactacacctcgctgctgtacctctccaactacctggaggacttcggcggagggcggttcatgttcatggaggagggtgccaacaagacggtggagccgagagctggtaggaggcgcgggcggggcctgggcgtggggctcctggctcaggcaagcacggtgggtgtggggggcgtgtccctgggagcgaggctgagttcacggagcatctgctgtgtgccgggccggtgctgagtgattcccaggtctagcgccagtcccaacacccaggaggctggtgtctacggggccacatgtctgaggtcaccgtcagtcagcggcagagcccccctccacgccctggtgtgtgtcaccttgacaggcaccatccatttccctccctggtgtgtgtcaccttggcggtcagggtctccctccctcccctctggagtgcgttcacctctgtacccttctcaaagagactcgcaacctaagattagacgaggccccagcccagtgtcggtgacctagtgccctcctcgctggtggctggaacctcaccgggtggctctgcggtgccggcttcagaacccatcacactggaccttgcagtcccagagtcccagagccccagccatgcccagcctgctgcagacacagcagtgccagtgagcatttgccgagcggacagtcatcctctgctccttgaacttgtgggtaacacaagcccagatcctggggtgggagggtgtggggagtggggaacccctgttaggggcctcctcaggtggagcccacggccctgaccccagatgcagccgaaactcgcataggcttgggagccctgtggactgtgccagcaccatccaccccccactgcctcacccatccccagggcactgccctcacccccccccccccgctgcctcacccgtccccagggcactgccctcaccccccactaccttacccgtccccaggacactgccctcaccccctgctgcctcacccgtccccagggcactgccctcacctgtggggtggcctctcagcacgggtgttcctcctgcctggccgctcagtcagaccagggactgtgtgacagtcaggacttctttcatctcttttaagatctccagcttgtttattttgagattcctgttatttgtacttgcctttctcaggttagtttacgacttcagtttgcaagctcag

SEQ ID NO: 21357 - DNA, 1069 bp, Homo sapiens
tatcagcttgtctttcttcaagaaccctttctgagaggttagctgtgatcacactgactgtagatgagttagatagtaatagccaatcttccagcccacgatcacaagaccagctctctctcagatcttctgtggtcttcctttgcaagatgttacagtccatggataggtcttgtacatctgttaacttattcctccgttttttaatatttttacgctgttgctgatggagcagcttttaaattttataattttgcattgcattttcggtggcgtgtaccctgacggacggacagttggtaaagtcgttaattttgcattgcattttcggtagcgcgtaccatgatggatggacagttggtaaagttgttcagcagatgtcttgattatgaggaggtctcatgcgaggtagctttgcttagccctctcatactctttatttacaatgaaaaatctttaaattgaatttgtggttctgatatttataaatgatatacatctattttttcggagaactttgggggcagaaagtggactttggctgtgagaaatcaaaggcagttcttgattggtgtcctctgtctccacgcaggcctctgtgtcctttgtcccaatagtaacaactccctcctggcctttccgggcacgcacacgggccatgtgcagcttgtggacctggccagcacggagaagccacccgtggacattcctgcacacgagggtgtcctgagctgcattgcactcaacctgcagggaacaagaattgcaactgcatccgagaaagtaagtgtgccactcaccttgttggtgttgtgcctcctggagcagcaggctcagcaaaatggccattccctgtatcaagactcaaaaggcagtgggcctgccccaacctggagcccctcaggggcctgtggacctggctggtcatgtcatcagacaggttgaagtcttcacaggtcgtcttgtgcccagggactggttttatttctaattatttacaaagcagtgtcttgtaaaatatgataagccaaagaaacagggccaggggcagtggctaaacctgtaatcc

SEQ ID NO: 21358 - DNA, 1076 bp, Homo sapiens
cgctgggattacaggtgtgagccatcacacccagctgtgttttttgtgtgtttttttgagacagggtctccctctgttgcccagcttggagtgcagtggggtgatcatagctcactgcagcctcagactcctggactctacctgagtagctgtgactaatttttaataactttttttttcagaaatgggagtctcactatgttgcccaggctggtcttgaactcttggcctcaagcgatctcacaccccagcctcccaaagtgctgggattacaggcgtgagccaccgcacccatccctcctgtggttcttcaaaagcacggtgctggttggcattctcatccctaaagcttgtcggtacattagcccttagaacacaaactgctaatttatgctaatagaatgttgcaatgttagcaggcaaacaagacagaagaaattttgaacttaaaaaggagcaggggctgggtgcagtggctcacacgtgcagtcctagcactttgggaagttgaggtgggcagatcacttcagcccagaagttcgagaccagcctggacaacatggtaaaaccccatctctaccaaaaatacaaaacttagctgggcatggtagtgcatgcctgtagtcccagccatttgggaagctgacgtgggagaatctcttgagcctgggaggtcaaggctgtagtgagccaagattgcgccaccgcactccagcctgggcgagagaatgagaccctgtctcaaaaagaaaaacagaaaaagaggaagaacaacccaggaccttgagtggagtgaggaacttgttggccctgatttgtgtccctctgatttcactttaaaactgaaacctcccttcctgatgcaggtttatttgcagcacttttaacatcagtacctatggtcaggcttgcctatgggctcagtcgggtggaatcaaggaaggtcagggagaggaacgtaaccaggcaagggcaagggttggcagagagagatgaacgcgctcagcgcgcctgtgtgcgaggccagtgggtcgcctgagaccgggaccgggctgtgcgcactgagagaggaacgg

SEQ ID NO: 21359 - DNA, 1021 bp, Homo sapiens
cccagtgccaggcgggaggaggcctgagaaaagccatctggttctggtgacattgaaggccaccggtggtctcagaggatgactgagtgggagcccagtggtgggtgggtagggtgggaggaggtgaggagggaaggagaggctcagtgagggaggcagttcagaatcaagaccaggatggggctctgggggcgccgcatgccaaatgggaagtgagtgggtgaactaggatctgggtgatatcacgtacttaggaatagaatagcccaggtcagatcaggcacaaaaggattgtgtggaaaggcagaaggttccagatgactcgtgacaagctttggggcccagctcacagttctcagcagagccccgtgaactgcgtgaacgtgaatgtgcggaagagagaccacactcgggtgaggactggccctgcctgatacatttatttttgttttggaattaggaacagagaaatgaaatgggaagagattatcggtaggaaaaacagtggaagacagggcttgagatcttggcctttgagcggttctgtaatctcacaaggtttgtctgtgccagctttaaagcagagttgagagtggctgctagcatagcccagaggggcagaggcctgtggcttgtgagtcctctggaggagcccacccagaagggacagcggaggttccacagagagagcagggcaggatttgcaggagaatgactttgccctggctaattggggatgggcagaaatcctgctggtgaattggtctgtgtcttgtcatggagaacttcattgaccattaaggaggaaaggaagcttatagatggaagtcaggaggcctagagggccgcctcccttgccctacctctggcactgctgggggaccccaggtgctaacaagggagccatttgtatgagataatctcaggtctcattctcattataaagtttctaagaggtgaaaaagccttagaaacttcacagacttagaagaaagcagtattcagcaggtttttgagtaaa

SEQ ID NO: 21360 - DNA, 1032 bp, Homo sapiens
caggtgtgagttattgattagagttgacgggaagcgggtaggctgtttacagtaactaggggcaaggaagaacaagaaagtcgagttcgagaacaaaggataaggaagttaacaggctaaataaaccctttgaagagaaactcagaaagatttattgtatcttacatttttctgtaacaacgaatatcctttgtaatatttcagtaccagcccttgggatctggaacatagaaagctctgaatgtaaccctggtctttctgtggggagaccctttccccctcttcagctgcaggaggtgggggtcaggtattatgggagaatctctttggcggggtttagaagtcctctctaattcctgaagtttggctcttacctttgattacttctcattccaggaaaggccttaactctccttctctgcctcttcacttgattctgaaaaatctgtttttcttttttttctttccatttttaaaacccagagaccgcatagctaactgtgcctgtgactgactgtgtttgtcttctttttttttttttttttttgagacggagtcttgctctgtcacccaggctggagtgcagtggcgtgatctcggctcactgcaacctccacctgccgggttcaagtgattctcctgcctcagcctcccgagtagctgggactacacagctggctgatttttgtatttttattttttatttatgtatttatttgagagacgaagtttcactcttgttgcccaggctagagtgcagtgacgcgatctcggctcaccgcaccctctgcctcccgggttcaagtgattctcctgccccaacttctcgagtagctgggattataggcatgcgccaccacacctggcaagttttgtatttttagtagagacgggggttttccatgttggtcgcgctggtcttgaactcccgacctgagggatccacctgcctcggcctggcctcccagagtgctgagattataggtgtcagcccctgcacccagccaacatttctttacttaaccattagct

SEQ ID NO: 21361 - DNA, 1071 bp, Homo sapiens
gatctcaggtgatccacctgccttggcctcccaaagtgctgggattacaggcacatgccaccatgcctggctaatttttgtatttttagtggagggtaggtttcaccatgttggccagggtggtctcgaactcctgacctcaggtgatccgcccacctcggtctcccaaagtgctgggattgcaggcgtgagctgctgcgtccggcctcaaatgggagttttagaggcctttgtgttgggctttcacaccacttgtgcagtcattggaaagatccagactttgcaacatttcatgtgaaaaataattgaggggtttgtttttttctctttccagccacagcttcatagagccaacagttggacatggcatttaaggagatggatgtagtccctgggtcacacacgagcattaacacacgatcatctacgcacttaagtgctttattcagtttctaacagtgctgtttatttggaccattaacagcctgctgtgtgacttggaggcagtgaccaggatgagtgacctgggtaactcattgagactctgacaggattttaaggagttaggatgatttataggtgggagcaaagtcacgggagaccaccctgtaaatgggaaagagcatcctttcctcaccttcccggttcctggagtctaggactacctcttgtctccccagcaccctgcccttcccttcacctggtgtccacagtgggcgggattgcctgcttggtggctttcctctagaagtgtccttcacgtttgtcactgatcgtcctccaagcctgggccatggggatgccacagaaggcccctgcagtggggaagttgtgtgaacaactccaagactcctttgctaaaggacaaacaaaatgccctgcatggatgtgcttgtcacttagtaacatttgtacaaggacaggagttgtgacttagcacctatcgtgtctgtgtggtttgagcatctgcaagagttctcagtagttgtcatttctccagacctctttcttttaaccactccaggcctggggattaatgtctcttttacacttctgctttaggatgctttg

SEQ ID NO: 21362 - DNA, 1048 bp, Homo sapiens
gtggtcagcctggccacgaagatccctacagcaaggcccacaaggtgtgcagtttcagagaagcgcctccatgcccaccaggaggaaaaccaggttgcattcagagggtcaagaatgagtttacggccgatctcaaaaggaactctggaatgactgaacgtgtttaagggaaaagcatcttctccctcaattgtatgcctgtccaaacacaaggaagagtgagggcagcctaaagacattttcagacgtgcaaagtctcagatactaccttcttccatgcacctttctcaggaattgaaaagaggagtcagcttaagagagggaaggatggaatccagcagtaagggagtgggggccccagggcaacagtcctcccagtccagatgggagcaggacagaaggtctggaaagatgccccaaagaaagtgaaattcctgaatgtttgcaggtaccgagagcagatttagatagttggggaaaattacagtgatgaattagtaataaatgcagagaaaactgaacaagtaaacaatgagtaaacaacaagtaaacatgaggcaattttttttttgagacaagagtctcactccatcacccaggctggagtgcagttgcacgatctcagctcactgcaacctccgcctgccgggttcaagcgattctcctgcctcagcctcccaagtatctgggactacaggcgcccaccaccatgcctggctagtttttgtatttttagtagagatgaggtttcaccatgttggtcaggctgctctcaaactcctgacctcagatgatccacctgccttgacctcccaaagtgctgggattacaggcatgaaccatcacgcctggtacaatgaggcaatttttaactccagtagaaacaaaaattcgtacatgaaggaaaaataaacattgtataccatatggtggttcagctgtggatggcgtctacctggtgtcattttctgttgctgtaacagaataccacaaactgggtaatttataaagaaaataaatgcatttcttacagttctggaggctggga

SEQ ID NO: 21363 - DNA, 1034 bp, Homo sapiens
ctgagcacccttcgccccagcactggatgggagggtcttccatgcccctgagctctgagcatccttccccccagcactggacgggaggaacgtggaggaaggtggggggctccagagctgctgagtgaagtggcttttggatgggctgctgtgactaatggaaaagagctgctgagtgaaggggcttttggacaaattgaaacagagatttattctctcacagttctagagaccagaagcccagaatgaaggtgttgcctgggccacgctcccttggcaggctctaagcggggacccttcctgactcccctgacttctggggtgctgctggcagccctcggcgttctgtggcctgtggcagcaccgttccagtccctgctgtctgtcgtcacacagccttctctcctgggtgtctgtgtccccaaatctctctgtgcttataagaacactagccattggatttagggcccacctaactcagtatgacctcatcttaacttgattacatctgaaaagacccttggccgggcgcggtggctcatgcctataatcccatcactttgggaggccgaggcaggtggatcacttgaggtcaggagttcgagaccagcctggccaacatggggaaatcccatctctactaaaaatacaaaaattagctgggcgtggtggcaggtgcctgttatctcagctgcttaggaggctgaggcaggagaatcacttgaaccccggaagcggaggtttcagtgagctgagatcgtgccactgcactccagcctccagcctggatgacagagtgagactttgtctcaaaaaaaaaaaaaaaaaagaaggctgggtgcggtggctcacgcctgtaatcccagcactttgggaggccaaggcgggcagatcacgagttcagcagtttgagaccagcctggccaacatggtgaaaccccgtctctactaaaaatacaaaaattagctgggtgtggtggcgggcacctgtaatcccagctacttgggaggctgaggtaggagaatcgtttgaa

SEQ ID NO: 21364 - DNA, 1121 bp, Homo sapiens
ttatggatgtgcaaagaaagtaatttcttgagatagactctactcctagtgaagaagctgtgaatgttgttgaaatgacaataaaggatttaaaatattacgtaggcttacttgataaagcagcagcaggatttgagaggtttgactccagtttcgaaagaagtcctactgtggataaaatgctattaaacagcaccgcaagctacagagaactctttcatgaaaggaagtcagtcagcgtggcaggtttcattgttgtctcattttaagcaattacccagccttcaggaaccagtgccgtgatcagtcagtagtcatcaacttggaaacaagaccccccacctgcaagaagatcattaactgaaggcttagatgattgtcagcttttttttttaagcaataaattattttaaaattaaggtatgtgcattcctttttagacataatgctgttgcatacttcacagactgatataaacatgatgtttgtatgcactgggggaaaatttttgtgtgacttgctttattgcgatatttgctttctcatgctctggaacccaaactgtaatatcttcaaggtatccctgtgttttaatctatgtaatactcttttgttggatagaagataattttatctaagtcagttgatcacattttttagtgatttgtactatgttgtaagaaatcttcgcctgtgccaagtttacaagattttttttttctgttttcttgtaaagcttgataagttttagctgttacatttagatatattgtctgtctttttttttttttttctttgagacggagtctcaccctgttgcccaggctggagtgcagtggcacgatctcggctcactgcaagctccacctcctggttcacgccattctcctgcctcagcctcccgagtagctgggactacaggtgcctgccaccacacccggctattttttttgtattttttttagtagagacggggtttcaccatgttagccaggatggtctctatctcctgacctcgtgatcagcccgccttggcctcccaaagtgctgggattacaggcttgagccaccatgcccggcctatattgtctgtttttttgagacggagttccgttcttgtt

SEQ ID NO: 21365 - DNA, 1061 bp, Homo sapiens
gccagccagaaatcttgaagtcgtttttaagaagtgtggacttcgtgttgtgggcgaagagaaaccattggaagattttaagcagagtactgacattcaaattatcctctgaattctaggtagctaagattattattttattcttcaacagtttttattttaattttgcttaaaaaattgcctggtgaatcttactgtgtcttttatatatatcccaaaatattgctttattttaccctttcctcttatccttggatgataatattgcttggagcaagagtctaggtcaaagccatttttcctcagtgattggtagttatttgtccactatttttgtgtgtccatgcttactgatgagaggtctgatatcagtcttgatttttattcttttctgttagtagcttttagggttttctcttttttttttttctttcccccagttttccaagaatgtgagactgtgggttttatttatcttataaaagtactcagtgagcacttttagtctgaggactcttgtcgcaaactctaggacatttcttggtcattatttctttaggtactgcttctcctccacctggtttcttatacatattaaaatttctagatctgttttttagtcttctaactttcctccgtgttttaaatttttataatttttatgtgatgtgctctaggaaaatgcctcagttctgtcttacattttactgattcatacgtctactttgtttcactgcttacttatcatgaccttctgttcttttttataactccttattcttaatttttggatctaaatcctgcttttatttttctgaggctctgaagtatttttatttaaaggttttttttttttttccttgttgtttggccttttaactctgttctttttggatgtaagggttgttcttccctcatttgtttaaaggttgtgtgctcatatcatgcaaccatattctcttccttatgtcccagttgcaaattatctgaataggtagtttgctggggtagctttctggctagcacccttgggagtggctgatggagatagccttggctca

SEQ ID NO: 21366 - DNA, 1720 bp, Homo sapiens
ttttggcttcaggtttgatttgtataatacatatctttggggttgactctggggatagccagcgacgggttttatcataatccatgtatcattataaaagagggtcttagtgaatattggtgtaaagaagtgatgtgtgtgaggagaaatagtaatcttaaaggatagaaataactggtttcttcattgcataagagaatataacccccacctaattttggacattttaatactgttaaatctttgggttaggtcaatagggttttacagccatgcctttttttttactctctctctaacagctttattgatatagtgtacatatcataaaatctgcccatttaaagtgtataattcattgttttttagtttatccacagagttgtgcaaatattactaaaatgttaattttagaacattatcattccaaaaagcaacttcataacatctagcagtcacctcctttcccatttctagccctacccatttatctatgtgttatttctctctagatttgcctactctggacttttactctaaatggaattaaataatatgtagtctcttgtgactggtgtctttcacttagtataatgttttcaggattcatccacattatggcatgtatcagtacttcattcttttttattgctaaataagagtgccttgtatggacaagccacatatcatttatccattcatcgttggtggatatttgggttgtttctgcttttcgactattacaaatactcctgacagtcgtgtacaagtcttggtgtggacaaatgctttcatttctctttggtatgcatctaggagtggagttaattactgggtcatatgattactatatttaaccttttgaggaactgccagaattttccaaaggagtcccaccgttttacatttcccccagaagggtatgagggttctgatttctctgtctccttaccagtacttagtattgtatgtctttttgactatagccatccaagaggtatgaagtgttatctcattgttgtcaaccattgatttttgatattataaacaggtttcttttgtgtcatttgcagttagagagattttactctaactttttttcctaaagtagacttacttgttgaaatgaagtttttagtgagaaagtgtgatcatttatatctacttcatttgacagctcatgtatcttagaataacttagaatttcagcagcttctgcagcatcatatatgcggctaatagtattgatgcgatgaaaaatactgttctttacatttttgcttcttgattttttaactttttgttttgaaatacatttaaatttacagaaaagttgtaagaattcaccagttactaacttttagtcgcatttggtttctcatttttccgttatgcatgtaatttttttctgaaccattttagaataaggcgccagacatcctgaatatttcagtatgtatttcctaacaataaggacattcataaccacaagacaattcttaattttcagaatctgggctgggtgcggtggctcatgcttgtaatcccagcattttgggaggctgaggcgggcagatcacttaaggccaggggtttgagaccagcctggccaacatggcgaaaccccgtctctactaaaaatgcaaaaattagccgggtgtgttggtgcatgtctgtaatcccagctactcgggaggctgaggcacgagaatcgcttgaa

SEQ ID NO: 21367 - DNA, 1029 bp, Homo sapiens
gtttgttaaatgtagagtatatgccaaatattttaccaggttttctacatgtactgactgtaattctaacaataacactataacattgattaccactaccaccttttccaaatgatgcccagagggataaataccgtttccactgttacacgggctgtaagaagcagaaaggtgatcatgctggttaagatatgtgcagcagctaaaggctttcccacatctgttaggttaacagaggtttctgtgttatgacttttttcaaatttaacaataattcattggtgctgattggcttttatgcataaaacgtaaagaacaggagtttcttgggctctcttaattttcctctagagtgaatattctgataataaacaggaatgacagctttgttatataaaatacaatataaaattctctgaatctaagcatcatttggggcatagctaaaaaagagcaaacagtatttacactcggaggaatccacaacaacgtaaattatttgatgccttgtaagaattgaacagtatctaaaagtcttcccatattgtcatcaaattgtgtctcagtggtataaacccattgatgtactgtatattgcctcttaggtagtgctagtttttaaaaggcttactggtgtgattctatattgcagaaataaaatttttaaaactaatgtttggtcttctgttatgttctttcttagcgacttcaggaagaaatcaccaaacagtctccaacgttgcaaagaaatgccttgtatatcaaatctgtaagttatgcagtcctttcgaagccaaattccgcttcactgaaatatttccagttaattaattttatccagtcttaatttttaccaccaaataattaaaacttgtatggtattttgatgtaatgggatttctttacattttgtctcctcagtccaagatcagccggctgcctgcttacttgaccattcagatggttcgatttttttataaagagaaggaatctgtgaatgccaaagttcttaaggttagtaatgaactt

SEQ ID NO: 21368 - DNA, 1090 bp, Homo sapiens
cctgcagtgcccttaagcctgtgtggtcactgggtcgcacttggaggactgttggtgtggccagtggagcactgctgtgcctccgatgacttgatactttttttgcagtggaactctgagacgaatcctgcataacattaattcatcttcttgtccctgttatttagatgaatggattaagtttgatgatgacaaagtcagcatcgtaacaccagaagatatcttacggctttctggtggtggagactggcatatcgcttacgttctactctatgggcctcgcagagttgaaataatggaagaggaaagtgaacagtaatcttcattttagtatttatgcttagatgtgaaaataaatgttatttgttgatcatttctataatccagagctttagaggaagacacataggtgggtttatgtttcacctcatttggaacaaaagaggacagaagcagaccactctgtgcaccaacctaaaaaattacagagaagagaaaattatctttggattgtgctgccctatataaaggtggcagaaagacatttttaaaaagcttattatttcttgcattattttaaaaagttcagagttgaaatgcctttcaaccatttccttctgtggtcatttttcttgctgcctttttcacccaagattcagcagtcagatgtttactgcacacctattacctattatttgctgttcttgcatggttcaaaccaccattctgtagccacccatcctttgccttatctaacaaacatttttccaggaaggtggaaaaggaagtgttgctctcattgtgtgactcagtgctgctgtccatcccatggaaacatgggcacaatcaagtatttgtccagcctattgcaggcttttcctgactttaaaataaattgtgatcaataatagtacctttgattatacatttattattgtgtctctctctgatgtactgtggattgtacatttaactttggaatggctttgtaataatcagtcttaagaaaatgttgacaagctctggttgcttatttttagaaaatgaggacatttaataataataaaaaaaaagggattaatagcttttg

SEQ ID NO: 21369 - DNA, 1047 bp, Homo sapiens
ggaagaggagagcactgaagctggcgcgggaacttggtttcctggtggcctcccatccaatccccacgaaccagctttcctcttaaaccttgaaaagagaaattcgggagttcgagtataagttcttagtcgtcctttcctctttcctttccgacaggagcaccccaggcaaaaaatgtctcgcgggtcattggcgccaggctttcaggggacagtggggcggggcggggtgggcacaggacgttaggcagccgttggccctccctaaggccacaccgtcctgccgtcctggatcctgcgccagctgcgcgggggaggggactcgaaggtgtgtgagccaggggctgaccttgaccgctcagataaatggagcgcagccttgacacaggggtggaggtggttttgaatggggaaacccattcgtggtgaagcagattcactgtagctagcggaaaagccctccggcccacggacccatctagagacgaatacatagcagctgctgtggctgattggcgtgggacagcgtggggagttttgtctgaggagagggatccacttttctgcagctccaagcccaggggcctttgatgagccatagacctcatttttaacccacctttctgcttagacattgagcaagttacttctcatatagcttccctatatgttaaaaatggagaaaataatgcttagtaggcaattctgataaaagcaggtgcttgcaaaaatctctctgttgtctgaatataaactgtaccacaagcgagtgcggatgaacgaggactgcatttaaagataagtttttacactttcatttctctgtggctcgacacttctgatgcctccctttttgttcctgggacacatgcttggtgttgtcttcacacctttgtgacaggattagcactagtgggcagtggatgatagctcctcccttttgccacatgttcatccctgccctcgccaccatctcactgtgtggaattcctgtgtccactggtcaccggggcacagaagtgctgtctcagcctgaatcgggccact

SEQ ID NO: 21370 - DNA, 1076 bp, Homo sapiens
atcattaggaatatcctgtatgccaggtagaagatacattgaacagattgcatgtaggcattaaattcattttggggtattacatatagacaacacatttcattaagaaacataaaactgtcagatcggtggaatacttaaaagcacttggaggtgtttagcctaaaaagcttagttgaggggaatggaagaaaagatctgggagggtggttccaaagaagggatcagactgtcctaaagccctcaggaatctgggctgggaccagcctacttaaagataggatgggcagctgggtgtggtggctcacgcctgtaatcccagcacttcgggaggccgaagtgggcggatcacctgaggtcaggagttcgaggccagcctgaccaacatggagaaacactgtctctactaaaaatacaaaattagctgggtgtagtggcgcatgcctgtaatcccagctactcgggaggctgaggcaggggaatcgcttgaacctgggaggtggagggtgccgtgagccacgatcgcgccattgcactccagcctgggcaacaagagcgaaactctcaaaaaacaaaaaaaaggatgggttccatatgggtggtgtcaagtgcccacctcctagcaagtcagcaggggccagaggcccttgtaagtggtgtctcggggggatcaactgagatggcttaggatttacctggatgcctgctctgctctccccatctcttccagggatccacaaatgctaaagagctgtcttccaagggagtgaaaatctgggatgccaatggatcccgagactttttggacagcctgggattctccaccagagaagaaggggacttgggcccagtttatggcttccagtggaggcattttggggcagaatacagagatatggaatcaggtgaggagatagaacaatgccttccatttcccgggtgcccttcctagcatgtgtttgctccgttgttttagataaggtctgggggatgagtcaatgtcacaggagctgatgtatagctttgaccttgtgaggggtggtgccaggttaagccacaattaagcctcatgaagg

SEQ ID NO: 21371 - DNA, 1140 bp, Homo sapiens
agggattgtggaattcaagtaaacgtagagctactatgagttacagattgactgtgttcctgtctttaataaatttgccaagagtggttataagaacttacacctgatgaggcaccaggctcctgatgctgtgtaatgtcacaaaatacccctcactctcgatctgtgcaagagaacagctggttgcgctccaatcatgttacataacctacggcaaggtatcgacaggatcatactcctgtaaaatagaactttgttgatcacatcctgtgtacttgtttcacggacatgaggagcaattacaacaggtcgtacaattatggcaaaataatggccttattttgtttttagcttcagcgagaacccagacctttcccaaagctcaggattcttcgaaaagttgagaaaattgatgacttcaaagctgaagactttcagattgaagggtacaatccgcatccaactattaaaatggaaatggctgtttagggtgctttcaaaggagctcgaaggatattgtcagtctttaggggttgggctggatgccgaggtaaaagttctttttgctctaaaagaaaaaggaactaggtcaaaaatctgtccgtgacctatcagttattaatttttaaggatgttgccactggcaaatgtaactgtgccagttctttccataataaaaggctttgagttaactcactgagggtatctgacaatgctgaggttatgaacaaagtgaggagaatgaaatgtatgtgctcttagcaaaaacatgtatgtgcatttcaatcccacgtacttataaagaaggttggtgaatttcacaagctatttttggaatatttttagaatattttaagaatttcacaagctattccctcaaatctgagggagctgagtaacaccatcgatcatgatgtagagtgtggttatgaactttaaagttatagttgttttatatgttgctataataaagaagtgttctgcattcgtccacgctttgttcattctgtactgccacttatctgctcagttccttcctaaaatagattaaagaactctccttaagtaaacatgtgctgtattctggtttggatgctacttaaaagagtatattttagaaataatagtgaatatattttg

SEQ ID NO: 21372 - DNA, 1040 bp, Homo sapiens
ttgttgttttaaaatctttatcaatttaggaggtgaaaaatagcttgtttatatataaatgtgtgtgtatatgtgtatatgtgtgtatgtatatatatttaaacaatttatgtttttatatggttatttttcttttaacttgcttgtacatggtttttcaggcaagttttatttcacctttgctttttgccatgaatttgaatctttatatattaaacttactgatggttttaatagttggcaacacaacaagcaaaaaaaattgacagctaattttttcttatttacattttttgtttttaaaggtgaattttttacatttattataatatctactcttctgatttttttttgtgttgatttgcaagggtgccattttgcaagtcaaaaatggtcgagtcagagaaattagttcctctctatatggtgcaagcaatttttttctctctctctttttttttttaatttcatgtgctgttttatctgttcagaaatgtgagtttttatctaatttaatgcagtctctccttttgtagcttctgagtttcctgtcctacttagtgctagaattcctaaagctaatactgttcccctgacattgtcttggccatcagcaaggctttaactaaatgaaggcaggcactgggtatatggattttgacccaggagccatgctggtacatacagtaccacccattgtcaagagagtagaattccaatgccatagcccattaataaaaatccaagtttcattggactttatatataacatttatgcattcaatttgtctctccccggtgatgcccatggacatttgataactacttttttggtctcaccatcagatttttttttttttttttttttttttttttgagacgagtctcactctgtcgcctgggctggagtgcagtggcacaatctcggctcactgcaacctccacctcccaggttcaaacagttctctgcctcagcctcccgagtagctgggattataggcacccgccatcacatccggctaattttttgtatttttagt

SEQ ID NO: 21373 - DNA, 1052 bp, Homo sapiens
attttagtataagaaagagaaggccttcttttttaaataattcactcatgtatcacagtcccatttatggaaaaactgatattggtcgggcactgtggctcatgcctgtaatcccagcactttgggaggctgaggcaggtagatcacccgagatcagaagttagagaccagcctggccaacatgacaaaaccccatctctactaaaaatacaaaaatattagccgggtgtgatggtgcatgccgtcccggctacttgggaagctgaggcacaagaatcatttgaacccaggaggtggaggttgcagtgagccgatatcacaccactgcactgcagcctaggcaacagagcaaaactccatctcaaaaataaataatattttccccacagttttgaactgtcactagtatgttcttaattaaacctatttctctgatcttttttttctatccctgcttcatgaccatactaattcctgtcactttctaatatattttatctagaagatgaacattcttacttcttttcacaatgttagctattgtcgtatcctcactctctaaattattttttcagattttaacaaaatcttgtgattttgttattattgacataacattgaattcatgatatataaggggaaatttccatcctgtcaatatttaatcttgtcatatgggaaagtgttaaatctcatttgttcatcttttttgttccttcattaagattttgtttttgttttttcgttctatggtggttttttgtttgtttgtttgtttgtttgtttgtttgtttgttttgaaacagagtcttgctttgttgcccaggctggaatgcagtggcatgatctcagctcactacaatctccacctcccaggttcaagcaattctcatgcctcagcctcccaagtagctaggattacaggtgcccaccaccacgcccagctaatttttgtattttcagtagagacagcgtgtcaccatgttggccaggctgatcttgaactcctgacctaaggtgatccacctgcctcagcctcccaaagtgctggg

SEQ ID NO: 21374 - DNA, 1067 bp, Homo sapiens
aagaaagaaagaaagaaagaaagaaagaaagaaagaaagaaagaaagaaagaaagaaataaatttggcaatccgaaaaaccaactttcactctaggtatatttgccctaaaaaaaatatttacactatatgctagggggctgtactaggttgaatagtgccccccgcaaaagtcatgtctatcctaaatcacagaaggtgagcttatttggaagtaggatctttgcaaatgcggttggttaagatgaggtcatgttggattagggtagcagttggttaagatgaggtcatgttggattagggtaggccctaaatctagtgactggcatccttacatgaagatcgtgtgcggacagaggcggatgctggggtgaagcagccgcatgctaaggaacaccaaggactgccaggagccgccagcaactggggagagacgaagaaggattcttccctagagccttcagagagaccatggccctgctgacgtcttgatttcaaacttccggcctccagagctgaaagagtacatttctgttgttttaagccacctagtttgtggcaatttgttacagtatcagtatttgaaatcgcaaaaaaatcaacaaaaacaacaagaaaaaataatgtggcatgttagtttcccattgctaatgtaacaaattaccaccaacctaatggcttaaaacaacacaaatttgtcatcttagagttattaaggttagtctaaaatgggtccaaagggctgtaatctttctggggcctttgccagcttctagaggccacctacagtccttggcttgtagctccttcctttatcattaaagccagtgcatggcatcttctctcctctctgccctctgctgctgtccttaaattccttctctgactctgacactggtgatttcctcttctaaggacccacctggatagtgcaggataatctccttttctcaagatccttaacttagtcacatctacagtttcttttgctatgtaagctaatagtcacaggttcctttctggaattagggcatggacatctttggaaaggctattactcagcctact

SEQ ID NO: 21375 - DNA, 1051 bp, Homo sapiens
cgcacggagacacttgtccaggtcagctctgcaggtagagctggccttctgcctgtctgagccctaacccttgggaatttccaaaccaagtcaaaggttggtatgggtggctgtggagcaccagaaaacgtacctaccccgtgtattggttcgctttgaaaatgaacgtggagggaaatccgctttaaactgtgatgtactttatagatatgaggtggtggcattgcctgagctttgaagaaggaatattgtcatgctctgaattaaccatatgaggtccctttttaagctgttaagaacacttagcgtccaagggaaaaaaagaactttgaagccgtgttttgtcgtgaggctgataggtttagaaatgttctagaccatataactgtatggttgctgaaataattgaaatcgtgatccgtagaatgaaaacgattggagaagtaaggactttcttttgttcacagctgtagtcccagcgtctagaactgtgcctgcgacattgtaaatgcccagattagaatggataaatgaatgaagacaaaaacctatcccctcaagttaattctgtgcctgaacgtagtagattcccgttgtgtttgaaaagtgaatgaatgctcatcttttttgttgaatgctttctattcagaaccattctacaaaagggaaactttttacgtttattgtgtttatagtaaaaatatcagtacattaaagaaaatatggaaccagaggggggaaacaagtaaatcttttactcgctgtaaaactactatatgactactcttagcacctgaggttatgtcttttcagccttcctcctccttcccactccattttttaaattactaaaatatgtgttttatattctattaattttttcacttaatagtgtcagaagtttctttaaacgtaggtcttcaaatcaaaatttgaaatggtccatttgctaccactatttacataaccgaatctctcctttctgttgacatttacattacttttaatttttttgattttaagtaatgctgtaataaacattttcccaggc

SEQ ID NO: 21376 - DNA, 1282 bp, Homo sapiens
ggccagtctggtctcgaactcctgacctggtgatccgccctcctcagcctcccatagtgctaggattacaggcgtgagccactgcacctggcctagatttctccacaaccattctatttcaccattttcataaatatgtggcatttaaaggatttataaaaagccagggagaaggcaaagaccactgtctttgatagtgtgaggataggatttagcatatcacagaagtattaggtggaagggaaggtagaacagatggtagattaggcaaaatggtcagaaaaacatcagttatatcaactggaagagtagaaagaaatgcaaatcttaactgaattcatgggacattgactctgatttctctctagttcttagaacaaaacaaacttttaaacttaaccaaatattagggaaattgtaatttctggcaaaaatctttttgctgctggttttagtcttagctttatgggtttggtgtcagtaaacaatcagttgttattatagctgttaggtactcgtactgtcttttaagtccattatcagttccttgacccactctaatttctatcaatatcagatacaccccttcagcctctagcttctgctcagttgctttactccttccatttgtttttttctggatacaaggatggatgtcatagaagacaggctgtagaagaaaggcaagaacaggctaaaagtactaaacaactaacagtcttgacctgtagcttatgttgtattggagagagaaacagaagtaaatacaaaaaattacatgtaaaagcatttcagttattattactatgaataaaatgtaagagtaatgttgaaggaatggattgctagaaaaaaaatgtagaataatagagctgatgcacatctcctctagataaggtggttggagaagagggcctctttgagattatatttgagttgaggcttgaatgatcagaagaaagtagccaaataaagatctgtgagaagtgtgtttcaggtagaagaagcaccagcaaagcaaagactgaaattgtgacagtctcattttgtttgaaggacagaaaggagactattgtgactgtagcatagtagatagaggggagagtagagggagatgtgagaatttcagtttggaaatattatttgtaactctcatttacctgggtactactccctcaccccaccctttttattttgaaacgtttcaagccaatagacaagatgaaagaactagcacccatatatccttcacctagatttatcagttgttaacattttgtca

SEQ ID NO: 21377 - DNA, 1049 bp, Homo sapiens
actttcatcagtgagtggattcttggaagtccttatgccaccattctggaagtgttcactcgtttactgatttttgacaaatatatacacttgtgtatctcaaacccttgttaagatataggacaataagctagactcagtggctcacacctgtaatgccagcactttgggaggctgaggcaggaagattgcttgagcccaggaatttgagaccagcttatgcaacatgagaacccacctctacaaaaaatattttaaaaaattagccaggtgtagtccgggcatggtggctcacgcgtgtaatcccagcactttgggaggctgaggtgggcggatcacctgaggtcaggagttcaagaccagcctggccttcatggcgaaacgctgtctctactaaaaatacaaaaattagccaggtgtggtggtgtgtgctggtaatcccagctgctcaggaggctgagacaggagagtcacttgaacctgggaggtggaggatgcaatgagccgagattgcgccgctgtactccagcctgggtgacagaatgagaccccatctcaaaaaaaaaaaaaaaaaggaaaattagccaggtgttgtggcttgcacctttagccccagcttctcaggaggctaagatgagaggatcgcttgagactaggaggtcgaggccgcagtaatccatgatcacgccactgcactccagcctgggcgactgagtgagatcctatctctcaaaaaaaaaaaaaaaaaaaggatatataacattacataaacctagaaaattctctcataacttgggcactataagaattattgctttagaatttaacttggatacctgggacataattataatagtatgtgtataattattttgtaggggagaggtatgacattagttaggtcagctggattcaggtatgtgttgggtcagcgctactctttctgcactttcaacttgcccatcaattaaaaggctctcaactcagagccattttgttgaaatatgaataagtaaaaatgctacatgacccatgccgtatgtatttta

SEQ ID NO: 21378 - DNA, 1035 bp, Homo sapiens
cctgcctcccaggttcaagcagtcctgcctcagccacccaagtagctgggattatagatgcacaccaccactcctgaaaaattttgtacttttagtagaggtgaggtttcactatgttggccaggctagtcttgaactcctgacctcaggtgatacacccacctcagcctcccaaagtgctgggattatgggcgtgagccaccgcgcccggccccctgatactttttcttacttgagacacctcttatgttttgtttccatcaaaatttcccaaagattaagtgtcctttcattgtatgaagattatgaattaagatattttctgaaatatttttggactttgatgtaaatttattcctgaaggagattaatttcctaattctccagaggactgctgtggtgtaaaactgttccttgaacttgtagttttctacttttatttatattcatgaagggatatttatatagtccttgagtggatataggaatttttctagactcattaacacaagtctgagactgtcttgaaataaatattctcagccttacttgctgtgatagagttgttgcctagatttggtttgcatgggtcatttaagttgaaaaagggatttatgattttgtgcatttctaactagtggagagaattctttagttttgcatgacctgatgtatgtatgttgtgttttatcagtgagcttctcctttctctaaacttttgtatattttcccagaaatattttaaggaaaatatcagagagtattttcaacttatttcctagaagtattgccatagtaactgaatacttagaactcatttacttttttttttcttaataaacattagctcatagactttggttaatcataattctaggaaataagttgcagcatctcacaagttttgttacactgtattttctgtttcattcagtttagtctacttttttcctttgcaacttggtatttaacctgtggattgttttaaaagtgtgtgaatttataagtgttccaacatattttcctattgtcttt

SEQ ID NO: 21379 - DNA, 1027 bp, Homo sapiens
ccagaaaggaaaataatactggatattattacatccataatgtaattaaatgtaataatacaaagagtgatcatctgtttacccatttatttgttttaattgttctttgttcatttcctggtatcttttattgactttctctggtgttaatatattcattctagctttcttttcattagtgttaaaatggtaaatgtttttccaacctcttaacctattgtctctttatatttaaagagggtttcttttacgctatagatatttgtgtcttaatatttaacaatctctgccttttaattggagtgtttagatcagttgcttttaattggattattgatatgtttagatttaagtttaccatctttgttaattttttatttttcctgcctattttttgttcccattttcttttttttcctgccttattgcagattcagtgtgtgtgtgtgtgtgtgtgtgtgtgtgtgtgattccattttatttcctttttggcttattaactatagctgttactttactggaaactctaggattcatagtataaatctttaatttatcacagtctgtattaagtaatactaaaccacttcgcatataaatacatcacaacagtatacttccgtttatgctatcttggtctttgtacttttgtttttgtacattttactttggcataaatgtcaaagtacagtattgttatttagctttaaatattcatttgcctctctccttaatgtaaaaaggcttcttctcaacttcctgacatttcttgctaaactatacacgtctgccctgttttccaacagcacactgttctgttctgtcccttatttttttcttttttttttttttttgagacgagtctcgttcttttgcccaggccggactgcagtggtgctatctcggctcactgcaaactctgcctcccgggttcacgccattctccggcctcagcctcccgagtagctgggactacaggcgcccgccaccacgcccggctaattttttgtatttttagtagagatgg

SEQ ID NO: 21380 - DNA, 1046 bp, Homo sapiens
acttaaggaaatgctgctggaacatttcagatgttgcattttcagacttgggatgctcaggtggtaagtataatgcatctattccaaaattggaaaagaaatcagaaatctgaaatacttttggtccgaagcattttggataaggggcactcaaacctgtatgttaaatatgtcactcaattttctaccagcttgcatcgtttataaggagaaatctgttgtcagtcttatctttgtatctcaaaacatatagtctgtttttctctgacttgttttaagattttttttttaaatcatcagtgtgtatgctttgtagcattgtggtgtgtgtttctgttgaaagtagttgtgtgtttgtgtattgtgtgaggtgttttgtataaatgcaaacttgtgtggggaggcattttctgtgtgttattttgtgtcgacagtttgtgtatgttgtgtggggatgtgattgtagatgttgggagggtattgtgaggggatacttttttgggtgcttttgttgttttgtatctctggtattacagtgtcctacctggtcaatgttgtctttattttgattatttatatatgaggataggactttttataccaattaaaatgtttttgtttatcccattctttctgtttctgtttcttctgttttctcttaaatttattgtcttctgctgttttgttttcttgctccatctttttctttttaatattttagactttatatcttctctgatcttctttgaagttttaacatgcatatttaactttagatttcaggatttaaaatattttccttcccccaacttaaggacttcattagctttggtcactcccttcctgaaatgacacttttgttattgaaggtatttaaagtgtgactttttagaaattcaacaatatgcacacaccagtttttcaccacaccagtaaatgtctcatatgtagtccttaaaaaaattacttttgtatgtgttgtattatggtgacctcttgtatgttagattgtgcttgtaggaacatttctttagaacaagtcttct

SEQ ID NO: 21381 - DNA, 1011 bp, Homo sapiens
cactggagtagatgtcttgacactgattatttcacctttcagttaggggtgtttgcaggcgtgatcattttattaacactgaatacaagtgcaatgaaagtttcttttgacacttaactagcttgtttaaaatcactgcattaatgttttattttagtgatcattcaggatatgttcgtccagtaccagtgccacgcagtttaaatagtgatatttcctattttggtgttgggggcaagcaagctgtcttctttgttggacaatcagccagagtaagtaaaaagatttcttataaatgaaagttgatcaaaatattttgaagttgactctgtctaaatgcattaaccagtttattaggaatttaaaaagtactctttttaatatttaacagatgataagcaaacctgcagattcccaagatgttcacgagcttgtgctttctaaagaagattttgagaagaaggagaaaaataaagaggcaatatatagtggatatattagaaacagaaaggtacaatacattttaactcataattataaatttactcctttggatagacggtgggacagaacttaacttgaaagtatgaaattttcaaaatgagttaccctttcctttagtcataataacaaaaatgggctttctcaagccaaaaatcttcagacaagttgtctcataaagcttactaagctttctgtaaattgcttgtaggattgtaagcttttttccctggtctgaatttgggttttaaaatctttgttgtataataaaattatagagtagaaaaacagtaacagggtaatggactttcaggaaattggacctctagagaaataaatgagagattgctcttacaagtttgcattgaaattcttgtgttcataagacaaaatgttaacaaatttgaatcttggtggcaagtaaatggtatatttattgtatattccttcaactcttctttgtttgaaacatgattttttttctttttttttttttttgagatggagtct

SEQ ID NO: 21382 - DNA, 1028 bp, Homo sapiens
attctctgaaagtgggttggtgtccaggatgattttacttttaagcactatgtgtttgggcttagctagctgggtccagcctgccctgtagttttcttgaacatggagggctgggcattggtcctgaccaagttaagtggtaggtctcccaagcaagcgttcattctaccctaggggtaagtgtcctcaattttttaaggcattttaaaactcagtatttgtctttaccttttcgtttatgattctaaaatcggtttagcattataagatagggtgctctttatgcatgctagtttagcagtctgtgtgaaagttcccttgtcttcacagtgttgtcacatactcagccagtttgttgtattgggccagtttcctccaaagcttttctgaaacctatttgtgaaactccaagtaaatcacattaaaatttgatgcaatagctatttgtataattataatttagatgatttaatctgttgtatttctgttcactcttgtagccctctgattctgttcacattacaaatgatgatgaaagatttctacatcatcttatcatagaggagaaggaaaaagatagctttactgctgtggttatcacaggggtacaaccagaacacatacagtacttgaaaaattatttccacctttggacacgacagttagcgtaagtaattatatttggcttaggaaatgttgctacttaacttttttaaggcagaaaacattacagatatattgaagcctctttggtatccgttttgctcctgtctcattttcttccctttagtattatccagtactctgatattggtgttaaaacagctctctattcatttattctgtaaatatttatagatcacctctagtgtactgagcattatttgaggcacaggattttgacaatattataaaattaaaaaagaacttcacagtttgtcagattgagcactatatcacttccatgaccccgttttgtgcttcttttccataggacctgtcgtaatcttccataccatatatattta

SEQ ID NO: 21383 - DNA, 1030 bp, Homo sapiens
gatagttttgaattcaaagctcatgttgaaggagatggtgtagtggaagggattatccgttatcatccattcttatatgatagagaaacttaccctgatgatccatgctttccatcaagtatgttaatctgttatcttagttataaaatatgaagttgtaatttaggacagtgatttgtttttctaaatgattatcggttgggttattcaggttagataaatattaaattttttcttatgcaagtcttagattgttaggtatttgtaatttttgtaattcctgatttttgtgtacattcatttctagatgaataaatctttaatgaactcttcttttagttctgttacgaaaccaaacttttagatatgtatgcgtattaatcctttatatgttcccttgtcttctctttatccttgttgcagttttacactttatgcagtcatatttactaactttttctttatgctttctgattttgtcttactgtagaaaggctttttacatctcaaaattatataaatctgtagcttttttgtttttgttgtcattttatggtcaatgcatctgtgtttttcttttttgtatgtagagcaaggtggggttttatttatttatttaaatttttgagtgatggggtcttgccgtgttgcccaggctggtcttaagatcctggcctgaaacaatcctcctgccttggcctcccaaagtactaggattacaggtgtgagccaccacacctggcccccacctttttttccccccccagtagagagatagggatttaacaattattttctatgtggtattcatattcagtttcttagcaccagttattgaatgttataatttacccaagagttagaacttgtataatacaaagttcccataagtacataggtctagattctttactataaagtactattttatttttttttaatatgagtaatgatactgtcttgtagctttatcttgtaatttggtatctttgggaaaaaacattttcactattgttcctttttgagaata

SEQ ID NO: 21384 - DNA, 1048 bp, Homo sapiens
tttaaagctaattttttagtaatgactaaacctacctagtaaagactaggtttggatagaatttacatatcttcattagttttttttgtttttttttttttaagacaggagtttcactctgtttcccaggctggattgcagtggctcaatctcagctcactgcaacctctgcctcccaggttcaagctattctcccgcctcagcctcccaaataactgggactacaggtgcgtgccaccacgcctggctaatttttgtatttttagtagagatggggtttcaccatgttggcctggctggtctcgaactcctgacctcaggtgatcgacttgccttggtctcccaaaatgttgggattacaggcatgagccatcgcacccagccaagatcttaatatctagcccttgacatagtagaagccacagaagcatcttaatgagaacatgtatgaacaattgtatttgctttaagggctatatttgtatattaataacctagttgtgcaatttttagctagtcttgagggtaaaaatggggtaaaactgtgaagtactttgagctaaaaggtgatttgagattgatcagtattaaaatacatgtattgattaatacaacaagaatgatttcactttgaaatttgttacaaagttgagtgaaactagtatactagtgtacttgtattctgtgaacagacctcagagacttttgatactactctttcagtagtttaatgttgaattgccaagaaatagatgattttattatcaatttattgctgggcaataaatacagtgcatagtacatagtatttgtagtcagtcagtcctgtaagatgttgaaattaattttgctcttataaagcttgtgaatcatagaagattaggacacttttaagaattatacaccgagaaagaccttatcaaaatgagttactactcctttataatacacttagaattcatttataatatggtgttagttatccaacatttattgagcagtgggtgttttcaaaagctatccagaataagttaattctattcctttg

SEQ ID NO: 21385 - DNA, 1034 bp, Homo sapiens
ttcttgttaatgtttgatatgttaggactacagaggttatataaaaaatataaacaaacattgtggtgtaacgtaagaatagctactgttatttatgtacttaattaggataaaatatatttctttggaagaaacaaatgggtgtttgtttttattacagctagatttaaatagttttctttgaaatgttggtaaatgtatttattcaggaacctcaggcactatatgatgaagtaagaactgtgccaattgcaaagctggataggacagttgctgagaaagctgttaaaaaatatgtagaagatgaaatggcaaggtaagtcacacttcaagatgcatgacaaaaataagaaaaattggaaagaattgtgctgtaagtattctgagtatgtcatttactctgctgttagggcatttgtagtcttagatattgtacctattgagatgaacttcttgttgaaaaaaattaagaggtctagttatacaaacagaattctgcatttgttttgtagacaaagaaggaaatcttatatatctaaagtgtcacttttataggcactatgattaacatgttttaaaaaaactcagtttggcctacaactaggatattacaatacctgctgagaggtaaagatgagtgtattagttcgttttcacactgctataaagatactacctgagactgggtaatttataaagcaaggaggtttaattgactcagtcgtgcatggctggggaggcctcaggaaacttataatcatggcataaggcgaaggggaagcaagccatgtcttacatgggcggcagaagagagagagagggaagggggaactgtcaaacactttaaaaatcatcagctctcgtgagaactcactatcaagagaacagcatgggggaaaccattcctgtgatccaatcaccgcccaccaggtccctcccttgacacctggggattagaattcgagatgagattcggatggggacacagagccaaaccttatcagtgagttataaagaagaagaaggaagtagaa

SEQ ID NO: 21386 - DNA, 1049 bp, Homo sapiens
aactgtgtatatcactcacctgttttatattatttcatctttagtggcctaggaaactagtcatagctctgcaatactccacgcatgatctggcccttcctctctctccaacttgatctcatcctcacttaccatacctctaaccacaactgttttcttttggttcttatcgaaccccagttttcccaactctagaccaaattttgttccttaaatgtgtctttcccctctaggacaggggtgacaaactatttggaaagcgtcaggtagtaaatacttaggctttgagagctgtatgagctgtttcttatgattacgtaagtctgttgttgtagatgaatgcagccattggcagtccagtagtttgccagtccccttgttctacaagattaaaaactccaggaaagcaatgatgttttctttaccctttttctagtactttgtatataggaggtaattaattaatatttgttgaataaatacatcaaaaatcagaaagttgcttgggtctttttagagaacttctcgtggtgatttgctgtctgatttataattgcaccctttttttaaagcaaatattgagaagatgtttctagaacatgtttctttctctattggtacaagttgagaaatccagcagtaaaaggcaaatataggcatgctttctttaagatacatcataaactggtctggccaacatggtgaaaccccgtctctactaagaagtaaaaaaattagccaggtgtggtgatgtgcgcctgtaatttcagctactcgggaggctgaggcaggagaatcacttgaacctgggaggcagaggctgcaatgagctgagattgcaccactgcactccagcctggcaacagagtgacactccatctcaaaatatatatatgtattttaaattttcatatcaattttatcattgacataaagattatttaagagtaagctgtttgatccaagtattttatagttttgagagtttctcttggaattgatttctagttttattccactatggtccaagaagttacttgatatgattc

SEQ ID NO: 21387 - DNA, 1038 bp, Homo sapiens
agttcttattctgaatgttaaaaaatacattggtattgtgttgacttgatttttaatttcttcttaatttatccagaaaatattcagaagttggggaattataccttgaaattacaagttgtgttgaatgaaagtaatgcagacacttatgcaggaagaccactaccatctaaagcaattaagttttctgttaaaggtaagcaaaacagtaatatataattatatatgctaaaggtggcattttaaatccaaagagaaaagagagataagccattaaaagatgtttgaacaattgggtaaccatctcgattttattttattttcttacttactttgagatggggtctcattctgtcacccaggctggagtgcagtggcacaatctcggctcactgcaacctccgcttcctgggttcaagtgattttcctgcctcagcctcccgagtagctgggattacaggcgcccgccaccacacctggctttttgtatttttagtaaagacaaagtttcgccatgttgactaggctggtctcgatctcataacttctgatgatctacctgcctcagcctcccaaagtgctgggattacagatgtgagccaccgtgcccggcccattttgattttcaaatagctttgtaagtctactcgataatcatattccttctgaattttgaagacattgttttctacttttcattgttgctggtaaagtctaaagctgtcctgattcctgaccctgggcatattgcccctcctcccccaaaacgttctctgttccccagtcctcaagttttaggggaatcccagtttctgaaatattcaattgtatgatttagcataggcctgtttttatctagtatcatccagccatgtacctcgtataccctttcagtctggaaatccctgttttattttctaggaatttttcttgaatcactttgattttctattttctttttctctccttttcttttctgttcctttcctttcttttcttttcttttcctctctcctctcctctcctctctcctctctc

SEQ ID NO: 21388 - DNA, 1035 bp, Homo sapiens
attgatcctaaaatgatattcctattttggaaaagtagattctaccataattctcttcctttcactgtctataaggaagcagtattgatcagtttttttcctctaagatttctgactccatatatgataattttagtaagtataaagttggtaagtaatttctacaatggtatgaaaataaaaccaaaatataaatcagaattgatgtgataaactacttaagtatgtattcaggactgggtttaatttttactgtttttttccaacagaattataatctgaaggttactctgcctggcttaaaagaagactcacagattttgaaaattagattactacctggtaatattatttcaagaaatataattatttaaaataattttcttatgttaaagtataatgatatgaagttagaggtttttgggcttttagtagtggtgtaaatcttgaaaatacacttaaatgtcaaaccatagcactgacagaaatgaccagtttttaaaaaggaaaacatttaggaagatgttattgacattctgaatataaccttgggagaaaaatttggatattgaaaatgtttggggaactgtttcttggaatatgtctattaggctttattagagatgggtctgttctttacattttgttgataaaactgtttcatattttaagaagaaaaacttctaatgttatttttattaagttaacttgataatgacttaacctgagaaaatgaagttgcattaaagttacgtagggtagaatatgctggctaatttgagaggtagtctatggtagagattttaagtacattctggagtcagcccttctgggttagtatctaggtaaactcgttctatgcctcagtttcttcatgtgtaaaatgagataatatctactcccttggggttgttaggaggattaaatgagttactacaggtagtccttgccttgcacagttctgtagtactcaatggaggacacagttccaatatgcgtgagttttcattaacacctactgtaccaagtaagaac

SEQ ID NO: 21389 - DNA, 1030 bp, Homo sapiens
aagcaagaattgaaatacctgtaagttattattgttactcattgatattatattgagtcttcatacaaatagtcttcaactgcttaataacattttttgcaaaattgttaacttctgaaaatgaggtatttgtggttctttcagccaaagcaaagcaaagacaatatgaaatgctgtaatgactattttaacattttgtgtcaaatattagtaattgtcttgatttttacagtgtcttttatagtgtctataactattattgatttacatttccctaaaatatttttcttctattaaaatacataattttattctttcgcttttttttttttttaaagagatagggtctcactctgttgtctaggctggagtgcagtggcacaatcatgacttgctgcagcctccaactcctaagctctagtgatgtgctcacctcagcctcccaagtaactgggactatagacaaggaccaatgcacctggttatttatttattatttattttttgaaaaagagggtcttgctgtgttgcccagtctgatctcaacttcctgtccacaagcagtcttcccaccttggccacccaaagtgctgaagttataggtgtgcaccactgtgcccagccattttgctttttatcgttctcatttgttttagaaagcttggtaaatatctctgtttaaaccaccatggaaggacatataaacctttaatttttgtatgtaattttctatacacacatagctttttatttgtgtttttacacaaagggattttttttatttctatttatattttttgagatggaatcttgctctgttgcccaggctggagtacagtggcacgatctcagctcactgcaagctctgcctcctgggttcacgccattcccctgcctcagcctccccagtagctgggactacaggcacccgccaccacgcctgactgattttttgtatttttagtagagatggggtttcaccgtgttagccaggatggtctcgacctcctgagctcgtgatccacccacc

SEQ ID NO: 21390 - DNA, 1043 bp, Homo sapiens
gactggggcaggagcattgcttgagcccaggaattggaggctccagtgagctatgatcattgcactccaacctgggctacagagtgagaccttgtctataaaaaccaaaaataaaaatagaatatgagtgattttaaaatcacaactatagaaggctaaataaaagtagagagaaagttgaggtcagaattcttaaatagaaagtattgggagtttaaaagtaagtacagagtagagcaaacaacttgaaaaagtatggattaagtgacaaaatatggaatgtaagaggtataaattaatacagaactaaaaacacctaagaagagattaaggccaaagtatggccagaaagttagatcaaacttcttttttctcaccttgctaagaataacgtccacctagatctcattgaaagctttcccataaataggattcttttcaaaaaataattgaatattgcttttcagaattaatcacatgatctgatttatatgttacttttaaacgataatggccacagtgatacttttgtggcagagctctaaagaaatgacttaagaatttttattttatctcactaaaaaaatagggcaatattaacaacaaagacaaagaggatgcctttgtatcatattagtatatgaaccacaccgtttctgaccataaagagacttttttcttgggggtgaagaagacggattataatgtagttttaagagtaagataagtggcagtaagagaacattagacgaagctttattattgttaaatatctctttttctcctaggttaattggactcctgagattaacaaagaacacttgctacagggtctgcttcctgatgtgcaagtaccaacatctgtaaaagatatgcgctattgccaggtttcattccaagatgatcatgtgtctttggaaagtgcgtttacagtaaggtttgtggactcattatattttgcagcctatggcaacaaaatactgtcctccattgcacatatatgaaagttgtttttaatgtaaaaatattacggtttctatgaa

SEQ ID NO: 21391 - DNA, 1705 bp, Homo sapiens
tcctgatataataatctacttcaacatttatggttcattttaatcattggttttggaaactatcttgcttaattaatcctgaatctttgcttgcttaatttagaccatcagtccaatcaagttggtattatctttaaataatatcaccataaagttctactgtgtgtcttttaataatggggtgtctttccactgtcactaatctcacattgtaccttacatgtattatgaagatataaacgtgtgtatatatacctgtatgtttataaatggaatccagatacacattcagtttaggtatataataagctttcctcctaagtatactatgttaaattttgtcattttcccctctccccttctctcctactcccctttctaggcagaaacatttagttgtaataaaataaaagataatgacaaagaagatggctgcttctatttcaggtatttctcaaaacatttcatattttgaatacatatcttgttacaaagtaattcaaccctggagatatatgtgggctcacctgaggaaaagtaatttatgatcaaatagaaatgttagtgtctctaaatttttctcagttttttgggaaaaggtgtgttttcgtttttaagcattaaattggttttaagctttgtaaattgtaattgtatttgcttttgaaactatcgaagccatcagaagaattcttttatgttgtcagggcactttataacttcttattatataggaggtttctataaagattagactggcttttaacatttctgtgactttgagcatgttgctgcttcattctggacctccattttcaaatctaaaaacattatgtgttaagtttctttacaaatcctttatcatcaatagggtcaaaatgctcattatatttgttcagtgctttttcagactaattggtaaaggaccaatcatggaagctccaccccttacctcttccagttattaccgtcttccttcctgttgtgcatgccatgcacacactcatgtagacacacacatgcacacaccacaaaccctctcctgatttggtcttatttagagttccgtttatcttagcatacatctctatagtctctgatttagttgtgcccatttttgaacttgatatacaattattttcctttgcataagacttctttcactcagcatcatgagattctgtggcatatagctataaattcattcatttccattgctgtatagaagtccattgtgtgaacacactactattttccattctgttaatggctatttgcattttcaattttgggctattacaaataatctttataacactggtgctcatataaaagtaaaattgctgggtcataagttcatagatgtgtatatttaaatatagatgtgtatgttagatgttaaatatagatgttaaacatagatgtgtgtgtttaacttgagtagcttgagggtttatttctttttaatacatagccttgctagagtgcaatgcctagagtgcagtggctcactgcaacctctgcttccctggctcaagcgagccccctgcctcagcctcccaagtagctaggactacaggaatgtgctgccatgcccagcaaatttatttatttatttattttgtgtgtgtgtggagactgggtttcaccaagttgctctggctagtctcgaactcctgagctcaaagccatctgcccacctcag

SEQ ID NO: 21392 - DNA, 1053 bp, Homo sapiens
caagtgatccgcctgcctcagcctcccaaatttctgggattacaggcatgagccactgcgcccagccttgtttaaattctcaatataactttcttaggaattaccatctcagagaaaacaatatagagaaaggttaaataattttcttcaaggttgcatagatgttacagtgtcgggatttgaattcaagtatgtattcaaagcctgtgctttgtactgcattgagccggtattttgagaatatgaatgacatgcaaaagctaccctagggatcatgagccacatcgcacatattgtagaatattattcatattttctttgtggtaaagcgtgaccaaaaataggttaataagtgtacctcttcttaggcactgagttcattattggtaattgattcacagtaaataccttgtatgtgtagttaaatatttcaaatagtacttgaatggaaaaaaagttacatagaagatcagcaggatgttctataattttgaaatacaaaactgtcgcttagaaattcataaagtagaaatgaagcaaaatttacttgacatgtaattcagcattttttacgtatttactgctttctcaacttcatattcctgttctttcaatttttaccatatccagcacgtttattctggatgttttgtaaaagaatgtacaggtaagaggaacctgggagtaagcaagaaatatttgttgaacgaatgaaggtcaatatactattagtagttctattcttcctactcatttatttttgtggaaagaacagaaatgttgactctttgaattccttccccctttatacaaacattgtcagtaatcttaactttcttttaaatttagggataaagtaattcctaataaagtggggacatattgtatccagtttggttttatgatggataaaacaaatattctcaacagtgaacaggtttgcttactttttttatataccacagttagctttacattttctttttttttccctcttggttctgcattacatgaaatagcttcacattttctcatttagtttatgaatgaaat

SEQ ID NO: 21393 - DNA, 1053 bp, Homo sapiens
ataaagtaagattttcttgtgctctaacaaaaattaggtaatgaaagccacgttgaaaaacaaaggggagtggggagacatacttaacatgcagagtggatttgtgttggaagaagacatctagtcttctttctaaagaaagttttctaaagaaaactttacctgttttcctgtttagctatgtccagttttctttttttttggagacagagtctcactgtctcacccaggctggagtgcagtggcgcgattgcccctcactgcaagctctgcctcccgggttcacgccattctcctgtctcagcctcccaagtagctggtactacaggcacccaccaccacatctagctaattttttgtatttttagtagcgacggggtttcaccgtgtttgccaggatggtctcgatctcctgaccttgtgatccacccgcctcggcctcccaaagtgctgggattacaggcgtgagccgccgtgcccggcctgtctccagttttcttggcccccttatggtcatttgaaattgctaaacctgctgtatatactcctgagattcagacaagagatttagctattccccagcagctgtatataaaaatctcttcacatcatgcatgtaaattgtactcttaccactagaggaccctgatatctcactgaatcaatagaaaactcaagtccttcttggctcctgcctcacatattgatttagtatgtctggagcagggctctagaatctgatttttaaaaagcaggtgattcttatcattagggaagtttaggaaacactggtctagagcacaaccaatgtttgtaaatgttccacattattgctttgtttaaagttacaatctaaatttgtagttgcttaagtttgttaattgtgctattcagattcactgtattatttgcctacatgatctggacatttctgatggcagtgtctaagtttcattctgatatgcatttgtttgtttctcatatgccaaatttccgtttatacttggatccagtttgggactcttcatttctgttattctgtttatccttttt

SEQ ID NO: 21394 - DNA, 1098 bp, Homo sapiens
aaattttaaattggcatctatacattcacatgaattgatcaaatcgagtgctgaaagcaagttgctaaagtatatgttacttatttttaaaatgcaaatagtattttttaaatacatgtttgcatttatgtaagtctgttgaaaaccacattcagaaactgattggcagttggtttaatggtgggcttgtattctatattctttgggaaaaagtctgtgagctgtaatttataattttatttcatggattgacctacagtgccatatcgatttagattttttaaaaatactacttctctgtaaattgtattgttatagtctaaacaaaaacagctactatcgtttcccttagaactgtgtgaaaaaatcatttcagataaaaatatatttgtgtcatttactagttatatgttttggtcttaaagtatatcaaaaggttttttatccattaatgagaaagacacaatttaaaaaatctttagagcttttcaaaatctcttgttctgtcacctgggactttgatgggtctatttccatgttaacagctgtaacttaaactcagcattgggctttgtgattgtttttataactttcacactatcagctctttcatgctgctttcaatttagaggttagaatcaagaagattttacaggtcaaaattttaagtggccatctctaatgtgaaggaaataactttttcttgaaattttttatcatatatacttttcacataagctgtttattgatacgatcatttggctttcaaaccaataccagaaggtaaaaagttgtatgtcttgggtagtggtggtggtgataatggtttaatggaatcttaaggatcagcctatgcctttggcctttaaaattaaccacttacttgaaaacagcataatgagttatgtaacatttatatgttgtaaattttctttttaaatcttgttttcccctattgtttgtttatatgtacagagtctggtgctggcagaaagtagtcctggaagggatagtactgaatattttattgtatttgagccccggctaccacttttatcaagaaccttagaaccatatatcctaccgttcatgttttac

SEQ ID NO: 21395 - DNA, 1047 bp, Homo sapiens
tggcaaacttttgtatctttagtagagatggggtttgaactcctggccttaagtgatccaccttccttggcctcccaaagtgctggaattacaggcgtgaggcaccgtgtctggccactttgtttgcttttattaaagtaaaatacacatagaaaaatgtgcatattttgtgaacattcagcttgatggatcttcacaacatgaacactgcacttatattaaaaaatagaacattaggctgggcttggtggctcacacctgtaatcccagcactttgggagggcaaggcaggcggatcacctgaggtcaggagttcaagactagcccggccaacatggtaaaaccccatctttactaaaaatacaaaaattagctgggcgtggtggtgggtgcctgttgtcccagctactcacgaagctcaggcaggaccatcacttgagcctgggaggcagaggttgcagtgagccgagattgtgccattgcactccagtctgggtgacaagagcaaaactccatataaaaaaaagaaaaagaaacaccagtactgtagaagatttctttttggctcctccactccctaccaccactccatactcaaaggataacaactttcttgacttatagtagcttagattaattttgcccattttagtactttatatacttggtattgtgcggtgcgtacttttttatatgtctagttttgttcaacactatgcatgtagttcattttcattgcaggataatacttcattgtgtgaatgaaatgtacaatttatttattctactgttgaggaatttgagcagtgtcttagtctgttttgtgttgttataaaggaatacctgaagctgggtgatttataaagaaaaagatacttaatttggcatacacttcttctggctgaaaagttcaagattgggcatctgcatctggtgagggcgtcaggctgcttcctatcacagtagatgaagagctggcatgtgcaaagatcacatctcaagaaaggaagcaaaagggaaggggagggaaggtgccaggctctttaa

SEQ ID NO: 21396 - DNA, 1048 bp, Homo sapiens
gaatagaggcttcagttttctaaataattttccacttataaagattaaaaattagttctgttaaaaatatgtatcatcttctatttggagatagttcagggaactattagaaaatatttacatatacctgaatttttaaaatctgtagctatatatgtcaaggtgctcactgtgttcatctctacatgaatgagattatgaatattaaatgttttattttgcttgtctttgttacttttctgtaataagcattataattcctgttcttaaaataataagttcatttaaggaaaagggggtgaaaggaaaaatctgcagaatttaggtctgagataataccatttcaaagcactgtgatacaaattacttatatatgttatatactgtgtgtgtgttaactacttttatttgggggcttgttttgcatacatgtgaaggaaatgattatatataaggatttaattaaatctgtttataccaagaattatatttaaaagaatatggtttcattggatatttaagcattcaggtgtgatgagggaattcagggaaaggaaacctttggtacataaaacttttttttctttcccctttgaccaggattataaccaaaacagatgtatgagaggtgacagagagaagaggccattggtctcagtaagaatgccctgctttctgcatctctgtttcagaagaccaagagggtgacttaccagactgagtatttctggggacaatacaagtacctgggcatgaatttccatttcgattcagatgggactggaaacaaccattcaattttatgaatcttactggacattatggatttactggaattattccagacattatgccctttggttgtcactaccttgcaaatgtgtaagaggaaaatgtgctaatgtggcagtgactgtaaaactggcacatggcatttattaatcctgaagaaaagtacatgtactatttttcagtataaatataatgaacatgtcagaactatttcttgaaaacctttttattacttttgcgtgaatttatttaacaa

SEQ ID NO: 21397 - DNA, 1030 bp, Homo sapiens
cttggctcactgcaacaactgcctcctgggttcaagcaactctcattcctcagcctcccgagtagctgggactacaggtgtgtgccaccatgcccagctaattttttttttttttttttttgtatttttagtagagatagggtttcaacatgttggtaaggctggtctcgaacttgagctcaggcaatccgcccgcctcagcctgccaaagtgctaggattacaagcatgagccaccatgtctggcccctaagttttgagaattggtggatgaatgaagacaaaggaaggagccttctttttatacttaacaaggaggaatggctgtttcacatggaattgttcagtgttttctgaggaatccagaagcctgagtcacctgggacctgtggaaggaaacctgaggttcttttttattattattgttttttagagacagggtctcactgtgtcacccaggctggggtgcagtggcaccatcatagttcactgcaacctctaactgttcggctcaagcgatcctcctacctcagcctcctgagtagctgggattacaagcagaagtcactgcatcctgctagttttttatttttatttttttagggatggggtctcactatgttacccaggctggaaaaaaacgttcttcagaaactcactctagagtgactgagggataatttgtgagcagtgttggaagtacagggctggaggttggccgagatgctggagatagaaacgcatttctgcagttgagagtgacggacaggttggcatcactgaggccttgacatggttgagcagagctgagttcttagggacagtggaggggaaggaagaggaagagctgggcaaggagagagagtgaagcaaagatattggtggaggaaaccccatcttagagactcaggagaagtcctggaggcttcaggctccagaaaggccatgggttagtgagcaggaagcaattgtttctgcagaaagaggccattcaggtcagtggggtgcaggcattgtaatttgtgtgagat

SEQ ID NO: 21398 - DNA, 1075 bp, Homo sapiens
tgccttcagatgtatttgactaatcttgaagaaattgagtcaaaatttttagcatgagaatgaaccttaatctaagttttggtatgtgaagaagaatgaaaacataatcaaatgccttgttagtagactacattctgtctctgatttaaccttcgatataactaaggtcaaataacaaactaagttacaaggaagagaagaaaattaacatttatttaggacttgtatatggggagggtaaggagttggaatgttagagtaaggactgtaaggctggtgtacttcaaaacaacaccactaagccaagcttcaaaacaccctgtgggatgttctttagcttgaataaatagaagtagacaatacatttatataaaaaatcccaataccagaagtcctggagacttaggtccaaaatccccttgctcagtcattgacctctctagtcatttgtttttcacattgcaggaagttacggaaacagtctgcaagaccatcatttctgacagcagtttcaagtttggatgtcctaagaccacccttgcgtttgattatttgctaagactcacagaactcactgaaagctgttaggctcacagatacataggttttcagaggttatatgtagctagtaacggtggagctgagatttgaactcaggacttcctaactccagagctgatggtatttttgtgttttatttattatttaaaactgcaaattaaaaatgaaatgacaagtgccttttctgcttgacatttaaattattggtggctttcagtagagtgttggaagctactaccaaagccatattacggagaatggaggaatgattgggaagaagagaaaaggggctgggcacggtggctcatgtctgtaatcccagcagtttgggaggatctcgagcctcagagttcaagatcagactgggcaatatagtgagaaaccccccatctctaaaataaaaaacagaaggaaaaatgaagacagttcagcattagactggtattctgaaagtcttgtcaagggaaaagggaaatgcagggatagctagaaagatgaaagggtgggtttgata

SEQ ID NO: 21399 - DNA, 1067 bp, Homo sapiens
atacagtgtaactctttacatagggtttacattgtgctgggtattatacgtgatctagagatgacttaaagtgttgggaggatgtgcttaagttatatgcaaacactacgccattttatgtaatggacttgagcatcggtggaatttggtattagttgtggggaggggtatggaaccaatccccctcagatgctgagggatgcctgtataacatttaagcaatggaggctgagaaaaaaaatcagtctcttaggccaggtgcggtggctcatgcctgtaatcccagcactttggtaggccaaggtgggtggatcacctgaggtcaggagttcgagaccagcctgcccaagatagcaaaaccccgtctctactaaaaatacaaaaattagccaggcatggtcgtggcaggcgcctgtaatgccagctactcacgaggctgaggcaggagaatctcttgaacccgggaggtggaggttgcagtgagccgagatcacgccatttgcactccagcctaggcaacaagagcaaaactccgtctccaaaaaaaaaaaaaaaaattcaatcagtcttgtaatgcccatgaatttcacagtcacagaatgtaattttctttatttctggtaataaaatttatattctaactctgagcccccacttctgacggacagcagaaaagctccatctagtcacagccacagccagtcgacttgatccaatttagcactttctaagttgcttctggttaaaattcaggaatattcagaatatttccctttgattcccctcctttccttctattgctgctggaagccattgcatctggagaggcagtcgggacagtcagggggacctgtgttggtgactcagccttcctctgctgtctgagctttgaccccaggggattggacacagtgctgctgggatgcaagagtggatctatggggtggctcccacctgggtctctgatatgagttgagccttcgtcctgttccagtttctggaaggaactgttcactctgcagcccctgccacggggatccttatctccagccaggcacgtctgtcag

SEQ ID NO: 21400 - DNA, 1030 bp, Homo sapiens
acactgatattacgaagtatgcttcaaaatgatggtacactcatggaagcagcctcagaggaaagccattaagatggcgggggtgccaatcatgtcatatgagggcaattgtaagatattattgaactaagatcaatgggtacagggtttgggaggaaggattcaggtcaatgtagggaagaaccatctaacctgtccacagaagggatggattgcctaattaaatgccgagattagagaatttagcctcgtggatgtggtcaagaggattcaagcattaggttgatgatcatttagatcagcttcccacacctgctcatcagaatgatccagccacttgttgaaaggatgtgttctggttaccctgagatgttttcattcattagatttagggtggggcctgaacatctgaatttttaatcaacacaataggggacctgttgctgggtagagggtggtggggtataacagaggtcacaaatgtacaaaagccctttttggaggagcatgtatgaaatgttttaggaactgaaaggtcagctttgtggttgtactcaagagagtgaagggcaagttgtattagaaaaaagtagacatataggtgtgagccagaaattggaggttttccagaaccacattaaagattttaagcacaactgaaaccattttagcctagagtaacatagggtaaccagattttgtgtgtgtgtagtgtgtgtgtgtgaatgtgcagacccacacactcaaaatacacatcatatttttaaagatctctcagactgtgaagagaatggacttaaaaatgttcatggaggaggtagagtgggtggcagtggactggttaatagactattgaagtattccaggtgaatgacaaggggacatgaggaggtttttttgggagctaaaatcagctggcctggatggtagaccagatcatggggataagggtaagagggtattcagggtggagagggatgccatttactcacccagggaataggtttgtgggaatgttttgaacgaatgg

SEQ ID NO: 21401 - DNA, 1021 bp, Homo sapiens
ttaatccatcttaattttagcatagtatgtagagaaggggtcaagtttcaatcttctgcatatggctagtcagttacaccagtgccatttattgaatagggagtcctttccccattgcttgcttttgttagcgttgtcaaagatcagatagttgtaggtgtgtggccttatttctggtttctctgttctgttccattggtatatgtgtctggttttgtaccagtaccatgctgtcttgtttactgtagccctgtagtatagtttgaagtcaggtagcatgatgcctctagattttgttctttttgcttaggattgcattggctattcaggctctttttttgttccatatgaattttaaatagatttttctagttctgtgaagaatgtcagtggtagtttactaagaatagcattgaatctatataaattgctttgagcagtatggccattttaatgatattgattcttcatattcaggagcatggaattttttccagttgttcatgtctctgatttctttgagcagtgttttgtagttcttgaataggtcctttacttatcttgtttgttagctgtattcctagtttttttgtttctttctttcttttttcacaccggctaatttaaaacattttagagatgggatctcaccaagttgcccaggctggtctcaaactcctgggcttaagtgatggtcctcctgcctcagcgtcccaaagtgctacgattacaggcatgagccaccacgccccacctacacacatgttagaatggctaaaatctaaaacacttacaatgccaaatgctggcaaggatgtggaacaagaaggaccttcattcattgctggtgggaatgcaaaatagaacagctgcttcagaaagcagtctggcagtttcttacaaaggtaatcatagtcttagatatgatccagcaattctgctcctaagtttttgtcaaaaacatatgttcacataaaaatctgcacacatggttatagcagctttattcatttttgccaaa

SEQ ID NO: 21402 - DNA, 1019 bp, Homo sapiens
aggatctacaggaaaagaaggaacatgatggtacattatttctgttgaaagcaaatgagggcacagtgcaaatgccaggcaggcacctgtaatctgtgacatttcagcttttaaatttgattttggcttatctaataaatatgggatctgtttatattattgtgatttcatgtctacttaagagtttaatgttataattaagtccttactagttttgtgagtactaaatcgaagaattgctatcatgtaattctttgaacagataaacatttttgggagagggaaggcaaatctggattctggtagggttgatatttaatatttatcagttatggtttcagaagaagtgaaactgactacagatctattacctatgttaattaaaagaagggagcaaatggcatggaattttactactccttgaaaaagttctactagcattaatgttctagggggtattgctaaattcagttaaaattagtccatggtagcctcgttggcataatagggaaaaagtgaattctccaaagaatgaagctttcaaattcattaggacaaaaaattacctgtcttcctctgggtatttatttttgctacagcttgagctcctctcttagtttcagtgccacttgatagtatggacagataaaactccacggtgggggtcacacacacacacgttaaccaaaaataaaattctaagccctgcaaccaactgaatggatcccccttatggccgaggggattccaaagaaacctgaaaaactagttcaggtcatgaaaggaagtggggaccaggcatgcctcattgtaccttctctcttttggagtttagatacaactgaccagcattaacattaaaacagagatctggctgggcatgatggctcatgcctgtaatctcaacactttgagaggctgaggcaggcagatcacttgaggtcaggagtttgacactggcctggccaacatagtgacaccccatctatactgaaaatacaaaaattagttgagcatgg

SEQ ID NO: 21403 - DNA, 1034 bp, Homo sapiens
cagcactttgggaggcccagacaggcagattggttgaggccaggagttagaggctagcctggacaacatggttatatcccgtctctacagaaattaaaaaaataaataaataagccagctgtggtgatattcacctataatcccaggtacttgggaggctgaggtgggaggattgcttgggtccaggaggtcgaggctgcagtgagctgtgatcatgccattgtaccccagcctgggtgacagcaaggccctgtcaaaaacaaaaacaaaaacaaaacatcttattgtgtatggactgtgttcagggcactaaggtttgctttggagcaaagtaaaataaacatatgttccctgttaatacaggtataaagaaaggcaaattactgtgtccctcatcttaaaaacaaacacagtactttccttcaatcatacatcactctcgactctcctgtctgccccttatttttcttctcatagctgtcgaatcgatttcattaaagatagctgaagccttgtagcccttctggattttctattaaaattcacctaatggtagaggtaaaataaaatgtgcatcttcaccccttcactgtagcactccccacagctgtactctggtttacaagactctcccattctcttgagagcaaattacttgaggttaaggacttagggcttatctgtctttttacctttggaaaatagtgaatgtttaataatgtttgcatctttctgtgagagccttcgctccagcacatcaatgatcttgggcaccaagcaccaagagtcacctagatttgtacatcagaagccaaaatggaatcaaaccatacactgaatgttcagggaatctgtcttatctttatcaaggctactcgtcatggttgaactggtagtgttctgatttcccatgtgagcacgtgtgcccatgtcaatacatttatatatccatagtggacatgtggtccatgattgtcaggaggcatggttttctcacaactgtgggcgtgattaattacttgctagaaagtcca

SEQ ID NO: 21404 - DNA, 1022 bp, Homo sapiens
ctcccagttacaagcgattcttctgtgtcagccccccaagtagctcggattacaggcacgcgccaccacgcccagctaatatttttgtatttagcagagatggggtttcaccatgttaatcaggctggtagtgaactcctgacctcaggtgatctacccgccttggcctcccaaagtactaggattacatgcatgtgccacctcacccagcccactctaacacttgtaagtttatccagaggactcaaagcttgatggcagtttgcttagagctagaaggctgaggtgcgctgggagacatgtttctcttttgctcatttgcacacataccccaggaaggtaggtgaacccttattgagtgagattggatggctggggtcttggtggtgtggatgtaaggaattaaagcacacaggtaagattgttcaccatagggctgcttgtgagccaggcttaccttgcatccagtgtcgctggcctcagagcgggcaaagccagtcttagcctttgtcttctgaacattttaggaaaagttcagtcactcttgacttaccaggtatgttatgtgttatgtctggaaccactgtcatgctttgggaagcaggtggattttatcttgacctcatatgtcctgtgtacttccttctatccatgctcctctcagcacatccagatgcattctcttcttattcacccagctctcagtttattcgtcctcattaacacgaaatgtgggctcactgggacatactcagtggcatctggcctccagttaggacttgccaacttcatctgtaaggataatgctgcttgtgcttttaaaagctaaataagaagtaagataaatgagagctaaaacttgtatagtcataacaacagattatgaaagattgataatatgtcaaaattttagtttatgagggttagccatgttcctttgtgtaacacttttataaattaattttaagaatataaataactggtaattacctattagaataaactgcaagtgaatagaatgc

SEQ ID NO: 21405 - DNA, 1053 bp, Homo sapiens
tcgggagctctgcagaaagacagtcatatagagtctgcttcctgaaggatcagcctccttgggatctctaccataagaaacttctgtcctgaagagagaggcaaatacatgagggtaccaggaactgagggcctccagctttttgcttttagagacttaattatgccatctaacaaaagacgtaatttgagaaatatttctaggcatgttcaactgtgcagaaaatgtctttgtacttcagactagaggaaattaagctgccatctggtatgggatatacaacagcaataaaaaaattgcatgaatattttttcccattttttcccctttgggtatgagtgtggaagtgttgagttttggctttaactattttgtttggggtggagcaggtggggtggaagtagggaaaggagctaactcttgttatcagccatggttaggtcaataatatttagcctgacctttatatcttttatctctcattccttgttttgtattaataaaagttatcatttggagttgaaggaaaggaatattcacaactagagtattgtaagtgtttggctaggttttgagggagggtttagaattttctttttaagcaattataacaagggataattttttattgtgtaatattttatgagcacaaacttgacttgaaatttaatacacttgatattctgtgtatagaattaggttatagaaacagtatggagagttgagaaagagaaaataagtctttgggaagttagaataattagagattagaaaactgacacagattgaagaaaatgggttggtagaagaaagaccactggacttggaatcaaaaaatctaggttctagttatgattttgccaggcacttcctctctgattttgatcaaataaatttactcctacatacaaattaagataatattatctagcgcatgaatttatcatggggatttaaagatgaaataagtgccaatatatatacctcgaagcatgttttaagaaatttttcccatgtaagttacactacaaagattattgtcataatgagtgt

SEQ ID NO: 21406 - DNA, 1064 bp, Homo sapiens
catgtaagtgtttactcttgccttagcagtagttctcattacacgtttctattcataagaccagccctggtcctccagcatttccttttttcgtctcattttattcaaatctgatatcatgaaaaatctaattttacatgaaaaatataattatttcctctatcaacagaatcataaatagaattcatataaattcagatttctctgatgaatcttaagtttgattgcaaggagctaccagtttatttgtgcatttgcaagttttcaggaattgatcttataaataattagcaaactcccctgaccccaaatctatataataactcagaaaaaaaaatggatgtgtttccctattgatccctgaatcattatgtgattgtggttattatcagcttaactgaataaacttagccataaaacaagcaaaacggtcttctgtttataaccactctaaaaggaaataaacacttggcaacatagtaaatttcacaatgtgccatgggtatgaagaaccagtgagatgtattacttacgtaacttaacaaagcctaatgttctagtcaccctttaagtatatgaatctctttccactttattaaaaaaagatatttgtgatttacatgccattttataataattcagtccttataattatgttagaattcactccccagattccagaatttgttcttttaatcagaataggtttgttcaagagtttgatcctggcttagaggagccagctaaattctattatttattcaaaaaagtttatccctttatagtattttcctgctggaatgacaatattattttgagaaacaaaaaacttatagtgtaaaaccttgcaatgcaaagtttaccttaagatataaatattctggccaggtgcagtggcccatgactgtaatcctaacacttcgggaggccaaggtgggaggattgtttgagctcaggaagtcaaggcagcagtgagctgtgattatgcactccaacttgggcagctgagccagaccctgtctcaaaaaaaaaaaagatataaatgttttgtaatataaatttta

SEQ ID NO: 21407 - DNA, 1034 bp, Homo sapiens
acgtgtgtttgtgaacatgagctgtcatctggtcaacttgacagtgttgttttaaccgtcacatacagaaatgtataagaaatgctttgagaaatttaaaatgtcgtcttaaaatgaggcaatataaattaacactcaaagtcaaatacaatcatttagatcattggagtaaccatgaatacagtgggaagttctgtatgatttaatttagagacgatggtaaaaacacatcattaggtctgtagcagaagatttaatcaggtcatacttgatgagttgtgttggataaaataactttttgttgttgtttaactctcaggtgaacatagtttgaatataccatgatgtacatgtgcattttcaaaattctcactgaattcttattttgtgaacttacatgactcttttagtcagtgttagctcaacaaatatttcttggttgcatgttttgtgccaggcattgtgtgaggtactcacctcatttgtatcttgtttgtcctcataggcttgtagttctatatccaaaaatctatttatactaattttaaaacactcaatttttatatcatattgtacctaagtgactttatgtatagaaataaattgatatttactgaaattatagctgcttatgtgtttcataaactgccgtatgctatcagctattaattattacaggacgatgaagcccttgaaccaggtatccattgatgctcttagatctcaagattatggtccatactcaacaacaggaatttcaaaatactgctgtattacatttcacttacacttaaggtctgaaaaagtaaatcctgttccagggcccctagtttataatgcttaacgtttaacgtcacagctgaaagttttgaaatctctttcatgcgtgtgttctcatttatttcttcattactatgaaaagggaaacaggtactgctattcttatttttaagatgaggaaaaggtgtatttttggagacgaattgactcaccaaggtgactcagctgataatctgggggtcaaggcctgcact

SEQ ID NO: 21408 - DNA, 1051 bp, Homo sapiens
aggaggccctcaattaaaagggaagccgtagggaaatggaaaaaggaatgagagagagggaaggaaaggaactgcctcgggtgtggatttcaatatattattagttgttactgtcagttagaagcaaatgctgtgaaactttgcactcattcctgtgtggactggttagcctatgtttcctctaccgcagcattctgagtcgtccacctcaaatatgtgctgttggtcataaagacagactgggcccaagagacagtgtgggtgaaacaaattcattcattccttctagaaataaaatgggaagtctgtcctacagaggatgagccagccgccatcgtctgtacttgtcacatgccaggccagctcgcctgctagcttgggagcaggaggacagcaaattcaaacactggaaaattgcttgacattttattgggaggcattgtcaattattagctaagattgttttgtcttctgaagaattggccctctataaaaaaatagttgtggaaggtgggcttttaacagaaaatgtaaagtctgttcagttcatactaattagtacatggaattatttaacatataggcaataatggctaaaaactgacatgaccatcagctttattttaggatgttttacaaacctatcacaaagcaacaactaattttttgttcatgtatattaattcatttggcctttacctggactaatatcatctgaaaccttcttttctttgaaacattttatgaaatgtatacacttatttttactttattatgtaagcaaagcaattttttattttccgtcccacaaattatgtgttcctttaaagatttgacattttgatgcagcaaatgttaagaaaaggtgtgagataaatgtctacaaaataaatgttttatacagaaccacggggcaatgtactctcaaaattaatataaaataacttgaataggacatattttttttaccaggtttcatccatgtataattagatatatttgtataaatgaaaatacctgtatttttaacatttttcataaggaataatgt

SEQ ID NO: 21409 - DNA, 1031 bp, Homo sapiens
tgagttttgagttggtgggaaagaaatcatggccgaggtgttcaaaaccaagagctgatatgtggaaaacaagcattaaaacagtgtcactagaaagtgacggcggtggaaagttgtccatagagtaactctgctttcagggctccgtgtgaggactgagggggcaccctgaaatccacactggaaacaggcaggcccctttatgaataggagctccagctccatccatggtagctgtgcgtgctcattcattaggccttactggtttgttgtgagtgcagtatcagcatgatttatggcataggcagcctggaaataacatgagcagcacatagcacagccgtggctgtattcatccaacatatcctgtctgttcaaaggaaatgtagaaatctacttcttaatgacattttgtgctgctttttaatttttcttgcttttgaaatactgcattgttcagtactcctgtttgggagtcacttagagtgacgcagtgtcagtcagcccaagacttggtggttatctctgttttgtcagatctgagctgcactcgcctcttttattcttgtaaggattgggcatacaaacgtttcttctcaggaatcaaagaaggctctcatgagaaactgcctccccagcacctgagggccccaccatcccaaggcaggactctacatgcaaacagcatccaccctgaggacaacattctgcacagaaacctctcaaaactacagaattgtcatccacactttggccaggagtactgggaagtagctagaatggagttgagtcaattctcagctcttagaagttctttttttttttttttttttttttaaataatgttctgggaaagctagttacagaggcctttcacaaggacttcattggctacctgtaacctctggcctaagtatgtatttgcttcgtggttccatctcacatgaaattagtataaggtgaacccagtgatggctgcctttaacaagggttagcaactgttaggatggatgtgtggattgactcagcca

SEQ ID NO: 21410 - DNA, 1025 bp, Homo sapiens
cagacagcagtgcatgcaggagagcataagcatgcgtgctctgggaggggacagcaaggagtccttgtggccggagcaggataagcagaggaaggagtgttggcagtttaggtctgtgctggtggggaagccagtgaagtcagatagggcataggggctgctgtaaaaggcttcagcttttattctgaatgcaatggagtcccgtcggaaggttttgaaaaaaggcgtgacattgtctgctttctactgtagaacagaagagttttctgtgcttgtctccagttccttttggaggactaagtgtggctgctgtgttaagcatagaccaagagatggcaagggaggaggcaaggacacaagcgaagagactgcaccgacagcacaggccagaggcagtgatggctggtcccgagtggtagcaggagagagatgggtgggtttcagacgtattttcaaggtaggaccaacagggtttgctgatagattgaagtgtcaagaaaaaaatcaaggatgtctctgaggttttcagcttgagcaactacaaagatggatttgccattttctgagaaggaaactacaggaaaatgaggtccgggtgggagatgaggagaaattaagaagtcgggatttgtttggggactgagaaatttgaaatgtctctgacatctgtgatggatttaattgtgtccccccaaaaagatgttgaagtcctaacccccagtacctccgaaggtgaccttatttggaaacagagtctttagggagataatcaatttaaaatgaggcaattagggtagaccctaatccaatattttataaggacaagaacagaaaaccagacaccgcaggttctcactcataagtgggagtcgaacaatgagaacacatggacacagggaggcgaacaacacacaccagggcctgtcagggtgaggggtaaggggagggagagcattaggacaaataactgatacatgtggggcttaaaacctagatgatgggttgataggtgcagcaaaccacca

SEQ ID NO: 21411 - DNA, 1057 bp, Homo sapiens
acaacaggaaggggtgaaatgtggggcatgggggagagcccgtctcagtggcacagtcatctcagcatcagaacagggtggaaggtggagaaccttggggaattggggaagcttgtgtaggtctcttcttctttttttttttttttttttttttttgtttgtttctaagacagagtctcgccctgtcgcccaggctggagtgtgtggagtgcagtggtgtgatctcggctcactgcaacctccaccttccggtttcaagtgattctcctacctcagcctcccgagtagctgggattacaggcacccgccaccacccctggctatttttttctatctttagtagagacagggtttcaccatgttagccaggctggtctcaaactcctgacctcgtgatccgcctgcctcgccctcccaaagtgctgggattacaggcgtgagccaccgtgcccagccaggtctcttctgattgactcattttcctcaatgaaacaggaagcaaggtcatcagctgagagtgaagatgtggagtgggagatctgaagacagagggggaggcatgaaattgttctgttgtggaaacgaagggtgaatggactgggaagggcagcacaactcccaggcagcatggagggctcgctggaggctgtggccatgcactcgtcagcatggctatgccagccagaggggagtggactcggtgcagggctgtgaccaggtgtcaggggtaagctggggagttgagggttttgtgagggaatgatgggcatgactggctgtagggtgagctgggtgagaagagagaccaggacagaagatgtcaagacctttgttgaatgaatgggcaaagataaaaaaaaagaaactgtcatctcaaacagttcaagtcaggactgcaaaagaggaccaggtgcctgtgcctggtaggaaggaggaccaagatggcttccaagaggaaaagtcttaaagcatgaacggaaatttggacagacagatgagcaggtgaggaatgggcaggtccaaggagagaatgttgtgtgccagtgccaccccagag

SEQ ID NO: 21412 - DNA, 1090 bp, Homo sapiens
ccatgttctttatagggaaacttcgttatactgaggtttcagtaaaactctcatctcttgcgcatagcagtctgaggatagagtgagccacatgttatggaaaggggttatacttttccttcatctccagggctggataactttcttaccatgtaccatatatcatcaaaaattcccgttaacaagtaacttacacataaataggtagacttgattctatggattaagagtttaagaactgagaaaataaattttaagaaatatatgctgtcatgttttattgctataatagtatttccatatctaagttggagagtcctaaggaatactataactctagactgcataatcctcctaaaaaattattggttgctgcattggtgtctttggcaaagtaggatttggggaagagtttaattttaccaatcatacactgtacatggcgccagggatacagagaggagaactgcttctccgctgtcccctggggaagctgacagggcaggagaaggcagccaggtaatgactgtagtttgtccagtcaaaccccacaccctctaagagagatgcgcaggcatactctgaaggccagtggggtcacctgagccagccaagagcaaggatgacttctctcttggaagatgagtgggagctgaccaagagaaggtgaaagagggtagccatccaggtagacccaaaagcaggagaatggggttctctgaggaaatggcaggagttctatatgcctgagtcccaggacgggctggtctgtgggatgagggtggtcagggctccaatcaccaaaagcacctcctgtgtcacactgagaggtttggacatcattatagaagtagtaaaagagaagaaagactcaaatagcctgagtctcattcctgtacttggatggagagctatttagtctgaacagctcaattttaaaatattatttgtatgaggcacacaggcaatgcttaaaaggtaataccccaaaaaagtaaaggagaaagggaatgtgtatttactttaaaagttcctgttgttctatctctattcaaaaatgccgtggaatgcttggcttcaagacttgttg

SEQ ID NO: 21413 - DNA, 1090 bp, Homo sapiens
agctagcctcaggatggggtgggtctccagaaaaacctaatgattagagagttggaactttttcagccccacacaccaacctccagcgaagaggggtagaggcagctagagatcacactctctaaaaactcgaacaagctgtgatgagcttctgggctgctgaatatatacatggaggtgctgggtggtggcacatccacagagggcatggaagcttggcgtcctggccccatacccagtcctacgcacctgttcgtgtggttgcttgcctgtatcctttataataaaccagtaaatgtgtgttccctgagttctgtgagctgctctagtgaataaattaaacctaaggaggatgtcataggaaccttgattgatagtatagatgacagcctactactggggactggcatctgaagcggggggttgccatcttgtgggactgaggcctcagcctatgggatctgactccaggtagaaagtgtcagagtggaagcgaatgagaggaaacagagttgatgtccactggagagttgtttggtgtggaaaaatcctgcacgtctgatgacagcagtgttctgtgctgggctgaatgtgtgagaggagaaaaagcactttggcttttcctatctcttaccaaccgctaatagaagcaatgtagaattatttacatgagactgtagtgcatttcataacatgactattccaacaaagaaactctatatcatcatagacagtttcacagctcataaaggcatttcagaggcaagtgaggctttgaggggtggactttccataagtcttgcttggctgctagaactttcatgatgttgagggtacctgcccttgtactaacacctactatatcggcactgtacaaagaacacaccaggccgggcgtggtggctcactcctgtaatcccagcactttgggaggccgaggcgggcagatcatgaggtcaggagatcgagaccatcctggccaacacagcgaaacgctgtctctactaaaatacaaaaaattagctgggcgtggtggtgcgcacctgtagtcccagctactcgggaggctgaggcaggggaatcacttgaa

SEQ ID NO: 21414 - DNA, 1047 bp, Homo sapiens
gttttgtttgaaattgcatgggatgcatttataaatcttgggagaattgtcttcttggcagtattggctgttcctatccattaatatggtttatgcctccatttgtttggatcttctttaatgtttttcaataaagcttcaaaatcttctttataaatcctatacatcttttggtttgataagattaaagtatgccaactaattggataacctagaagaactgggtaaattcctagaaacgtacaacttattcatgaagaaatagaaaattcaaatatagcaatagcaaggagattcaatcactaatcaaaaatctcccacaaagaaaagttcatgtccagatggctttactggtgaattctaccaaacatttaaagaagaattaaggctagtatttctcagatgcttccaaaaaagttgaagatgagaaaacagttccaaactcattttacaaggccgatattaccctgatccaaagccagataaggaccctatgagaaaaaggattaaccaatatccccagtgaatgtagatccaaaaattacccacaaaacactagcaagccaaattcaacagcacattaaaaggatcatacaccataatcaaatgggatttatccctggggtgcaaggatggttcaacatatgcaaatcaataaatatgataccccacattaagagaatgaagcatataaattatatgatcacctcaatatatgtagaaaaggcatttctcaaaattcaaagtcctttcatgataaaaactctcaacaaattgtgtatagaaggaatatacctcagcatatatgaaaggccgtatataaagtttccagctaacatactcaacaaagaaaagctgaaagcttttcttctaacaagacaaaggtgcccactctcaccagttctgttcaacatagtactagaaatccaagccagagcaattaggcaagaacaagacattaaaggcatccaaattggaaaggaagaagcaaaattgtctctgtttatatgtaacatgatcttatatatagaaatacctcagagactc

SEQ ID NO: 21415 - DNA, 1115 bp, Homo sapiens
ccatacatataatcagttttgtctgtagttataatttgtccataatttgaaaaagagaagcctaaaaagttccctccagacactttcagctaggaacaaacttttatgtgaaaataataaaaatgtggggagtgaaggtttatagtggaaatatttacagagcctcaaacactgcacaacagttcaaactttgttgtagtgccttcattctttttgctgtcagtttgtttttcttctatctttattccacatacttctggtataggtttaataaggatttttcaaaaagataaatatggtttatattttcccagctcaaaattccccttcaggcctctgaagcaataaataatagtgctttgaatgctgcactcactttcctgggcaagccattccggtagtggagggttctcagagcgtcagtgtaacttctgcacactctgtaaagcagcttttttctcttgcattctggcctccagatggagatgaacacttgaaattatttctcagtagaattgaaagaacttttttttaaatcaaaagctcagccttcagtaaacaacttttgtttttattcttccaagaaccagtgcagcttgcacttcaagtgcaaattctgtgttagctagcactgtgcttcctggcaaagttgttcctgcattgtcagtgagttgtaggttatgttttggattcatttgttatgtcctatttgagactaatttaaaagtattacctagtgaagtggagtattctctggtttccaaatttaaatagggatgctttgagaaaatgtgatttatatacaggcgaacagtgactccataaaagtcactgtcgtaagtattccagcgacccagggccaagtttatacagaccctgcctgcattttaccaaccatctgtggttttacaagagagaatgaacaattgcaattagcagcttatccagaaacttccttttaaacaataatttctcttcactagattaatttcaaaagatagttgccaattagccaaatggtcactttcatagacatttctcatccctgtgctctaaataaacttgctcattagcaatgagaacatttaaaggaagagttaaagttaaaagatgaa

SEQ ID NO: 21416 - DNA, 1033 bp, Homo sapiens
tggacccgatcctatgggcacctggaaccaaaagactccttagtaaggcattggcacgaaaacagtttggcagagttgcataggatgtttgggaataaggaagagctgcggaggatgcttgggaataaggaagaaaccaggaggcaaggagaccaagcagtttgtttctgtgtcccttaacaaacatgcacttacccgagcacatactccctactctgagtgtggttgaatttctgtcttgctcatttttgtttgcttcacatgtagcctataatacttagagtactggagtactttagtactcagtgcgtgcttctaactgtgggatgttcagagaatgatcatggcccctggcctgctgcagagcgggaagacactgtgagaacgccagccagctccacttcagtttctgcttcagagttgcttttcccctccactcatcagatcgtttgttgagcacctactgtgtgttgggtgttatgctacccagtggggattcagtggtaaacaggacatcgactctgtccagaagtggatcggagcttctgggagctgcgtgaccgcttgtcagggcagtgacagatgtgtatgggtatttgggagcacagtgaaagcgcctccagtcgaggctagtgatgaggcctggtcagagaaggcttcctcgtcattggaatgtttgaagataagtttgttcctctagttcctttagaaaaatgcaaattaaatatggtactgggtgtggtgtagaattgtggttgccttacctgaacgcttaccatttgagcagttagctcccggggttcttcccaggctggtttttctagtttcatcttcatgtagtgcagtgaattccatatagagcaagagtctcttccacagtaggagtttctccctaccctgtcagggctgctcgcgacagccgtctgggaaagaccgtgagcctcacagcatggcccagggaagagtccctgagtgtgcctggaccaagatgggtcactagagtggtagtattgtctaattcctaggctaggag

SEQ ID NO: 21417 - DNA, 1050 bp, Homo sapiens
tgaaagacagccagcaagaaggcagagcgcagagtcaggccttgtcttaacagcttggctgtgggagctatgagccacttcagaacatctcacgcttttctctcttttcacccatctgacttttattataataacctttcattgtgggcagtggtgtaaatttgagtcttggttctgctgcttctctgtcatgtggtatgactgtaggcaaattaccctgtcctctctctgctcatcatgttgtcttcctttataaaatgggggtaatagtttccccgtcactgggctgctgtgaggcttggatatgttgggtattagacatggagtatttgacagatgtccactgtcattagtactaaaggaaattaaggtcaagaataagacaccggcacagttgctcatgcctataaacccagcacttggagaggctgaggtaggaggatcgcttgagtttgagaccagcctgggcaacatagtgagatgctatctctacaaaaaccaaaatcagttagtgacagtggtgtgcttctgtagactcaggtactcgggaggctgaggtgggaggatcacccaggagttggaggctgcagtgagctatataggatcctgccactgcactccagcctgggtgacaaagccttcttttttttttcttcttctttttttttttttttttttttgcttcaaaaaaaaaaaaagactgacttaaacagagcagtctaagacctttgataatactgtatctctgtagcctgcgtgcttttagaaagcattgttaaaatacttttagaaagacttccacaaaactggtaagcctaaagaaaagcaagctcctctcaccagactaattcacctggtagaccagttctgtatctaagggactgaatggagaaactgttaccgtaatcctctgagattagtgtgtgtagggagaggctgtgagcaaggatgtctgccccatcctgtgaggaactgtaggagaaatgagaggttgtgttgctgcacacactcatatttcccctgtgtcctgggcacccctgcgttcactgc

SEQ ID NO: 21418 - DNA, 1031 bp, Homo sapiens
tacaggctaaattgaaaaggaaatatacatgatggtttgcttagtaatattaaaatgaataaaaattaaagttgggtatgttaatttgtgtaagagtaaattttaaaatcttctcactgttgatcatataatgttatgtttatatttacctaaaattttcatgagtactgaaatttttagtacaataatttctaaattcagactaaggctatttgactaaagttgattaagtttgattaagtttccagtgttccatataagaattttccctgagaaaacatccttttaaagccacttatttgttgatgtagttattaaatgtaattttaaactggtttctatgctgaactgtggtagttataagttgtgttatgaacagcaaatactagaccgatcactcaggataagacataacatgggctgaccttcccagtgtggactgaagcgtgagagatgggaggttatagacactggtgcagatactgcttttccttggaattaagtgatgtcaggtttcgtggggttttctttttttctgataatgataacaaaatacacaaataggattattttgtatgacaaattgcatctttgttgtttttgcttcacatttatttgttttatttacaggtgttgacttcaaaatcaaaactgtagagctaagaggaaagaaaattagattacagatctggtaagtgggagagtgtgcacccagtaatgtgctgtgtgtgtttaacagtccatgtacttgtctaataaaatgaactgtttgagctgatttgcctctcctactttctcctcttttgctcattttaaaattaaatggacagtgtttccatcaagagagagaatttagataaggctgttatgttatatgccacttgcacatggggagcagttgtggacagaagaatgttactttaatggtagctagtttggaacctttttgcctctattttcaaattatttacgtgatatcaaaactgtctccactaaaatgattgctcaaatgtttgtcttcatgtctttat

SEQ ID NO: 21419 - DNA, 1050 bp, Homo sapiens
gggtgggcatactccttccggctgtactgctgattccacgggatgtgagcccccactaatgcctactagaaatgaatccaggcccctttctcaaatcacaattggaatgagagactcaaccagctgtgttataactgcactcagcactaagagctttctgttagctattaacctgttaacagcccgcaggtgctagcgacctgtctgtggaagaagggataagatctggtctggtggtctggcggtggcttaaaagtagccccattgaggtgctctgagaatgccgttttgttttgaatgctacagctgcggtgtactcagcttactaactcctcttggcaggtcaccctcagctctgattgtttgtccaccatgtgtgtgtttgctttcatctgcgttaattgctgcttcatctgtggcatcatcggtcacctaatgcttgaatgttagtgccatgtcttcattcttcatccgtgtccctgtctgggccgcagctgcagccaagccgcagtgcctgccttctggaggtgtctgaggtaatatcttcatttggtcacccttcactgtataacacacttctaagattttttgatttgggtttttgttcgttttcttttctgttgtgcatttggtctgcatattttcatttttggcttgattatgaaacattaggtcttgtctaaatacttgaataaacaacaaatagatatttcttcctgtgctagtcccgcagactttttgtgcattgctgcccagcttttaaacgctggaaatggcaacaaagtgtttggcacacaagctgctgtttctaattataagctctataaggtaaagaccatcttcacaaggatttgggatatgcctctctctgttcctagtacctgtgtgaggtactttctgatgagaatattgccccacaaaagtgatgtaaacattattagaatgtgtgacgcctgccttggtgacagccatgcctgatgactgtggcacatgtcttaattaatgcattaatacttccatcttcatctttggcggcagtattctttataa

SEQ ID NO: 21420 - DNA, 1031 bp, Homo sapiens
aaaagagggaaatattaggattctgccttttcatagaaaggtgaaagcatgatcagtgcattgatgtaatctaattttctgaaaaggagagatttgtgtgggatttttatggtgctggcacacggtagatatttaagaaatacttgctgaatggaatcaacatttcatttattattctttggccgtacctgatagtagataatttagtatgtaagggaaataaatcaagcaaaggcacttttgagaggaatagaaaataaaagctttctcaacccaaatattttgggagtgtggaatcgtctctcaaagaaacatgcttttctacccccagccttcagagccaggcccaaacagtggcatttaaggaatgggcttaaatggggagtgctgaactagttcatgtttcctcattgggatttttgtcaactaaatcagtttgctcatttgcgttaggacgattgcctcaggttttgaattttgaggtttctatcctctttctttacattggacttaaagtcagtagaggcagctgacttcttaatggtgagcttcttaatgtttctaagattcctgagtatgctattcatgcaaaaacattttaagctacatcaaaattgccttttactatccctgttctttgattgtttttattaaaactcctattatctgtaatttctctggttttgtgcctccagtttctggattcttaagtcattgaatgtgaatggaagtgcatgtgagttgacttatactgaaaaccagattaaaattacctagaataaaagtttattaaagtatgtaattcctaaaatgcttattgaagaccttaaatctgattgttatttaaatttgtggttcagcgatattgtgttaaccactgatttcagagtagaaaaaatgcttattatttttaactttttaaagaaatggggaatgttttgtaacagtactcaaatagcacagaatatttttcaacattaaaaacatttgattgaatcctaatttagacaagccataacttgggaggatgg

SEQ ID NO: 21421 - DNA, 1047 bp, Homo sapiens
attgtaacagcatggccaaggggtgtttctagggacccagtcccacaggtgcctaagggaagtgttctcctcccctttcaggaactccctgctgtgtggtgagaggctctggtggccttgcatggaagagcctgttgccccccagcttactccactgtggcgcacttggttggggttctttgggtaaagctaaatcatagatggtctttaaagaaatcgctttgcaagtgttagtccttcctgattggaagccttctccattgagccttattggaattagaaatttgcagtggttctcagtttctaggcttatcataatataagatataaaccaaaaagtatctgagacaggtctcaatcaatttagagagtttattttgccagggctaaggacacacctatgacacagcatcaggtggtcctgacaacctgtgcccaaagtggtcaagagtacactttgcttttgtacattttaaggagacataatacatcaatcaatacatgtaagatttacactggtttgatctggacaggtgagacagctcaaaggggctggggcttccaggtcataggtagatttaaacatattctgattagcagttggttgaaagagttattatctatagaaagcaatgtctgggttactataaggggttgtggagacctaggttttatcatgtagatgagcctctaagtagctggcttcagagagaagagactaaacgtttcttaccagacttaaagtgtgtgttcatgttcatgctggagggtagagtgaggaatgtctgacccccactgctcatcatggccagcaccagcctttcaggttaaattttagagtgccctggccgaaggggaggtccattcagatggttgtgggaggacttcaaattttatatttggtttaaaaaggagaaacagggctcagctggcatctgtactgattgatgtgcttacattcttcatgtggatgtggccagtgtcagcctggagaaaaaagaacgcttttagatttcaaaggagcagttgggtaataatgaactttac

SEQ ID NO: 21422 - DNA, 1050 bp, Homo sapiens
catgtcactgattgcattccagcctgggtgacagagctagactctgtctccaaaaaaaaaaaaaaaaaaaagtaattgggacttattgatgtttttgtttgagtgtaacttgttcagaaaagctactgtggctgacagtagtggctgtgcacggatgtcagtgcagacttgaggagcttccagtggccggacccagacagaggcattctcaagagctggctctgcttgtctccacagactcagtgctgctggcctgactgtgcctgctagggttgtaactgtggatcttcttttcttcctgaagtggtcatcgtaagctgccacatgtgccccacgcctgcccccagcactctaggtggtggttagtgagctctgagaaatgaattctttgtggcttggagggcattcattttcacaatcctaggatgcccaccatttattgtgtgtgtgagcggggagtgggtcatgcatgtgtatcaagtgtgtgtttcttgtgtggcattgttgctcttgggtatgacaaatggttttgtaaatcacctacaatgtgaattcttagggattgattgtttggaaactctgtattttaaaaacttttcccccattttattttaggaaaacatcatatattttgatgttatattagcattcctgttgctgattttctgtcttgagggaaaaagttattcaggagagtatgttgatcttggttcataatccatctccattaatctaatttagttgttaaatataaaggtattttctatgtcatagttttagtcaacctaaatttttcctactttctttaagtgtggtcatcaggtcaaagggaaataggggttactctcgttcttttttcgcagaaaaactgcagcatataatctatgtttgcattggaatgtgatggtgctcactttgggcattatttgggaactgactttggctgctttttcttagggacacagcaggtcaggagagattcaacagcattacctcagcttattacagaagtgccaaggggatcatattagtatatgatatcactaagaa

SEQ ID NO: 21423 - DNA, 1028 bp, Homo sapiens
ttgtaaagttaaaacggatttttttttgtttgtttatacgttagatgcctctggatattttaaggaatgagttgtccaatagtatcctgtcgttacaaccagagcctgagataccgccagaactgcctccaccaagaccacatgtccgatgctgttgatttcctactttggagacaaagtggaaatgattcctggaaaggggaaaaaacgttctattctgcactacaatcattttgacaatttcctttcgcactttgtaatccaagtcagagctatacactaacttgtaaatatgcatatatgcaatcctgggtaagttttggttataagttacctatttccctccaaattattatatttcattcattaccccagtgtctagtgtacatacactgggaaacctagtacttctaatatgaagaatgggagaaatgaaaggtataatgtttcttgaaataaataatataattgtccttattaattatattatgaggacagaagatattctgataagagagaacgtggtgctttgcttaccgttttaaagaaaatttgtaaaactaaagactttttgaaaaaaagctatcttaagtgctttttctttatttacaagacatttcccccagtggtagcatctgaagtattggagtgtttctgccacgaagcaaagctccattcatggccgtcatggaaggttatttattaatgttacataatggtagaatattactagttagagggttggatttgacttggtcctaaggccacagaatctctctcatggcttcctaagggatgtacctttatgcttttaagaactacaaagattcaataaagaaagaaatgtttttgaaactatagaaaaagattttaaaacacgctgctgtcctaaacaaatcctgtttaaaggaattttaaagagatgcattttactatatcaaagaacatacgtgtatttgcctaaacactctgtacctttgtaatgataaaacttcccccttctttacggtgaagcttattctgattaa

SEQ ID NO: 21424 - DNA, 1079 bp, Homo sapiens
gtatatcttttattaaactgcactgttttgtttagtcaaggtaattaagtaattatgtatttgaataacttggtgtgtcttgagtgttgtggtatgaaaagcattgtggtctttctacactaatgaagtgcaaataaaattttgtatttatgaatgaagttgagttgccatatttatttatccaattataaattgtatatatgacagtattctccatgagctccacagcttaatccttttgagtgtttagacaggaaaagcatagtcctccactggggaaaagagtttgatgttttctcaaagggctgaacatagagctaccatatgatccagcaatttgacttctaggtttatatctaaaagatcgaaagcagagactcaaacaggtacttgtacaccagtgcccacggcagcattgttcacgagagccgaaaggtggaaaccgccccaatgtccatcagcaaaataatggataaacaaaatgtgtgttctacaaacaatgggatattcatccttaaaaagaaaggaaatgctgtcacatgtgcagcgcggatgaatcttgaagacattacgctgagtgaaataagcaggcccagaaggactgatactgcctgattccacttacatgaggtatatggagcacccagattcatagagatgacgtagaatggtggttcccaggagggcgggagaggggatgaagcattgtttctgggtgcagagtttcagctggggaagatggacggtggcgatggcagcacagcagtgtgcagggacttctttagtgccactgagctgtagcaaactggattgtcgtgtcctccagaaaagatttttagttcgtgtatatgcctttatcagccacagtcgattacgactgctggtgatttacctaccctcacctcccaccctgcccttctgtgttctgctctgtgatgctggggttgggactcccaactatatttgccaaaccctcttgctcttcctgttaaaatctgctgatggagagctagaagttggcaggagggaagaaggggcttgcttgccatttttccgttcccatcagcctccctggagca

SEQ ID NO: 21425 - DNA, 1024 bp, Homo sapiens
tacctaggataaacacatcttcaggagatttctttttgttcatttttttttttttttttttttgtctgaggctcggatgttgggcaccttgttctttattgttagtcaattcctgtttttaagaataaatacaggattagcatgagtggtaaaaatccaggaacaaagggaatagcaggacgagaatggacaattagggtgtctgagtataggagagatttttttttcttgaaccttaatattaattgaataaagtaaatgggaataactgagtgcatgctattctggaggcatctgaaactatcaattatgaaactagtcaagaaaatccctagaatgtttccttaatcttcctccttccaaattgttcctcctttaaatcttgtgtaacccttcagtagagtgaatatctcatacctgcagctacatctgtgggtttgggaagaagctttcatcactgggctgcaagactggaacaaagcgagcgtgcagttgtgtctgatgttagtcgcctttctgacttggtgtttgtaagtgttcactggcgcacctgtgtattcattcagcaatatttattgaggacctaccgtgtgctccatgctgctcgggatgcagagaggagaaagacagacaagcttgctcccctctgaagcttaccttgttagtgtaggtgacagacagtaagtaggaaaaaataccaatactattagatggcactcagaggtgggaagaaaatagagccagcaagagactagagactcgggctgatgagggtggccaggggaggctttgcatgacgtcagattatgtgatggaatgagctctgcagagatctggagcggggagtgttttcagaagtgggaatagcaggcgaggtcttgaggcctgaagaagcaaaggtgcgagcagtctcagaccctgtgctagtcgtgggcagggagggagtgtggccaggaggcctggaaagaaggaagcccctggagggtttgagtagggagtgaggtggtctgatttgcacattaaa

SEQ ID NO: 21426 - DNA, 1054 bp, Homo sapiens
atctgtgagggaggagggttatccaaagtgggctttaaaaacaatttatttattttaaagccatttaaatttagcagtttgggggggttggataccaactttagtgacactaaggttagcacgttctgataatgcaccaccatcagaccagccagagtggccttttagcccagatgttgatttcatttttaaatgaatctcctcctccttttaacaataagtcagttgtgtattgccagggtctttgctatgtggtgtaatatattacttaatgattttgcctctgatgttgtctgatagtacccttagcacacaaaaagcctcatatcctgataatgatctctgtgggtcgatgcaggtagccaaagatgtatctgtcagattgcaccacgaacttaagacggtggaggaaaagcgcgctaaagctgaggatgaaaacgaaactctccgacagcagatgattgaagtggaaatatccaaacaggccctccagaatgagctggagagactgaaagaggtaatccaaaactgtgggggtcctgcccccttggatttaataaggaggagcttggaactccaagtgcccccttctcattgtggtcgaaagctggggttggcaaatcgtggcctgtttgtttggctcataagttagattgtttttacatttttttcctagcgtggtaaacaaacaagcaaacaagcaaaactcacaggaaagaaagcccccaaaagcaaagaagactatggattcaatactgtgtgatgcttgcaaagcctaaaatattttctatctggccctttgcagaaaacgcttattgggccctggtctaaagctagtttttgtaattaccactcagatgagctgaccattaattcctttgatgtgtccaagtggagcctattattgctagaatacagagttaagaagtagcttttttctccagagtcttctccagtgagctggaaagtatgttatggttgtctgttaaagctgtgtaaacagacaatgtatgtaacaccacctgtgtagctaaaatgagttaaatatagacat

SEQ ID NO: 21427 - DNA, 1055 bp, Homo sapiens
gaggtttaattgactcacagttccacatggctggggaggccttaggaaacttacaatcatggcagaaggggaggcaagtccttcttcacatggtggcaggaaggagaagtgagagctgagcaaagggggaagccccttataaaaccatcagatctcctgagaactcactcactatcacaagaatagtatggaggaaaccaccctcatgattctgttacttccatctggtcccacccttgacacgtggggatcattacaattcaaggtgaggtttgggtggggacacagccaaaccacatcaccgtcgtttcctttatgctgactatttcaaagcaagtctcagatacctacacacgtgttatttagtacttctgaatttcttatttttgtatggaaaatgtaaagcatataacaaatggaagcagtccatggtttatacagttttcccttaacaaagctcacctttagggaggaagtgtgacaccaataatatgactacaataatactgtggactttgaaaacacatgcaccactcatggacctgtatgcctttgactttcactttgaggttggcaatagaagttattactgttgcttttctacttatcacaattaaaactgtatcaccttattaaaactatttagaaaatttgaatgagttactttaactacttgggaaaattgagtaatttactttaaactgcttttggtggagctgcagatggagaagtcccgtgtggaggagctagagaagatagtctaattgtgattcattgatagtttcctgttccttagtacaggacattgttctagctggctagtaaggctgaacaatttttaaatgacatatccacatgcaaatatataacatacgtaaatgaattgataaatgtaatcacatgttacatattggcattttatgttttccttttctttacttttccttttacttgcatgattctgtctttcccagcacagtataggtccagtcctaagcacagaaggtcttagtactacagataaatatattagtttactattgatgctgtaacaa

SEQ ID NO: 21428 - DNA, 1044 bp, Homo sapiens
agttttctgcaagactgtgttccttctggaggctctagggaagaatccattttcttgctcattccagcttccagaggccatctacatttcttggctcatgccctctttcttcatcttcaaagccagcaatggcgggctgagagctttccctgccatttgtctggtgctctctcctgactccctctttcatttttaaaaaccctatgatggcattgggtccacctacataatgcaggataatctccctatttcaaggtcagctgattagcaacctctactccctttgccgtgtagcatgatacagtcacatattctgtggatcaaggacgtggatatttgaggggcattattctggctactatagtaggaaagcaaaacttcagagctggtgaggttggagttcatttattctgtcttacatttgcatagttgagaaactgaggcccagggcataccatttattctgcatgactggatacttccaaatcttcatctaatcctaggacggccctttgaagtgggcatttttatatttcatttttatatgtctttaagataagaaaactgaggcttggagtagctagcaaacctgccctaggtcccatagctagcaaatgacagagagctgagtctcacagctgtgactggcagctgcccgggcccactggcaccctttccgccgctagctaggtgcatgcggttagctgccaggtctccggtttcccggctggcattcttctcctgttctcccattctgctcactcacatttgcctccagtgacatgagtaataatacattttccagaacttcctctttgaaagattgaagtatcatcggtgttatcaaaccttttcaatttttgtagcttctgacttccttctttaagggacactgtatattcttcatccccttggaacattaattttattgtgttactcagttcaaacacatcagatttttgtggaaattctgagataaaaacttctcctggttttcatttctcaccctgcttcctgctgcttcttgtgactacgtcccatatt

SEQ ID NO: 21429 - DNA, 1041 bp, Homo sapiens
taaggaaccgccccactgttttccacatggcagcaccgttttacactgccatcagcaatgcacaaggcttccaatttctccacatccttgccaactctggttattttttgttcggttgtgaggacttgaggtgaaatatctaaagtgctgaggctacttaaacaggggctgtcactcttatgagcattgtcattctttgaagtgtggagagggggaatcccatggatttgaatctagaaaccctggatatgttaaagtgggcattttcttgtcctatgtggagtaaaaataagatagaggataccttggttttccttcttgcacggaagccttctctcgagctgcactgtggtgtttgcaaaccctgctgacaggggcccctgcactgctccccatctcctgcccatgttggtgcaggagagagggggtctccacaatgtgccagagctgggcctgggcagtgatggatgtggattatggatgtgggattattaaacagataattatctcattatatcaaacaacagtcatgaatatatacccgaggaccgcgtgcacctacaataaatgcaaaaagggtggtaggagtgggggcagttctattctcaaagaaaggagacaaaagtggaatgggacagggaagcccatttaagatttagctggagaacctggactgccagttccgtctctccacccacactgagcatcgtcacctggggcctgggtatcgcgacgatgctcacccttccgatgtcctgtgttggcccggctcttccaggtggaaatcagagatggtcagctttttggagagacaggtccagagcccacaccatgcctcttgtggtctggacaccactggtccacacaggtactgactctgtcttttctagtacggctgcaaccaagggcccacccactgaacggcttcagaacctgaagcttattctttcacagcagtggggactgcagtccaagatcagggtgcctgcagggcatgctatctggaaaggccctaggggagagtctgttccatgcctggtg

SEQ ID NO: 21430 - DNA, 1017 bp, Homo sapiens
tgtttttcctgagtggctccagatggatagcctcagcagccctgcacaggctcctgtcctcattgtgtcctccttgtgtgccccatgctggagtcccactggcaggttgtgaggagagctgcctggttgtcacccacacacctaagctctgtgtcctacctccaggtcatgttggtgcccctggtcttccgtccccagaccatacccctcagaactgcttgtggccgcctcacttggggctctgcacccctgtcagctctctccctcacacagtttcctggttctgccctgttgctttctagtctctctgcctgcactgaactgaggtgcccagacctcacaccaagccggacccctgcccccatccctcccctgcagtcagttttgcacaaagctgccaggtaggtcttcttgaagaggcctcacaacactaaatatattcgtatattagtaggtgccaaggcaggaggatcgcttgagcccccaggaattggagaccagcctggacaacatagtgagacaccatctctaccaaaatttaaaaattagccaggcatggtggcatgcacctgtggtcccagctacttgggaggctgagatgggaggatcgtttgagcgcgggagatcaaggctacagtaaatgataattgtgccactgcattctcacctgggtgggtgacaaagcaagaccctgtctccaaatatatgtatgtatgtgtatatatatatatgcacacacacacacatatacacacatatatatattctgaatatatatattcgtgactccccgaaataaattcagtttatatatatgtaaataaattctgaagactctacatgtgtgtgtatatatacatatatatttttgtattaacgttaatagtaatattaacatgagttcagggtattagccagttctgtctttcgggatgaagtcactggattgaggcaagacttcagtgaaggaagccatgtggtttgtaaaatgaaactgacaggggacctttgtatctt

SEQ ID NO: 21431 - DNA, 1021 bp, Homo sapiens
ctcttgtctcagcctccgagtagctgggattacaggcatgcaccaccatgcctggctaattttgtatttttagtagagacggggtttctccatgttggtcaggctggtctcaaactcctgaccttaggtgatccgcctgcctcggcctcccaaaatactgggattacaggcgtaagccaccacgcctggccacacccactcttctaatccctcaggagttatgccagatctaccaccaggagatctttccactcatctagtcatggctcactccttgtttcctaggtggaaataatttcacacattttcttcttctatggatttcaacagtgtccttcacctggggtttccttcattcataggatttggggtaattaaaggcaaaggatacagtctttcaggttgattaatctcacctgtgataagcatagtgcttctgctttaggattctaggtaggctccagaacttgataaatctaacatagcctggtcttgcataagttgtgtgactgcgttcctttgtgctgaagttttcctgagaaaggtttgtacttatcccatatttgggcgctttctcatctcccaagggccccggggacttcagtaattgtaaattcttggttatcaggagtttgcgatcagacaataatgggtggcacaaggaaacaaaactattgttgcaaattctgctgatacccagggaaaccagatgacaagattcaaaacagagatgagaggaccaaatatacctatcttgcagatttctctaaaaaattcctccctttccccctccacttactggagttagtgaaatccagttgaaacacctcctccgaagtttcagtccaaggtagtgacagtagaggggcagaaggacaagaggacagcagggggtgtggagagcatcctggaggaaaacggggatgttgttactgtttgcaattctgcatttgcgatcacactttgaagaaaattgcctgtgagcaaagtcttcgtgtggaaagacttaagtagcagatca

SEQ ID NO: 21432 - DNA, 1048 bp, Homo sapiens
ctccattccttcatgggaacaacaaagacctgtctatgtatttggatttcttacaaatctgtgtttaacaaaaattgaaaaggtgcttgtgtttgctgtacttttgaaagttctaagaagctggggttgtttaaaagtaacatgccaacttctggtacatactaggtacttaataaatatttcctgaaagaatgaatgaacaaggccaggtgtggtggctcatacctgtaatcccagcactttgggaggctgaggtggtggatcatctgaggtcaggagtttgagaccagcctggccaacatagcgaaacctcatctctaccaaaaatacaaaaattagctgggcatggtggcacactcctgtagtcccagctactcgggaggcagaggcagggggcaggagaattgcttgaacctaggaggcagcggttacagtgagccaagattgcgccattgcagtccagccagagtgcagactccagagcaagactccatctcaaaaaaaaaaaaaaaaaaaaaaaaaagaatgaatgaacagataaacgagcatgcttttcctctagtattagtattaaacacaacgtatgccttttacagcccatgtattctgtgtaggttctttcaaaaaatacgtcattaccccagcagcgatgatagcatagcccatttgcctcagtagttgtgagtagggcagacagccttacttcaagttagtcacaggattgctttttatgtctacctaacccaaacccaaccaaatccttcatgtgataagttctcagaactcaaagaccatgtgacatttatatgttattctcctaacgtgcaaagaaggaaaaagactctttaccggctcctttacccaatactaattgtgtttcagacaaataagaaaattaatttcagggagctagagcatggtgatttatcatacacaaaccagtttatatataataaatacactttttaggtttatgatttatcatatacagaccattatttcatttgaccctcacaacgacgttgtggttaagtgagcattcctgctt

SEQ ID NO: 21433 - DNA, 1032 bp, Homo sapiens
tagtacccaataggtaatttttcaacccttgcccctctcctcgcaaccccttttggaatacccagtgtctgttgttcccatctctgtccgagtatacccaatgtttggctcccacatataagtgagaacatgcggtatttggttttctgttcctgcattaacttgcttaggataatggcctccagctgcaaccatgttgctgcagaagccatgatttcattcttttttgtggctgcacaattttatgtaaatacaaacatccatccaaagtatcttaaattcctcccatatatacttaaccatttttgtgtatgtttagtggatcaactagatggatttagaagcatgactgtggagtgaaggccagtgtgtgtgtagaacctgaaggaggggtcccagtgtacttgctgaaccagggaggagaggtttatcaagtttgggggatgaggaattctgagagggtggggctctgtttttccatagtagagcttatctatgtccagtgggacttagagagcttttataactcttgcttcatacatgcaccaaaaaagaatgccctgagaccgccctgagagcttgtgatgtgctttccgtgctggttggaagagatgggctcacgaggcttttattatcaaggtaccataattgattcagcgtgtttcattcatttggccaaacccttctgatataatgcccttgctgaaatgtactaagacagaaatcatggctttgaaatttgacttcaaagggctgggcaggtttcagaacatataaaccattttaagttagatataagcagattagtaataaaaatccactcttcatttaccagacacatttgcatgcttaacatgagccaaggattgtgccaaatactggaaatgtgagggtgggtctggcttgtcctttccaagaggcagaaaagtgggggctgatagttctatctcaagggaccacaataaagccttcctgaacaggttatgcatttcacctttggctttaattattaaacatcaaaatgtttaataa

SEQ ID NO: 21434 - DNA, 1050 bp, Homo sapiens
gtggccgtatgaagttccagccacaaaagcagcagggagcatgaagcatagtctccagggccactgttccttttctgctgaccccagagggaggcagggaaaccgctcgccccattgctcttctggaagcctgtggctcccacgctgtcctcgggccatgctgtctctgccgtgttccatcttctcccgagtgacactgcccattccgtgcagccgtctgtccttcccccgctgctgctcccctgcaccactggctgggctgtcctcatcctggtcttttcagttgcttgtcacatctttttaaatcctccaactcacttcctttctttgagggtccttgttctctgtcatccttcctgtgccttccattcagttcacctcaagcttccagtgtctgagtgtcattccagccagcgggctccatgctgggcaactcagttttctcatgccacagctttttacatttctgtgtatcagcaaattccaaatttgggtgtcctggttttgtaacatgtaaggacaaggagctcaacattctttaaaaacaaagtagcttgagaataaggattctaggtgatttgcacatggttgagtgtgtcttgcatcacctgctcgcagaacattaggatgcctgaaacacaaaaccaccagtacattctgattctacctttttaaaatgctgctgcaattgaacagtcattaaagaaaaccagacccaaattaaaatttctgcctgcagcatttttgccatgttgtgggagtttgtttaagctactcccagtcaatttcaaataaacagtagcagagttcgtttaagacgactgccattgctaacacagctgaatgaaatcagaggtctctttgtgggctcccagtagatccaggccctgtaggaccagttcacttgtccactgtagctaaatagatcatacaaaagggccaaatgaacagatctaccagataggaatatgatgaagtggcctgtggagaccgctgccacagtcactgtgtcatgccttctgtataccccagcccaattctaaaggagct

SEQ ID NO: 21435 - DNA, 1039 bp, Homo sapiens
ccttggaggagcatggtggcgaggagccgcccgaggagcagccacaccgagatgcaagcttgcatggattatcacagtataattcactgtaatttgcataaccacaccatcaccatgaacaaaactctgcccaacaggagagatctagttttctcaaggtcaaagaatgttttttaaaaacacaaagctgctgaatgttcaacctgtgaaactgagatgtttctagaatgaaacagtaaatgtgcctgtaataacttaatttttttcatagctcagaaaactatttttgtctccatcttttttacacacagtatattaaacgaaaaggtaaataaggtataaatagatttaaaaaataaaagttttaaaaaatgtacattttaagagattctgaacaccctcgctgtcaatacctgactgcctctgttaaatttgcactgttacattttggttcagtttatttccatgttgaattagagtggattaagttaattttattttgtcagtgttactgttttttacgaattttttaatgcttcagactgtctgattcagtgaactttttgtagtgaaaaagccatgaagccagtagacaagacagatattctgtatgctggaggggatacaggatgattttgaaaaggtacaaagtcctcagtgggcttagaaaattcactgtatgatccttatattatcctacttggcttgcacgtcttcgggtgcatgtatataccgctactgtgtcctcgccatcacctaaatgtgactcagtctgttccactgtaatatgttgtgaatttccttgtactgtacttttattgttggtcttcttgcatcgatgatccaacagcaacaccatttttaaattattgtgaaaagattaactggcaatgtacagagtttactcaaagttttcttaagggaaaacactacaaaaagtcacaaggataccaaatggaaacacatgatgatgcctctgggtctgtatgagaccgtgatgaagtagaaataaagcccttctgagatggcagcatgtctc

SEQ ID NO: 21436 - DNA, 1118 bp, Homo sapiens
ttacggctggagtttcagaactaatttagtaaaggattgaaaaggaaggaggatacagttgactcatttgtacagagtatatgactcatttgtacagaatgaaaacatgtttatgaaggttcacactaagtgaaagctggcatccaagttgattcagacaaaagtgaaagtcaagaagttaatagtacattaattctccaaatgcatgccagcagagcgtggcaggaaggtacacaagtcagcagatctgggttgtcctggttctcctattgactcgtgtgtgtgatgttaggtgggtgaatcttggctttgaatctccatttgtaaaataactctcctgaaatagagatggatagggtagaataccatatttcttaagatcttttataagttgattccattgttgtaaattatgaatcctaaagtatttctttatgaaaaattttttaaggctatgatttactaaactttcttaaaattttaaattttagggaagacatgtaaggaatttgcataagacagttatgcaaaatggagctggaggagctttatttgtggtaagtaattacttagatttctttggaaagaaaagacttggaaattggggtaaatccattgtaaaaatccaaaatatcttaaataccattgtctttgatatatgatggtcatcgtgagaatttacatacagctaattgaatttactacatttcaaaagatgttggttccagttgaacctcatgagtttaaattagtatcaggaaaactctgggaataagaatttatttccagtgaaattactgtgtgagccctaacctgattctcatcacactttgggttctcagtcatgttggcttactgagagtttggagattgtaacttgttgaatcccaaaatgacactagtttgaaactcatggattttagtaatgtagtaactagattagcagctggtctttatatttttagtttccggagttttaactataaatagaagtctgtgaactccccagattagttgcacaatttggaaaggataagatattatatctcccttttctgacaaggtgctgttttcagggattaatctagtataaaggcaatatagtggacttgtgtgat

SEQ ID NO: 21437 - DNA, 2191 bp, Homo sapiens
ctttcaaaagagtattgtgatatgaaatagaagtagtgtgctggattctgggagaggagtgtgtgattgtgtatgataatatgtgtatacatatatgtagagatataaaattttgagtttacatatttaaaatatgggccaatagtgagctttgattttcaacctttttttctgttgctgtaccatttgtatgtaggctgtttggaaaaaattggtgagagtttaaaaaatctaattgcttcttttattggggtttggccatcaattttttgccatttagacagattataaaatgtgagttgacatgatcaaagtagaaattcttaatagtgaaatacttaaagatttagagaaaaagaatatccttttacagaggtgagaagtagggtagaaggaggaagtgctgttaactccattaactttcgggctctgtatggtttaagtgtaagtacattgtctgcaaaaattgaagagtttatatctcccagttatccaagacaagtatgttttctgctcttgaagaacttttctgtttttaccaaattgagacaatattgaaattatactttgtacaacataattaaagctccattactaacactgtaattatcttatttttaaatgtcctaatattttaggttgcagaagttttacaagtacctccaatgagagtatatgaagtagcaactttttatacaatgtataatcgaaagccagttggaaagtatcacattcaggtctgcactactacaccctgcatgcttcgaaactctgacagcatactggaggccattcagaaaaagcttggtagggaatacatgatatttgtaacactgataaaaagtagaattgtctctctagatttggtacatttctatctaaaatttccaacttctgccatcttattggatctgtacttacctagtaatattttgtgttactgtgtttccacatctttatttcttcctatttggtattcttcctcagttcttagtgttaaagctgagtttttaattttttcttttttaatcagtatgtttgaaatgcttgtagaagttataaaatattcgttgtttagaagattgtttcacttagaaaattgtttcacttactattctatgacagcatgtggtatattaaaaagtgacccattattgtctttatattcttctaaagaagtcatggaacaaataagatacaagcatagtaagaatgctttgggaagggaaatttgaaacagatgttattacagtagcatttgaaaagtaaattagcattttaaaagtaaatgggcattttcccctacaaaactgccattgctacacttctaactatatatgtcaaatgaagtaatattttgttattgaatataatatgtgcatgttgtaaaaatagctgggtggtattgaaatatataaaacagctgaagttggctcaaacccccccacccccaacaccatcaaggtataaatcctgataacaattggatatattagttgtagattttatatcattttaattattaaatatataaatgtactacatgtatgcttgctttttagactttattttggctgtatttctacagcacaatatatatgtctgcctcattttttttttctgtttttttgagttgaggtctcactttgtcaccaggctggaatgcagtggctggatcatggctcactgcagcctccaattcctgggctcaagtgatcttctgcctcacccttccaagtagctgtagctatgggtgcatgctgccaagcccagctaattgatttttgtttgtttttgtagagaggggtcttgctatgttgcccaggctggtggttgtgaaatcctggcctcaagcaatcctcctaccttggcctcccaagtgctgggatcacaggtgtgagccaccatgcttggcctgcctcatttttcttttacaaacagttactttgatgtacacacacatctttgcgtacttgtcctgttgtatgctgagatagtttacaagaagtagaattgtagggtcagactttaccgtatttttcccaaatgccttccctaaatgtatgagactacccattttcttcacatcccttgataatctttgacgttaggagttttctgagtctttgccaaatctgataatgtgactgtgattttagtagtttaattattacaatcaaaatgaaaataa

SEQ ID NO: 21438 - DNA, 1028 bp, Homo sapiens
agccactccacctggcctaggatttttttctttttaaaaaacttttttttttttttttttggagatggagtcttgctctgttgcccaggctggagtgcagtggcgcaatctcggctcactgcaagctccgcctcctgggttcacgccactctcctgcctcagcctcccgagtaggtggcactacaggtgcccgccaccacacctggctaattttttgtatttttagtagagacggggtttcaccatgttagccaggatggtctagatctcctgacctcgtgatctgcccaccccagcctcccaaagtgctgggattacaggcgtgagccaccgcgcctggcctctttttaaaaaacttaatagtcttaaacttttaatatacctctataaaaattcttttttttttttttaaaccaaatgactattaaaatataacctggtccttagagtgtttatttgtatttttaggaataaaggttggggagactacacctgacaaacttttcactcttatagaagtggaatgtttaggggcctgtgtgaacgcaccaatggttcaaataaatgacaattactatgtgagtatttcaggtaatacaagttaaagttgtatgatgtcatatttaaaacattttaaatatttgattttgtgtccttagatgttggtttctgaattactcatttagaagaaatggttaccataaatatccaggttttaaaaaattctttaaacatttttgcatttaacttcagaagacaaattttaaaactttagattatgaaaaatttaataatttggatattaatacagaaaataatcctagtgtagccaactatcaggacttaactgagagtaatattttgccacattttacttcagatactatcatcatcatcatcatttgtagaaataagctacagatacaggtgaaatactccatcccaaatctttttctcttccttttatccccagagataaccattatcataaattgtgtctatatatgtatgcagctatactaatatgt

SEQ ID NO: 21439 - DNA, 1044 bp, Homo sapiens
cattttgatttcttgctattagctgacacgtaaacttttctttaaaccattcttacgttttaggagcattatttcagtccaaaaagaggatggttaatgcaatcatttccatcatagttcataagaggtttctactgctctctgtatatagacttagttatgttaaagtaacgtgtatcagatgggcgtgaagaatttgtctaataattgctgtaggttgcttaagagctattgacactgctttctgacttggaatttgttgctaaaaacatgtatttgtaagatgcctgtgccttgtaaagggtgcagtgttgagatttatccttgggacaggaagggacctctgattttctttattcatttcctttatttttacacatgagaaaataaggtgaaaagacttaaagctagtctgcagctagttaaaaactagtctgtggtttggccgagaggtttctttctgtgaagatgctaatttgcctctttctttagaagttttacggagttgtggaaagaacattgaaatataagtgagaaggcctgggtttaaattcttgatttatcacttcctcacttcctaacagtggtttttgacatatcgcattaactttcagaaccttgccttctatcagctgcaactttaaaaatacaaaaataatagccttgtcttcttaacctgcaaaagtaattttcctgcataatttaatgttttcatgtggaacaaatgagaatgctttagaaagcacattgtacactgtaaacttctatacaacgtggtgatgttatttttaaagaaaatacaattcttaaagtgtaacaaggtgtttagatccctggatttttgcgtagccctacctttattgttttcatcttctgctgttttacagataactcctgtagatacattttctgatccccacttagttctaaccttagttaagctgcttatgaacattttaaatattgcagttattagtctgactttccctggagaatatgaagtttctttagcctttgaaaatattctcatgtatactcatgcat

SEQ ID NO: 21440 - DNA, 1022 bp, Homo sapiens
gtggttaaattttgtgattttgtgattttttttaaaatttatttttattttttattattattttttgagacggagtctcgccctgttgcccaggctagagtgcagtggtgtgatttcggctcactgcaaggtccgcctcccaggttcaggccattctcctgcctcagcctcccgagtagctgggactacaggcacctgccaccacacctggctaattttttgtattttcagtagagacagggtttcaccatattagccaggatggtctcgatctcttgacctcgtgatccacctgccttggcctcccaaagtgctgggattacaggtgtaagccatcgcgcccagccaattttgtgattaaaaaaaaaatgatgctaatttcttgatctggaatgcaaccatgagctttttgtgggaaaatgttatggaataactgccagaaaacattgtggtgaaaattaactattactttaggaaaatatgataaagagagcatgttccctttttatagactgaattctcacttgaatggcttaaatagctaaggcagggagggaagtccagttaatatctcagaagcacaactatttgtttcgaggctttttccagtatttttttcaaaaccactttaaaaatgtgagggaattaagctgcttgttcggtttaagtaggaattacttagtgtttatgtctaatggtttattttttgcatgtgaggaaaacagcagaaaacatctaataatttatcattttgcattcatagaaaaaatactagaatttggagtgaaatcattctaaacctcttatttaagaagcagaattttggaacgagaggatcttaaatgtcatctaatttaattttactttcaagaagaaacagaaatactgagaactgatgaaggtcaaccaaaaagtctttggtagatctcagaatagaatcttggacctcacgctcccagatcacactacataaaaagtgatggtcactttcctaactgaatgacccttaaggaccattcaaa

SEQ ID NO: 21441 - DNA, 1043 bp, Homo sapiens
ctaatcagtcccagtgtgagaacctggacatttcatttgaaggtgctgaattcacttgctgttgtcattcttctctatgagagccatcttgtttctaatcggctatcttggcccctcctgcccccttcttgtcttacaggtggaaactgaggaataatcccagtgctttgtgaaactgctatgaagaatattcaagtcagacttaagttggaagatagtgactagagcaaacagaccaaagcatttatttatttatttatttatttatttaatttgttcattcctgagacagagtcttgctttgttgcccgggctggagtgcagtggtgtgatctcgactcactgcaacctccaccacccagattcaagcaactctcctgcctaagcctccagagtagctgggaatacaggcgtgcgtcaccactcctgcctaattttttgtatgaccaaagcatttaaagcattgattctgagggcctggaactcactaaatgctgccagactctaaagtgatctcaaaatagactttctgtagttggaatacttctgtagatattcacttgtattatacatgtgcagtctccatgtttgtagcattcagatatgcaaattctattatttctgttccccatagtcctctaggccacattggcaactagaggtgtttttttctctcagccctatcttctaaatagtctgagttgtctttctctgttattggattttctccctgattctccctccttttgtcagtgttcagtagtttttcgtccacagaaatggtcccaaggcttctttccttcttgatcacttgatcagtttttcaaaggctcctcttttttttttttttttttttttttttttgagacagtctctgtcatgcaggctggagtgcagtggcactatctcggctcactgcaaattctgccttgctggttcaagcagttctcaagccttagcctcttgagtagctgggattataggcaggtgccaccatgcccagctaattttttgtattttagtagagatggggtttcaccatg

SEQ ID NO: 21442 - DNA, 1031 bp, Homo sapiens
atgtttattgggccagtcactagtatttttcgaacccatttccttcactccctcctccatctcacaccaacacaatagtaagctgcttcctcaattccctgcctacaatcttgtccccatggtgtctgttcacacagagcagcaagctgtcagacctttcatggttctctgttacttaaccctaacatgttctacataatacctcttccacagcatgttatttaaatgcctcctgtgcaaatgggggaggctttcatggtcaaataagtttgggaagcactgttaatctaaaaataggttcactgcagaacttaccagaacctttgatgtattgggagttttctaagtgggtacatttatacaagtatacagtgttttccaaacttgttcttggaagcatttttgtagatctttacagaattgtaagattgtaaagaattgtaagagaaattgtgggcccaatcttctgtggaacatactttaagaaaagcacatttacagagtagactgcagcctgtattattttgcccctgctgatctcttctgcggtcttaagttcttagaacatcaaatttgacaaaatggtgtgaaatgatgacgacgagagtaatggcaaaaccgcaattacttttgcaccaacctagagttgtctgcagataccattctgtttgtttttgcatgccatcctcttttgggaattacctccctccctccttttcctttcttcccacatgattcgtttcactaactctaactctggctcttcctttaagatgcaggtcaggtatttgccctcttgaggaagctttctctggcacctcagtgtcagacagtagatatccgtcctctacattccttgaaataactagaggcctatatggttttccaaaactaaaacagcaccaaactacctacaactcatgctaagtttaaagcagttcacaggacgcagaaattaaacaaatgaattactgcaattagaggcctgagaaatggtcagttccagtaagttgtttgtcctgtagaatttt

SEQ ID NO: 21443 - DNA, 1066 bp, Homo sapiens
ataaagacacatgcacacgtatgtttattgcggcactattcacagtagcaaagacttagaaccaacccaaatgtccaacaatgatagactggattaagaaaatgtggcacatatacaccgtgcaatactatgcagccataaaaaaaatgatgagtttatgtcctctgtcgggacatggatgaagctggaaaccatcattctcagcaaactatcgcaaggacaaaaaaccaaacagtgcatgttctcactcataggtgggaattgaacaatgagaacacatggacacaggaaggggaatgtcacacaccagggcctgttgtggggtggagggaggcggggagggatagcattaggagagatacctaatattaaatgatgagttcatgggtgcagcacaccagcatggcacatgtatacatatgtaacaaacctgcacgttgtgcacatgtaccctaaaacttaaaagtataatataaaaaataaattcttacttgaattgtgcaatttgtagaactttaataaaaaaatgatacatcttactcgtatttgaccaataaacaatttagaattgtataatacttgagggcaactttaaatgtctgactgatacgagaacaaacaactttaccgtgtggtggctcagtaactactagctgcaaaattgcttgatattggccagctatgtcatacaagtatctccggccagctgtgtcatagaagtatctctacgcagaactgcagttaggtgtcatatagcagcagatctcacaactgcagggattttcttttgtttttttgagacagtctcactctgtcacccaggctggcagtggtgtgatcatcatggctcactgcagcctcaaccttccaggctcaaaccatccttttgcctcagcctcccaaatagcttggactacaagcatgcaccactacacccagctaattttttaaaaaaatttttgccaggtgtggtggctcatgcctgtaatcccagcactttggaaggctgaggcaggtgaggagatcgagaccatcctggctaacatggtgaaaccccgtctctact

SEQ ID NO: 21444 - DNA, 1026 bp, Homo sapiens
ggggcccggagaatgggcctgacaggagggtctgtcggaacctgagggactggggatcccggtgcggagaagcgcgaagggaaatcgcgttgagcagctggggtgggtgcgcctgggggcgtggcctgcgggccggcgggcgggcgggagcctgcggtggaggcgtggcacgagggaggggcgaaaccgggtggcgcggagggggcgtggcgttgggaggggcggggggagtgggcggggccgagatgggggcgtgcgcgctgacaggagcgccgggggagtgagagacgcctcctggcgggagctggcggctgtggaccccagcgggggcggaggggaagaggggagcaggggcggggagcaaggagccgggaggagggcggcgggcgggcctgtctctttaaggtgcccgaggctcgcgggcgctgcgctgaggggacggcgggaggcgcggcctggcctcgcactcaaagccgccgcagcgcgccccgggctcggccgacccggcggggatctaggggtgggcgacttcgcgggaccgtggcgcatggtgagtgggagcggctggggggttgtgcagcctcttggcctcttggttgggaaggggccgggcgccgagctcggccctctagaggcccggggccgcggcgagcttcgcgggggccgggagaagcctgggcccggctgcgcggaggacaaagtgggggtgctgggcgcgggcgcacaggccggacgccgggagccagcagcatctctgcgccgctttggtccagaccatctctgggccggcccgcgtcctccgcagcccgcgtcggccgagccggggtgggggtggttccgggtgcccggtcccccacaccgctaccggcctctgcctcgcggggcgtccggcgccttcggggccctggcaccgctctacagaggctcggctctgccctggtcgctgtcagtgccatctcccttaacgagaaacttgggcgtgatgtatgcgaaacaattttgatgcatgatggtttctaactcctt

SEQ ID NO: 21445 - DNA, 1044 bp, Homo sapiens
tcttgagtgctggtgtgcacctgtagtcctagctaactgggaggccacagtaggaggatggctgagcccatgagttcaaggctacagtaggttataatcacacaactgcactccagcctggataaccaagcgagaccctgtccctataaaataacataaagctgctataaccatccatgtgcaggttttgtgtgggcataagttttcacttcatttggctaaatactaaggagtgtaattgctgcgttgtagggtaggactatgtttagttttgtaagaaattgccaaactgtctttcaaagtggctgtaccattttgcattcctaccagcaatgaatgagagttgctattgctccacatcctcaccagcatttggtgttttaagtgttttggattttcaccatctaaataggtatatagtggtatcatattgttttaatttgcaattctctaatgacatatgatggagagcgtcttatacttatttgccatttgtatacctttttgggtgaggtgtctgttaagaatctctggcccattttttaattgggttgtttactttttttattgttgaggtctctgtatgtatgttttgtatagcagtcctttatcagaaaagtcttttgcagatattttctcctagtctatggcttgtcatctgattctttggagagtattttttgcagagcagaagtttaaaatttcaataaagtccagcttatcatttatttctttcatgaattgtggctttggtattgccagctaagatttaatagggattgcattgaatctgtagatcaatttggggagtactgtgttgccatcttagcagtattatgtctttgtttcatgaacatgtgtgcctttccttttatttggattttctttcatttctttcaacaatattttgtagttttctgtgtattacatttcttttgttaaatttatttatcagtattttattctttttgatgctattgttagtggaattattctcttaatttcatttttggattgttcattgcttctgtatagcatattagc

SEQ ID NO: 21446 - DNA, 1074 bp, Homo sapiens
aggcaggtggatcacttgagggcaggagttcaagaccagcctggtcaacatggcgaaaccctgtctctaccaaaaaaaaaatacaaaaattagctgggcatagtggtgcatgcctataatcccagctacttgggatgctgagtcatgagaattacttgagcctgagaggcagaggttgcagtgagctgagattgtgcagctgcactgtccaacctgagtgacagaatgagactctgtctcaaaatgaaacaaaacaaaaacaaaactctgtgaggcaaaaactaacagaactgcagtagaaatccactcttatagttgaagacttcaacccccctcaacccaggaggcagagaatcaatagggacatgtttgaactcaaaaacaccattaatcagctgaatataatggatatctattgactatttcattccacaacagcagaatatccaagcatgtaagctttatctcaagcttatgtgaaacattcaccaagatagatcacattctgaaccataaaacacaccttagcaaatttaaaagaatagaaatcctacaatgtctgctctcagactacaatggaattaaataaaaaatcaataacagaaagataattggaaaatcccaaaatatgtgaagattaagcaacacacttctaaacacatggatgaaagaagaaatctcaagaggaatttaaaccttttgtactaaataaaaaatgaaaacatcaaaatttgagggatgccatgaaagcagtgtttaaggggaatttataacattggaatatatatattcaaaaagacaaaagatctaaaaatcagtaatccaaactttagaaaactagaaaaagaagagcaaactcaatccaaagtaagcagaagaaaagaagtaatacaaattagagtagaaatcaatgaaattgaaaataagaaatcaataatcaacgaaatcaaaagctgtttttttcaaacagttcaataaaatggatgatcttctaactaggttaagaaaaagagaggacacaaattactaacagcagaaatgaaaaagagaacatcactatagatcctatggata

SEQ ID NO: 21447 - DNA, 1025 bp, Homo sapiens
acaactttgttctcctcagctcttgccatgatccttaaactaacaaaatgaggaaatagatggtttttttctcctccctgaatttataaaaacaggaatttataaatttggtttaactttttaaacttttaatctgaggaagaagtgaaactccatcttacacctaatagatgcgaaacaaaaatgaaacataatttagctttcaaaagtatagccataccccacggaaatattgctgatttggttccagatcactgcagtaaagcgaaggtcccaataaagtgagtcacgcaaatactttggtttcccagtgcatataaaagttattttacactatagtgtagtttattaagtgtgcaattttattatgtcttaaaaaatacgtaccttaaatacaaaatactttattgttaaaaaatgcaaaaaatcatctaagccttcaggcagttgtaatctttttgctggtggaggctcttgcctagatcttgatggctgctaattgatcaggctggtggttgctgaaggctggagtatctgtgacagtttctttcttcttcttctttttttttgagatggagtctcgctctgtcgcccaggctagagtgcagtggcgcgatctcggttcactgcaacctccgcccctccaggttcacgccattctcctgcctcagcctcccgagtagctgggactacagatgcccaccatcatgcccggctaattttttgtatttttagtagagacggggtttcaccacgttagccaggatggtctcgatctcctgatctcatgatccgcccccctcggcctcccaaagtgctgggattacaggcgtgagccactgcgcccagccttctttcttctttttttaaatagagatggagtctcactatgttgcctagactggtctcaatttcctggcctcaagcaaccctccagccttagtcccccaaagtgctgagattacaggcatgagccatcacactggctggcagtttcttaaaatatggtaacactgaagtttgct

SEQ ID NO: 21448 - DNA, 1050 bp, Homo sapiens
tcccaccttggcctcccaaagtgctgggattataggcgtgagccactgcgctcagcttattattattttaatgctcaaattgtctattagccagtaggagccccttcagttgtcctcctgtgtctcttcagcatgtcccatcattcatggtgcacttccttactttctggcacaaatgtgttcctggctcactttgtactttcctgacccagccttcaaatcagtctttcctccaaggagctctggttcctattatgtatttaaaaaacaagatctgagcgttcagtatgcttgaagctactggggtagaagaatatcatcatttaggctcacccagcaaaaaaaaaaaaaaaaaaaaaaggtaggaaaatatccatgtgtaatcctagaagttacataattttaatgtgttatagctctgattgcaaggcagtaactaacaaaatcttatgatattacccccaacccaggtatgtgtaatcctcgaaattatagtgacacacctccaacttcaaagagcacagtggaggagctgcatgaaccgatcccttctctcttccgggcactcacagaaggagatactcagttgaattggaacatcgtttctttccctgttgcagaagaactttcacatcatgagaatctggtttcatttttagaaactgtgaaccagccacaccaccagaatgtgtctgtccccagcaataatgttcacgcgccttattccagtgacaaaggtaactgccaacagttgactttttccattccgccccctcatgtggtctgtccatgtaatctataaaacctatataagaccatcttttggagcagccttttggttttgaatttgtatcatctcacataaattctagactcaataaccctgatcccatcatatctagaggcacatgccagaaggataagagaaaaaaaatatctccaatccttgagtagataaaaaggcatgtcggctgggcgtggtggctcatgcctgtaatcccagcactttgggaggccgaggcaggtggatcacgaggtcaagagttcgag

SEQ ID NO: 21449 - DNA, 1033 bp, Homo sapiens
tattattgatattgcagcctggtgtcagtcacatgtttcagtgtaatctagaaagtttttttttttttttttttttgagacaggatcttgctctgtcacccaggctggagtgcagtggcacgataatggctcactgtagcctcgacctcctgggctcaagggatcctcctacctcagcctcctgagtagctgggactacaggtgtgcgccaccatgctcggctcattttttattgtttgtagaaatagggtcttgttatgctgcccagactggtctcaaacttctgggctcaagcagtcctcccaccccccaaagtgctaggattataggcataagccaccatgcctggcctagaaagttttgttttaattaaaaatgattttactaaaaaatttgtcatttcctgcttggttatacctgtaaacagggctttctatggatgaaaaacaggctggatggtgacacacctttggggactgctggggaatttaaggcatttagaattagtcagctctttggaaatgtagtgatgagggtcacctggaaggccttgaagatcaggagagattctatttatgtaataataataagagtggcctgcaatacctgatgagtttagggtatgccagtcagacttttgagttccctcttgtttagtgtgtgttgcttggttctgggactgtgagtgtaccagccacagcaatggtaaaatcccagatctctggatcaccttaaaatccacattgcagatcaactgcagcatctaaacagcacatccaaggaacattagttagcccttgcctgaattggggaacatgatagtaggtctctgttgtggttgtgttaaagagacaaagacaacctgaatacttctgtttctttgaggttagagatttgtattaatgtggaggatagctttgtcacacggggcacattcatgggacttttacacgtgcgctccaggatatgtaatgtagcagaagccctctgcgtatttttcttccttctttttcctagctcactaggttatcta

SEQ ID NO: 21450 - DNA, 1050 bp, Homo sapiens
taaaaccaaaagcgaacccagccaagggggtgaaagccgagggcgcggccggggtggaaggtgaggcagtgacctgtgcggagcgcgccctgcaaacttccctgctgcgggtgaaagaagctgcctgggaaagtcctccccaccatcactcccctaaagtggggttttctccgcccgaagaagccttaaagcagccagaaacaaaaaagcagtcaatccgtgcggcccggggactgcagacaggggacccggcgaggacgcagggagccgctggcgaaccgcccctgggaattcagataaacgtagggtcgcttcctttcgggggcccactccgcattccagaattccttcttctaaaagaagagccggttctaagggcgttttcagcagccattagcatctggtgtacccgcccgtgtcattggcaaagctggtctcatgaaaaccatttcctaaaaaagggcagcgaaagggtcgcattcttgtgcgaactgatctgtcaagatgggggtacaagaactgtagaaagaggaaatgatttcggtgaggactgaattgtgccagcgtctctaggcttcctctaggctcttgtggaacctccggcaggctcccatcatcggctcccatcaccggcctcttccaaaaccatcccttacgctaactcgattgtccggttggcttagaattccagaggatctgggaaggccctgccctccctgctagcccctggcacagatccgcacagatccccacctcccccgacttgctcagccacagccaggatctagtctggtctttctctgttgacctttttgtgtggcaggagtgggttttcctgttccccaggccctctaatatttccagacataaattccaggaatcccatgcttccctcttgaggggccatttcagcctcaggaaaggccttcagagacttagaaggaatgtcgtgttccaaggaatgaagaggcagccttgatgtgccgtgtttgtcaggactggccttgggaaaggtgaaataggacatatttttgcctttttttctgcaac

SEQ ID NO: 21451 - DNA, 1048 bp, Homo sapiens
taaactctttgttatttgtattgcatatgtttttcctcagtttgttgtttcatgtttcactgtttactgtcttttaaaaaatcataccgatatttagaaatcttcatttagttaactatatcaatcttttgtgattttgatgttttatgtcttgcttagaaaatccttctctactctaatattataaaagtatttagcgcgatggctcatgtctgtaatcccagcactttggaaggctgaggcgggcggatcacgaggggaggagatcgagaccatcctgtctaacatggtgaaaccccatctgtactaaaaatataaaaaattagccgggcgtggtggtgggcacctgtagtcccagctactcaggagactgaggcaggagaatggcgtaaaccagggagggggagcttgcagtgagccaagatcacgccagtgcactccagcctgggggacagagtgagactccgtctcaaaaaaaaaaaaaagtgtttagctatattttgtcctagtactttcatattttcttttttacattttaaattatttgagcacgtggattttgggataaagaaccagctagggatttagtctcccctcccccacccccctctaaatgcctagctggttgctttaataccatgtattgattaattcataatcattatctactggtctgacatgttatctttgtcataaatgagatttccatgtgtatgtgtgtctgtttttggactctatgttctattaaaattttaattaatttctgaatttgagaaaaatcagagccagtagtgtccgaattatgaatttacccctggttgtttttttactcttctcttgatgtacttctcacacactgcattctgttgcataaaaagaataacatggtgttgaatgacagatctaaagatggacatttgtctatgtggtaaatacgtggtagattctgggtgatttttcatatgcttcatataaaaaatgatcgtacataaaataacttttttggaaggaacataatctgagccattcagatacaacgaaatccagc

SEQ ID NO: 21452 - DNA, 1044 bp, Homo sapiens
tggccaagtcccctagagaacctgttttctgcccagtccctgttggattccaaattctgatatgttttccatgagaaacaacccatttaaatctgtggcgagaacctgacactgctcgtttgaacctgacaccaggaatttagccccaggtgaatagcagttaaggacatgtgttattaagtaggtgaggccccttgggagcagaaattctttgctggtacacggttgtcaagtgctttagctgtaagtgcttagatcattgcaatgtgttattgtctcagatatttgctgtgaagggagtagctattctttgtttttttcaaagaagtttattttcgtttttttccttctcacaggtaaaaatccaagtgtctgtaagaactagcattttaaacagagattttgctgctttaattattgttaaaatggttgcctcatctgtgtgttacatagacatcttgggtatttagagaaaatatgagctagggggagcataacaaactctgattattcatttcagtgggtgcttgccggaacggggcctgctgtgagaacgcgtcagagcacacacagccctgcagccctcctctgcttgattttgatgagatgttgtgaatgatttcccttgcttttggctgcaataccttaaacatgtgggatggttttgacagaaaataattccaccacacagttaacagccgtctcccgctcaccgctgctgtgctgctcgtggccggcttaattggtcttttatgcttgaccttggaagggggctgtggctcggggagagagtaaaaatataatgcaaaaaacatgtaaggagacgttaaatgttacattccaggagtctggcagaatataatatacttagttttttctgttacagtattttagaactataatatgcatgctagaacatgtatgaaccaccagagaatttgttttaggaagcgctaatgagtccactcttctttttatttttatttttatttaactgtaaaatggtgcctgagcagtgtatattttattgtgccctagctatag

SEQ ID NO: 21453 - DNA, 1044 bp, Homo sapiens
tgaacccgggaggcagagcttgcagtgagccgagatggcgccactgcactccagcctgggcgatagagtgagactctgtctcaaaaaaaaaaaaaaaaaaaaatctcaattggctttattcatgattctagaactggcaacaaatcattccataaaatagaataagtgttcccatgggctgagcagaggggattggctttatagacagagaagggctgaagaaagcaggaacaaggaacagtagcctgctagtcgtttcaaagatacttttcttgggggacaggcagagggagggacggggaaacagaacgatggaatatcagatgagttaacatgtcatgtaaggattaaagccaagggaactgcattccatggctactgaagatttcagctggcctatttgggaaattggctgttacctcttgtgacttctcagaaggtcagataactacttagtttgggtttggtgaaggggaacttaagcatgggtgactacttttattttcagtctggtctcatggggcctaatgcaggagcttaggcccgaaacaaaggcctcctataatattaatttgacatacagttctgttgttatggacacaactcaggagtagctaaatggaagagatagtgagggcgaggggtgggagtgggacaaggagcttccagcctctcaggggtagcactcccagcacaccagtgtgctcagcagcccggaccctctcaagccttgtgttcaatagttcgtattgaggcttcattacttagatgactaatgaagattgattaaatctccagccccagaggctggcgttggggctgaaagattcaaccctctaaccatgtggttgattcctccagcaaccaggctcatcctgaagaggccacaggatggtctagggccacacgctatcaaactcagtcatggctgaaggggctcttcaagaataccagaagacactcctatcacccaggaaactctgagggtttggggagaactgtgccgggaaccagggcaaagaccgaatctgtatttttttatta

SEQ ID NO: 21454 - DNA, 1042 bp, Homo sapiens
tgagttatatgaccttggactactgtttaccttctaagttgaatcatttgtaaacttggtatattaaaatgtaatgaaagtatctacttcatggacttgtgagggttaaataacatagttcatacaaagttattgatacatgagtgcccaataaacgctagctgttccgttagtagatattctgtgtactatatagtattaatatatgttttgtatatatgattaccttaacatgatgccacagatactcagcagcataacccttgtgtaactgggaaacagtttaatcagtgatacaacttaattagctaaaacctgttagaaacattgaaggtagtcatcacctgcattgctgtggctacattgtttgtgtatttgagcagagcacccagccttcctcattagtctgcactgcatagctaagaatttacaaagaccttgtcaagaactgtgaagggactgaaaatttagcctgctgcagttttgtagatgttggtagaagacatgagatttcctgagttagacagtggacatcattgttcatggcactgcaagtggaatgggctttatatttgtgttgttttccttgccctcctcaagttccatggaggtgacagaggtgttcgggtagatgctactcacatagtgagtttgcatcataactagaaaccctgagcttagagaaccggaatctttcatagtgggctgcacagaaacctacctgacctttgttccagtagaagaccttatcttgattatattggtcagtgaacaaacctgcccctctcctcagaagggaggtgttgtcttctaagacagttcactatttaatacattcttgaaaagatagcctgggtaaaaacccccaggactacttcttgcaagatgtgcagaaatgctagaggcccatggagaattgtctcctaaacacacctctgagtaactagcctaaatgggggtcacagagttcataaattaatgttcatgtgcattgtctgtttattcttaagttacattttagaagtgttttctgttttctgaa

SEQ ID NO: 21455 - DNA, 1078 bp, Homo sapiens
gagtggaggcccatttttcacttgaaggtgcttcttcaaatggtaaaattttaatgataaaactgtgtcagcagcatataggatgatgtggatccttttatttcttggggtaatgattgcattttatggttggattatgttgggtaattcaaaatgtgcaaaatccaatactgatcctgagaagaatgggcgggtacttctatgaaccagctgaagtggtgtttcaattacagcaatacataaatacagcttatgactttgatggctcactggcctcgtcattatgatttttgatggatgtttttgagtgtttataatttacatttcaagttttacacatagaatgagacttaaagattgtaatatatcaccatttcaaatttatgtaattcaaacttgcaaaaattgtgtctatactatttaggctggaagtggccttaattgattaatgtgtatgttaaagagaggctaaaacacaattgtgtttttataaggcagtatttcccagtgtattaggttggaagtgttctgtagacaggtgagcttggaaaaatactgtaaatgtctccaagaggaatcacattgcgtatttgcctattaaaggctctgagaaaacgtaacggtaaagaaatatatttaacccagtattttttttttaatttaaaataacctaattaacttaggaaatatctgatgttctgaaaaaatatactttgggaaatactattcctgcctaaactcactgttgtagtattaactaccctgcagattgtacaagaaatgttacttactgagaaatgtgtttaaactcagtgcaacctggcacagacccaactccatctgggttgttagttgattatgtgactttcaagttaatcagtttaatgttgcatctcatcttttacagaaaatatgaaatcttaaggtaccaaatctgaagtcttatgatagtacaaaatatataagaagtttttgtttctaacaattaaggataaaaccttttatgtctatctaaagataaacaaaacacctcttaatattttattcatgtggtaataagaccctattgataattgta

SEQ ID NO: 21456 - DNA, 1026 bp, Homo sapiens
ctcggctcactgtaagcgccgcctcccgggttcacgccgttctcctgcctcagcctctccgagtagctgggactacaggtgcccgccaccacgcctggctaattttttgtatttttagtagagacagggtttcaccgtggtgtcaatctcctgaccttgtgatccgcccgccttggcctcccaaagtgctgggattacaagcgtgagccaccgcgcctgaccttgaaggtgacatattttctagaaaaaaatactgattttttttaaatgaagactgaggggctgtaaagaacagggatttcaggggtcttataaagggatttcaggggtcttatcataaaatggttgaatatacattattttctgttgagacagaacaaatggggtatcagtaagtataattagggaatccctttcccacctgtttgtataatacagtattttatctattaaaggaatttgaaaagaaaggaagagaactatggacttaatggttatatgagtctttaagtgtttattggcctgggatgtgtgtgagagagtgagtgtattgggggataggctttaagtacaagagaggtttatgaaattgttcagattgagtgttatcaaagataagaagacatacaagtgcttgtttttcagattattgacaattattaattagtaaacattaaaagccacaaagaattagatggtattcattttaaaacaatgtaaggctggcataaattttaataaagtatgtacatttaataggtgcatgtaatgcaagtagattataactaattttgtttgggaaatacaaaaagcgagttcagaaactacttttgctttaacatagctattattagtattgtttcttatgcattaatgcatttttataaagtgttaatgtttagagcctaatgctttctgtgtcagtcattcccaatatcatgcagaagaaatcagagttcggtgagaatctgagaatatgtttcccatgccatctcagggtataactccaccagggaatgctccgac

SEQ ID NO: 21457 - DNA, 1077 bp, Homo sapiens
atcttcaaaatggaacaggatgcccgggggcgctatctgctgttcaacggtcagaggcccagcgacgggtccagcccagacaggccagagaagagagccacgtcctaccagatgcccttggtccagtgtgcctcctcttcgccgagggcagaggacctcgcagaagacagtggaagcagcctgtatggccgggcccctgggaggcacacctggtccctgctgctggctgcacttgcctgccttgtccctctgctgcattggaacatccgcagatagaagttttagaaagttctatttttccaaaccaggattccttactattgacagatttgctttaccaaaagaaaagacatttattcttttgatgcacttgaatgccagagaactgtccttctttttctcctctccctccctcccagcccctgagtcatgaacagcaaggagtgtttgaagtttctgctttgaactccgtccagcctgatccctggcctgagcaacttcacaacagtaattgcactttaagacagcctagagttctggacgagcgtgtttggtagcagggatgaaagctagggcctcttatttttttctcttaattattattatatttctgagttaaacttagaagaaacaactatcaagctacaacttttcctgccattttcctgtggttgcagcctgtcttcctttgaaattgttttactctctgagttttatatgctggaatccaatgcagagttggtttgggactgtgatcaagacaccttttattaataaagaagagacacaggtgtagatatgtatatacaaaaagatgtacggtctggccaaaccaccttcccagcctttatgcaaaaaaaggggagaatcaaagctttcatttcagaaatgttgcgtggaaaagtatctgtaattaaagtttcgaagtaatttaacctatttttacatcatttgtcttaccttgttgagagaggagactggcttgttggcttctggttgttgcaggaggcatgtggcttcctgccttctcagtagacaggatcattaggaaaatagcaacatcaatcctgttacaca

SEQ ID NO: 21458 - DNA, 1104 bp, Homo sapiens
ccaataattggaaaagttgtaaggaaattgctttagaaaaaagtaatattttatagttttaggatacttcctaagtatttgaagtaagtatgtttataatacttcatataaaatgcagatttcagtaatgattcatttgaggtttttaatgatggaaatagtcaatttttttttctatttcagctgttgcttttaaaaatgccaaacagtttgagcaagcaaaagatgcctgcctgagggaagctgttgcccatgaaaataatagggcgtatctttttcaacttttaaaaagaaattaaacaattagatgattttgacaagctgttttctcttgctgtaaatttactttactacctgtgaagtaaaatgtttttaaattagaaaatgattagaaaaattctgtatttttaaactatgaaggagcgtttataatgaagtttgattataaggtccacactggttcgcagagctacaatacttactttctattgtttgtgattttacttgatgatggttttacttgggatgaagtaaagtaaatctgtagacatgtgctgaagaatgaagaagtagcacaggtattgaaaacacgtgaactactgtatcaatttttttaaatacagttttccttaggtatttgaaataaaaattataagtagtttaaaacagtacattttcttgaggtgtttgcaaacttatcaataaaaaatgtttctcttatttgcaaactgtagtcataataactttgtacttcagtaaaacttcagattattgcgtaatagaaatagtttaaaatctgtgcagtgttttgttagtggttttgggaattatgtagttttaaactatattgacaggtattgaattacttcttttttacctgtttgtaggatttgtcttttggaaccaactgggtcagtgatttagttaactgtctttaaatagttgatctatagaaactattgatttttttcttttttccttaactttgacttcgttacttccattcagtctttttcatgctgccaagtaagtattcttcatgttttcatgtatttgcaaattatgttttaaatgttgctgtttttctgtaggttggtaattttt

SEQ ID NO: 21459 - DNA, 1034 bp, Homo sapiens
agtccggggtcattatctttattcatcttattacttactcgtcgcttcccagaaatcagtgaatgaaatgctaactctgacaaatcccaacttaaaaatggttcactttagtttctgaaagtgtttgttacagcagcagagctgttcttggtgatggcgttatggctgtggcaaaatagctgaactgtgaggtgataccaaggttctgacttgtgagcaggggccccatgtcttagaaacagtgtccttcattcttttcagggcagctaggaggcaagttttagcatagtttacctcctttctcttctgttctcatctcctgatgctccccgacaagactcccagtgcctttctagagcgctaagccccttactataagaccccatggaaggtgaaggaagtgaagttgcaggaaggggcagaagttaaggacagccctgtgtgaaagtccagactgcatcagctcccctgaagtatttctgctttccacatcttctttccttttgtttctcaaggtatagattatctaaagctgtgttgtagagggagtagcaggaaaggagagaggccaggatcttttcgggggaggtcagatgaggaacgttttccagctgcctgtgcatattcctttagaaagctccactagggatgggggccaccatcatcctcaaaacattaccagtgttgccagtcggtttggacacatctgatgaaagccattgttttaaagcaattactgtgttaaattcttcaaagcctcagcagaggggagaatgctagttgagtgagcagcagaagtgagaatgctgcgtagatgtgctcaaagggcacatttataaatccagggcttttattcgtgactttgttttattggttttttttttttctttttaggaaaaatgtattttaaaatggtactttctactgtgctcaacaaaaatgttatggaaatatatttttgaagtgtattaacaatataaaaattaatttaaatttgtgcaggaacatgaaggaatttgatcttttgaaaagtg

SEQ ID NO: 21460 - DNA, 1052 bp, Homo sapiens
ggcaggcagatcacctgaggtcagaagttcaagattagccttggccaaatggtgaaactccttctctactaaaaatacaaaaagtagccgggtgtgatgacgcacacctataatcccagctactcgggaggctggagaatcgcttgaacccaggaggcacaggttgcagtgagactcccatctcaaaaaaaaaaaaaaagaaaagaaaagaaaaaaagacctttccagcaagttgatcatgaccttgtgcctctgagagaaggtctatgcctctgagacaaggtgtgtggtctcagtgaacccaaatccctcctagaagactcacttagcaaagaaaagagctgcttctcaccagttgtctgagacagtcactagatcctaaacacaaggagggttgggtgtgtatatgttcaggggtgggatgtgtgctattaaggagaatcactgggtttctgtcttgcataactgttctgtccatggtgccatcaataactgagataaggaatatagaaacaaacttatcagtgatgataataaacttagctgggaatatgacacataaactaaacatttctgtaggtagttaaaaataggttttggagttcaggaaatagttggggccagaggaacagtttgagttgtggtgtagaaggtgtctgttgaaagcttggggatgaatgaggttctgtgacagttttctgccatttgcacataacttctgtggggtttcaattttgttacatttggggaagataaaaacaatttattcttttttcagcaaaaccaaattcttgtcattttgttaggaatattaagtattacctgatggaaaagttgaaagcatctgtgtttcattataataagtaactaatacttttctggatacatttaaaaatagatggctttgtatgctaatttcatggccttttagcaaagtcgatcaactttttcgactacaaactcatgtaagggcttggctcttttgttaggtaactatatattagcacatagaaatgctaatattatgtcaaggaaataaacagtttatgcgt

SEQ ID NO: 21461 - DNA, 1045 bp, Homo sapiens
tgcgcctgtggtcccagctactcaggaggctgaggtgggaggatctcttgagcccaaaggggcggaggttgcagtaagccgagatcgcatcactgcgctccagcctgagtgacagagtgagatcctgtctcaaaaaaacccttgttggttcccaattaggacactatcagctaattttatggtgttgggtgcaagtacatctgcccattgataacacagagatcacaggcctgcacattgcctggcaggtgtgagctgttggtcccagtggggctgaatatggctggaccagtcccagctcgtcacctggaaaactcagcccggagcctgcagggaggggctgtccagtggtgggtcactagcatccccttaccccacagaggattgaggcttggtttacagcatgcagcccctcaggtacatttcagagctgcatctcacgttgtttatggcagtattctgctaccccttttcttccctgtggcatatttttcctagtcatctgttgcccttctgttccatccacgctggctataagtgcattggcctggacaagtcacattttcttgggccgttcctgaagggtctgaaggctgagagcaaatccaggaatctgtgggtgtggttgaagctcagttctgaatgcagtgcccttgggccgccccccacaccccgccgtgcttatgatctgagcacagcccctcctgcagctcagaacctgtgcccccttctctcttctgcaccaggacttaatgtggtgctctccacatgcaggtgttctgtagatgtttctagaatttcctttacttaccatgtgttgctcccctgccccaccattgaaatccgggccttgccacatttcccaaaagccacaacgccacattcctgggtgccttccttgcacccaaagccgccaaaggagcctcctggaccgtcccacggccccagcgcagccctccccacggctgatcgccacactcttgactgccccacggctgtgcttgtcctccctgacaccacatccccgcacccccactcgcttctc

SEQ ID NO: 21462 - DNA, 1007 bp, Homo sapiens
tctcgctgccgtctgtcccgttctgtgtcgaccaccaagcctctggctacctctgtcccctcaggtttggttgtgtagcttctgttgtcattgaatacggcctcccgcagcatcccacccccaaaccaccgactctcattgccgacactgcagcagaatctctccgggtgggagccccattattcattctccctttattgattcatcgaggagaacttggtagatggggagaaaacacagttggtttttttttccacgttatcaaccgtgactgcaagagcgttcgtgcagtgccctgagccacggccgtctctgattctccctttatgaagctgcaggctgacgagagatggtcccttcccattggccttagcccaagacttggagtcgaccccaagcgacagagtgaccagaaacccttttacagtcacattcagagtcgctgctggcctcaggcatttgaattagagctactttgagcctcttaggcagaaaacctaccacattcactactgcaaaatgtgtcctgtctaaaaatgattctctaaactttccctatacttaggcatagtcttctttcttagattctctttgttgttgtccctattgctggtttattacactgtacagaccacaaaatgtaatattcttttgtataactactaaagaaaaatccttgtagatctttgtgccttcaccatggctatctatacctgtacatgaaatgtgtttgtattgtgctgaagagcttaatgtcaacattacctgctgcttactctgaaaaaaggaatgaatggtagctgtagaatttaggatattttatcaggttggcactttataaaatactccctgatttaaaaaattgtaagttatacacgttaatcatccacattctatcgacaatgtaccaacatcacaagctgttgcaaccacctgctgttacttctctgagctgtaaaaacctgaactcaattcaggggtacaaattgcaatctaatcttttcagg

SEQ ID NO: 21463 - DNA, 1030 bp, Homo sapiens
ggcgggtggaccacttgaggtcaggagttcgagaccagcctgaccaacatggtgaaaccccgtctctactgaaaatacaaaattagctgggcatggtggcgcgtgccttagttccagctatttgggaggctgaggcaggagaatcacttgaacctgggaggcgaaggttgcagtgagctgagatcgcgccattgcacaccagcctgggcaacaagaacaaaactccgtctcaaaaaaaaaaaaaaaaagtgattgttttcggggattttagagacaggaggtgtgctgagagcagattggccttttatattcaaacatttgttttcttttttgaggtctgacagtccgaaaatgctctaccagtttccctagatgttgaaatcggactgttatcaatcttaaatttgaagtgagtcgtcataaagtggatagtgctttaccttggtgcaaatcctctaatcctgtttaaaaattaatctgcaatactaagtagactcattttttgttgaagggccttccttccctttgtagtttgaagaacccaagcctcagaccgtaaagaatgaatgaatttaagagtgttgcgaaactccaccctttgacctttccctcctgtaggaaaaggaggaccctaaaccttcctgcaaggcagatgaagcttgtagcttcagtgcaagcgttcttcctggaaagcagagctgctgtgtgcatggaacacgggttctccttccatccttccctgcctcccagctttccttccagagcaagcatcagccagatatttaggaacttttaggttctactgtaaaacttttcttccttgaggcagtgaaaagccagcttaggattcagacattgctgtgtaaaccctggcgagctaagttaggagtttctgtggttttcaaatttagatccttgaagaaacagaagattttaaaattttatgttattatttaacaaatgtgcataaagagcttgcaatagagcaggaacagttctaaggctcctatgacttttaacttaagagata

SEQ ID NO: 21464 - DNA, 1058 bp, Homo sapiens
gagggtggatttgactggggtgcatgaagaaggtggtgaagaagatttactttggaggctgagatgacagcctctgagttggatgtggggtgtgagagaaagagaggagccaagggtgacttcaggggtttaggcctgaaaagctggttgaatggatttgccactttccgagatggcaaaactgcaggaggaacaggtttggagctgagagtcgagtgttctcttctgtgcaggttaagctcgaattgccagtagatttcttattttatttttttgagacagggtatcgctttgtttccctggctggagtgcagtggtgcaatcacagcttctacctcctgggctcaagtgattctcccacctcagcctcctgagtagctgggactacaggcatgtgtcaccatgcctggataatatgtattttttaattttttgtacagacggggtttcactaagtggagatgttggatttgcacccaagctgacggcagagatgcagtgtggaagtcatattcctggagatggtatttagggccatgtcccggacaggaggagagcaggcttggccactgatgggctttgccgtcggatgagctcaggtcaggctcccattttcctccttgggagcctcacaaatgccagtttgtggaggtcatttctgaagtggttcatttctccagaaaaggcttccctgctcttcctgcctgggctgagcgcacctgtcgctggaggaagaggaggcaggagggggagaggaggcggtggtgatggcctccagctcctgcctcgcctggtccacacctgcagtgtttgcttagctctgcagggtggggtcagcctacgtgagaaattcgaaaactcaacaacatttcaaacatcagcagagacagaattcctgtgagacagcagctggcaggcacagagtagcagctgtccctttggtggggtgggggtcggtacatggtctccaagggtccgaggcccactgctcctgaccctatctgagaggtccctatcatttcctacccattttgctaacaaaagctgtctcagaagaa

SEQ ID NO: 21465 - DNA, 1029 bp, Homo sapiens
acccagcatagtgcctggggcacagtatcctaaaatgagaaccattatcaaagaagaaacttgaatctttgcacaaaaccaatcaagtcatgccccgttgttaaaattaggacttgtttctggaggacacagtcattaaaacaagcaccactaatctctctctctttctccctctctctttctgcttcccttggcttcccctttcttatttctattatgccttgctggaatatcttcaactcacaagttaaaaaacagcactggatagaggtaaaggattagaagaaggcaagaattttattagctgcttcttcaaattctaccatgcaaatttcagacatacacaaagtacacagaaaaagcaaaatgatgccccatgacccctcacatggcagcacgcctgcttcgtgtgtgtccaccagctcccgccacccccagctgcctggagccaatcccaggcatcaggtcacttcctagtcagtacttcagcgtgtctccaaaaacagactgctctcttacaaatacaatcacatcatcaatatcactctctacccaaaatgcatccctaaaatcagcaaataatcccatcagtgttcaaatttccaattgtctcgtttttatggaaagtggcctcctaaggtcatagtctgcgttctggggggacttcctgttcctgggtcagtctttgttgccttttcactggactgtgctaggaagtacgtattttttatttgttttgttttgttttttgaaacaggatctcactctgtcacccaggctggagtgcggtggtgcagtcttggctcactgcagcctccacatcctaggttcaagcaattctcctgcctcatcctcctgagtagctgggactacaggcatgcgccaccacatctggctaatttttttgtattttttagtagagacggggtttcaccatgttggccaggctggtctcaaactgctgacctcaagtgagccttttgcctcggcctccgaaagtgctggggttacagttgtgagccactgcac

SEQ ID NO: 21466 - DNA, 1089 bp, Homo sapiens
accttttcctcaaatattaaatttggaaaacaatcttgtgattaagagaagaaggctgtccaccaatggacttaccctgttatttcttccttattgtgagttgaatggcatgacaaagcagaggcaaagaggcatacatcagttcttcaaagtattaagtcagaaaggtcagagcttccacagcgtggcaacagctttgcagatgcccacatcatggtagttgaaatagcaaagcccagcaaaggttaaagctgaaagtgccagaagctctgccttgggagctttctgcaaggcatccccatgaacatagtcagtaacaacttgtccaaggcccgagtaactatgaagagtgagggttgcagcaaggagtagagtccgtcacagagccaaggattcaaataagcagctggaagcaggcccaggagcaaaacactgacgaccctctcactagtccagtggagagacgcaacctgggaaccagaatggtggcttggtgacaagccaatgtactcactccacaccattcgggggtaggtcggttctgaagtaatgctgagataggagcaggtgtgaccactggggttcgcagcaacagagctcagcctccttgggcaccgcgaagggtactcagtctccagagaaccgccatctcattcctgaaaactcaaggtcatccaccaacccccactttgtattttagttatagtcggttaaaacataaactcgcttttgaaaccttaactgcatgttttatgaaacctgtattatataaaactgtttgtctggggaaagagccagaatcagagaagagtttacacagctgttgaaaaatgaaatttgtcagaatagtagaggaagacatttcagatataatgaacggggtgtatatggatgaaggtataagcagtaacagtcatattggaagttactcataataagaagcaggtttagtgtgttattataaaggtaatattaggaagtaaagaacaatatgtagtgttagtttatctgttaatactggattttcaaattttgtttttctgatggttttgttcatttatattgttgggtggattcatttgtgagcga

SEQ ID NO: 21467 - DNA, 1048 bp, Homo sapiens
aacattcaggaaatgcggattttaccctgaagaaacaatatttaaaatactcagttgtatcaaccagaataaaatagttccaaataaaaaagtaataataatagtcatcctctgcctttctttttagcagaagaccagagggtaatattgaaatgattatcccacactgtgtgacaaactaataagaggcgcgataagctgaagagcatacccctgcgctttccaagttagagccttgaaaatgcaagcacagcctcggagccagccttctccaggcgagagccttgcctgaggccatcacagcagacgcatttaggaactggaattttctgagccatcagagctcatagtggttccatacaaagattgagagcccctaaggtgtttgagaaccaagtactgggctagggtgagtgaggctaacagtttctactttgtagtttttagagacagaaactaaagttagcctggtatcatctgagacttccgaatgtatatatcagagtctcctcggtgcctttccttccttagaactcggctcacttttatttctgtagctctcttctctgtcagtctcgtgctttcaagttttggcatggcatttttctcatagttcttggttttagggtgttaggagtaatttttgcatttattggcaagcaggaaactttttgccttggtgtatctccatctcatcactagcttgaggcgtttatagtatgataggagactatgttttggagttagagagacctaactagatatagttagatatagagaccttactagatatagaactttgggcatgttaactatgtattaaatctttttttcttcatttgcgacagagtcttgctctgtctcacgcagttctcctgcctcagcctcctgagtacctacaggcacatgccaccatgcccagctaatttttatatttttagtagagacggggtttcaccatgttggccaggctggtctcgaactcctgacctcaaatgatttgcccacctcggcctcccaaagtgctgggattacaggcttgagccag

SEQ ID NO: 21468 - DNA, 1061 bp, Homo sapiens
cttctaacctcaggtgatctgcctgcctcggcctccaagagtgctgggatgacaggcgtgagctgctgcacccagccagaaacccttacattttccttccttgcaattagcttttttcacttaaagatacattgtgggcatttttccatatattaatatatctagtcttacctcatttctttttaactgctgcatagagcatgactatatgaatattaccatagttgctttttattaaactgtttttaaacaattataagaatcacttggtgaagaaaaaaattgaaataatccataagaatacaaaaagaaaggtaaagttcctttaccccctaaaaacaaatgctgtcaatagttctgttttcagactttaattctggtagtcactagtatatttttaaaggatttacttatacctttggttcttgctatgttatcttttttttaaaaatttttattctgctatttttccacatgttcttgctatgttatcattaaagaatatccaaactgatagaaaagatgaatagagcacatttatacaacttccacatcccaaggtatgactagatagatatcttatttgtggtgatgttgatagttgttggagttatactggtaattattataatttcaaataatatatatatctctacacatatttatcaatttttagactatatatttactcccgtctcttttttttttttttttttttgagatggagtcttgccctattgcccaggctggagtgtggtggcatgatctcggctcactgcaagctccgcctcctgggttcaaacgattctcctgtgtcagcctcccaagtagctggaatcacaggtgcccgccaccacatctggctagttttttttgtatttttagtagagacggggtttgtccatgttagccaggctggtcttgaactcctgacctcaggtgatctgcccgccttggcctcccaaagttctaggattacaggtgtgagccactgtgcctggcttcccctctcttaaaaaagagggaattagtttattgcttccccctcacattgccccttc

SEQ ID NO: 21469 - DNA, 1057 bp, Homo sapiens
aggatgtgtgagccaagagcaggctggggcaccctccaactgacaaagcaagaaagattttccgttgagcacgatgaaccattggggcgcagttccttcctccctgcccctttccctgttggttttggagtgctcctttatttccagctcttaccttttctttttcaagttctaattgtctcactaagacaatgttttttgaccaaatcactccatgattgtccgtgactcatttatattctttgcatttattaattggaggttggaccttctggaattttctacttactgatggtgatacggactcttttttcctttgtattttctttctcagtctgatctgcttcctgacttcctggaaaccctccaaatttcttgatttctaatggcactctttctagatttctagccctgtacgataatattctttcatcatttcagtgggcttttggagggaggcggagatccaggtgatctgtctacactattcagtcagaaagctggatggtttttctcactgtttagctgtgactcatacttagaaagtggtttaaatgtgaatatcttagttctggttgtacaattgaggtaatcctcaattcaggttgctgtctggacatttcatgactggatttaaaaatatttttaaggccaggtggggtggctcacgtaattccagcactttgaaaggctgaggcgggcagatcacctaaggtcgggagttcgagaccagtctgaccaacatggagaaaacccttctctactaaaaatacaaaattagctgggtttggtggcacatgcctgtaatgctagctactcaggaggctgaggcaggagaatcattgaacctgggaggtagaggttgcggtgagctgaaatcacgccattgcactccaccctgggcatcaagagcaaaactctgtacccgcccccccccccccccccacctcaccaaaaagaaaaaacaacaaagaatttttaaaatctcacatttttttagctgggtgtggtggtgcacacctggaatcccagctacttgggaggaggattgcttgag

SEQ ID NO: 21470 - DNA, 1050 bp, Homo sapiens
atgtggactggaaacgtctcttaattctctctttcagcctcagtttcctcaataatagggatgatggctaccttacaaatttgacatggggattagaaaaatgtatgtgaaataattagcacattacctaataatagacacagtatcagcaaactaggggttatagattctttcttaaaactcgttttttcaatttgtatttccagttctctgtcaggtattgggaatatgtggatgaacaagatagacatttccccaagaagctgctcttctaaatttataggggttaaagttaaagtagagtttacccactgactgagaatgttgtcattcattcgtttcacagatacttactgagtacctgctgtgtgctaggcattgttctaagtgttaaggaaatagtgatggacagataggcaaggcccctgctcttagggagaaattatttcattggaagaagacagataaatacaagaataaatagtgataaatgctgaagaaatttaaatggatgtgattgactgtggcgctgtttgacttaataataagagataaacttctcttagaaggtaacatataaattgaggtgaacgtcaggaaggagctagctaggcaaagatctgggagaagaatattctagacctgtggtaggggtgggctttgggggtattacaagaatagaaaatctagtatgtggtgaatgagcctgagagggtgggagagagtgacaggcctcatagagttttcaggagaggcatggcacttgattcatagttaatggtctttttgcttgcttcttggataattaattgtagggtggcaagaataaaaacatggaaaagggtgaggaggcttttcagtagggtaaggtggtagtaatggagataggaagatatagactatttcagggtgtgtttggaacatagacatgttttgccctcaggaatggactacaccagtagatgtgttttgtttgacaacagtgtattgaatttaactagttttaggtaaagcctgtaatttccagctgacctcagtccttataattct

SEQ ID NO: 21471 - DNA, 1030 bp, Homo sapiens
ttgttctatatctactttttttttcctttttttctgttttagtgcaaaaagacatcgttctaggtaagtttctttttttctcatgctcattaaatcatttggcaatcataattttaatcatgagagctctttttttgacctttttttttaatgggccctttttgtggatgtacacttgacccttgaacaacccgagtttggactgtgtggttccacttataagcagatttctttcaaccaaacgtggatggaaaatacagtattcatggatgtgaaacccgagtgtagtcagtgctaactgtaggacttgaatattgcatattttggtacatgcaggggtcccggaaccagtcccccatgtatactgagggttgactgtaacagctacatggatacttctgaagattctgattagaaattttgaaagttctgtaaactgttccttttctccggggctgcttgcatagtttgttcatttttatttttgtctcttgaactgctcctttttttcttgtctgatttgtggctgtcttctaggctgcctagtgtgggcatccttatctgttgtgtatgtagctcttatttctcattggcttccacacaagagggacgttgttcctggccatttactgtagagtgtgcaggttggagtcttcaattttatgccagatgtttaatgctttcttctgggccgctgtaactgccatcgcttcgttctccacaggcattttctgtgccttgattgcaggcaagcccttccctccccgttgtcaggtgttcactgtcgtgtgtgcatggctgttgtctctggagtgggaaagaagggtgggtgctcctgccatgcttcatgccgggctttccgtccccactctcctgccctccccgactcccttctgccctctttctgactgtagtcaaggaacatttttgtgtttctccctggcagatttgtttccttttctgcttccgggcccttctgttcttggattgtggctttctctccccctgcacaccccatctgcttttcaga

SEQ ID NO: 21472 - DNA, 1088 bp, Homo sapiens
tgggaggctgaggcaggagaatcgcttgaacctggtaggtggaggttgcggtgagccgagatcgcgccattgcactccagcctgggtaataagagcgaaactccatctcaaaaagaaaaaaaaaagttgtacaaatggccagtaaacacatgaaaatatacccagtatcattagacatccaggaaatgcaattcaaaaccacaatgaggctgggcacaatggttcatgcctgtaatcccagcactttgggaggccgaggtgagcggatcatttgaggtcaggagttcgagaccagcctggccaacatggtgaacccctgcctctactaaaactacaaaaattagctgggcgtggtggcgggcgcctgtagtcccagctacttggggggctgaggcgggagaatcacttgaacctgggaggtggaggttgcagtgagccgagattgtgccactgcattccagcctgggtgacagagagagactctgtctcaaaaaaaaaaaaaagaaacaataaaaacagaaccacaatgagatgctgcttcacactcactaggataactataataataaaaaaaaaggaaaataacgtctttgtgaggatatggagaaattgaaatcctcatacattattggtagaaatgtaaagtggcatagccactttggaaagcagtttgacagttcctcaaaatgttaaatattgtgttaccatgtgactccgcatttgcactcctaggtatatacccaagagaaaggaaaccatatgtccacacagaaactttgttttgttttgttttgtttttttttgagacagagtcttgctctgtcacacctagtgcgtggtgtgatcttggctcagtgcagcctctgcctcttgagatccagtgattctcctgcctcagcctcgcaagtagctgggattacaggcatgcaccactacacccagctaatttttgtatatttagtagagacgggctactaaatatacaaatattggctaggctggtctcgaactcctgatctcaagtaatccatccacctgcctcggcctcccagagtgctgggattacaggcatgagccactgtgtccga

SEQ ID NO: 21473 - DNA, 1045 bp, Homo sapiens
tatttggcctctgctctcggacaccttagtcaggtgcagagaagagatgcagagccaattgtcagattggttttcataaacccaacaggccccaaatgtgcctgggaattatagggggtgagaaattaactctgattgaggcaggtactgaagctttctagaaaaaggatggagcctgtgccaggccttagatatgggaggaggaggaggacatgtcaggaagcaggaacagcatcagcaaaggccctgctgtaagcacgtgggttgtgttttgggaaacagccaggggttttgtgtggcaagtttacagcacctataggaggccacactggtaaataagcccagaaaagtagactggggccacattatgcatgactttgaaagccaggctgatgagcggagtgagcatcacatccatggagagcaggttttgctatcaaaggagttttcagacttttttggattttggaatagtggataaataatcattgacctgaatgtatccaatctttgattgctttagtatgctggattcttgtagacagaattgctaagacataggtgatgagtgttgttgagactcttaatgttgattgcaaaattgacctctaaagtgacattgccaacttagaagaccatgactgactgaggggtcatgttttattttgtgcttgctgagctgggtgttacagtgttgaaaactcctacagtggcctttctccttccctccctcctccctccttcctccctttctttcttttacttctcctgtgataggctcatctatacttttttgaaagaggtaaccatttgccacaccattttctggaaagtctgctttcttctcattgatttgtgatgccacatttattgtatcctgacttttgataacatgccagggtctgtttctgtcctgtcttctcaaagaggttaaatatttatcttgtattaaaatgttcataatggtttataattgactgaagttacaatagttttctcatgtcaaacaaaaaagacaccaaaatcttagtccattgactcattt

SEQ ID NO: 21474 - DNA, 1064 bp, Homo sapiens
tttatggagcagtaaaattgacatctttataatattgagtcttctaatccgtgaaactaacatatcacttcatttatatgttttaatttccctttgtattttatgagttttgtgcagatttttcacatcatcttgttagatttcttcctaagttgttgaaacttttatttttaatttttgtgggtacatagtagttgtatatatttatggggtacatgagatgttttggtacaggcatgcaatgtgtaataatcacatcatgggaagtggggtatccatcccctcaagcatttatcctctgtgttatgaacaatccaattatatactcttagttatttgtaaatgtacaattaaattattttgaccctgttgtgctatcaaatgaaacattaatattatgtttcttaactttattttctgtttgttttggctaaacaaatacacaattgtatttgttttttaaatatactcaccttatatccagcaaatttacttattaactctaattatctatcaactctttggatttcctgcatacatagttttgtcatctgagaataaaagttttatttcttcatttttaatttttatacctttgtttctttgtcttgccttccttgactggatggacctcaaaagagtattgatgtcatgatgttgggtttccctcattcattgggaactctttttggtatttcatctttcaatttgatgcatggtgtaaggtttttgttttgttttgttttaaattactggatcaacaacgtggtcttctaatctttgttcactagttttttgttctgttttggatttggttttcaccttgtaagaggattgaatcttgccgagtgcttctctagatctgttaagaacatgagcttgctctgttttgttgatgtgatgaattttgtcaaatgatttttgaatattaaactattcttttatacttgaaataaacctcactagggttgtaatgtgttatcttttgatatatcattggatttggcgtgtgctaatagtttgcttagaattttgcatttttgtgagtgagatgaatgctcttt

SEQ ID NO: 21475 - DNA, 1034 bp, Homo sapiens
gagaaacaaaaggactattctcatgtgcgtcatttcttacctaatgatttagaaaaaagtaatggatccaatgcacttgatatggagaaataccttaaaaaaacagaagttagtagatatgaaagtgcattggaaaacttttcaagggctagtatgtctgatacttgggatttatctttgcccaaagaacaaactactcaagacattcatccggtggacttaagtgctactagtgtaagtgtgagggcaccagaagaaaacacagcagctattgtttatgttgaaaatggagagagtgagaatcaagagtcatttagaaccataaactcctcaaattcagttacaaatagagagaataacagtgcagtagttgatgtgaagacatgttccattgacaacaaattacaagatgttggtaacgatgaaaaagctacctcaatttccactccatctgatagttattcatcagtgaggaaccccagaataacatccctttgtctgttaaaagactgtgaagaaatacgagataacagagaaaatcagaggcaaaatgagtgtgtcagtgaaataagcaacagtgagaagcatgtgacttttgaaaaccatcgcatagtctcacctaaaaatagtggtaagtgtctgagtcgttggtcacattcataaaattacaaagtttattttctcttcttactggaaaatacccctttctgatagatttgaaaaatacctctcctgagcatggtggacgtggctcagaggatgagcaggagagcttcagaccttccacgtcaccactgagtcattcttctcctagtgaaatttctggaacgagttcatcagggtaagtgtgtaccttcttttttaaaaaataaaaatatgcgttcagtataggaactgggaaaaaaatgtgtaaagaagaaaaattatctgtgcattcgtctctcaaaggtaactcttgtaagctgtgaatttctttccagctatttttctgtgcaaacttttgtatattgcttttttttttactctttataaca

SEQ ID NO: 21476 - DNA, 1021 bp, Homo sapiens
ccgagcaagagcaggaatagctaggatccatgctcccagggacttgcaggtagcctcagtcctcctttctgccgttactgctttcattcatgctgatttcactttgtgacagttcgttgaaatgtctgtcttgccccatcctccagacgatgcatttcttggccaaagtggcttcctcaagaaagcagcacttacctttgaaaaatgctgggaacattgaagtttatttggatatcaaggtatgcacttccatgagagtgccataagatagtctttcctcagactgtgagagctccttgctttctgcaggctgttgtgctcttcctggcccaacagagtgccctgaacctcagatgaaagaatcgctgagagtttttaaaaactgggtgttatatagcataaaatatatgctgtggtgctttttaagtttaaagttcagtgtcttgaatatgagaaccaagttcttagattagttcctgaaaaacatgcatgtcaccctttggttagagttggtgaagaatgatccgcacacgttgacatcatttctgagacctgagggtgaatgagagggggttagtgatccaaaattgtgggtgaggtggaagataaggtttgttgtagaagagaaagaaatatcctttccaagagaataggacaagttgagaccgtgacagacaagaaggggacaaacaacctgtcctggtaaatgagaaacgcacgtaaggcaggagccactgagcgaaaactgcgtttttgtaagtcggcattcaattatgattatgtaactatatttaggtcccagaacaaggaagtcacttttcagtggatccaaagaatctactccttaaacctggagaagaacatgaggttattgtttcatttactccaaaggatcctgaagcctgcgaggaaaggtaatataaaaatgttataatggaccgggcacagtggctcatgcctgtaatcccagcactttgggaggccgaggtgggtggattacctgaggtcaggagttcgagac

SEQ ID NO: 21477 - DNA, 1100 bp, Homo sapiens
attgctgggtcaaatgatatttctagttccagatccttgaggaatcgccacactgtcttccacaatggttgaactaatttacactcccaccaacagtgtaaaagcgttcctatttctccatatcctctccagcatctgttgtttcctgactttttaatgatcgccattcttttgttgttgttgttgttgttgttatactttaagttctagggtacatgttcacaacgtgcaggtttgttacatatgtatacatgtgccttgttggtttactgcacccattaactcgtcatttacgttaggtatatctcctaatgctatcccttcccctgccccccatcccacaacaggcccccatgtgtgtgatgtttcccacccagtgtccaagtgttctcattgttcaattcccacctatgagtgagaacatgcggtgtttggttttctgaccttgtgatagtttgctgagaatgatggtttccagcttcatccatcttcctgcaaaggacgtgaactcatcctttattatggctgcatagtattccatggtgtatatatgccacattttcttaatccagtctatcactgacggacatttgggttggttccaagtctttgctattgtgaatagtgccgcaataaacatatgtgtgcatgtgtctttatagtagcatgaattataatcctttgggtatatacccagtaatgggattgctgcgtcaaatgtatttctaattctagatccttgaggaattgccacactctcttccacaatgattgaactagtttacactcccaccaacagtgtaaaagttttcctatttctccacatcctctccagcacctgttgtttcctgactttttaatgatcaccattctgactggtgtgagatgatatctcattgtggttttgatttgcatttctctgatgaccagtgatgatgagcatttttttcatgtgtctgttggctgcataaatgtcttcttttgagaagtgtctgttcatatcctttgcccactttttgatggggttgtttgtttttttcttgtaaatttgttcaagttctttgtagattctggatattagccctttgacagatgggtag

SEQ ID NO: 21478 - DNA, 1050 bp, Homo sapiens
tactggatatatacccaaaagacagcagattgttctactaaaaagatacatgcacttgcacattcatcacagcactattcacagtatcagagacatggatcaatccaccgttgatcaccggtggattggatgaagaaatggtggattggtacatgtatatcatggaatactgtgcagccgtagaatcaaatcatgacctttgtagcaacatggatacagctgaaggcgattatcctaaatgaattaacatgggaatagaaaaccaaataccacattttctcacttataagttggagctaaatattgggtactcatggatataaagatgacagcaatagaaactggggactactggaagtgggaaaagggctgaaaaattaactattgggtactatgctcagtacctgggtgatgggatcattcatacctcaaacctgagcatcgtgcagtatacccaggtaacaaacctgcgcatgtaccccctgaatctaaaataaaagttgaaaaaggaaaacggaacaacaataagcccattttccatagtggtaaagatacaggtgtcatacatctattttaaaaagaaaaaaaattgaaattaatgagctaagcagtcatttgaagaatggtgaaaataataaatccaaagaaagaagaaaaaaaagttctaaagcaaaacatagtaaaattaaagaaatgagagaagattaacatctccaaagctgcttttttggaaaaaataataataatagacaaacctttggcaaaattgaccaaggcaggaaagagacaattttacacgaaaagcatttgtcaagtgagaatctagcagaatgagattagttaaaaattcaaaaaaactttaaaagaattaaaggtaaataaatgtgttgcaaaaagaatgacttaagtatcaaagacttctaaaatgcctctttcatgaacccctcgaatatgttttccaaaatggtctttatgggttgtcctgagaatttatacaccttataccattgtataactttgtcccctgccctgcaaaaaaattgcaccaaa

SEQ ID NO: 21479 - DNA, 1061 bp, Homo sapiens
gcctcctgggttcaagtgattctcctgtctcagcctcccgagtagctgggactacaggtgcccaccaccacgcctggctaattttttgtatttttagtagagatgggggtttcaccatgttagccaggatggtctcgatctcctgaccttgtgatccacctgccttggcctcccaaagtgctgggattgcaggcgtgagccaccgtgcccggcctgagttgacacctaatattaaccatcacacttacctagtaccatatacagagattcaccgaaaatcaaccatagaccataaacattagacctaaagctataaaacctctaaaagacaacataggaataaatcttcatgaccttaggttaagcattggtttcttagatttgacaccagtaaagcacaagccacaaaagagaaaataggtgaattatcaaaatcaaaaagatctgtgcttcaaacaacaccatcaagacaatgaaagacagagaatagggacaaaaatttgcaaatgatgtatttgacaaaggacttgtatccagaatacgtaaagaactcttacaacccagtaaaaagaaatggcccaattttttaagtgagcagaggatttgaatagacattttcccaaagaaaacatacaagtggtcaataaacatgtgagaagatgcttagaattcctagtcattagcaaaatgcaatcaaaacgagaaatgaagtatcacttaatacccactaagatggctgtgagttttaaaaaaacagaaaataacaggtgttggtgaggatgtggggaaattggaaccctgatgcattgctggagggtatgtgaaatggtacagccgctatggaaaataatttggcagtttctcaataagccaaacatagaattactgcatgacccagcagttccacttctggatatacactagaaaagttgaagcagattttcaaacaaaaacttgttcacaagtgttcacagcagtgttattcacaatagacaaaaaagtgggaatcacccaaatgtctgatgggtcgataaacaaaatctggtatatctgtaaaatga

SEQ ID NO: 21480 - DNA, 1471 bp, Homo sapiens
tagagtagttcctctttcaaatgttatttgcactggtatgctgagagtcaaggacttagattttcattaactgggacaaaaacctttccgagttaattgggaaaacttttattgtggtgttttccagttgccattctttagacactccttactgttcttaatcagggcctcattttcttgtcgctcttgctaattttcttttctatatgatgcacatttaggttgaacctcgaactgggttgtcactgttatttagaacttaatagttagggttctgttgggcttaatgctgaagaataattttaatttcatctttgaatctttaagtcatttaattattgtaaagtctctcattttagcattaggagactattccagaaacgtgttctattctatgaaaatttggaccactctgcaaacattctaggcctgccatttatgcacttactaagaccagcggtgctgtacagttgaagctcacagccctggatactggaaagatggctcgattgaggactgttccttccaccttactctttctttttattcgtttatctctcacaccacctcttccttctcctatggactataaaatgttttaatatgcttgagggctaaacccttcctttccctcccaggagactgacctaaaggcacaaactatagattttagttctgaaaattcaacaatgaatacatctaaaaattatcataaacttgataaactctttggcctcaatttccttatttgtaaaatggagatgccagtgctagctactgacagcatagaattgtgaggaatgtaagagacgtggtaataatgcccagacatagcaagcgtcaggtgttaacatcatcatcatcatcatcattaaatctcccctgtaggtgaccttggctggcaggatgcatcaacactcactctacagattttgatagaacctcattttattatcagtgtgtcttcatttaatccctatgacaactacatagaagagaaaggcccaagtttaaaaatcagccaaatccaagttttccaacttctgttctccaagttctcctctcatagtagtctgtggatctccagttattgtaggctgccccaattgatttgagactagtgatgctctagtgtgcgtaataataggttggaactactaaaatacatggtagcacaactgcagaggcaattagtttattcagaaaaagatcatttaaatttctaattgttgtaactgtttttagtaactgagtacaaatagatactgaataaattatcctgaacactgttattatctaaactcaaattttatcataactgcattattcattctgcttcctcagattggttcacatcccacatcttcaccagctttttgcagggtatatttttaaacatgcagtggatcaatggaatacttctgttcaaactggcatacatctgtcacaaattggagggactttagatttt

SEQ ID NO: 21481 - DNA, 1056 bp, Homo sapiens
gggtcatactgtgcccgagcccagggaataccagtggctcctgtgtgtggaagcctggcgtgggtgcagggcttcttcaccatctccctgcaaagtcagctgcatcgtgcatgtcacctggacttactaataacatcaaacatatcttccctatccagtggcttgtacacaaagttaaatctgtagaagaagcagaatgtgttttaaagaatcaactggcaccttgaaatgttaagcattgtatactgactgagctatgatggtggtagtctggtgactcccaagggggaaaagtaactttgtgtggtttttcagggaatacatattcttgaatacctgcaagaaatagcatagctgctgtggcttaaatatacatgctcctatgaggctataagccttctctagtagaaataaaccatcatgtatatattttgatatgtgtgcttttaatgtttgtacaaaaagaattgtatttggggttttgtgtgtgagactgaggactgtgtgctgaggaaggcagaatttgtaaagttggagctttgggactcccaagtaccctggaagatcactggctcccctctcatactgtgcaaagagaagacctgaggctgcgaggcggggtgccttgcccaggaccccaccggcagcccagggtggaggcaggagcagaaccagcgctcttgcctcttccgtcaagggctcctgcgcctggcgggcatctctcgtgcatccctccagcgcggtttcacgagtgctgtgcccagaagccaggaggcatgacctgtcatgttagagcaggaacagagtgccgtagatgacttctgcttcgcaagaggcgaccgccaaatcagaccgggctgtgattcttctgtataagcttgtgagatgttttagggtcctctgtcaggataggctgaggtatatgaatctgctagggctgtcctaacaaagtaccacagaccgggtgacttaaatgacagaaatgtattttctgtcaggtctggaggctctaaatccaagatcaaggtgctgtcagggttggcttctggtcaggcc

SEQ ID NO: 21482 - DNA, 1072 bp, Homo sapiens
gggaggcctgcaataaggcacccggtgccagcatggagccccattgtcctcactcttcctcctgggcctgtcccggtagagatacccggaaccctctccttctcctggcttatttcggggtgggtgtgtgagaattggctgtgagatgagtgacagcaggatgaaggaatttggcatctttagttcatctttatatgatcagcccctgcacccaagaatttcttggtggcgttcacactaagaagtgtcagagtgggcagagggaatgcattgggttgtatttcagtgaggggtctaggctgctgaggatttctctctggaggcctccatctggtcttgcatttctgaggctgaacagacacctctcatgatcagagatggggtgtgggaaggaaggaagggtggtgaactgggagccggcagcgcgtcccagcgctgaacccgtggcacctggctgcttggctgtgagggctgatcttccagtgcccgagtccccgctgtgagcgccctgaggagcatgtgtgtctccgcactatgccctcagcggccgctggagtggggctcgtgtgtgccctgcagctgaaggggaaggaggccgaactggccggggtgtccgtggttgggggggtacaggtgttgggagtgggaagcatttccagccagtgagtttagggatgctgcctactcggtcctatcttggagagcctcagtgtacctttagcgtgctggagacgccagtggtccttctgtacagaaaacctcagtgttatttaacccagaatgtcctaaatgtatgcgaacccagaacactctttccccacaactccagtcagcgcagagtaacctgtgctggaccagatgagcttgaaggagacttcccgctggaccattctcgaacttgagagtggagtagagggtgctgttgcatatttagagggtgatagggtgacagaaggctggggcttggggcgaggggggtggggaagattctcttaacagagctctggctctgcattctaaaattaagtcctgtgggtcacgtctgcacccacagtgccagcaggaaccgtag

SEQ ID NO: 21483 - DNA, 1024 bp, Homo sapiens
tccagaaggcacgatagtgaaaggagggagaaggatgcccggtgcacacactagccataaggaagctggtgcaccaatgtcaggtgaagcagacatcaaagcatcgggcattgccaaagatagcagcttctcacagtggtaacaggtgaattcccaaggatgatagtttactgtaaaggcagggtctatagccacaaaaaagatatttcttaaattgcccctacacgtatcctaagctctcagggatagcttcaacctgtagagactcccagtttctttagcccgaagcctaaggtacacatccccaaagcaatttggatggaagatcctgacctgctcagctattcagatgatttttttactgaaagagtatttcatttttgtctcaattcattttgatggacttacagataagatttcttcactagaaggcattcatcacttaaaaaattaatatttgaaattggttatcctttatctttttaataaattgaacaattaggattggtagaacaatggtacacctgtctattttccgtgggtgccactgggaagaccttacagtattgttgaagtgtatctgttgaacctggcaacattcaaggcaggctgagttaaagaaagcacgtcacaagacagtatgtgcactgtgatcccacttcagttaaaaatgtgtatgtttatattcatatagagaaaagtctggaagaataacccaaaatataagtaatgtttctgtctgagtggtgggattatgggtgattttatcttctctgtttatttctatttttgtattttctccaatgaacgtttgttactcctataataaaaataaaagccatttaagaaaaaattttttatcatatgacaccaactgtttctactagaggaatctatgtcttcttttaatctttatcagtgtacacagttgaatttcacattatgttaaatatttgtctctctgtgtcatctggaatagaattttctgcattaccgtgtggttgagtatacatctgccactcgt

SEQ ID NO: 21484 - DNA, 1025 bp, Homo sapiens
aatgatggtgcatatacttagaacacacagacatccactcatagactttacatcatctctagattacttatgataccacatacaatataaatgttgtgtaaatagttgttatactatattttaaaaatttgtattgttttttattttttagacagggtcttgctgtgtcacccaggctggaatgcagtggcgccatcgtagctcactgcagtctcaacctcctgggctcaagtgatcctcccgtcttggcctcttgagtagcttggactacaggcacatgccaccacatctggctaattgtttattttttgtagagacggagttttgccatgttgcctaggttggtctcaaactcctgggctcaagcgatcctcctgccttggcctcccaaagtgctaggattacaggtgtgagccactgcgcctggcctattttttattgttttattgttatttgtatttttgcctcaatattttcagtctgcagttagttgaatctgcaaatgtagaaactgtggatacagagggctgacggtacagctgtagagattgtacagaagaaaatacattaataaatgtttctagatgccatattgtattttaaagaattcctttaaagaagctatattccagttgccaagtagacaacaggcctccagactccctaaggagatgggggtgtgcccatttcacacgagggttctgtcctaggcttgctgggtccgccaaccctgagggagagaccagccacagctgctgttgggtttgcctgacttttatttttttgtttttgtttttttttagacggagtctctctctgtcgctctgtcgcccaggctggagagcagtggtgagatctcagctcactgcaagctccgcctgcctggttcatgccattctcttgcctcagcctcccaagtagctgggactacaggcacccgccaccacacctgcctaattttttgtatttttagtagagacagagtttcaccctgttagccaggatggtctctatctcctgacctc

SEQ ID NO: 21485 - DNA, 1045 bp, Homo sapiens
aaatgctttgaccagaagaagccttgctgttggtgtagggatgacggaggaaaggacgtggttcacttacgggccatgaggtgagccgcggaggcccactcctagatttattgacttcacatgtgttcctggagcacttgctgtataccagacactgtagtaggcactggggacacagggctgagtaaggtggaggcagaccccatgttcatggaattcacacatgtctggggagacagaatagagtaatcaaatgtatcctgccatttcagacagcattcaggtcccgtagaaaatcaagtatgggaaggagatgggcaagagatggggggaatggccgttgctgataggagggcaaggtgaggcctcgctaaggacaagggagggcaagggcacatagagagcagggagtgtgggctcaggaaagagcagccagggcagaggactcgggctggaacagagttggtgtttggggaacagtgtgtcagttgtccagaggccacatgcccaggagcagacaggcaggtgggcagtcactgtaatttcattcatttccaaaggaagggagaagctgggtaagactgtcagttttggctaggaatgtttgctatatatttaatacatttatattgtctttttctaaatcatcgctttgaaaaaaaaaaaaaaaactgtccctttctccaacactgagtttcaccacagtagaagggctttatatttagggttactgcactttatgtatttcctggctccttgtaagtgcattgctcagatgtgttggtgtgagcgtgagaggagcaggttgggggttgggcggactctcctgtgcgtccccgaggccctgggaaggaagtcacccaccccgtagtggagaggatgccccgtgctcaggtctggacagcctgggcctgtcttcaggagagtctggtgcaggaagcaaatgatgatgttttgcttggtctttgtcccccagatgcaggctgcagccatttggggtcagacacgtggagaatggggtctgctcccagcctgggttcacttc

SEQ ID NO: 21486 - DNA, 1041 bp, Homo sapiens
tctattataacatttaccatggtgtttctatttgaatgaatgagattcattcacttctctctcatccattcatatgatattgatcaagtgcctattatggactaggtacatgaggaactagagagacagcagtgaaggttcagacagggtccccgactttatgggcctccactccagcagggcaggtggactgaactagctatataattacggtggtgagaaaaggatttgtttacctgttagcatttctagattatgagctcttggagggcatggatttttgtcttccttgtttttgaagccccagtgtcttagaatagcacccggcagccagtaggcgctccgtaagtgaacgaatgaactgagcacttaatgtaccaatttgtacatgatcttatggacgatcactttgctcccagcagcttctcaaatttttattgatctatgaaccgagctgagaagttcatagttgaagactgtcctgagcttcctggatgcgctgcttccttctcctggtacgtagtaagggcagcgtgtgtgacctgacaggatcacagcaaggctgtgcatcagtcaggattcttcttgcaggcaacagccaccaccagcaggaagggctcctcttgagccttgctgtcttctcatgtttccagtgccacgtcaagcccaggatggtgctttgagtggagcttgggtcgcatgactgtgcttggctgtaaggaaggttggaatccagtgctgtgcttgtatctgcgttttctgttgcaaaggcactccctttcccacagacctatcaagtggggagggaaggaggtttcagtgcttggcaagaaatatcactgtacgtgttcactactcactgacatgtaattggtcaactgttcgtaaattccggctattttgtgtttaagctgatagagaattctgacaaagtaaatgtgagcttctgcggaagtttctatcacagtatttttaaacatgcatcaatatctttgtaaattgaattgctccgtttaacctcatctcatagtgtgatcaatc

SEQ ID NO: 21487 - DNA, 1028 bp, Homo sapiens
gttgactggagactgttgatcctttctctgctgcctcccagcatcctatgagcatggctgccaggtgaacagtgcccatgaggctctgtggtagacttggtgcctgccacggtgcctggcgcatgtagcatatggggcatggccctgtaaatatttgctgagtgtagggatgaatattattattttagaaaactcaagcctgaccagaggatgaaaaaggcttttgcttgcaaggcctagtaccttgcaagtggaagcagggattgaaaatatccacgtgatgctggcagcctgcatgagaagacaaaggaaaagactacataaggctggtgcccacaaactgcctgtccttcccatgtgtgtttagactgccataaacacccaaaccaaccaaagtagaagcctactctggtaagcatttattctgggaccagcagtgtgataggcttttactgtgcgtgtgaccagtcagggcttcccagtgctgcagccctggagggacagacctttggcctctaaatatccatctgctgtgtaggaaggaccagtcctgccaagcacagaggaaatgtggagtgcttctggccggccctaaagacatgtaagtgtgtgagcaggtgtgagtctgtgtgtgtatgcatgagatgtgagtatgccagagtgtgtgggactgtgtgtggtatttgtgcacaagtatgtgtgagaatgtgtagttgtgtgcacaagtgtgtgggtgtcagagagtgtgtgtgagtctggtgtgtgcatgcatgtgactccatgtggtgtgtgcatgcatgcgtgggtgtgccatgggtggagtgtgtatgcaggtgtatgaatatgtccatgtgtgtgagggtgagtctgtggtgcgtttgtgcatgaatgtgcacgtgtgtgtataagagtgcatctgtgtacatgtctatgtgtgtgtttgtgcatgtgtgtgtgtatgcgtgagggtctatggtacatgtattcatgagtgtgtgtgcgtgtgtgtgtgagagagtctgatgcat

SEQ ID NO: 21488 - DNA, 1028 bp, Homo sapiens
ttatgaatttctgcgaatttcttcatgctgggtctcttccgggcagctccacaactggcagagctgtaggaaagcgggtaaaaaaatccccagcgcctgcctggctgcgcttgggtgcctgcgtagtcgtgatgcttgtcttcctaattattttctgagtggcggggatggagtttatgtgatgtcagaagtgagtttctgctcatgaagactcccagtgtaagtgtggtgggagtcgggaaggagatattgaggtaaagatgagattggggggcggaggctgggggaccaccgataaggcgggaggtgacgcagcagcttgccgttcggctgggaggtgctttgtcgcttggtttgatggccgctaatcacgtcttggtcttgaaaaaaattatccaaaagggtactacggtgaaacttggaagggaccatctttgagtaactgaagaaataaagctgaagtctaaagctgccatgagatacgtcgtggactgcagaggtgggtgaccctccgagggctggacttctggattcatcctctgggctggtgcctctttcagtcatggcagctttaacatgggaaagaaaccccaacaacctaaactttgcagtaatcattttttcactccttcatccattcttgttctgtcccaagagctaataacagagggaaaagaagatattttttgcttccttcccagaaagaaaacagagatcaaagataaaaaatattttcaaagtagacaatcactggagagggaagaaagaaatcttgtttcaggagtttgcagtagtgagcagcgagtgagtctgtcctttttccagacagctcctagaaaaattgccgtggtcctccggaaggtccagctgtccttagaggggcaccttcttgccctagaccctttgcttgctgttcacaccaggaccatccactcagggcagaaacttttcattccctgggatggcctgtagggaaggggcacatggcagggggctgggctgtgggcatcagcacttctcctgccagc

SEQ ID NO: 21489 - DNA, 1062 bp, Homo sapiens
tggtgaaagctttaaaccctaagacaaggaacaagagaggatacccacttttaccaatgctgttcaacattgtactccaggttctagccagagcaactagacaagaaaaagaaataaaaggcatccaattgcaaagaaaagaatgaaaactatccctgttcaaaaatgacatgatcttatgtatagagtatctccgagatgccacaagaaagctactagaacaaatagatgaattcagcagaattgctgggaacaacatcaacatgcaaaaatcaagtgtgtttctatacatgtgccatgaacaatctgaaaaggaaattaacaaagtcatttcatttaaattagctctaaaagaataaaatacctagaagtaaatttaacccaggaagaaagatttgtacactgaaaacaatacaaaatattgctgaaagaaattaaagaatacctaattaaatggaaagacgttccatattcatgggtaagaagacttagtatagctaacacataaatactacctaaagccatctacagatgcaatacaatccctatcaaaattctaacagcctttcacttttgcaaaagctgatcttaagattcatatagaatttcaaggcacaccttacagccaacacactcttgagaaagaacaaagtcagaggactcacacttcccagtttcaaaatttacaaaagtactgtaatcaacacggtgtggcgtggacttcaggatagatgcatagacctatgaagagaactgagagtccggacatccacacagctatggctggatgattggatgatttttgataagggctccaagtccatttaatgggaaagaatagtcttttcaacaaatgatgctggggcaactgggttcctgcatcaaaagaagggagttggaccctatctcatatcaggtacaaaaattagcttgaaatgtatcaacgacttacatttaagagccaagagcataaaattcgtaggagaaaacataggggtaagttttcatgatgttggatatggcagtggattcttagctataacacccaaagtatgaacaaca

SEQ ID NO: 21490 - DNA, 1052 bp, Homo sapiens
ttctttctctttccctcctccggaggttggcattgtgtattttcaaattgtgttgctttttttttttgcagaatcttgtagggtgtgttgtgaaaagtctgccagccaggtgggtgggtattattaataatccatagaaacccaaggggtccggagtgagaggagaaacatgacgtgcctgtgtgtgcacaggacgcctgacactcgctcacacacgcatgtccctctctctgagagccagggaatggggtgggggttggtttggtttaatgcatgataaaaacaggggcattctgtaataacagagctttcatttcaagattcttaacaactaaaataatattttgaaacatttggaattgtactagaaatgtgtgtttgatatgttcaacctaagaaaacatcacacttaaaatgcttttactccactggcttcagacctctttgaaattggtgcctacacagctgagaagtccgggtaggtgccgtaggcaaattgaggggagaaagtgacatcttgtgtaacgctgcaaattcgcggaaggctttgaaccgtcaccagagtagcaaatactcattgtgaaagtttttgcaatgaggtacggaaaaccatttcagctgctctgattgtcagctctcctgtgttttctttagctcctgacttaaagttacgtgtcctgtcagttttgatactcttactacttagtgctttaggttttatcagctggtgccacatcttttaaaattctgtcccactagcctctgtgctggtcctgaccgattcaccagctcttgggactgtgtccagatgccttttgtgatgcctcttttctaaaatgcttttatttgggtttaagatgtactaattctttcacacacccatagctgaataccaaatattggtatgcatactaccaaacttttgtgtatgaagttcgtacaaggcactaagtcatttaaaacattttaattgtgtgctgagctcgtaagtgtacaatatgactgtctagtaaattcttaattatttgtcgactctttatcgaagaaaaaag

SEQ ID NO: 21491 - DNA, 1091 bp, Homo sapiens
ctcctgccctccatgtaggaggctgggacactccctcctggcttcctagtgactgtcgtctgcctttctacccaaagttgtggcttctgcacctggcctcacacttcactgcctgatatgctgccctggacaacctacctgggctttcctacagcagcctggtagcagatccctgagagtgggggctcttccccacctgagtctaaaagtatatgggggaaaacacagtgactcctagcccacatctgccagtagtcttcctctgccagcactgagctggagacgccttacctgcgttaccctgttagtcctcacagcagaattgagcaccattattactattattattttgagatggagtcttgctctgtcgcccaggctgtagtgcagtggtgccatcttggctcactgcaacctccgcttcacaggttcaagcaattcttctgcctcagcctcctgagtagctgggattacagatgtgcaccaccacgcctggctaattttcgtatctgtaatagagatggggttttgccatgttagccgggctggtctcaaactcctgacctcgggtgatccacccaccttcaccttccaaagtgctgagattacaggcatgagccaccacgcccagcccagagttgagcgctgttattatcatctgttttcaacctctcaacaaggttagtataatttacgtaagtttgcaaatttatgccactttcaaaaagaatagtttgctcttctacaactagcttgttgcagagttagattctgcagtaacacccgtggttcccattgcacaccccactggctcctgcatagcagcgttcccccaactgtaggatacatgactcccagggggttccaggaagatgcagattctgattctgatgttgggagtgaggcctgggcatctgcctctctcacaagctcccagtgatgcccctgctgttggtctgtggcccacgctttgggtagcgagagcttagatcctcggccgtggttctagcttcccaatgctttggatcacaggaggccagagacactggcccaactgatgtcagaatgatgggaagtcgaaatagcagcat

SEQ ID NO: 21492 - DNA, 1035 bp, Homo sapiens
tctacttttttctcttctggaatatagtacagtagaaacatgcattatgtcatccttgcagttttgcttctttcatttagggttatgtttttgagactcatccatataatggtgtgtttccatggttcattctgttgtactgctgagtagtgttctatggtgtggatgtaccctactctgttcatccactcatccattgacggaactgttcattgtttccagtttggggctattagaaataatatttctgtgaatattcacatagaagtctttgtgtgggcatatattttcatttttctttgttaaatacctgagagttgactggccgggttatatgtgtttaatttaatgggtaacgctatactggttttcaaagtggctttaacattttgtattccagccagcaatgaatgggggttctgattgagccacattctcatcaacacttgatattatcagtccttttacctttagtcattctggtggttgtgtagtgcatcttactgttgtttgaatatgcatttccctcatgactagtgatgttgagcatctctttatgtccctcttgcttatctgtgtctttacttttgtgatatgttgttttaaatcttttgcacattttttattgggttgtctattgatttgtaagaaaactatatatgttttgaatacaaactttttgttagatatatattttccgcaaatattttctcctagtctgtggtttgttttttgtttttcttagctgttttcaaagatgaagagctttttatttgtatgaggtccatttcataatttttcttatataaattgtggatttcatgtcctgtttaagaaatctttgcccaacctaatgtcacaaagattttctcccatgttttcttctataagtttaacagtttcagcttttatgtttagttctatgatcctatcaagttaatttgtggatatggtatgagttaagagtcaagttcactttttgaaataaagatacaattgtttcagctccatttggtgaaaaggccatcttttccc

SEQ ID NO: 21493 - DNA, 1030 bp, Homo sapiens
agattagatctgagaagatgctctggggactgagcccactgttgttggtgtcagggaggcttactggagccacacctgcaggcgctgtgttcaggcaccaccttcctccttgagctttgcctgtctcttgccttatcagttcttcctccaccaccctacacccccctccccccggccccaagcccctgtgtctccttgttacaattaagtttctggatattgacttaagaactgttaggaagaggactagaaaaggcttcccctgcctatcctctccgatcaccaaggtggaagggagctagtaggactcttccttgacacaccttgtcgtctaaatgttcggtattctattcaggacttacggtaactattatgagggaggcatggctttccaccgtcgggccaggaagagcacctgttgctgcaagctcagtgaagtggggcactcccagacctgccatgcagtttatcctctgagaatggaattggaaatgaagacctaaccagctattggtgggaatgacggaactggggattgcgatgattgatctgggaacatggctggattgtgatttaaccaagaatgctgatgttgaattctttgggcctagaatatacttgagaaagcactagtggcttgtgttcagggagaggagctggcagtttttaaccacttctgtgggagccgtgttctaacctgtggaaagtattgcaattctgtgagagtgactctgcagagtcactgcaccatcaggcttggccctgctgtgccttcagtacccagccaggttctctgggtccagggtgactctccaaagaaattggccttcagctggagaaaacattgggtggagactctcacttatgttaatgcaatcttgaaatgactgaaaggtagattgccagcacagtgagtttcccagcctgctcccccatccacacttggaaattgagggagcatgaccgctctctgacttcacatgttaatagaggatcagagcagagttgggagtatattggtcaggatcat

SEQ ID NO: 21494 - DNA, 1050 bp, Homo sapiens
gagcagcacatcagaaagcacagagtgagaaggaagggactgcttttcttttacttcctttctatattgtatgttgaagttcaaagcaccttagagaagattttcagttcagttgagaaatatgtaattttctgaattactaattttttctgctgttttataggacagtaataccccacttttattcgctataatttgcaagaaagagaaaatggtggaatttttattgaaaaacaaagcaagtacacatgccgttgataggctgagatggtacagtagttctttttttttttaaataaaaactgtgtattctagagtggtaacagtcactgaagtcagaaatattaataagaagattaacgtaattattggcatatagtgaaaaatatcaccatgaataatcagatagatcagcaaatatttggactgagtaacataaagaacagtatatagtaggattcatcttctcctaaatatagagtgtttgttatttataattggatgtttttggtactgtaatcttgtattagctaaagggttttgtattagctttattaagtttttttggagatgcaatctggctctgttgccaggctggagtacagtggtgtgatggctcactgcaacctccacctctcaggctcaagtgattctcctgcctcagccttccaagtagctggggctacaggtgcacgccgccatgcccagctaatttttgtatttttagtagagatgggatttcaccatgttggccaggatggtctcgatctcttgacctcgtgatctgctctccttggctcctcaaagtgctgggattacaggcatgagccactgcacctggccagttttattaatttttaaagtgtggacttttagtttatgactactagcattgtcattattattattgttgttgttgttgttgttgttttcagcctgcagatagctcttatctgacccctagctgatttgaattatatatcagactaggaaagcaatggcgaaatcttcatctaaatctttacctactttagataagtgacctcagca

SEQ ID NO: 21495 - DNA, 1023 bp, Homo sapiens
tgaaagatgcacaggtacagcttgggtcactgctacagagggtgccgcctagaagccttggtaacttcctcatagtgttaagccactggtggacgcagcatgagactagaggcttgggaaccttgctatagattttggaagatatatggaaatgactggctgtccaggcaaaagcatcccaaaaaggcagagccttatatgaaacttctactagggcaacacagaaggaaaatatggtgttggagcccccacactggaggccaccatcatgcagacccgagattcatagaccccccaacaacttgtattctcagtggggaaaagtcacaggcactcaacaccagccgagcccctgagggcagccgtggggcataaaccctgcaaagccacaggtgccaagctgcccaaggccttgtgagcctagccctcacacccctgtgccctggatgtgggacaaggtttcaaaaaggctgattttggagctgtaggatggaatgactggccttctgggtttggagtttcatggggccggtaagtcctatctgtgttttgttgttttctggcaacattcttccttttggctgggaatgtttacccaatgtgtgtacaagcattgtaccttggaagtagttaagttgctttatatttcagaggctcatgggcctaagaaactgtagccttgtgtcagatgagacattaagctttgaacatttgtataaatgctgtaatgatataagattttgggggactgtaaggaagacatcattgtattttgcaatgtgagaaggacatgagatttggggagccagggacagaataataaaattcagctctgtgtctctaccaaaacttatgtggaattgtcatcggaatgttaaaggtggtgcctggtggaaagtgatttaatcagggtggagactgggggttggaagatgaggcatagggggaatgggggatttatggtgcgggagaggagtgaaaattgggggtggggggcggatccttcacaaatgattaaacact

SEQ ID NO: 21496 - DNA, 1032 bp, Homo sapiens
aacaccatgttattaaaaatcaagttgtagtaaatatctatgaaaatagtgttacatatgtcgtgaaactatttctattgtagaatctttttttttttatttaggtagataacttagttacaaggggtttggggatcactttttctcttgtcacaaacgcacatgagtatgacagagctttccctttttagcctacagctcttatagtaggatgggttgactttcactaaaacatgagcagaggcacttgagaactctctaaataacatccgtatcagctggattcttgttagatattcaaaatctcaggccccatcccgagcttactgaatcagaatctctggcaggacccaggaatctttattaacaaactgtctgcttactagtggtatctgccttctatcactgaattgctcaagcttcagttgttttatcttggccaagttaaatctgacctctgtccaggtactgttgttaagtgctggggatgctgcagggaagaaaagtgagagatatctggccgggtgtggtggctcatgcctgtaatctcagcactttgggagaccaaggtcggtggatcacctgaggtcaggagtttgagaccagcctggccaacatggtgaaaccctgtctctactaaaaaaaaaaatacaaaattagccaggcatcgtggtgtatgcctgtaatcccagctacttgggaggctgaggcaggagaatcatttgaactccggaggcggaagttgcggtgagctgagattgcgccattgcactccagcctggcaacaagagcaaaactctgtctttaaaaaaaaaaaaaaaagtgacaaatatctctgttctcaggagaatcaaacaatgaacaaaagaaattgaggaaaatatgatgttttttaggtagtgagaagtgccagagagaaaagtagagcagaaaggggaattagaaagtaagctggaggttgcaattttctacgggtgtcattgagaagtgacttgagtgaagacacaaagaggtgagggactgagccactgg

SEQ ID NO: 21497 - DNA, 1031 bp, Homo sapiens
tctcattttattcaaaccatgttcctcaaaccattactaatataggaaaatatttatataacataatatgtaaaggtgttttttgtcctgtttcccaatacctaaattacaaaagaattcaattgaacttatatcaaatggaattttatgcccatttaattttttaaaaactagaagatgtttttaacttgttcatgaggcatcgaacgtattataaaatttgaaatggtattggtgatgttaagaaaatcatggtatgatccttaagttgttagtgacacttcatggatattaaggtacctataaataatactaaaactgtggcattccttttttttcatggtgggggtatgaatttgaccactgttcaactcatatcctttttttttgtcttattgagcagaaactaactttagttagtataccgcttttgagatgttctttatatagaaatttaaggcatgagaaattatcatttagaaagaaaatgaatgaaagctcatttggaccttcagactatgtttaaagcacattgtacacgattaattagtacataactattctactgatgtagattatattgagaaataaatatttgaaacatagatcttaaagcattttcttataaattcactttttagaaatttggattttcagcaattttatatcactgaaagctgtgtgtactctaatttggtccttgatatatttctcatcatgagcagtattaaaaaacaatagacaaaatatttaccataagtatgttatttttaaatacatttccttttaattgaatgaaattaaattttctacctgatttgtggaccatcagagaaaagaagatacatattaaggagggaaaaaaaggaaagagactgaaagattaattagaacttattccttgtacaataatattttagctttaaactgttagtcctttatattaggatccactaaaaatcttaagttagcctgctaaattttagctcctcacagtagctggttttccagagacttaacatgcaaaggac

SEQ ID NO: 21498 - DNA, 1032 bp, Homo sapiens
ctcatctctttacagttgaattgccttgtgactccccagtgcagaattttctctgaaaccactgataacttcaaaatcaagcatctgatcaaaataaactgctttgagatctaacctataattcatttgtgtagataaaggtatgttgtttaggtagaatcaaagggcctgatcacaagaaaaaagcttaattgttagttccttagggatctaattatgtagcagatgggaccacacagcacagtttgctgttatttagtgtaattaattttagatctgcatccagaaaaaaaaaaaacgatgacaacaaatgacacaaaatcttagtttgcatccatatagggcactatccacttataattgttgttcctcttctcttttggatcactttaatctactccttactctattcgatgctaataaggtctcagaattgcttatttgctttaaatgcatgagtagtttggatacactgatattaagggtgtcatggatgttcattggaatagaatactcggatttagaggattggttaattaaactgtaaaataagccagagttaaaagctacaacaacaacaagaccaagacaagttctactttagtttccccctgctttaatccgaaactagttcaggggactagttcgaggtagaggggaaggtcttatcctttctccccctccccccctcctggtcacccttcacccccgccccacgccccccaacctctgactctccttcaaatctcactgaggaattatagtctctacagaggcttggttgcagatgcctggaaagtttacactgcagagagttgttttgtttggcatagctaatcaggagccaggctggaattgctcatagctgtcattcaggttttgtttcaaagtccaaggacctgctgggaaaaacaaaaagctaatgaaagctgactgtatttaggcctcaaatctgtagaaactgaaatgatgtcctgacagtgtattcttattcttccacattcttgctgttactaaggtaacagattttta

SEQ ID NO: 21499 - DNA, 1086 bp, Homo sapiens
tttttgttacaagtatgttattttaaaatttttaattatttatttttttagagctggggtcttcttcttttgcccaggctgaagtgcagtagcagtatatataataaacaaaaagcctggccaacatagtgaaatctcatctctactaaaaatgcaaaattagctgggcgtggtggtgctcgcctgtaatcccagctactcgggaggctgaggcaggggaatcacttgaacctgggaggcagaggttgcagtgagctgaaattgcaccactgcactccagcctggatgacagcctggatgacaggattaaataaaataaagtgttaatattctctacatataaaacattcttccaatcaattttaaaagaacaaatacctcagaagaaagggatctagggcagaagttgacaaactcatcctagaccaaatccagtccatgtcttattttgaaaataaagttttattgaaacatggccatgcttgttcacttgcatatcgtctctgactgcatttgagctacagtgacggagttgaatgtgacgtcgttgaatgtgacgtcaaaaccagcgatgtttagtctcagtttcctgacctcttatataaagaaaaatccactgttggtggtcttggaagacaatgtagagtctcttctctttgggatggtttttggtggttccgtttagcttcaggagaatggaccagttgggctcttgaggttccttcctcattctcattctgttttatcttgaacttgtcttgggtcaggtttttacatgcgaatgcctacataagacctgtcctctcttatgcatttattcccattggatcagtcctcaatcgaccagtctttctaccctgatgaccttcttctgcgacaccacctcttccgtggtaaaccagtcccggaggcctcggtgtttttaagacccattctctgaccttcatcaatacctaactctccaaccatttattcttctttgctcttgcactcaggttgttgagttttattgaagaaattcacacaacctgggaaatgggtggttcattcccacccgttctacattcacggtctctcccctgggct

SEQ ID NO: 21500 - DNA, 1021 bp, Homo sapiens
tgtttgatatctggcaggatgctattcggaaaagagaatgtaaatattcctgcatgttgtcttagaagcatttaatgtaactgactgagataatttgccatttatttcatggcttcttaaagggattttgagcctccttatctatgtgcattgttagagtgaagctgacaacaggttattttgtttgctttgtaaaacttaacaggaggaggccatccttggctttccttgaggtgctggtatcttggaagggaagctagccaaacttttcctcccagaggctgtcttttgacacagaacattttagttcctaccagatttctctgagaggctttcatggagcccagttaccccttcccagttaccccttttagcaaatgatattcatgaatactgtgctcacaaagaaatttaggtcaataaatggaaagcatttgagatatctggactcttttcatgttctagaaccccagatgctagggaaattttgggagaaagcctagaagtggtagaatttaaatattagttaggtttcttatggccatctttcctaaggaaactctagaaatagctcatgggatataatttaattacatggtcttagataaatcctcatcagtcttttatagctggttatgatatttgatgagataaaacaaacgaactttttttcagatttattgaataagaatcactaatcttgaatatttattcagctcagctcaaaccaattagcaaactttaaaaatggccagttctaatatggtacaggccattgaagcatattcataacttaatttttggcctgcgtttgcatgatctggccattgctggcacgaggaattggaaggaggttgcttaagggaggaagaatggactaagggagaaaaaggaggaaactcaggaagagaggctgagaacatagataccctggtagacatacttttgacagcatttaccacattttaactctggtatgttgaaatgaacattgatagccttttactttcttccttctctg

SEQ ID NO: 21501 - DNA, 1139 bp, Homo sapiens
gcctcaggcacactgggacatagcggcttccttaaagcctcagtttgatgatgtgacatttaacatgagtgacttcattttggtttggtctggtctgttggagcttagtgcaggagttcattccaaacaatggccttccataatgtttgtttgtttgtttgttttgagacggagtcttgctctgtcgcccaggttggagtgcagtggcgtgatctcggctcactgcaacctccccctcccaggttcaagcaattctcctgcctcagcctcacgagtagctgggactacagtcatgtgccaccatgcctgactaattttttgtatttttagtagagacggggtttcaccatgttagccaggatggtcttgatctcctgacctcgtgatccacccgcctccgcccctgaaagtgctgggattacaggcatgaaccactgtgcccggcctaatttttctgtatttagcagagacagggtttcaccatgttggccaggctggtctcgaaatcctgacctcggatgatctgcctacctctgtctcccaaagtgctgggagccaccatgcccagccctatgtttatttagcattactttcactctacattggcaagccttttgaatgcaatgtgttcttgaagtctaggttttcacatggatacctttaaggtgaacttgaagtttttatgcactgtattttcaccctctgggtgcagttactgtcatctgttagacttgcacagaaatcaccaactaatctcttagaattaaacaaaaaatagggggagaaaagttcccaaatggaaaaattcttgttcttttgttttttaaaaaaattctgaaatatattggaaataaatgtttgggagaactaaactattaagcataaatataacatttttccggagactttataattgattttgaaattgtcactaaagaattggttagctgttaatggttttcactcttcacttactgattcaaaggtgtgatgttagttttaccctgtaggctgttactttgcttctttgcacttcaaaaagatctaaggtcattcactgattatgactttgccacttccggccctattgtccttacaaagggatttcgtgagtaaccttactgtaaagaagtcagccc

SEQ ID NO: 21502 - DNA, 1090 bp, Homo sapiens
tatcaggcttaaagattggtctagccacaaaatccattgagacattgagtttatgaaataaatcatgaaaccttgaatttctggggcaacttaaaaattacaatcaatagtgtgtgtcataggattccttcggaaaagaagtaaaaggatagcttactacaaacaaattttaaaatgttattttcctaaggttccaatctgttcttgaattccctcctggggagtccaggtgttagtaacacaaggtaaacagaaaggccctcaggcatgtcatgatgcaaattcaactcacacacatacaaagggcaacactcccatccaaattaatgggatgacatttgctgaagtcctcaaactagaaacttcccagttatcctaggcttccctcccttcctcatgtcccagacctgttgggtcactaaaccctgtcgactcagcatcctacgtaagccttaaataaacgacatctcagctccactctccttgccagtccctcctcatctctcatctagaccattgtagtcatctccctactgggctccctgcttttggactgttcctcttcctgttcccactcttccatttttatctttgaattatctttttgaattatctcctgtgaattatctttttgaaaagcacatttgatcacaccattcttttgagtacagtcttcaaggactcccttttatctgttaaaaaaaaaaaaaggaagaaagaagaaggccccaacctttctttttttttcttttttttggtggggtggggaggtggggggcacggagtctcactctgttacccaggctggagtgcagtggctgcgatctcggctcactgcaagctctgcctcccgggttcacgccattctcctgcctcagcctcccgagtagctgggactacaggtgcctaccaccatgcccggttaattttttttgtatttttaatagagacggggtttcaccatgttggccagaatggtcttgatctcctgacctcgtgatccgcccgcctcagcctcccaaagtgctgggattacaggcgtgagccacagcgcccggccaaccccagcctttcttaacctagctccact

SEQ ID NO: 21503 - DNA, 1044 bp, Homo sapiens
gatagtgtagtcttgttcatgtgtgtatcctcagcatctgtcccaatgcattgaatcgagtgaaataaaagcaagtacaggatatgctttgtgtatcccagtaagaccccaacctgaaaatagtgccaagacaaccaggaaactgaccagtggtccagctgagctgcatgaagcagaattaggcacagaaagtctgcagtagttcaaatggagtcctgagaaattgtgtccagccctcatgtcaccctggcctgccctgatcttctttgcttgttctgcctaacttcttcattctattctctcacttgctcaggggggtctatttggcttaatctgttggacctgctcctttcttagcactgaaggctgatgcatctgatacgtgcatgtgtgtgtgtgtacgtgcatatgtgaatatgtgtgcatgtgtgtgtatgtgtctcaagatgaactcccagacatagaactgggtgtgtccacttagggggttgtatgaatcagggggaaaggggaaaacaggaaatgatagtaatcagttattatgtactgtttgccaaatgtcaggatttgtatttaattgttaaaaccaccttgtgaatggtagtcaccattattattatccccactttacagatgagttaactgaagcaaagagagactgagtcacacacacccttgaaatgtgggggagctgggatccagtcagcatatgtcttaatccagagtcactgctgtaagcacaattagacttaaaatattgtaatggaggccaggcacagtggctcacaccttgtaatcccagccctttgagcgaccaaggcaggcagattgcttgaggctgggagtttgagaccagcctggccaatatggtgccacccccatctctactgaaaatacgaaaattagccaggcatagtggtgtgtccctgtaatcccaaccagttgggaggctgaggcacgagaatggcttaagcctgggaggtggaggttgcagtgattagagatcaggccactgcactccagcctgggcgacagagtgagact

SEQ ID NO: 21504 - DNA, 1050 bp, Homo sapiens
tagaggcagggttttgccatgttggccaggctggtctcaaactcctgacctcaggtgatctgcctgccttggcctcccaaagtgctgggattacaggcgtgagccaccgcacctagccaccattatcattttttaaatgccctgttatgtttttatttggaatagagtcagctaattccttttattctaccaagtctcagcagggaatagatacttcccattgacttcatctgaatattgctaatgcttttgtaggattctgtatgtcttctgtaatggtgaaactccattgcccatttttaaattaatttagtgttttttttttcggggggggacaggatcttgctctgtcacccaggctggaatgctatggcacaatcatagctcactgcaacctccaactcctgagctcaagtgatcctccctcctcagtcttccaaagtgctgggattccaggcatgagccaccaggcccagcctgatttaatatttttattcagcatgatatttatctgttgtttatatatgttctgtcgtattactccttaaactctaagttgaagagattgagattatgtgatcctccatgtataactgggtactttttaaaaattaaactaaaaagacctgttggagaatgtagcttttcaagattttcttttttattttgaaaggagtttcgctcttgttgcccaggctggagtgcaatggcatgatcttggctcaccacaacctccgcctcccgggttcaagcgattctcctgcctcagcctcccgagtagctgggattacaggcaggtgccaccatgcccagctaagtttgtatttttagtagaaagcgggtttctccatgttggtcaggctggtctcaaactcctgacctcaggtgatctgcccgccttggcctctcaagtgctgagattactgatgtgagccaccacgccaggaggttttcaagattttcaatgatgaaaggaagataacttgttggagtggtaatagattaagaggcagcaatatttccagacattggtgctctggaaaaaggctg

SEQ ID NO: 21505 - DNA, 1035 bp, Homo sapiens
tttttttttgttttgtttttttgagatggagtctccgtctgttgcccaggctggagtgcagtggcgtgatctcggctcactgcaacgtctgcctcctgggttcaagcaattctcctgcctcagcctcctgagtagctgggattacaggtgcacgccaccactcctggctaattttttttgtatttttattaaagacaggatttcaccatgttggtcaggctggtcttgaactcctgacctcgtgatccgcccgcctccgcctcccaaagtgctgggattacaggcatgagccactgcacccggccactggactccttttttaaaaagtgggattcttgttttagaagtggggattccaaatcttgggacctctgagataaattggctaaatgttagaaaatgctagaccttttttcttcaattatgtctttcagaactgtgcatttttccataagcatctttttattaaatctgctgtgatttatttgcttacccagatgtcaaacccaaggtggaggatctggacaaagatttggtaaaccgctacactcaaaatggaagtctggatttttctaacaatctaacagttaatgaaatggaagatgatgaagacgatgaagaaatgtctgattcaaacagcccaccaattccctattcacaaaaacctgccccagaaggatcttgcactacagatggtgggtttcagttgtgttttctttttgctattttgtctctaatattgtctgacatatttctaattattacatgaggtgctcaaggctggaaactagtaattatcgtatggagaggaatgagaaatgattatgctctcattcacattatctcctgtgacttcacaacagatgtctgtaagaaagacaagtattatcatcccatcttaacagataaagagactgaaattcacagttgttgacttccctgagatggtctgtttagaattgcagaggcaattctaaacccaggtcaaggcttttccagtattccaagtactttctgcaagaatgctactatttt

SEQ ID NO: 21506 - DNA, 1072 bp, Homo sapiens
tgtgtttatagctggttctgtaaagttttccctgccctcttttagtttactctgtaaccttcaagttggagataattggagaatgctaatctgtttctgtgaagtgaaatctttggctgttttcttaaggaaatgcagatgaagtttataaagaagacctgtctactattattcctttttaaaaaaattaaaatcatttgctctggttttagagcaacatttcagtgttatcttcagaaaatgaaattatttcaggggcagatttgtcaaaaaaattatttgtatgcctgttatcactaacttacgtttctttgcttgtagagtatgaacaggcttagatcctcccttaggatactcttaaccagatcttctcgtagcctctaaaagaaagatcacatcagtccttcagaattatttagatgtaattcagaattaccctgttggggagtcctaaggttttgttttgttttttcatttagttcaaggttttaactgagatttaatatttgatgtttattagactattaatcagacatatttctagtagtgggaaaatagaactacctatcacactggatattgggatcctatgtcttgagatagaatgtttcatagattttgtttttagctatccactcttttttacagacatacacagcttattttccatctgaaaaaactaaattaaatattgctgtttgcataatgtttttactctcgtagggatccctcatgatatattttgtatatcattagctgatctgaatcccagcaatgaggatttggaggaaatagtaaatagatacatactttacagaaatagaccagacccttggcaggcgaacttattcttagaataactacaaactgaattcataaacttttgcttgacttaatgagcatttttggcatggagttgatttcttctggaccctgttcctagacacagccctgctgtgcctttctttcctattctcttcttaattaaattgcctgtgtggcttgtattggcaaatagctacatggtaaaagataaaatagaactattttattttatttttgaagaacagct

SEQ ID NO: 21507 - DNA, 1027 bp, Homo sapiens
gcgccactgcactccagcctgggggacagagcgagactccgtctcaaaaaaaaaaaaaaaaaaataataataataattagctgggcgtggtggcgcttgtagtcccagctactcgggaggctgaggcaggagaatagcgtgaacccgggaggtggagcttgcagtgagccaagatggcgcccctgcactctaggctgggcgacagagtgagactgtctcagaaaaaaagaaaaaacgttttcactttgtttagtgaaattgagcagatggtttaatatagaagtctaatgataaatctaatatgctggagtaaattagcagtgaagatccaactactcgttttttcattcagcagtatttattcaggatgtactgtgtgacagaaatcacacgaggctcttacgtagggacacaacagttaaaagactcagtcctgttcctcacagagcttactacctagtaggctgtagtagaacaacttcagaaaactttttagcatttgaaaagcattatcgtctcatctaatgataaacagttcaggtgtggctctgactgtcgacaatgaaaatctctcataatgcattttttgttcaatgattctttgtgactagagaatcctcttagaatatgtcatggaaaagacacagaaaacaccatcagtataatagacttcataatccttagaaattaggagtgagaccaaagaccatgtgctttagaatcagaactgtgttctaatcccagatttgtcacttagtactttaagaacttcagcaagtattttaagaacttaaagtcttagattgctcatgcatataatggggccattaacgcctaccttgccgggtcataaagatcaaatgagatgatgtccttaaagcacccacccagcacagtgcttgggacatagtatttgctcttcaaatggcagttatttactattgtatttattaaatacccttacagacttggaaccttgcttactttctctagccttgtaagtggacataattttttactaaccact

SEQ ID NO: 21508 - DNA, 1072 bp, Homo sapiens
cagagcagatggtaaacagcacagggctgggagtcagagttctgctattaagatactgtacctgacatatattggctgaaaattggggcaagccaatcaatttttctgtgccttggtttcctttcctcatttgcaaaaactgaaattaacaacgcctgttttgcatctttgtgaggaatgacttagccttgctaccacacttctgcttgtgtgacactgttccctgttataatgatttgcaaaccatgtatattctcttatacgctagaagctttatgttctttttgtttatctctgtatcacctagtaccagacaaatgcctggaaataaatgttatttgaattctgtttttatttaaattagaaattagcatttggggattattaatttagtctttattaatttattaatagtactggtatgtactgtctttctaaatgaagataatatgctcatccaccattagaagaacacatgttttatcccttagcttgtagggaagcatggggtgagcctcctaagctctgcccctgtcactaatagtatggcttttaggaagactctatgaagcagggccactttatgattttcttgggccctagatatctttgcctatgtaggctcttcctctgtagaaaaatatgtcaaattatgttttataactgtcagtataaaggtgaatatattattataatattatatataaaggccagcacggtggctcatgcctgtaatcccagcactttgggaggctgaggtgggtaggtcgcttgagccccaaagttcaagaccagcctgggcaacatggcaaaaccctgtctctccaaaaacataaaaattaactaggtgtggtggcaagtgtctgtagtcccagctactgggaaggctgaggcaggagaattgcttgaacccagaaggcagaggttgcagggagccaagatcgtgccactgcactccagcctgggagacagaaaaaaaaaaagacaaagtgttgatcataaaggaaaagactgatattttactacattaaaattataacttctaactattaggagtcaccatagagtaaaa

SEQ ID NO: 21509 - DNA, 1098 bp, Homo sapiens
ctgaggcaggagaatcactgggaggcagaagttgcagtgagctgagatcatgccactgtactccagcctgggagacacagcaagactccatctcaaataaataaataataaaaatataaataaataaaattgctcaaaagcaatggtaaagagaaaaatcttaaaagcagccagagagaaaaggcatgtaattagtacaggggaacaaaaagaagcctgacatcagatttctcatgggaaacaatataaatgagaagacagagcaatatttttaaagttaacctagaattctatacccaataaaaatatcttttggccaggtgcggtggctcacgcctgtaatcctagcactttgggaggctgaggtgggtggatcacttgaggtcaggagtttgagaccaggctggccgacatggtgaaaccccatttctactaaaaatgcaaaaaaaattgccaggcatggtgatgtgggcctgtatttgggaagcggaggcacgagaatcgctttaacccgggagacagaggttgcagttagccaagatcgcgccactgcactccagcctggatgaaagagtaagactccatctcaaaaacaaacaaacaaaaaataatctttcaaaaatgaagatgaaataaagacactttaagacgtacaaaatatggaatagttcacaaccagcagactcacactacaagaaatgctaaaggaagtcattcagatagatggacttgatagcagatgaaaatccgaatctttacaaggcattgaaaaccactgaaaataggccaggcacagtggctcacacctgtaatcccagtactttggggccgaggcgggtggatcatgagatcaggagatcaagaccatcctggctaacacggtctctactaaaaatatttgaaaaattagccaggcggggtggcgggcacctatagtcccagctactcgggaggctgaggcaggagaatggcatgaacccgggaggtggagcttgcagtgagccgagattgtgccactgcactccagcctgggcaacagagcgagactccatctcaaaaaaaaaaaaaagaaaagaaaaagaaaaccactgaaaatag

SEQ ID NO: 21510 - DNA, 1064 bp, Homo sapiens
tatcttctacttccattctttccctgaattcttgacaatgagttatatgaggatattgatagtagctaatgttttgtcccgatcacatttgccttccctacatgcacaagatcattacaactgatctgaattcaacctttggcttaatttcaacccatagcattgaaaagccattcgttatatgggacacaatgctaccaacccaccatcatagagcatatatggacttgttttgctagtagtggtgttagattttccctgctgttatctggttctttatgtgacccacgcttattatttctgacctggatggttcagtctgtggctagaaacctgaaaaaccaaaaccaactggctctctttcagaacacctaactgtagccatttggtatccacagttcaaacatttgtctaccttgctgaacaaaccacagacaattgtaaatatactggttttaagacataaatgagttatttaaatgtttgtttaaataaatagttttaaagactacatagacatcttatatacacaaataattatgccagtctgtcactatggttgcttgtaggtagtactggttaatgatgagttcatccttcttcacacttttctatacctttcaaaatgtatgtaatgaacagatatatgcctttgataatcttggggggaaagctaagataccaaacaggatccaaaatattgcatatggaaaaaacaactggaaggaaaatcagcaaaatgctaaatagtagttgtagccacatgttatgattatggttaattttttttctccttttgtttttttcacttatcactttacacaataaacctaatgaaaaacacaacaaaccattagatttctaatgcttctctgttaaaagtattaaaactgcattgctttctattgtatttcatttagttttcacgccatctttcttgtcaaacttttttttttccagagccccttttatctgccccagttccacagaccccactaactggaattttacaacccaggcccattcctgcaggggaaactgtaattgttcctgaaaacctgctg

SEQ ID NO: 21511 - DNA, 1027 bp, Homo sapiens
aaatttagaagttgtaacatttatgtttcatatatagatacacgttcacaattttatgttatagtcatagactacattacagtggaattcctaggatgaataacaaaactccggaaacgcttcttacagtataattcatggagacatgaattacgggcttgagaccatttgaatattgctaatgatgaagaatttggaggctgggcacggtagctcatgcctgtaatcccagcactttgggaggccgaggcgggcggatcacaaggtcaggagatcaagaccaccctggctaacacggtgaaaccctgtctctactaaaaatacaaaaaattagccaggcatggtggcgggcgcctgtggtcccagctactcgggaggctgaggcaggagaatggcgtgaacccgggaggcggagcttgtagtgagccgagattgtgccactacactccagcctgggcgacagagcaagactctgtctcaaaaaaaaaagaaagaaaaagaaaaagaatttggaaaggcggacaatcagcagcaccatgctaagtctcccacatctgttgccagagatgacctaaatgcacgtgaggctgctgggtcttctcctggtctctgttgacactgattaagtgaagctacttagagagtcttaatcatgtgttcagaagggccagtcactaagtcagtataaatcagtctgtcctaaataatttacccctctggaccactgttggaaaaccacagtcaaggcctgaggttcttcacctggctgctagctcatcagaatcacctgcagggctttcagaggcacattagttgacaatcactgtgccctaaacgaagggggcctcaagttacgacttctcaaggcagtgacatcttcctcaattggtatgagtagctgccaggcaacaagtacgtataagagtgtcccatattctggctgctgtgatggctcatgcctgtagtcccagctacttgggagcctgaggcaggaggtttgcttgagcccaggagtttgaggctgcag

SEQ ID NO: 21512 - DNA, 1028 bp, Homo sapiens
gtccccaggttggagtgcagtggtgcgatcttggctgactgcaatctctgcctcccaggtttaagcgattctcctgcctcagccttctgagtagctaggattacaggcgtacgccatcctgcccagctaatttttgtgtttttgtagagatggagtttcaccatgttggccaggctggtcttgaattcctgacctcagatgatccgccctcctcggcctcccaaagtgctgggattataaataggcatgagccatcacgcccagcctcagttcttagaatgttttgtatgttgaaatggaaatatgtccaatataaactgctaaacgaggactacaagttatagacgtgaataaaatatgacccaatttatgtcaaaagaaatctgtatatatccttctgaatgcatataaagtgatctggaataatattcctacatacccacagtgcagggggttaggaagggagatttttactttataggcattataataagcttgtaatctttttaccgactgtaattctttatttctttttttttttttgagacggagtctcgctctgttgcccaggctggagtgcagtggcgtgatctcggctcactgagagctctgcttcccaggttcaccccattctcctgcctcagcctcccgagtagctgggactacaggtgcccgccaccatgcccagctaattttttgtattttttagtagagacggggtttcaccatgttagccaggatgatctcgatctcctgacctcgtgatccgcccgccttggcctcccaaactgctggaattataggcgtgagccaccacgcctggcctatttctttttcatggtttataatgagtctaagatcttgtatgtctggatttcaggtttgagaattagaaacgtccaaatgacagtttatgttagtattgttgtgttccttcataaaggttgaggatataattcaggaaagctgaaattgttatgcagattattgataggaattgatgcagatagcatctagcaaattttcaa

SEQ ID NO: 21513 - DNA, 1050 bp, Homo sapiens
tttttttgagacagagtctagctctgtcacccaggctggagtgcagtggtgcaatctcggctcactgcaaactctgcctcccgggttcacgccattctcctgcctcagcctcctgagtagctgagactacaggtgcccaccactatgcccggctaatgttttgtacttttagtagagacggggtttcactgtgttagccaggatggtctgaatctcctgacctcgtgattcgcccgcctcggcctcccaaagtgctgggattacaggcgtgagccaccgcgtccggccgaacattagtttttaaagaaatgtattatgaatatagatagaaaacccaaagtgaaggaatagaaaatgaaatatcagtttcttttaatctatcataattatgtgagcataacttagtattttgaaatagattaatgtagtcagcaaacaattcatgtattacctataatagatatcatacatataacatttaataacatacagttcttgttcctgaagacttaacctagaaaataactccataacaagaagaatctctgtcataataaaccaacagcagacattttctaaaggcattaaaagtatatctgatactggcctttattaatgtgaaattcttgtggatctgtgaaataaagaggagtactttcttttcgtttttttttcttttctttttttttgagacagtctcactccttcatcaaggctggagtacagtggtgcgatcttggctcactgcaacctctgtgtcccgggttcaagcaattctcgtgcctcagcctcccgagtagctgggattacaggcatgcaccaccacacccagctaatctttgtatttttagtagagacagggtttcaccattttggccaggctggtctctaatgccagacctcaagcgatctgcctgcctcaggcttccaaagtgctgagattacaggtgtgagccactgcgcccagccaataggagtacttttgaaaaggaagataaattttttttttttgagacgtagtcttgctctgtcacccaggctggagtgtag

SEQ ID NO: 21514 - DNA, 1035 bp, Homo sapiens
agtctttaccgttgctcacaacattccataccatgctgttcagcttaaaaacacactactaacctgctctgtctggtttgaaatgttttcaatttacacacaaatacagatcgccctgaatttgtgaatgtatttctaccttcgttaaaaaagaagactaaaagaatatggaatccctaattcacatttagttcgcctaggaaaactagcagttagtgaaaaactggccacatcacagccgcacagctccagcagcccgggtagcttccccaccctcactttctccagccccgcctccaggacggcctaaccgctttcctcatagctcattgggcgcgcggcaccaccgggcggcaactccagggatccgcccctgggcccgcccctccatcgcccggggctggggttgggcaaccgtccgccctttttctagaccgcgcgcatgcgcactctccttggaccctggagagacgcttagggatcagttttctcctcctttcttcccgcgatcgcgcggctctctggaagccttcccactctattattgccgaggatccccctcctagacactctgagaaggtgccgctccggccttgggtacggcggtacccggatgtggagtcgctctcgcccggctgggactctgtggcggggcggagcgcggcggctggtgcgggggcagagagaagggggcctgagggcccgggcgctcgccggacgccgggaggtaccaccgctgcccacgggggaggaggcggcgccggcgcttgggtgcccgcccccgagcgaggggccggggtggcagaaaggccggcagttaagcttgctccccgccgcccccctcgggctagcctcccccggccccctgcgctcctcgcgctgccggccgggggagagcgtggtttccttgcggccgtcgctgtagcctggccggggagcccggaggaagcgggagagtccccgcccacggccccctcccctctgcccgctctccgccgccgcctccgagcagccgcgggccgccctccactccga

SEQ ID NO: 21515 - DNA, 1040 bp, Homo sapiens
gaggtggtggtagtgtgggacaacggcacagctgccaactaccgctgctccggggcttacgacctccgcatcctggacagcgcgcccaccggtaagccgcggccacctggccagggcttgcgcgcgcggggggaaggggcgagctgcggtgggcgtcggtgtcgcggggagaggtctgcagtgggacacctggtgggcagcgcccggctggagcgagcggaaaggcaaagcgccaaaggaattctaggttccgaacgggtgaacaaacactttcagaaaagaccctctacccccaagggaaatgatggcagcaccatcaccgggatgctttcaagcctggaagacacaaagcaccgggaagagaacagacacaggtcccccaacccgactcctcctcttgggaaggggtctggagaggcctatctaataagccattgaaattaatcagccaccaagtgataactgtctgaagggaggcttgctttgccatatggtgctcagctgaccgtttataattgccaaggggccttggtacctcggatttgtggagatgccttttttttttttttttttaacctcctgtgacacagaattacttggagttcagtagccaaatgttacttgggactctggaatgatttttcatccaaattgttctattttatatctttatatcaatagagagaaaaacatcctgagctcttgaaccatttctttgtgttaaatactttttccaagtggcagatcggcgtgggggacacctgatgttattttttgttacactaacgtccgtctcagtaaggtgatgtcagaatcttactcattcacccagcagtgagtcagggtccttgattagtgaatcttgattagtgaattttaggggtctgttattgacgctagagtttctaaatgattaaaccaaaggcttgctttcacaaaataaataacaaattcattttcatatagattcatctttggtattatttatccttgatatttatccttgattctgtagaaaatagttcacatttaaaattggg

SEQ ID NO: 21516 - DNA, 1049 bp, Homo sapiens
tagctgagcgttgtggtgcatgcctgtaatcccagctacttgggagactgaggcaggagaattgcttgaacctgggtaacagagtgagactctgtatcaaaaaaagaaaaaataaagcaaacaaagaacagtttacttgtgtggttacagaaagttagtaaacaggcttttatatgctaataaccatttggactaaggagaagaggatataatatgccaatattgtagaaacttacttgacaagggaacctttactcttggagttcagtgtggaattagggtaggtgttctgttatcaattgtggtacatctatttgatggaatattaagtagtcattaaaacgattattttgaagatgatagcagcgtggaaaatgcctgtataaagacatcagcattcaaattagtttgctacaatgattacaattatggtaaatatccatgcatggaaaattaaaactagataatatttttatccattaaattggcaatggtgtggggaaatggtacactcattgtacagcagtttggctctattggaattgtaaacaaatgtatgctttgatcagatagttcttttaagaatctctactgaaataccgacctcatgtgcacaaagatgtatacgcaggaatggtctttacagtactgtacatattggtgacaatttggaagcactttaaatgctagtcaataggagaatagttaagtacattagtgtatatccaagtgatggaatactctgtagcagttaaattgaattaaggtctattcaatttaggtctgtattcttagacctatttaagataggtctgtatctgtgacactaaaaaataaatcttccaagatgcattctttgaaaaaaaagtcacaaaatatatgtatgtgtccctatgtctgcgtatacatatatatgtatataatattcccatttatggaaaacaactagattatgaatgtcattcagtgtattgatagaatgtctgtaaggacacagagtagaatattaatagtggtttctagtgggatgggaatggtgatccagcgtg

SEQ ID NO: 21517 - DNA, 1032 bp, Homo sapiens
ttacactgtggcttcctgttctctctaaagtcagataatgcttttccatttgttttctctctttcacaaatgtgttactttttcttgttttctaatgttctccctttatctttatggatttttaccttttaaattattttattgtcattttagtgtggtttcaggaaagatagtatataaacatgtggccaagctaccatctttaactatctttaatgattttgtggatgggatgtaaaaggggtagaattaaagaattgcacttggccttgggtatgtccatgggttagttatacatgtccacaacatctgaagtgaaggaaaggttggaaattactgctttataatagttgtatataactaccttgctaacttatttatatatccttatttattgtccttgcagtttgcctgcaagttgatgtttggtatttttgttgaattgaatttatttatccctagcagctaatatcttttctaaaagttttcttttcacttcagtgctttttttcattgaaccatggactcagagattaatctaaaaagaaatatatatacaaaaccaacttaacttacttcctttctttctcccttctttcaactttgcagattgcctaacagttatttcgtaactctttggacaatgaaacttttgttttttaaaacaatgcttgcttcccttctcaaaattaagaagtctgtagttatctgaactatgatatatggaacaccaacctaaattattctcgtggaatcatacagtatactagacttaaacctacaccgtatgtatatattgcctgtttctgattattcattcattctttcattcttttttttaaaaaatgtaggtaaatgggcaatgtgctggccacacagctatgcaagctgctagtcagaatggacatgttgacattttgaagttacttttgaagcaaaacgtggatgtcgaagcagaggtaagtaaacttgaaaaatattttaagtaaacatttatttcctagaaataatacttctatatcatgagatgga

SEQ ID NO: 21518 - DNA, 1048 bp, Homo sapiens
aattgaccagaaaaagcatttgacataatttaacaccctttcatgataaaaacattgaataaacttggaatagtagggaattacctcaatgtaataaaagccatatatgaaaaacccacagtgaacatgatattcaatggtgaaagactgaaaacttttcttataagaacagggcaaggatacctgcttttaccagttctatttaacagtactagaagtgctgaccagagcaattaggcaagaaaaagaaaagacatccgaattggaaaggaaataaaaattatctctgtttgcagtgatcttagtgaaacctaaagatttcaacaaaaaaacttttagaacaaatttagcagtttagcagaatacgaagttaaaacacagaaatcagttgtatgtctatacattaacaatgaacagtctgttaattgaacaatctgttaacaatgaatctttcaggaaattgagaaaacaactccatttacaatagcataagaataaaatacttaggcatgaacttaacgaaggagataagacttatacattgaaaactacaaaatattgctgaaagaaattaaagaagacagataactggaactacttcccatgttcatggattagaaaatttatattgttaagatgtcagtactacccagagagatctacatattcaatgaaattctgtcaaaatcctaaagatgtttcttgcagaaatagaaaaatctatccagaaattcataaggaatctcaagagagccccaaacagccaaagcaatcttgagaaagaacagaagttggaggactcactcttcctactttcaagacttaccacaaggcaacagtaatcaagacagtgtattactaacataagggtggacataaagactgaaagaagagaattgagaattcagaaataagcctttgcattaaggtcaattgctttttggggtccaagacaatttaatgggaaaagagcaatcttttaaacaaatggtgcttgggcaactagatattcatatgtaaaagaataaagtaggaaccttacctaaca

SEQ ID NO: 21519 - DNA, 1067 bp, Homo sapiens
ctatttcttttttaaaaagttgtttttttttagggaaaatgccaatagattgggttttgattgggcagggagaatgaggacttctttgtaaaaatatcagcttatgaatggatttaactttattgatcatgacagtgagctcaacagcttaaagaagtgtaataggctatatttcataatagttacttcataactatttaaattattttaattgtagcttttattgtagcttagggactttgaatagtcgttagtgtaatcttcggagatttctgttttggaaaatgtataggattttagagttgatttacagtaggatctaatttttgaagcaatgattgcctaagaaatgattatccccagctacagttttataaccagataaattaaaccacaaatatatagaaaatgtagtctgtgtccattttctgcttagtttggttactaagcaacttgtcttttgtgcacctgtttgattaaagtttctatacttagtaattttgtagctcctgaatctaatttgccaacttttaggttccttaaccgaataggcttgaaacaacatattatttttaaataaaagtgttccctgaaatactatttgaatatgtaaaacataatttgtttccattggaaactcaataatgattttttaaaaagtagggcagtggttagaatcataagctgcttgtagtttagataatttacagcatccaggaattggttgctggattggatagatctcagagaagaaataaagaacagtagtagtgggaatgagggcttgagaagaactgaaagaatagattttgttcagctagataattattagaaattaaggtttttgaagtgcagctgttttggaactgttgggatctagagtatgtccttgtaagtgggaggcaggattggaggatgagggaagaattgggggggtgttaatctgtaaggagaggtgatttatacctgctgacgttttttgtctgaaatgggagacaagttcatctgttgagagtggtgggtagagaaagagtaattgagaagagtgataaggacttggggacctg

SEQ ID NO: 21520 - DNA, 1066 bp, Homo sapiens
agtgttttgtttactccagcacaggagtgtgggagccctgttaggctgtttttctcagatgcaacattctgcgtccttggtgctttcaactggcttatcttaccttatatttcacctgtttgataatctttctaaggaaacaacatctttttttattgtagtttgtttgaggggaggtgtgggggaggccccttgagtcacagaggtggcagagtggaggaaggcacattactccaaacagtcctaccccggtgtcttgtgtatcccaggtctgtgcttctcgtgggagcctcgacgctacctttaggacagcaagtcagtcctaggggccaggattccttaggataaaatgggacattcccaaccttgtccgcaaaagacacgctggaaatgcaagtggtctgaaagagagggaaccaatttgaacagctctctgatagcctgagttctttctgtcttcttccaagcgctgcaagacttggtctcaaaattccctctttttagttttgctctgtcgcccagtctggagtgcagtggctcactgtaatctctgtctcccgggttcaagcgattctcctgcctcagcctcccgtgtagctgggattacaggcgcgcgccgccacacctagctaatttttgtatttttagtagtttttgccacgttggtcaggctgtttttgaactcttgacttcaggcgatccattcgcctcagcctcccaaagtactgggattataggcgtgagccaccgcgcccagcgaaattccctctttttgcttctgctgcaaagctggccctggagaccatttttcccctgtgtgtggaatgggatcgggggaccctgttgagatttgcactgttggcttgggacttgagagtcagggctctcatccttacctctgcatagggacccgtgtttggctcccaggagcagagagatggagaggctgggaatctctaaggaggtaatggttgggtgtgaagcttattttgtcagtcggggagttccgtagggaatgtgcaagggtgttgtgagttgggtgaggggtagtatctgcagattgagc

SEQ ID NO: 21521 - DNA, 1041 bp, Homo sapiens
gtgatgtctgcgatctgaactaaagtcctttgaagggttgaattatttgtgggaaaatatatcaaccaattgaaatttatacgtgtgtttgtatgtgtgtgtattaggtccaggatcatagtatatttttctctgatttcccccctccgcccccccctcccaacacacacacatcgtgttgattctcagtaggcatctcttgactatcatcagtgagggaaagggacttaaaagatgaacaataacaggacaaagccaggcttcttaagaagagtagctgtgccaactctgaacgccttctacttttagaatattggtttagaggccaggcacggtggctcatgcctgtaatcccagtactttgggaggtcgaggcaggcggatcacttgaggtcaggagttcgagatcagcctggccaatatggtgaaaccctaactctactaaaaatacaaaaattagccgagtgtagtggtgggcgcctgtaatcccagctactctggagactgaggcaggagactcacttgaactcgggaggcggaggttgtagtgagccgagataccaccactgcactccagcctgggcgacagagtgagagaatatcggttttgagagctgaagttacgctgatgcatggagctgacgtgttgattgttttaacttgtatagaactgtgagattcacatgtgcgtggctggccaggccctggcctgtgccaggtggcagggagatgatttcaggggcggatgggggcccttctgacccgccctcctgttagtgcctcgactctggttccctcctattttttcaagccactttctgatcccatgaaggttggcttgtccctcaagtgccttgtgtttctggtactcatgtcttctattcatccccaaagttattaggttggtgcaaaagtaattgtgggttttgtcattactttcaatgccaaaaactgcaattactttggcaacaacctaaatagatttactatgcaattcaatttaagtattcaaagaaaaatattcaaagaaaggtatagatg

SEQ ID NO: 21522 - DNA, 1030 bp, Homo sapiens
atataagagctctgcagagaaaattctggtataatttgaactgtgatttacaagatattccaacctgaccttttcagttgttttgttttggtacaagaaatttgttatataaacacggtggagctcttagaattatcctgttaagagtatttttatctgaaaaacttatttattttttgacctttagagatgcacaaagactagaagaattcttcaccaaaaatcaacagctgagggaacagcagaaagtccttcatgaaaccattaaagttttagaagatcggtgagtctggcacttaggtcttgagtaagaagtgatttcctccataataagaagtacattgactttcatttgtaattagttttgggattgaaagtgatctttcccacagccttctctcacctttgaatgaatactttatgaaaacaaggatctattctttaagattttcattaattctgagatcacatcagtttaccctttaaatgatatctttatctggtgtttgatgtagtggaagctcaagggtagcaatgttctaattcatttaatgctttaattccagttttacttctaagtaggtggaaactgcttcacaattctgtttctgtcgtcttttcttgttcttgctgttctcttttcttctttgcagatttcctcactttgagggagtctagggatcttctttctgagtattcctgaaataatattatcacttacttccatacacagacttctttctttcccactcctatgaggttaacactgaggattagaaaaggcttccagcatttgctgttttcccttttctgaattgtaagtgctatttaggacctataaactacctacctgctatagtaaacaatattccagccaagcgtggtggctcacacctgtaatctcaatactttgggaggctaaggtgggaggatcgcctgaggccagacattcaagaccagcctggacaaacaaagcgagaccctgtctctacaaaaaattttaaaagctgagcatgatggcctgaacctg

SEQ ID NO: 21523 - DNA, 1071 bp, Homo sapiens
tgtactaatttaggtcattcactttctagactattctagaaagctgtcattctggatttctcttcattagatccctgcattaattcagttatttcatttctctcatgttaaacagtcaacaaatacttaatgaaccacctgttttgttccaggcactgttttagaccttggggatacaccagtgaatgtgatcgataaatgtgggcctttctattggttttttaagctcattttgttacagcttaccctcaagtaactgctgaaaaagaaggcacaggaactaaattttcaaagggtccttgcattctcgaaaatatttttattctactgtttattatatagttgatattttgactggatataaatttctaggtttaaaatagttttccctgaaaactttgaaggcatttctcattgttagcattccagtactgatacagtctgccattctcgtgttaattcttttgtaggtaacagattttcttttcctttctgaaatttttccttgttctgatcaaccttcgtgatgctctgtgtgtgtgtgtttccttcattgcactggacactcaacctgttaacctaaaaactagcactcaaagtctggtaatttttttctgccactttctctattttttaatggtctctctttctggagcacttcttagtcagagactgattttttatcatcttttctcttattttctattacttgtttttcttccatgttctgtgagatttcttttattctccaaccctactattgaagttattttgacaatcacgtacgtaatatccaagaactttttattatttgttgattgttgctgtatatttatatgtgtgtgtgtgtttgtgtgtgtgtgtgtgtatactcttgttttatggctgtatcatttcccagatttttccaggaatgctagatagcttttgcttttccccctcaaggtctttttgtgtggtaaaaatctatataagatgaactttctttttttttttttttttttttggtggtggttgttgttttgagacagagtctcgctctgtcacacacgctggagtacagtggtgcaa

SEQ ID NO: 21524 - DNA, 1010 bp, Homo sapiens
aaacagaattgcttgaacccaggaggcagagattgcagtgagccaagattgcgccactgcattccagcctcggcgacagagcgagactccctctcaaaaaaaaaaaaaaaaaaaaaatcaaagaattagctgggatgctttgaatcttgtttatttctttttttttttttttagagatggattcttgctctgtctcctaggctggagtgcagtgatgctatctcggctcactgcaacctctgtctcctgggttcaagcaattctcctgcctcagcctccccagtagctgggattataggcacgtgcgaccacgcccgactaatttttgtatttttagtagagatggggttttgccatgttggccaggctggcctcgaactcctaacctcggttgatccgctttgcatttttaaagttaatatcttaattctcttccgaataatataagaattttaaagcacttaactttgatgatcttctccacttacattctgctcttgcccagtatttcatttctgtatagttttggggttttttagccctacaagctagatatttttttaaaaaattacctttaagtaaaattacctttcaattagcccaagggagaatccttgctttgctgataataaatcttacagggaccctactctaatgactgaaaatgggagggaaagacaccttgctagagagcttttccgtatggatagttggtcttctgagcgtgaaagcgccttttcttgtgtctactataaattacttgggagcactgctctgattttcttgtctcggtatttattaatgactcctacgtcaaaacttttagagatctatcctcatgactttagcctaagggcaactattaggcaccttttatttacccgtttagcaatttgtgggccatgttgcctctgatactagaattggtatgagattcttctaagaatactcccttttttaaaggccctttttcattggattttaccatcaatctgagcctatttttaaat

SEQ ID NO: 21525 - DNA, 1044 bp, Homo sapiens
ttaatttctttcctcttgctttctacattatgtgcacattgagctcatggctctcgttcatgtaattccagctttcccttctccaacataagtacacagtactgcatgcctttcctcagactgtgggttctctcctgatcttgtctgcaatttgaaatacttttaatttcacctgaagtgctattgactatactttctacttcacttctcacatagtatttcccactgggtactgtaatcattcgtgtacttatctacttaggtttggaacattagatgcaagggattacatcccttagagcttcatgtttgtgttctactgtaactccatgccatgtagtaaatgttttaatactcattgaattgattttctttccattgtcattcttctctaggaatgatcaacagcatcaagcagctgagcttgaatgtgaggaagacgttattccagattcaccgataacagccttctcattttctggcgttaaccggctacgaagaaaggagaacccccatgtccgatacatagaacaaacacatactaaattggagcactctgtgtgtgcaaatggtaagagttggagttgtattttagttctctggttttgtaaaccagtgttcatctactagtttttatgttattcaatctagtgataagaagatagtcactattctggtatcccatggtacaactatgagtttaacttctatttgtaaagtgactgagaaggcgttttctgcccgtgttatgtatagatacgtgtcatctatatgacatgtaaatataccatattttataaatgtagtaaatagtttcttttttctttttattttaaaaatattcctatgtgtatatatccaagtgggatagaaggaaaaaggaaaggaacttaatgttaatttctacctcctgtgtaccaggtattatgctgagtgatttgcatgtattattgctatgttttaattctcgtaacaggcttgtgagataactatcagctcttttgttttatagatgaggaaagatatgtttagaaaggttaactc

SEQ ID NO: 21526 - DNA, 1234 bp, Homo sapiens
atattatggtgttgagaaatacttcctatgtcattttcctctgcttttccccttctcttttgtcatctaaatgaagagaagccaaaagctgtaccttgtcttaaattttggttaatcatttgcttctaagaggtagataagaccttactattaattctgtattaaagaattgttatcactctttatttagattttcagattctacttcaaagactcctcctcaagaagaattacctactcgagtgtcatctcctgtatttggagctacctctagtatcaaaagtggtttagatttgaatacaagtttgtccccttctcttttacagcctgggaaaaaaaaacatctgaaaacactcccttttagcaacacttgtatatctagattagaaaaaactagatcaaaatctgaagatagtgcccttttcacacatcacagtcttgggtctgaagtgaacaagatcattatccagtcatctaataaacagatacttataaataaaaatataagtgaatccctaggtgaacagaataggactgagtacggtaaagattctaacactgataaacatttggagcccctgaaatcattgggaggccgaacatccaaaaggaagaaaactgaggaagaaagtgaacatgaagtaagctgcccccaagcttcttttgataaagaaaatgctttcccttttccaatggataatcagttttccatgaatggagactgtgtgatggataaacctctggatctgtctgatcgattttcagctattcagcgtcaagagaaaagccaaggaagtgagacttctaaaaacaaatttaggcaagtgactctttatgaggctttgaagaccattccaaagggcttttcctcaagccgtaaggcctcagatggcaactgcacgttgcccaaagattccccaggggagccctgttcacaggaatgcatcatccttcagcccttgaataaatgctctccagacaataaaccatcattacaaataaaagaagaaaatgctgtctttaaaattcctctacgtccacgtgaaagtttggagactgagaatgttttagatgacataaaggtttgtgttaaatgttcaaggattttgattaaaatgattgcttgtgatttcatttagagctaacaattatttctgttttagagtgctggttctcatgagccaataaaaatacaaaccaggtcagaccatggaggatgtgaacttgcatcagt

SEQ ID NO: 21527 - DNA, 1091 bp, Homo sapiens
ggcgtgagccactgcgcccggcctgttctttcctttagagattaagttattggggagggagtgctaatgggtttcattaacgtgatctgtagatccaggccacatctccttcatggccctatcctgggtgggagtcctccattcttgttcccgtaacaccagtcagtgcgcctttgttttataatgaactcttagtgtgtctcctcaccggattgttcttaaaggcaaggcttttgctctagtcatcctggattccacggtgccttgtagtgggtgcttagcaaatgaagggtggatgactgaatgcatcaatgagtgagtttataatgtgacgagctctgtcccagagtgatggaggataaggaggggccatgtgccttgagccttgccatggtctgcaccattctcatcagccctgcttatccttagccatgcctcatgtcttggtaaagctttacaaagtctgttttgtaacactttttttctttttgataaagtggtggtatttctccttgagatctttaggaatctgcctgtttttcagagcaggacctcttctcttctttcatgttgctttgactgttgtctctctttttccaagacccctgccaccctctgataaccctcgcatctaacggagccacagagtccacagctgctcataggtcactcacccacgacttgcgtccttagaggaactctgcttccccgtgaccccatcagcctcacatccctgccaaaccaggcagctcagagcttgcctgcattccgagctctggcctgtgagtgttgaccaaagggttaacctttctgagctaccatgagccacctagaacagggaccaagccttatgtttcttttttcggttttatttgagacagagtctcacccaggctgaggtgtaatggcatgatcacagctcaccacagcctcgacctcacgggctcaagtgattctcccacatcagcctcctgagttgctgggactacaggcatgtgccaccacacctggctaactttttgtgtattttttgtagaggtgggattttgccatgttgcccaggctggaacattttcttttacttctttgta

SEQ ID NO: 21528 - DNA, 1048 bp, Homo sapiens
atttggtttttgcctgattcatcagctggagactttaaaacatagccagattcaaaaccagtttcttggccgggcgtggtggctcacaccagtaatcccaacactttgggaggccgaggcgggccaattgcctgaagccaggagttcgagaccagcctggccaacacggtgaaaccctgtctctactaaaaatacaaaaattagtcgggtattgtggcgggtccctgtaatcccagctactcagggggctgaggcaggagaatcgcttgaacccaggaagcagaggttgcagtgagccgagatcgcgccactgcactccaccctgggagacagagactccgtctaaaaaaataaagaaaaaacggtttcttcccattgtgtctaatttaaaaaaatctaaccatccctccttttcttaaagataatcctgtcttccttcctttacaagaaaaatcccagtgactcccccaccccagggattttgaattcctttggtctgtattctggatatggatctggctttcagcgtgttagttgaggctcggggaggaggttttccttccaagccagctgtgtgcccagtgctcagaggtatggatggcatcaggctgactggtcaagaccaaatgctcctccagtcaccccagcctggtgacctggcccggccagtatgccactgtagtgtcagactctgtggctctcctcttggagttcctccagggtctaacaagcagctgctgccaggtgagcagtaagggccatgcttactttcatcggcacttttgctgctggacaaagctttagatccgtggacaacaaaacaaagcatgtgtctaatggatgtgtcctcaggctgaagggaaggccgttttgctttaagggtctgtgtatcttctgttaagaggtagcagctgacttttttttcttcatctgtgaacacgtgtactagggtgaaacagttttgttttgtttttgtttttatttttgttttttgttttttgagacggagtctcgctctgttgcccaggctggagtgcagtggcgcaat

SEQ ID NO: 21529 - DNA, 1051 bp, Homo sapiens
ctgtactccatcctgagcaacagagcaaggcttcatccctgaatgaatgaatgaatgattacttgttattactagagattattcctctattaaaagatattcattttctaggtggtctgtcaaggtagaagtgactactgtggcattaattctttcatcaccaacaataaacccagtaggtgtttaggataagaattcatttctcctaagaaaggggagcagcaaggagaggtggtctcatgcagcattagaaagaacccaggctggctgctgtggctcacgcctgtaatcccagcactttgggaggctgagatgggtggatcacctgaggtcaggagtttgagaccagcctggccaacatagtgaaaccccgtctgtactaaaaatacaaaaaattagccggccgtggtggtgcgcgcctgtaatcccagctactcaggaggctgaggcagaagaatcgcttgaacctgggaggcagaagttgcagtcagccgagatcgtgccattgcattgcagcctgggcaacaagagtgaaactccgtctcagaacaaaacaaaaaaacaaagaaagaaagaacccagcagctagatcccagcaaactgtggtcccacgatgcccagggaatgctctctggcctcatgttcattggccgtctctaggaatataaggggcctcatggaagagggagggatgtctgtaaaccatcagcttcatcttcaggctttctgttcagttggatttcatttatgtcaaagtggttgcaacaaggcatcactggcaagcgcccgaagagggacaacgggctgtcccatcaccagggctcacctggtcattttcatcggtgtgactgtgttgtctcatggagtaagcatcctcatggctctttgaggtgcacacaaaagcatttttttttcctctgacttgtcctcccagggacttgaagttggacggaggaagacaatcaactggtgcagtgagtttgaaagagatcattggtctggaaggtgtggagctgggtgctgatgggaaggtaaggctgccaggctgcca

SEQ ID NO: 21530 - DNA, 1078 bp, Homo sapiens
tcctctatgttagagtgcatcagaagcacatttactgtgctatctatatcgctatataaaagtgttttataaaaacccagaataggagcacgacgcatgattggtgtttgaggcgtttgccagctgggacaaactgcgtttggagctgtggttaagctgactaaggaggcggtggctctttcttaacattcccacgtgcccagggctgttcatgcaagattttaatggtgacttgtcctggcttactgggacagtctgtatgaggcatgtcaccacactgtcgcctcatagctgcaagagagaggcaccagctgaagttcccctgactgaagagagcctgtggccatgtaaaaagagaattaaactcttgttgctttttgtatacctgtatgcgtttgtgtagacgtgtgtctcaccagtcacctttgccctgcattgctgatccccttgcgcacactgattctagtgaggtcacagattcggagcttcacacaccagcccagagaaagggcgatggaaccgaaccgagggtctgcagctttcgttagcagagctgtcagattcttgacagtcttggaggatggagaaattcaagcagcagctggtgagggccaaaacagaatacttggcttcttcagaatcttagattgcactgagtttagtcctaaatattttgctaacaaatttccttggccagaatcagttgtaagacagtgatttgggtggtggggggagggaggagggagaggatatgattaatgtggtctctttggctgatcgaaagctagatcaactggtacttagggcacttgctgtttataaagcaaaattgagaaaatattcaaggtgcctccatcgcctgaactacaaaatgcccttggccttcctcacatggggtctgtcaccttgcatctctgataagccatccaccttcctggtcagtgcctacagggggagagcctttctgagaagcaggtcctgtggtatctgagaatggtctagagagctccccactgcccatctgcccccgaatttcctgccaagctctggggagtggggtggggggagggacgtccga

SEQ ID NO: 21531 - DNA, 1046 bp, Homo sapiens
tacaagtgtgagccaccatgcccagcctgttctagttttttaaaaaatgcaactactactgatcctataagctaaaattatgttgtgaaaaaagcattttctaagatagatgaatctcccttgggaggaaatagaataatttatcttccctgagctttagaatggatagttttgattagccgttgatggtgaaatatgttttaatattgaatacacccgtaacgttttctgtttgccttagctctgtaacgctgaaattaactttggctgtaggtttgttactgtaacctgggatcacttttctctttctcacattccgtgtgacagtgatgatgaatattgcattctttgggactgacagtcacagtaagtgcttcggctgtggctcttaggcttacccaaatcagtcctccttctgtctggagaggtggggttgggaagtcagaagagtggaggtcaggaattcaggaaaagggaaagaagtcatttatttgcttcgttttgcctttttccagtgtaattgattttaagatagaactgaaagaatattcaacacacactctctctcttttttttttttccttaaacagaactttattttctcacagttctggaggctagaagttcaagatcaagatgtctgcaggtttgctttcttctgaggcctccctcctggcaggcctctttgcagatggccaccttctcactgtgttctcacagggtctttcttctgtgcctgtccctcgcagcagtctctcccggctctcttttgaaggagattggagtgcagaattggctagtctgaggtttcagtgtgcaagacgtagtcagatggctcacatttggaaccctagtagtaatgttttattctttgtccgatggcattgggcgggttgacccagcctgcagtcaggatttccttgtaccgttcacccgggagttcagaatcgcactctggctgaaagttcagcaagagcaccattgtcagcctgactgccctgtcttgctggaccagccaaaagcttagttactttctggcacagttg

SEQ ID NO: 21532 - DNA, 1046 bp, Homo sapiens
ggcagaattgctagttctcaaggtctgtgatgtgcgttgtggggcccttctccttgaccagccataacccttaatgttgttgttcccccttcaaggattcggcagtgctgttgagagagcttacgcacaaaatgattaaactttagtggaaaatgacttgtttattaatggttaatctatttccaccctgtaatctcctatctccctaagacactagaaatcaggtcacataagttctgagttggagagaggagagaagaggtccagctaatgtccctgagcctggaacaaaatactgccatgtgggaaaggagtacacgccatcacagagggcatgagcttcctgcttagaaaggctactgaaccctggagaccctggagaactggaggagttctacactgggtggttaattctcccaatacacatgtgtggaggtctccccaagccttggtgaaaggctcagtttggcagcaatccacttcaacatgactgcctgcctttccttgtctgctggtttgcttctgcccaacaggctgaacttgaacaaatgctgatgaaatccacatccatgatgaggtagaaatcttataacaatttaaagggattcagaaacttaatgggtagagccaagcctggacaatcagaaaaattacttgctaatgaggcagaacccaagaagaggggtttaaccaagcatgtgtaccatgttgaccttgctgcatggataagcggaaggacctcaaatttaattctgagcttcctagcagccaactcaaaaagggaaatctgcttggtttcatatttcactatgatcataagctaaaaagtaataagttacttagaaaaaacatgattgttgacactagtgccaaataacaattttccctaggggtggggcagagtggtcatcacgaagggaattctctaatcaatgacatctttaaataacatatttacagcaggtgtattattaaccatcagtctgggctgcaacagaggaaaagcagtgatttggcagtgccaatgggactcagatgggtaccca

SEQ ID NO: 21533 - DNA, 1033 bp, Homo sapiens
tcttagtctgttcagctgctgtaacgtctgggtagcttataaacaatagcctcaaagttctggaggctggtaagtccaagagtaaggcaccagcagattcggtgtctggtgagggcctgctttctggttcatagatgccactttcttgctgtgtccttacgtggtggaacgggcaaggaagctttctgggcctcttttataagggcacttatcacctcccagagggcccatctcctaataactggtgattaggtttcacctatgaatttggggtggggggggcacaagcgttcggaccatagcagagagctactattaatattttgttagatacgtagtattttatacatactttaaatactcaagattatataatctacataattttatatcctaattttttcacttgatatttttagctatttccccatgttttcccaatcattaaaaatgctttgacatcatttttgatggtacagagttttgttccaagtgtttgttgagtacccactgtgtgctgagaactatgctctattgcaaacaaaacacatacagcccttggtgtcatagaacttaaagtcaaacaaatatattgttgcttgctgagccattcccctacaattaaacattaagattattcccatacgattaccatatagtgttgaaatgaaaggtttagagtgttggctaagagcataggttctgcagtcaaacaaagacaggttggaatttcgcctcttctagttataagctatgtaacgatgggcatattcctcaacctaagccccagttttccaatctggactatagggatgatggtacctaccttagagagttactgcacagattaaatgagataattcatgtaaagcacttttcacagtgtgttaagagctcaattgctattgttagtagtagtaatagtggtagtaataatattctcttcgtgcatgaagtttaattggcatttggatgtattttttttgacagtgaaattttattttattgaattttgtatgtataaaacatgcca

SEQ ID NO: 21534 - DNA, 1069 bp, Homo sapiens
ttagaaaacctaaggactcttccagaaggcttctggaactgataaacaacttcagtaaagtttcaggatacaaagatcagtagcatttctatgcaccaataatgttcaagctgagagccaaatcaagaacacaatcccatttacagtaactgcaaaaaacaaacaataaaaaaagcccaaatctaggaatacatctaaccaaggaggtgaaagatctctacaaggacaactacaaaatactgactgaaagaaataatagatgacaaaaacaaatgaaaagacattccatgctcatggattggaagaattagtaacattacagtggccatactgcccaaagcaatctacagattcaacgctatttctatctatgtcatttttgacaaaactataaaaaactattctaaaattcagaagaaaccaaaaaaagagcccaaatagccaaagcagccctaggcaaaaagaacaaagccagaggcataacattacctgacttcaaactatacagaatacagaactcaaaaataaagccacacacctacagccatctgatcttcaacaaagttaacaaaaataagcaatgaggaaaggactttttttcttttttctttcttttcttttttttttttttttttagacagagtcttgctctgtcacccaggctggagtgcagtggcacgatctgggcttattgcactgcctcccgggttccagtaattctcctgcctcagcctcccaagtagctgggactacaggtgtgtgccatcatgcctggctaatttttcattattagtagaaacagagtttcaccatgttggccaggctggtctcaaactcctgacctcaggtgacccacccgcttcagcctcccgaagtgctgggattacaggtgtcagccaccgtgcctggcaaggaaaggtctttctattcaataaatggtgctaagatagttgtctctccatgtgcagaaaaatgaaactggacccctacctttcaccatatattatacaataattaactcaagacggactaaagatttaaatgtaagacctcaaactataagaatcct

SEQ ID NO: 21535 - DNA, 1220 bp, Homo sapiens
tagttgacctactccccacccatcagtccccactccagcctgtcttttacaagggcactacctgacgtaggaaactgtgcagagcttgtattagatatcaccagcttgctcaaagaccttcaatggcagccagtggtctgttgtcttttttgagttccccgaaaacagaccctgaaaaaggaatggagagcaagtcatttatttgggaggtgatcccaggaagggagagagtcagggagtgaagggaaccatgataaaggtgcaatggcaggtaatggcagttatctgccattagtggaggcattaatgcttctggggcattcaccctctggcacttacagcttggccttcaggaaggctgaggagcttctgcagtcccaaaacaagcccctggcagagagtagcagtggtgtgcagtaagctgtctctgagggtgaaggggtgagtactagaggatgtgggtgttacatttaccaaatcatttgttccataaatattttaaaattccctgttatgtgcaaagtaccattctggctgctggggacttagcagagaacagaacagaaaaaattcccagctttcttggagcttatattcctgtggagaaacccagataataacatacataatatagaaacccaagcaaggaaaatagctaattcattagactgtgagaggcagagttgtattctgaacatgggtgccacttttaagggggagccattcacatcataggcataaactaactcatgtgagaagattccaggcctctgcgctgggttccagagccatggggagtttcttacataaacccatcacggcatccacagggaggcacaggttctcagaagggcacgcctgcaccaaaggaagggcacagcacacgcacacagcccacgactgggcaccatcggactcatgctcacatctcctgagtttgcctctcctaccccagggcgccagcagaggcctggtggtcactggggaggaggtagtgccagtcatgtgtgagcacgagtgcccctcctcctgcagcgccacggtgtgggccagcagagaagatggtttctgaagagctctccttggcagtgaagttcaggctctacagcaacatagtaactcaggtatggactggaggcagccttggtgataagcgctgctgaaaaaacaagacagagaggaggttagggaatgtgaggtttacagatttaaattagagc

SEQ ID NO: 21536 - DNA, 1027 bp, Homo sapiens
gttttttaacctttgaatactctatgattccagttattcatagctcttcagcttgagggtttttaattttttttcctcctcttttttcctcttagaatcaagtgaccctgagaggacgtgtaccacacctgggccgatacgtctttgtcatccatttttaccaagcagcgcacccgacgtttcccgcgcaggtgtcggtggatggcgggtggccacgggcaggtgagctgcagtgagcaggccctgctgcctgcctcaggctgaatctacagtccggtgcatgacagaaagtctctctctctctctgccaggctccttccatgcctctttttgcccccatgtgcttggctgccgggatcaagtgattgccgaaggccagattgagtttgacatctcagagcctgaagtggccgcaactgtgaaggttccagaaggaaagtccttggttttggtgcgttccactcgttcctcaacttgctcctcacatgcctgcctggctggccattctgggtgtctgtttagctcatggaaataattcttccaaggaattgaagtcatatttgtagaaaaatgtttaaattttacagctgtcttttaccccccaataaataaataaataaagcatgtgacaattaaagtcaagggaactaggacagaagagagtaggcgtcgcccctctccaccagcccctgcttcctcatctgaccagtctctggagcatttttcgctcctttcttcttttggcccctgcagctgctttctctctgttttccctgctttctctagcgctccttgggtgatttctcttttccacttgtcactgtgtgttggcgttccttccgatttgacaccgagcccctcattgtgtcatttctccttggatacatcttccgtgcccatcgattctattctctccactgtgggaaggacacccacatctgtgaggtcatctctgatctttcctgaactccagtatgtgaccaccatctcctgcgtatctgcctggccagagatcttgaaagtccct

SEQ ID NO: 21537 - DNA, 1035 bp, Homo sapiens
cacatgcagtgggcatctctgaggtgacccctaagaagcaagtctactcaatgctgtgcagacactggctacttcaggggccacaaataccaatggaggatcaaaatgcacaaagtaattgcctcctgatgctttattttattttagaagtcagtccagctctcaacaacctacagcaaaccctgaatattgtgacagttcagaaagaagtgatagacaccaatctcacaactctccgagatggtcttcatgggatacagagaggtcagcatcttcctaatccattgtactcggttggcttcttttgttgaacgttttagatacttatacctccctatctgtgtgtgcattaggtgatattgatgctatgatcagtagtgcaaagagcatggtcagaaaggccaacgacatcacagatgaggttctggatgggctcaaccccatccagacagatgtggaaagaattaaggacacctatgggaggacacagaacgaagacttcaaaaaggctctgactgatgcagataactcgggtatcaggcgatctctggccaggacatcttagccattctctccattgttatgtgttttggtccatttccattcttccctggtaaagtctgatctcagaaactaaaacattagaaaacagctccacctgatacaggatatattcaaagcgtatagatatcctgctagttggaaggaccagacaggatttttaatttttagaaaatacattgaaaatgctattggtttgcttttttacaaagtggagatatatgtttctaaatcatgaggcattgaattatgattgatattaagaatcagaaaacaggctgtgttttctgtgcgctgtggctcatgcctgtaatcccagcactttgggaggccgaggtgggtggatcacgaggtcaggagatcgagaccatcctggctaacatggtgaaatcctgtctctactaaaaatacaaaaaattagccaggcgtggtgatgggcgcctgtagtcccagctactcgggaggctgaggcag

SEQ ID NO: 21538 - DNA, 1065 bp, Homo sapiens
gttccccagttctctttttactaattccaacttgggcaggtcagtggtagcccccgaaaggtcttattcttcctttggaatgaggacttacagtcagcatatgggtagaaaaaaatttaaaataacctttttttattgaatatcagtggtatgtgtgttcgttatggaaaaattggaatatgcagagaggcattaaaatcacctagaatctcaccactccgaaatctgtttgtatatagttatatgttcattagtcttttaattcacatgtatttttttacaaaaatcatgatgataccatatatattgtttttatatggttttgcaaagtctattgtgtttcctaggtctttaactgtagagcattttattctatcagatgaatttaccgtaatgtatttaaccaccctccaattattcagtaaatggggttttttctcttttctttttttttctttttgcaattacaagcaacactaaaatgaagatatcatgggatataaatttatttattttcttaaggtaaattcttagaactaacactatcaggtcaaaggatataaacattttaacgattgttattagctattaccaaattgttcccccaaaagtttatatctgtatctgtttacactcagaatcattttaagtttgccttaatccctaatgccactgaatatgaacccaccaaagcttgccgatggtcttcaagatgggcagcagacatttacattcatgcaagccagcttgtagaggtccaccctgatccaggctgatctgagccaaaatcccatcacctggaacaggtggtcagctggtgggtgtttagctctgaggggcgatcctgcaaaacaccttaggagagggggcagcctgatgctgagccctgcagaactggagctgggccacggacgcagccaggttttcagaatgcatcacactcgagaacaccaaaccggtgccaagcctgggccgtgctcccagaaagggttggaataatgtgctgaactctcttcgcagcactgggcctcagtgatcggtccagccagccggcttcaccctcct

SEQ ID NO: 21539 - DNA, 1023 bp, Homo sapiens
agctgggcatggtggtgcctgcctgtaatcccagctactcgggaggctgaggcaggagaatggctggaacctgggaggcggatgttgcagtgagccaagattgcacaattgcactccagcctgggtgacagagtgagactctgtttaaaaagaaaacaaaccaaggaccaagtgaaccatgttaggtcgagctcttctaacagcaagtgatgtgcagcctgagaggacgatcgcccgtcctgcagtgcattgtcacgtgcccgatgcacccgggtgctgtgggggatgcagacagttcttcaaggagggaaaatggtttccttgcgttgttgctatggtttcttttcccccctcttaaatgataagatggtaggtgaagtcgaaagggccaggttaggtaccatgaataattaattgccgcagctctcagaaacctaattttagccaagaataagaagcagatgtggcaacagtaggccctagtttcagcttccttcatttttcaaatggcaaagtggctaatatttgagcagggaaagggaaaaggagggaaaagctgcagtactcagcacttgattgagatgtgtctgttcctgaaaggcagaattctgtgtcatcccttccttcactgactcggatttgtgaaacacctgctatgtgtgtaaggtggatatgatatatagtagggtagggtaggagcccatactgttattcccatatagtgctgtggaatgagaaaaactaatgtgtattttgaggcagattgtggggatgacagatgctacaggagtgtgccgtttgatctaggttcatgggtgtgagcactggttagggattcctcacaagggaattgaccccctcactttttttcatgtaggtttaagtaacctattaaatgggaaaagcagactattattaactgtagaatttaggtaggtactaagtagatgaaaaagaaaatggcaacagaaggttaatgtaaaatagagtcctggatctcacacacactgtctttctctgaca

SEQ ID NO: 21540 - DNA, 1016 bp, Homo sapiens
tcttttttcagaaatgatgttggttatcaaggactatttacttttcttgtggcacctaaatgtgtttctgaagtcagttccaaagaagaagttgtaaaaatgtcttgataattgaaataagaagatgatctcctaagaaggggaccaaatcagctatttaaattccagtatgctggctaaacaatcagtttcatttcttgagagtcacatttttatttcaaagatgggattataaagaactgaattaaatttaattgaagtaaaaaagtaaatacattaaatgaactttatctgttatatttgtattggtgtatatttgtcacatacacatacatgcaaatagatgttaacatacacacagacataggtaaaaatcatgttggtgtcttcacctcatctgcagctcttggctctgagtgagctccagatatatgggcagtatcgtctgtagggagtcaagaatggaacagttcggattgcagtaaaggctagggagtcctgcaacgttgaagtcatcaagtagctatggtcctgcccttggagcctcattatataatctttctcctatttgaagctgccttgtttgttttttcagaagagacacagccctctctgcccgtccaccactctgttgtgtcctccccttccctcactccgttcctgctgagaaagggacagtgataggatgtgcttcccccaaaccctctcagtgtctgtggggatggctttgatgcttgacctttacgtcgccatattcatgtcacccaggtttgctggttcctttcaagagggtggaggttcttccccctcattttcaattccctacgaagctctgtgtgaaagactttctttacacttctatccccggcgtgcctgtgttctgtctctggaccttacttccatccatgacttcgggtgccatcaactgtgagaggtgccttttaaaagtgggctttagtgttttctttctgtatgtttattaagataaagttccagtttccatcagtgacccccag

SEQ ID NO: 21541 - DNA, 1028 bp, Homo sapiens
ggtgtgctggctcacgcctgtacactcccactttgggaggccaaggtgggaggactgcttgaacccaggagtttgagaccagcctggacaacatggcgaaaccctgtctctacaaaaaatacaaaaattagccaggtgtggtgtgcacatagtcccacctatttgggaggctgaggtgggaggatccctggagcctaggaggcggaggttgcagtgagccgtgatcacgccactgcattccaacctgggcaacagagtgagaccgtgtctggaaaaaaaagaaaaaagggctctttatttagcctctccttgctccacatcagaatgttaatttccaactgcctcattctgtctaagtcatattcatttgagaatgtggcgaagtacaaaagtatgtcaaggtacagataaacgtcttgcattccagaaatatatactatttacatttgctcaatacctgagtattattgactataattatcagttggagatctgtgtcttctaaatagtcattcacagtaggcactggaggtggtcttatgtcagaaatttatacagatcctgaaaggacaaatggagatgtgcagaacatccttgtggtttgaaaatctgtgtgtaattcactaatctgcaattggtctgcatagccagcagtaacaaacagcacacgtgtggtctggttcttgggaactcactgaactcccctaccttgtctcttatagggcatatatttcaaggtcagcgtcagcttttatctgctatatgtatctctttcacatgtgatgttgttcacattggagagtcactttcttatactatatggagttttattaatgaattaggaatttcagaggccacttctttctgcccttcccacccacccctcctcctgccccagtcccagccaacactgtttttctcctggatggtcacatcatcctgactccctgcttttgctcttcttgccctgcagtctgctctaacatatctgtcaaagtaacttcgttagtaaaatttaggttacatta

SEQ ID NO: 21542 - DNA, 1108 bp, Homo sapiens
ctgttgcctctgcagtctccttgcccaccagctatggccatccccactccacccctgccccactggcctccttccttccttaaatgcacagggcacagggctgcctcggggcctttgtgctttctgggccctgcctaggacatttttacctttgatatctgctttcaccagttcctcacttccttgagtttgttcagagtcacctcccagggagaccacccacctcatccctgcccagagacttctctcaggacactctacgtgaaggggtttccttatttgtttattgtctgcccctccccattagaatgagaacttaagctccacgaggacagagacttcgtttgggccactgctttatctcaaatgcctagaccagtgcccagcgcttagggagcagggtgtttgtgtgtgtgtgtgtgtgtgtgtgtgtgtgtgtgactgtgcatgtgtgtgtgtgtgatgaatgaatacaaagtacagtctcttgttcttttcctctcagttgtgctgtgatgtagctcctggacttttgtcagaatgggagcagccatatttatggcatgtggaaacagttccctaattatgcaaaatttatgaattccacatccccagtagtattaaaagctccatctcccccatcaaggactttctaaacgtaactctaaaaccaaaacatattaagaaaaagattgataaaattgatcaaaagattgatagaatttacataaaaataaacttctgtattgtaaaaatatcataagcaaagttcaaaaaaagaaaaaaaaaaccctggatgttaacctactaaatgttagcatctttagtatagaaagagttctttcaaaattaggacataatggaaggataaataaataaaagcacagaaaaagaaaaatgccaaaacacctaagctgggaagtcaggaaataagatatacacatggccaataacatgtgaaccttgcaaaaatccaggaaatgcaaattaaaacaacatggaagaatgattggctaatactgaaaacattcagtgtgaataaaagatacagggaaattgaccctttacaaactgttggtacatatggatagttgataaaatctttatg

SEQ ID NO: 21543 - DNA, 1026 bp, Homo sapiens
gttagaatgaaattaccccctaatttgttaaactgtaaatcctgtctagtcactgaagtttgtttataaatagtcaaaaaaaaaaagtattaagaaagaactgtctgagaggctaaggcacgagaatcgcttgaacccgggaggtggaggttgcagtaagccaagatatcttgccactgcactccagcccaggcaacagagtgagactctgttcctccccatccctccccaaccccccaaagaaagaactgtcaagagtgaaaatttgctggtaagtgagagtgaatcacttactggaggattggggccttatcatgctaagcacttttaacaaattatttatattcttttatttgttggtcataataggtaggtagcaaataaggaaagaggtctctaagagtaaataatttgtccaatgccaggcaacccataggtgtcgggggagttttagctcaggtctgtttattctttccacaacgctatgcttatttttttacttgtatgtgtacggtatgcctcattgagtgtcagtactgaaaggtgattcagagaactttagattccagtcttttattttatataccaaggaaccaaaactgaaacttggcagagttaaaataatagcatactaggaccatagtctaattatgttcctagcactgtattaaaacattgcatgctatttacctctgagaaacccatacaaaagagagaaagaagataagttgtctttaggaattggtcgttatagaggaagtggggatttgcttttgggaattttctgctgacgtgtggcagaagggtgtactaactacatttgtgctcttattggatagaataagataaccaatagttgaagaataaaatggaaacactgattaaagtaactttttaaaaaggttatgaatcttatactatttcttttatatctttctttctttcttttttttttttttttttctttctctgagacggagtgtcactctgttgcccaggctggggtgcagtggcataatctcggct

SEQ ID NO: 21544 - DNA, 1041 bp, Homo sapiens
agtaaaaaaaattgagacagggtcttgctgtcacccaggctggaatgcattagtacaatcagggctcacttcagactgacctccctagcataagcagttctcctacgtcaaacctactgagtgactgggactacaggtgtgcctcactatgcccagctaatttttttttttttttggtacatttgggatctcactgtttcccaggctggccttgaactcctgggctcaagtgatcttcctgccttagcctcccaaagtgctgggattacaggcgtgagcgactgcacctggcccctaatctcctttttaaatgtcatctttattgaggtaaaatttttgttattaaaaaaggggaacctaggctgggcgcagtggctcacgcctgtaatcccagcactttgggaggctgaggtgggtggatcatgacgtcaggagatcaagaccatcctggccaacatggtgaaacaccatctctactaaaaatacaaaaattagctgggcgtggtggtacgtgcctgtaatcccagctactctggaggctgaggcaggaggatcacttgaaccagggagctggaggttacagtgaaccgagattgtgccactgcactccaatctggtgacagaacgagactccatatcaaaaaaaaaaaaaaaaagaggaacctggctgggtgcggtggctcatgcctgtaatcccaccactttgggaggccaaggcaggtggattacttgaggccaggagttcgagaccagccaggccaacatggcaaaactcggtctctactaaaaatacacaaaaattagccagggtattgtggtacatgcctgtagtgtgagctacttgggaggagaggcttgagaatcgcttgaacccaggagcagaggttgcagtgatccaagattgcactccagcctgggcaacagagcaaaactctctctctctctcaaaaaaaaaaaagatcatttacggtgaattgagtgctgaaacatttaataaaggtgtagcaccaatgaaattaagatatagagcatttcattccc

SEQ ID NO: 21545 - DNA, 1045 bp, Homo sapiens
tttttttgccattactttcaatggcgaaaaccgtgattacttttgcaccaacctaatataatttcaatttttgaaagtttattgaggtttgttttgtgtcctagtatatggtctgtcttggagaatgtttcgcatacacttaagaatgctattgttgttaggtgaagtactccatagatctgagttaggtttagttggtttatagttttttcaagtggttgatttccttgctgcttttctgtttagttctattcttcattgaaagtggggtattgcagtgtccgagcaattgttgaattatttttccttttatcactttttgcttcatgtattttaggctctgtgtgtgaggtatatgtgcttaaaatgttacatcgtgttgatctgttagccccatcattacaaaatgcccttctttatctcttgtttaaagtctattttgatattagtatggccactacagctttcttgtggttctgtttgtatgatgtcttttattttcaactcttttatatctttgagtctaatgtatatctcttgtaaggagcatatagttgaattttgttttttatccaacctagcactttctcccttttgactggattattttgtacattcacatttgcatttaatgttgttatatatatatagttggacttagcctgccatttacttttgtttcctatatgtttcttttactttttcctctatacttttcctgctttcttttgtattaagcaaatattttctagggtaacacttatcctttgtaattttttcaacatgtttttgagtgtttttcttagaggttgctttagggcttacaatatgaacctcattggaatctccttcatgtgtatattaacttatttcagtgagacagagaagccctttctttcatatagttcatttctggctttcctctgcgtgcgtgtgtgtgtgtgtgtgtgtgtgtgtgtgtgtgtgtgtgtgtgtaattattgctttataccttgcatctagttatattacaaacccaacaattattatgttacataattttatg

SEQ ID NO: 21546 - DNA, 1031 bp, Homo sapiens
taaagtgttctaatgttcactgcagtactgatcttaaattactaacgctaatgactttgtgttatcttgctcccctccaccgccaagaactctagctcacaattaatcaagaaagtggcagtgacacctgttaaaaaattggcacaaataggaactactgtggtaaccactgttccgaagccttcctcagtacaagtaagttgtgctggccattcgtgcacttgttgttctcttaacttttaaaaaaatcatttagctatctcctgttagatatgtaagttactgtgtgacattgaagatagcaattcagtaatatatgatggcacttatcaaactgggaactgttggaggtatgggaaacaagataaacatggtgtacattcttggaataccagttttacttcagtgtattaagttaatacaaatctgcctaatagccatgtgttgcagtatctggaagcaggttctgagataaaatttgggatatgtagggataaatacccatggaaggaaaggagagtagataagggtttaaactagatgcaggcccaataaagccttagccatcttagtggagaactttggaggatatatggccggtcagcattgtcccactatgggttaacatggttggctgggccttaattcctactctctgttcagtcactggatgtggactttcctgggaaagttacctttgggcaaggtgatcctctgcagctgagggaagcctgatggaacttataaatggaggctgtctaatatcattcctagcagctagctaggacagtacatatcactccttgtcatggttcatcacaggctactccttgcatcacttgtatgtgtttcctcatacatgttggagatcagctgttctgggattctcatggttttcgtctttggggaaacaaagaggaggctaatacgatgaactacagtccccactgctgcagctggtttctggtggcacctgatattaattatttccctcttccactgtgccttcctagattcccttcccctcaact

SEQ ID NO: 21547 - DNA, 1019 bp, Homo sapiens
agcacccagaactgtgtcagtgcaaactttgaacccacttgctggtccagtgggagcaaaagctggagttgtgacacttcattctgtgggcccaactgctgcaacaggaggaacaacagctggaactggtttgcttcagacttcaaaaccacttgtgacatctgtggcaaacacagtgaccacggtctcactgcaacctgaaaagccagttgtctctggaacagcagtaacactgtcccttccagcagtaacttttggagaaacttcaggtgcagctatttgtcttccatctgtgaaacctgttgtttcttctgctgggaccacatctgacaagcctgttattgggactccagttcaaatcaaacttgcccagccgggccctgtcctttcacaaccagctgggattccacaggcagttcaagtcaagcaactagtgagtaacattttgtttcttccccagttacttattttgaaaattttgaacattcagaaaactggtaagactagtagaaaactagtaaggctatatactgtttacgggtttgaccaattaatttttttttttttttacctcatttgctttgttttcctctttctactcacacccacaaacacacatataagtcctttttttaaagacagagtcttactctgtcgcccaggctggagtgcagtggcacgatctcggctcactgtaacctccacctcccaggttcaagcatttctcatgccttaccctcctgagtagctggaattacaggtgtgcaccaccacgcctttctaatttttgtatttttgttagagatggagtttctccatgttggccaggctagtcttgaactcctggccttaaatgatccacccgccttggcctcccaaagcactgggattacagacaggcaatgagccaccacgcccagcagcaaacacacacgtaagtctttactgaaccacctgagagtggttgcaaaaattatgacagtgcatggtgtatatctcctaaaaggttttttttgtaa

SEQ ID NO: 21548 - DNA, 1077 bp, Homo sapiens
cagagaacatattcttgaacatataatttcaattttattaaatttattgagacttctcagtgtgactaattttgattaatatctcatgagcacttgggagaaaaatacgtattattcagtttggggaagtagttttttgttgtctacatcagtttggtgaaggtgggtgacagtgttcacatcttctataccctgggcttttttttggttttatttttcagactgtttccatcacttacgtagagtgggtattaaaatctcccactctgattttttttttccttttgcttgttttttcctttagttctgtcaatttttgtattatatatttgaagctctgttattgggacatctcaagccactagtcatagactagggagtgcatagactagggagtgctttcagaccaaaagacataaactcacaaattttacccattactgttcccatcatccaacggttgacttacctctgttttctgcctgcctttattaagtctccaaatgattgccttttaaaaactgtttgtagattttgtaattgttattgatcaaactattgtagcattactagaaaccacgaccatcatttcttttttaatggattattgtcctgtggtatagttgtttgcctctatgttcttgaacaattaattgtagttattttattgtgtgcatgtgtggttttctttggttgttgttgttgttttttttttttttgagacagtcttgctctgttgcccaggctgaagtacagtggcacaatcatagctcactgcagccttgaacttctaggctccagtgatgctcctgcctcagcctcccaagtagctgggactacaggcatgtgccactatgcctagctagctttttttaaaatttatttttgtagaggtggggtcttgctttgtctcccagactggtcttgaactccaggcctcgagtgatcctcctgactcagccttccaaagcgctgggattatagacatgagccaccacaccctgccatttgtggttaaagtcaaatgcttaatgtttccaatgtccgggttacctgtgactctatttctattatctg

SEQ ID NO: 21549 - DNA, 1033 bp, Homo sapiens
caaactcctggcctcaagcaatccacccgcctcggcctcccaaagtgttgggattacaagtgtgagtcaccatgcctggccacgtgagtacatcttgatttatagtaggcagtttctgtataaaacataataagtataatttacaatggaatagaatttttaaagtaatatttattgaatggcattcaaagctctattgtgtatagctttcagctggaattcttttgttgtatatcagtagcgtatttccaaacatttagttgcactaggcaaaatggatggtatctcccccacctagaagacctcactaagttagcttgaagctaacacttccttaacctgctgtcttgtatactacctattctgactgattttcccgagctttccttttcctacactcatttgttaatacagctaatgccactgtctacatttgcgtatatataaaataacaaaagattatcagcccttttaagtcaaaataattatcatttggttatatttggattcagtttgaaatcaccattattttgtagactttgtttgtaataatctttatgtcacagctttagccctgtccttatatttcagttcatccctgataggatttatttttatctgtacagtgtaggaaattctactccatagattttataaaagtgagttactctttttaaaaaagtgaaatccccccatctctttccactcttgaacatccatttacttttgataatctttcacctggtttgatataattctttaatcattagtcataaactgagatctaagtaaataagtagaaagtgacatgtagtacagagcttttgatctggctaccaggtgttttcccactgaagatatgttatagtcgcctatatgactatggccctgaagaagcttcattcagtgttttccagttgaaaggtgctatttgggttgctttagatgggattcatttgatggtgttgatatcatttggtctgggtcattacattttcttggctaaaccatttaatatgcagtggccttaaca

SEQ ID NO: 21550 - DNA, 1054 bp, Homo sapiens
ggcaagtgaaaattacatcctgtgtagtgataccaggtcacagctcaaatttcttgaaaagctggatcaattggagaagcagagaaaggatttggaagaaagagaaatgttacttaaggcagccaaggtaagggccagtgtgatttatgagtgaatgtggcctggcagtgtggtcagaggtggctttatcgttggttgactgtcttggttttattaggcctttagatttctccagaggatttcctaaaacgaaattactaataggatgtctcacagccaggatggtgtggtggctttcagttaatttagtttaatgagtcataatcttttgtcttctcacatttcctgtgtgctctccccatcctcaaacccaggtaaaatgtttcgtaaaatttcagggtctttttaggaatccaatttgatacatgccaagttgaagttgatagggaaaatttggaaagtagacaggaaggttatgggtaaaattagtaatttggattttgtggaacaaaatacaggctgggtggaaatagagtaaaagaatagcgaggcttctttatttaattttatttttggagacagagtcttgcactgtcacccaggctggaatgcagtggcatgatctcggcttactgcaacctctgcctcctgggtttaagcagttctctgcctcagactcctgagtagctgggactacaggtgcctgccaccacgcctggctaattttttttgttgttgttggtttgttttttagtagagacagggttccaccatgttggccaggttggtcttggaactccgaccttgggtgatccgcctgccttggcctcccaaagttttgggattacaggcgtgagccacccgcctggccaaggctatttatttatttcccttctcccttatttaaacgttttcttgggctattagtgtcacatgaggtaaaagctaattccactacagtttccattttgaagctccacatttcttcgtaggctttgggccattgtgagaaatcttaaaggctgagcactggagtcttaatttttgttttaag

SEQ ID NO: 21551 - DNA, 1048 bp, Homo sapiens
attgtttttattcatttaaaccaacaattactctttttttcttttccttcatctgtaccaccaattttttagttttcagtgttcctacaagaacaacgtcatgcctcaactggacctgactgacatcgttagcatcattttcagtataagcttcctccaggctagaactgcagcagccagcccagatgatgagggggcaggggaaaccagggtgggagtgcagctagactggattgaggtattttcccctggagctaagatattcaatcacaagagaaaattgtcatttattaaatatttaatggcaactatggtgttcagatgctagtaatttctattaaaattttcttttcctttgatagagtcgttctaataaagaagatccagaacagctgagattaaagcagaaagccaaagaggtaggactttcaagttaccatgcttgtctttgtgtttgagggaaggttggcagctctctcctggcaattaggtcagggtttattttgctgttgcataccatttgcagaagccttggggaaggacaggaactgctaaaggcaagggcagtacttcaaatgaggtcaatgagttatgtgctctctttttaaaatttattttcaaggcttaggcctgtctcgaaatgggtctttgtaaactacagcagcatacttggaggaatataatgtgagattttaaaaaaaaagaaacttttgagatttagcatctgggactgtacaataggctacatttttccagggtaattgttcgttttgtaaatctgatactgcttataattctttggctgggaggcggtgctgggatttagttttaaatggaaaatgcctctggcttttaattttctgggcccagcagttttctgttctggaatggagcccttgtttcacacagttcatgtttagctgcaggggttttagtttatagcttagactggttaagcttttactcccagaggcctctgcatagcaactgtagaaatcaacaaataagttcatttatgtctgcagcctcctctcagtagctgactttt

SEQ ID NO: 21552 - DNA, 1094 bp, Homo sapiens
agttattcttcatcgtcctacactagtattacatgtagcaaataaaagtatgtacatttgtccttggaagttaagtaagtaaaggtaattgttagttaaattattagctttggaaataaaatggcaagctagattaagtctagtaattagatgttttttaaaatgctgcttatatgtgtttttgaccattagcttatagaccgttttcaactgtactcctatggggcgtttggaaatgtgtgaaggggtggtgttttgacacagtgattcagtgaagggtggggtgggttgtgtgctgttggcattttgtggcttggggccagcagtactaaacattgcacatcgtgagggggcaaattcacttaatttagcttacccaaaattctaataatatccccattgagaaacactgatacataaatttctcaagcatttcagtaatatttataaaattgagttaccatactctaggatcttatagtatctttcaggtaacttttaaaatttacaaacatcttttcacataagtgttggagtaaaaatttctgtagctatcataatgtttgtggatgtagaattccagcttgacaaacttctcatacttctataccaaagtacaccagatcataagaaagagtaaccatgttcctttggggaagtcttcaggaagggttgactttgaaatctcaattttaagttaaaaattgaaattaactttgcatttgcttttcagattgaggtataatttatatacaatagaatgtattggttttaattgtaaccactatcccagataagatataaaacatttctgtgatccccagaaagttctattatgccttttaccacctgcaaccccctctgcaattactgatctaatttctgttaccatagcttaatctttcctgtttcagaactttgtagaattgggaaccatatgataatgtagtcttgtttctgaattatttcactcataatgtttttgagatttattcacattatgcatatcagtagtacattctttttagtgctgagttgtcttctgttgtgtaaatactccataatttgtttattcagtgttactggactgtttt

SEQ ID NO: 21553 - DNA, 1026 bp, Homo sapiens
aagataaagtgtgcataggaataaactggtttttatctttaaaatgcagactccaggatcttctttcttgataataactctggagtgggcccaggactcctgtttttgttttgttttttgattaagtcccctgggcaattctaatatagtaatgagatgttagcctctgtaatatggcttctgcctaaatttccagcacattcttaccaccagctgttagtggagaacataacacactccattactttccttgtcaatttttcaatgaaatatatagctatcaaaaatgctttgcataattttctttattttggcaatgaacgaaaactcaggattttgttcttggcctaaaccagataaaaatgtcaatagccttgggaatactccagttgaaggcagtaggaaacctgaacatctaaatcatgcggcaatcatggaaatcttggtgataatttcaatttacctaggctgtttacatcagttacactacaaactaaaggctaaacagggcctccactgacactctggttaaagtttagtgcaatacataatttatcaatgagtgcacacaaatgagtttaattttgcctgctacccttaaaccccccattattatgtagattattaatgaggtcaagacatccctaacattttgcaagaaagcaagcccagggaactcaaccaactgattgtagacaaagttgggaaattacatgaagtctgatttagtcaccaaactaccttaaaaaaattcccttagaaaaacagtgagaaaatttctagagtgtgacttgaagtgtaaaataaaaaaagaaagttctttgtaaatattttcaagtgaaatatgcatatgcaaattttaacatgatgaccaaaataccttggaatgtttcatggtttttttttaaatcattaaaatacagaaaaatggtctctttgtatgtatttatgcaattatgtctatccatttatatctacctatttatctaatctaccttgatctaattaccttttttaatcaggaaa

SEQ ID NO: 21554 - DNA, 1047 bp, Homo sapiens
ggtgcagaagttgtgatccatccagagcccaatagagaggaaaactgactgacttattttggtgaaaataagtagtggtagctccaaaggaaggaaattcacaatgaattctccaaaacacaagtgaaaagctttgctgtaattcatgtaaacatgcctaatatatttaattttatactgaagaaacaagcaaaaatgtttagtgcatctaaatggtcagagatactggaaataaaaagcaacaggacctaagtaaactttaggtagttcttttagtaataggatataggtcaacagaggaaaaataatgtgtataaaaatgctgagagcagtattaattacatttagaaattgtgatagcccaaatgcctaattatagaatgactgtctatatctaagtagtagaatactatggaaatgtttataaaaagaaacattgaaaagttggaacataaaatatgtatacagtaatgaactgattatttcaaatggaaattgtgctattacaaagaactatttgaagaaaggttaatcttttatggaattaacagcaaaccagatattaataggtattatgctaaaaaagaggagagtggggttctttgtttaaacagatttgaaaatctctaggtttcttctttactccaggaattcaagtattttaatatgctaatgtgtaatatatagctatattagagggacagagctcacagagctaccactacttattttcactaaaataaacccatagaacacattttaaggaatactgatttatactgaatgcccactaattttttacattagaaaaaaaatcacttcagattgttaaatatatatacacatatctatagatatgtgtgtgtgtatgttttgagacagggtctcactttattgcccaggctgaagtgcagtggcatgatcatggctcactgcagcctcaaccctctgggctcaagcaatcctcccacctcagcctcctgagtagctaggaccacaggcacgagctatcatgcacagctaatttttgtatttttttgtacagat

SEQ ID NO: 21555 - DNA, 1076 bp, Homo sapiens
gtagaggagcggagatcgcgccagacaaagggagactccaactcaaaaaaaaaaaaacaaaaacaaaaacctaatctcaccccagcacagttgcttgtgtctgtagtcccagctactcaggcaactgagatggttggaacacttgagcccaggagtttgagaccagcctggacaaaaaagcaagacaccatcttcaaaaaaaaattgaggggtagataaaatttaaaaatagatgtctaaaaaaattttttagtaagatgaaataagcacctaatttctccagtagataaatctcacatttctacttggtaagtggattaaaagatattacttggtccaaatttgaaacatatctaggatagaaaatgtcctaagtggttagtaccttctccactccaaattggcaagggaattcaaactatgtctgttgtcagcaataggaacagaatgtacatactttttctctcttatttttaagattatcctagaaaaaccatcactggcacagtccttatcaatgttgaagacatcaacgacaactgtcccacactgatagagcctgtgcagacaatctgtcacgatgcagagtatgtgaatgttactgcagaggacctggatggacacccaaacagtggccctttcagtttctccgtcattgacaaaccacctggcatggcagaaaaatggaaaatagcacgccaagaaagtaagcaaaatcactggactacatagaaatctaaatattaagcatgatatctaaaatatttgtaagttgtatttcttctcataaattatatttccaatatagttttttaaaggagtttatgaaatgaggtcctgaacctactgacatatagtatcttttatatgcttatggagagaagaaaaataatctaaaatgtcttgaaggtagctgggtattccctaaatagcccttgaagtagttttgtctggtaaggtgaggagtaccaagcctttgtcagcaccacaatcgtagtagtttgccttctaaaaatcttgtagtaacagtaattccatttaaaacaacatttattgagcacttgctatgtgctagg

SEQ ID NO: 21556 - DNA, 1045 bp, Homo sapiens
cagcacctggctttgtaattttaacagctttattggtatcttgttacttgagtagttatgctctaagtatatactttaaaataattttcttctttcctaaaatctgtgctatttaattatataataaaggttgaggccgggcgcagtggctcacgcctgtcatcccagcactttgggaggccgaggcaggcggatcacaaggtcaggagatcgagaccatcctggctaacacagtgaaaccctgtctctactaaaaatacaaaaaaattagccgggtgtggcggcaggcgcctgtaatcccagctgttcgggaggctgaggcaggagaatggcatgaacccgggaggtggagcttgcagtgagctgagatggtgccactgcactccagcccgggcgacagagtgagactccgtttcaaaaaaaaaaaaaaaaagatttacttaattttaaatcttgaggactagtttacaacctttgattttttttttttttgaagtttttttggggaatgatctcgattatcgactcggaaaatagatagactaagtgccagattttaaattatttaatttatactgaaattgggagcatgatgagtgggaatattgtttttcctctcccagtgttgttgattagccttttgttgggagaatgcgtaatggaaattcgtctagcatctgctagtttaaagttgagagaaatgtaaagagaccttttttggttatagggtaatgccctgttctgaagatacgggccttttcaggaacatgaaaattagttttagtaattcttgatttgtacctttttccttcctacttctgctttgttttgaaataagttctgtctagcactttgatccattccagcccaaagtgagatgagaataattcgttttatgtctgaagaaacatgcttggttgtacagaggaaggaacagtaaaattggagataagagacctgaatatctctattttattttatttttagacaaaatctcgctctgttgcccagactggagtgcagtggtgcagtcttggctcaccgc

SEQ ID NO: 21557 - DNA, 1058 bp, Homo sapiens
gttatgattaacttcagttttatttttcattttttatttttattttttaaagtgacagtctccctgtgttgcccaggctgacctcaaactcataggctcaaactgtcttctgcctcagcctcctgaatagttgcaactacaggcgcatgcttacccagctttccagttaaccatattttttatgaatgacttataaaggcattataacactcaaattttgttctgtgatgatcctctctgtttgtttgttattcttgaacagttacaactgaacttaatgtcttattaaagttcaggtattcaaatcttgtatcttaaaagatactgttatatatgttttacataactgtcctgagtgtgtgtaatgtgtgtcaagatgtgtaatgtgtatcaagatgtctaatgttttgggcaaagtattagagtagttgaatatgtttttcctgttgacatgaatgttattgtttttagaatcttcagctagatgaagaaacccaataccaaactgctgttgaagaatcttttcaagtaaacatctgaaggctgtagacatctctgcatctttgtacctgcaagtgccatctttaagggggaaactacatgaagtcaccgttacagtaacttgatgtgtatattaataaaagtaattcagtcattttagtttttgattgaaaataaaggtagggcttctaaaaacttcatcatcttgataagttaaaaaatgaaagttatgacattagctttaaaggtgtaaaaaagatgtttcactaatgtaacggtgaaagagaatccctgttgtactttatctttttgtaatattatttttgaatttttcattattatgttgcttttgaaatttgatgcattcctcccatttactttattattgtacacatttaacacacagtagcaaattttgaacgatgtgattgatataacctaacaaatctgagccagttattattagagttgcagaatagaaacttgaagtgctaaatggaataatccaaaggaaattttttaaatgcaggttctagctgaaaaattcaactataaga

SEQ ID NO: 21558 - DNA, 1024 bp, Homo sapiens
cttgttgacttttctacactgaacattttttttaacttgatttaataaaaatgttaattttggaagtgcagttttgtaaaaacctttttcagtcaaacagtaaagactttatttatggattgtaataacaaccacaagaaaagccatacatcttaatgaacatacgcctttgttctgtcattttaaagagtggtgtttactatgtgtgtgcttgagcattttctttcagttacatgggtgtaatttaaaaaacagctcctttttaagacttttgaccatagtgttttccagtttaaagcaataactttcatagtttctttcaaagtttaatacatccaatatgtcaagttaaaccattctgggatttgcaaagtttaatacatccaatatgtcaagttaaaccattctgggatttgcaaagtttaatacatccaatatgtcaagttaaaccattctgggatttgggaacttctttaaaggaaaattgtagtagaggtcatcttgatggaattgtgttttaaagttttgtgaatgagttaaatatcattgatagtcttgtgtgtctcacatatcagctttttcataaggaaaatactttatttgcttttatctgagaatttctcagtatgaaaatgattgtttaaaatttcccctctttttgtcagtgcattgggaatagggatagactttacagatttatggaaattaaatttatggggaaaagtttatttttaatattacttatagctgagtcagaattaaaggagggaattgtattgatactccaatacctaaatttcacaataccacttaggaaagctatttcaacaaattacagttttattgttaaaacagagtcttatttgagatgtattgctttatttttcaattaaaagtggttttctcctacttgtgtgtctaattaaaatttgtctggaggcaaacatttaactctcataattcacactgaaagacgtaggagataacccattattttgcacttaaaaaagtggataagaaaaag

SEQ ID NO: 21559 - DNA, 1027 bp, Homo sapiens
catcatgtagaagaaagtatgtgagcctatttacgtaatatataaacataacacagtttatatctacatttatttccagatagctctatcttgtaagccatgagttcacactgatacctccaatcctaatctactaaccccaatgctaatctaataccccatggtccattctagttttctgtctttccatagatgtctcttacttctccgacagtgagaaaccagctcctcttactcttaatatatctagatatttgattattgccttgtaggtagccagtcttccatcttggccaccatacctttgccatgtggatggtctcctcatcacacacaggctgtgactcttgatgacaggccacccaccttgcattttcctcttcctgttagacttctaacactgcacatcaggctactcctcagtgcaggtgccctcctcaccatggttggactctaaaactcctctccaggccacctctctgtgctacctcaccccacttggctctgtgattccctcctggactgtcatgatcatggctgtacccctctccccttctctacacgcttacaatgctttaagcctcatacctagatgttcagaagagggaagagaaggctgtctggattctgattaggttcagctgttgggtagtcacagcaatggattgaatggagaaagaaaagtgagattgagcatcatatcctccctgcaatgacagcacaggcttcattcattggccagctcctatcaggatgtcctctccatacagtcccctctctgcccgtggtctgataagccctgcgtcccttcacacttcaggtcacacactaactcccattgttaattctagtttacttcactgttctctgtggtgttgcagcccctaggccatacctttttaagtcatcactttactctcctcaaatgatcctaacttgaaggagctgttgtggctgctaagactcttgactggcagaccttgtgaggaagttgagtaatagaggtgtaagaaaattatactggttt

SEQ ID NO: 21560 - DNA, 1043 bp, Homo sapiens
tctgtcttctcctgttctcttcctgtgacctataactacattgttttccctgactcagcttcagtgtattgctagcccagtagatggatagtggtgccattaactgagataggtaaagatggaagaatatgtactatggtatgaatgtaggtatccctcctggatttaaatgttggaacttgaactccaagctgatgttatcaagagatgtggggccttttgagaagtgattaagtcaggaggactttgcccttgtgaatgggattaaacccttataaaagagatttcagaggcctgcctggactttctttctcttatgccaagtgaggacacagcaacgtggtgccattttggaagcatagaatatcctttaccagatatcacctctactggtgccttgatcttggatctcacagcccctagaactgtgacaaaatacatttctgttctctataaattacccagtcttgagtgttttgttttagcagcacaaatgaaaaagacagcatgttttccattttggacgtgttggatctgaggtgcatttgagaaatctgtgtggaagcagtgaataactaattggctatacaggtctggaggttaaacttccaaggtggagttaaaaggaattgggaaccattgatgtatgcctgttaattaaaaccatgaatataaacaaaaagggctatagaatagatttagaagagggcttaagatgaaagtctgaaatttccaaatgttaatggctgaataaaagagaatgagcttacagaggagacagaaaagtaatcatcagtgaagtggggtagcataaaaccagaattctatcattgaatacacttccaatgatatttagaaagtgaatatttaggaaggaggccatgatttattttttcggaggggaaaggaacactgtctctggggaaaatatgtgttaagtagttacttcatttcacttagctattcataatagtttaagagagggatcagggaaaaggggagttccagggtgactgtgctcatggccaaggctgtgcccgttc

SEQ ID NO: 21561 - DNA, 1057 bp, Homo sapiens
gaaaatgtaattctctgcttcacatagcacactcatatgctgtaaaacttaataaacctgtgataaaaggcaatagtccctcagtgtaagaaattgcagatgaaattatagtgggatatcagcactcaaatttttaaaaaatgcattttcaagggtttataacttgttcatgaaattttattttgggctgaaaatagcacatgaaatcttaaagtagtcacttttgaatttcttaatagatttgagtaaaattatcctgttttcaagtatgttcatgaattaatgctttatagataaataattttagtcatgtatttaattctcacacttttctaaaaatattgactgtgtctaatgcattttaatctttgtttagtccttcttttggggagagcctgaaatgttatcttttgctttatcttcctcttcaaatgtcatctgtctttattatctgtatgtgtgctgctttttttaagtgacatgagcgtttacatcatagcgtggtagcaaatgaactaaccctgaaagcagtttcacctttgcctcaggtttaacagagacacattctgctttggcaatattagtgtcttagacaatcagatccctaaaaaaggaggggtttaagaacttactattgacggtcacttcagatcccccttagaggaacttatgctccaactcccacatacaaaccaatacttgaaagttgttattttgtgtaaaggacacagatggttgcaggtaacaagacctatgtcatgtgatctcatttcacaaaattacacttgtaaatggggaaaagaaagacatgccagaaggagtctcacgtgagagctcttcatgtaaagaaattagataattaacagactgcttggaatagggtgctcagagtatgctacccttcatgaattgtcctaaatggcagtccttttgagtaggaaggcctgtttttaattgctgtgccaggatatatatatttttaagcaaaaccaaataaagataattaatgtcttttctcaaagattaaaaatgtgacaagctagttgttatatgtctt

SEQ ID NO: 21562 - DNA, 1049 bp, Homo sapiens
ctattaaaatttttaaaatcaaaagtacaagagtatctatattagcatttcaaatgatcaggaaaatatctttaacagctaaaggttctgtgatcattaattaatgtaagaattttaaggctgggcacggtggctcaagcctgtaaccccagcactttgggaggccaaggtggatggatcacctgaggtcaggagttcgagaccagcctggccaatattgtgaaaccccgtttctactaaaaattcaaaaattggctgggcgcagtggctcatgcctgtaatcccagcactttgggaggcttaagcgggcagatcacaaggtcaggagatcgagaccatcctggctaacacggtgaaactccgtctctactaaaaatacgaaaacaaaagattagctgggggtggtggcaagacctacaggcgggacctgtagtcccaactacttgggaggctgaggcaggagaatggtgtgaacccgggaggcagagcttgcagtgagccgagatcgcgccactgtgctccagcctgggcaacagaacgagactccatctcagaaaataatataataataataataataataataataataataataataatttaatcacctaaaaatgatttattcctcaatttaaaagtagacttatcaataactgatgctctcactcttttccagtgagagttgtatttagtcaaggaataataaaagcaatgatttatttttgagtgaatgcatgtggtagcctatttgacagcaagtgaaagtctagaacagtgccaatacctgcccacagcaaccaaattgggttttctgaacagatttgatagtatcaacatggtacagaaatcagaacagctatgtgcgtatcttttcttgtcacataccccaaaatagacaaaagtataatttctgctatcacacattgctataaaaagtatgcaaacatataaatcatactatacatttattttgcattgccaaacataatctgcataattagaatatattcaatcaatacttttaattaaacattttattttgagat

SEQ ID NO: 21563 - DNA, 1571 bp, Homo sapiens
tgcttctgtttttaaaactccatctgtttctaatacatggcttctgtgaaggcatgccgttgaaacctggatttcctgtacaactattatgcattgtgcaggaccttgaaattagacaattgactggactcaaggaacttctgccaaatctgttagaattaattgttaaagttacttggaactgaagaagagaataacttcatggcttggagcttgttccattaaaaattctagaattgtcacctcagctggtagtgcctcctacagacaatcatgggttattcctattagctcatgcaagagggtgtggctacaaaacaaaacatgggaatttcagtaaaaagaagccatagaggtagtgacctattattttcaccttcagcaatgcatatatatatacacacacatatatttttttccgacttaaataaggctaagcaaatgaggatatactccggataactgcgagtgtgttaggttgaaatgctttctaaagaggaaaaaaaagaaagaactacccagaactaatgcattagtgtcatgtttcacagttggctcaagcttctggggtacagggcctgctaagttgtctggaagaaaatgcctttccttcatttttttttacccctaaatcaaatcactaattgtgtaaatgcttctgttttttaaacatgagcctgcttttcctagaaaatagataatttgacttgaacttaaacttacagttgaaaatttgccatatttacatagttgataccagtagcataatttatgttttcacacccaatacctaattccaaccctactcactcacctgaccctgctctataggttgtaaatgttacagattattttttctgatctcccttataagtatgggtgacagtgcaactcaggcatagccattgatatgtaggtggctgtccactggcactgcctctgcccctattcctttcattttgctctaataaacagcaaaattagtggagctgcatagccattatgtcaacatgaggaaaagacgtaaaggatataagagacattaaatccaacttgtttgagcaacggaacccattctagtgactgcttatttttagaattcttgttatattagaactctatatatttatataggctgacatatgctctgccttttatcctagtaaatatcatggtataacttatttattattagaataattgattcattcattatgttacagtatgtgattgaagtcagcgtataatatggcaaggtaaactaaaattttaataaaaagaaatataagttgaagacagtataatggtagaagagtaaaataaagccaaaagaacacaaaaatatatctaaaagatttatatatattcttcaagatcaaacaaagatttgcctcaagatttccagcacccagtgcaaaggggaacacaagatgaattacacaattcacagtgtccataagagaataacaaacaaatcagttgcttagcagaaggccgactgctactgactaggaaatgatagagacgttttccccatggagagtcacaaagtggttattgtggattgtaat

SEQ ID NO: 21564 - DNA, 1023 bp, Homo sapiens
attcaaaccaaagctatctgatccagttcctaccattcttaaccattctgctaatttccagaagtccagctgataaagtgtaaaacaaaagttgtttgttgctgttaccaagaaaatatcagggaatgctttctactaatacatcagcagcctctcttcttcttcccctctctcctcctctctccacccagttacaagctacaggtgcttcaagcatcaaattggacatttctgtgcagtcatagaatagctggaacttaagatatttatttttctggaaaaccactgatgtgaggtagaggtgattacacagtcacttaggtcaagagatttgtctgaatgggaacacaatattaaaagtgaaaatggacacatgagaaacatagttttcctggaaatctcttgctttagcatatacattctgtgttttaaccctgaatataattcatgacgctttgttggaggcatcatgacctaacactgttgagataggtagaggactgatgttcaggagatgtggtttcgaatctctctttcactagctggctgtgtgactttaagccagtcattgtttccttatctctctcatagatacgttcataactctgatagggcctcctggtgcattagtattttgaggacatgattacataagctatttttttcctttgaaaatttaaaactatctcataagtaaatgaaagcaaaagtattttactcttcttttgtcttgcatttgctcatccattatccagtttataactttctgttatctttttgtttattaactatcacttcattcattgggctacattctatgtaaattatttaactctgcaaagtgggaacacaaaatatttaataagactctgtagacagaaagcacaaggcagtgtgaacaccacagttagtttctgtccagttttttgaagtcatcttaaattcatttattattctctgtccactcaggcaggaattttaaaccctttctgacttttggtttcaaaacaatttttaaagcat

SEQ ID NO: 21565 - DNA, 1020 bp, Homo sapiens
caaaagcagaatccacacaggaaaattttgtccaatttgcttatttataaattaaaattttctcaacacaagagacactaatgaatagtaaaacaaataccacactcagagaaaaatagttcaacagaacaaaagggaaattttattaaaagaatatacaaatgaccaataatgaaaatatgttaaatgtcacaagtaaatgccatgtaaaataatgagttatcactgttcacagatcagattggcaaaatatttaaaatgatcaagaatatgcattgatggtccaggagtaagacagcacactgatctcttaatgcaggttttcttgggaaaactgttttagaggaaaggttcgtagaatcagtgaaattttacttctaggattccattcaaaaaaaaaaagttggcaatgaatatgaagatgtttgtccaaggaagacaaatttgcattttgaatttaaaatttgaattctaaatttgattgtagattctagtttcttaaagttaaactgaaaacaaaaaagtactctcagatgtccactggaaattttatgagctataagggtaatggtggttggctgacttgctaatttagaaaattaggggcaatctaaatttccaagtttctttcaagtaatctaataaagtgtcaggaatcagaggttccaggcaggctagtttagtgtgattactaaggtcattatgcttgggattccatctctgttaacctacctactgttcttttggcttgtggaggcagttatattgttttctgcattgatcttgacttctaagttaccagcagttaattgtatcattgtctatgtgaacatatcttttccttttagggtagggtgtttaaagatataaaccttggactaaagtgatttaggaattctgttaaagaaagaagtccatgaattggaatctgttgtctttatgtttttttcagttgcaatatataagcactagaaaatgttccttctattttatatattcttcaaaaagattttttctact

SEQ ID NO: 21566 - DNA, 1090 bp, Homo sapiens
gccagggagcctcagtcaacctgtcagcttcgtgccttcatttcccccaacgttcatcataaagaaagctataagtagcaagaattgatctttctacggatttgctctgagctgcaaccagccaaggaattactctattgtatgtgtcactgtgagacgtcttgggagaagtcttacagggtgggaattactctgtgctctgacctgtgtgcataaggcctaactcaatgaaaattacacattgcccttatactggacaagtttatgaaagacatccattattattttttaaactatattgggttcctggagatataccttactgttatccttgagtgaattggcttcactttttctttgtcacagaacaaacctgtttacataaactgcatcttcatgtatagatatacaaggacaaattcaacatttgaaaatcacttctaaaaagacatacgactgagcttaaatgacaaaagttggaatagattgtttaggagaagactattggatattaagcctttgctttatgaatttgaatttcaatatatcctgggtgcaatctgtctctgcatatttcagctaaattgtaatcacagcaaccaactaagtgttaacccagccagaatctttcttggatgcttttgagataaatctaaaataaataagacaaaacaaggattaatggaagattaaaagattcacataaacatagctaaatgttaacgattgaagacaatatttttggaagctggggaaaccttttaccttctgtttcttgaggcttaggagatttattcttgggtagttagagactttgattttcctcttttaatgaatgacttcctcctcttccatgctgccttacatgtatttttgtgctataaattttgtaatagcacatttaattgaaaaattttaggcctaccctgtctcaaaagacaggactgtagtcttgcctgaaggtgtccctatactctggtaattcacacaggttagaggtgtgtcccagaccagaaagcaaagctgtaagggtaaaggtcaatagaaaggtaaaggtcaatagagagcctaaagattgacagctctatct

SEQ ID NO: 21567 - DNA, 1069 bp, Homo sapiens
ctgtctcaaaaaataaaatttgaataacgtttcttgatttctttccattaaatattgacattgaatcaaaagaatctgaaattatttggtttaacatattaagttctatattttcatttttgatctatttaaattgaatgttaattataatctgcacaataaatgtgatcattatgagatggcatttgatagtgaagaggatagctttaccagaaaagaaaaaagtcctatttttttcaagatgtggcaacaactttacaactatatactacaacaaacatgactgtgacaacggattttagcatcactttctttcaaagataaaataggttcccctaaaaatactccatcttcctaacattttaaagaaggatcgagatgaaatttataatactatcattgggagccttaagaattttacagaacttctcagtactgaaatcactactctctcaggatattttttcatgtgttttaaaacacgtgctgtagtgaaagattatactgttagacttttgaagtactggtgaaataacttgtttaactcttctaagttatatatttgatatttgctgccttctcaacatcacagttgagttgaaaaaaagtagtggctttcttacaatgctattgaaatagcattatttcaataataatgaataacaggttgggcatggtggctcattattatttcaataatagtgaaataatgctatttaatggccttatttgcttgtcttctttacaaatcagtgattgaacagtatagggaataatcaatttttatcgtacctcataatttatagaaaaagtattaacattttgctgcatgtgcttactacgttagagaaaaaggttataaatggatgctatagcaacatcctggcataatccttcatttattgacagttttattgaatattgtgatttttattgatttagtaataaatttcatttttgaaactacttttatctacttatacttgtgccgacggaaagtgagaatgttgtaccatggcaattattagagaatacattttaatccagttaagtgattgcatttttttct

SEQ ID NO: 21568 - DNA, 1061 bp, Homo sapiens
agacagggtttcaccatcttggccaggctggtctcgaattcctgacctcaagtgatccgcccgcctctgcctcccaaagtgctgggattacaggcgtgagccacagcacctggcccccacacttttgaaggatctttgaagagtctaagttcaactgggaaagtcatagtcttatttattgttggggaaaaagaaactctactgggagcatattaaatacaaagcccttttcattgtggagaaataaagcatttgtgtatttttagttagaaattatgcatattatctcccattcgtctgtctttcaataaaattttaagttgaggtgtattgtgtttcttaagctgctttatactcatttgttcaaatacataccaagcctttaattagaccatttggctattttatttgcaaataagtaatactattaagtgtatctgtgcctccttctgttgctgtttcaattgtgtcatgaatgcactgaccctccatagacagggttaattggagtgtgggcgtgagtgcatgcatgtgtgtggctgcctgctgtagacttaagataaagaatggagatttaccaagcaaagcttttatgtcttaaaaataaaacatatgtaattatgagtgatatatttaggaatcctgccttaataaaattaatttgcatgcactctaccttatagtaatagttctgagtgactttgctattttttcccaaacagcttagcaaagcatctatattgtaatatgtaagtaggcatttttaaaagtcatacaaatgaaaagaaacatttaataagaatacaactgtgctaaaataatttaaatgacttgagagatctgcctttattatatgtagatttatgctatttctctagccagtaaaacaaacatacaaacaaatccctatttcattctttcagcacttctactatgtgccaagtatcagttattaaaaatagagaagaaattcagagtcttgctttcaaagagtgatagttttaacagggaagaggaataatagacagttaagaatctgcttaaggagaaaactgggccct

SEQ ID NO: 21569 - DNA, 1052 bp, Homo sapiens
tacatggggataccaggttggaagctttgagtgggctccaggggaggagtgaaggatacctaaagaggagaaagaagtactgaaaagaaagctatgaggtactttgtaagcacctctgagtatttaccatgtatcaggcacagtactaagtgctttgcattcattgccacttgtctccataatagcctttgtaaggtatatagtgttacattcttttcacagataaggacactgaggttcggttaagttcctcacatcaagccaacagaacagcaaaaaattcaagcctatattgactggctacaaagtttatgttctttctgatacatcagcagttctcaactctaactacagagcaaaagcacccaagtctgtaccccacttatgatcagttatatgaaaagttctgagtaagaggcacagtcctccatatttaactttaagtctcatcagtatttctaaaatgtttccagggctgaaaaccactatcagaaacactgtagatactcttccattttgccaactctcatactgtgtgcttacaggtgttctcacccaggaaaagagacttgactcagtttatgaatggcgcaccctaaactcagatgaaatattctgaacagactgagtgtggtggctcacccctgtaatcccatcactttgggaggctgaagcaggaggatggcttgagagtccaggagtttgagaccagcccgagcaacatagagagactccatcttgacaaacaaacaaaaaaaaagaaaatcttgaatagtcatgcactggccctgtgatttgaggtgctcttaattggtggctgctttgatgttagcaagagttttatcctgtttaatttaaattaatgaaatggattacatcatgcctagtctctaactctctgcaaagggtcctgctcagggccgttctgccattgtaagctttctagcacagctgatgctttttcaacataccccattccaaaaagtaggtactacctgggccacacacacattcaccataaaaattaaattgaataggtatcaagaaacaat

SEQ ID NO: 21570 - DNA, 1059 bp, Homo sapiens
catctttttgcaaattaaaaaaatacatttatagagattaagtaactcactgtaaggcacagcagaggcggaatgtgagttcagggcttctagcaccccgtactcttagaaacttaagtgagtttatgaaataaaccatattatgtctccccagccttcccatcaggttcccgtttcctcttgacttttgcagagtctaatctaggtataggctcaccagttctactattaggtgcctaggaggttctcccccacttccatctaactcccacacctgctgtatttaccttgcagtggaacagaaccaagtctttgagattcaaggaaatacagctaggtggttcatctgctttgggaaagtggcctctttattcctgaaaacagtagaaagaatgtaaagcttaagaatcacacagatataagatcaaatttatgtactttcacttattaatcctgagcccagggcaagtcacttaatctctctgacatcccatttcttaatccataaaatagaaataatgatttctaaatcacatgatttaaaaggatgaagtagaataacatatagaaggttcctttgcacacagtaggtgctcagtaaacatgggttccttcccttttgctctgctcccatgtcacatatacaattaactttgcacctggcaactcctgtttagcttctatatttctgctttcctttattcctttattcctctgtgtttaaaagtctgtgctaagtagccaaagttttgtatgagaaaggtctgctgggcaaagcagaaagctacacacataacacaactttagggccctaaataaatattaggaacaaaaatgcctctcaaaactttatagcctctcctgcttccctcctctcctgccactgctaccaccaatatatccaaatgcctaaaatcccgttttaagatctctcctaaggaacttatgaagaacatgcattagtctcaataggcacctgttacctcattttgtttacacatggctacatgttgtcatactctatatgctataaccattaattgacatgagactgggtaa

SEQ ID NO: 21571 - DNA, 1074 bp, Homo sapiens
tcaagcttttgaacttcatcttctatctttgcattttctgatacactcttgctttggaatattttaatataatgcataagcttcttttagtgaatttactgtatatttgattattttttcaagagtttgtaaggaagattttacttgatgttatacgtgattcttcaaaactcttcatctaagttgtctcttatttctgactctcttactatatccaacacctagtgaccactgtccatttcatctctaaggacagcaaacaaatctgtcatcttcaacaaacattcagtcaaatgctagatctgatgttccttctcatgtagaattttttccaaacatggtcttgaaatttcaacctcctttttttctatgtaaattaagaccactcagtcttcctttacctttgtataaaagtaattttccatttccctaaagtttggatttttcatcgaaatttttctttaatactatctatagctgtgttttacttttctgacataaatttcaagattattctggtttagctacttgggattggatggattctgatttatccttcaaatgactgtattatagcctttgtgtaacatcaaccatcatgccatcttcttctggatagttagatttttcttccccattttcccctagaaagtctattttaaccacaataaagagtaggactaatcagttcttaaatatctgtctccagacagcatttcaaacaactttatttcaagtctggccttcaaccaagacatttccagtgcttaatgacctctcttaaaatgccagagcctgtcagaaattttaagtttttcttcatctggagcagaaaacatgccatgatgttctttctccctacatttataaagcaagctttagttctgtgaaacccaatgagagctgtccatagaaccatcttttggggaaaatcctagagtcctgatcctgggctcaaacctgcaggcataatgctcacagagctgcatggagccttcaggataagccagtggtaaagctgtgtgactattgcatgtcctgtgtcacacaagtgactgccacagaactgcctct

SEQ ID NO: 21572 - DNA, 1062 bp, Homo sapiens
cgtatttctcctaatgctatccctcccctagcccccaattccctgacaggccccagtgtgtgatgttcccctccctgtgcccatatattctcattgttcaactcccacttatgaatgagaacgtgtggtgttcggttttctgttcctgtgttagtttgctgggaatgatggtttccagcttcatccatgtccctgcaaaggacatgaacacattcttttttatggctgtgcagtattatttgtccctagctggcccctttccttggcaatttctttaacctctaatccatcccacaagcatccttcactctcagaagttgattttgactctttctggtttctcttggcctatatccagtactaagacatttaaaaaatcttcttaaatcccgtgctttccattctctctgcagttgctctacttcaggtcttcatcatttaacttggctattatatggtcttccagttgttctcctgtctctaagctccatccacaccctcaccctgccactacatacacacttgctgaaaccaacatacccatcttctaaaaactatagacttcaattaattgctcccctacttaaaaatctttagtgattcatgactcccttcaaaataaagcttagtgtccttagtatgtcttaaaaggtccatcacaaagcctcgatctgtttctcaaacattgactccactgcttcactggttatcaccaacacttcaatcacatacaatggctgcctccacaatatgccgtatactattttagctctgtgctagtctacctttccccaccgccccccgcccccccagaatgcctattgcttctctcctttgtgggaaaaccccacttttcctttagggttgacctcataagtcaccttcactgtactttctgtactttctttttaagtgtatagctcacccactgttctgggagtccctaatgctgtggcttgtgtcttactcgcttttttattctcagtcactgacacacaggaaccactcaaaaaaatgtttaagaaatgaacagatgactattcagaagaagtttgtttctga

SEQ ID NO: 21573 - DNA, 1053 bp, Homo sapiens
ggttcaagcaattctcctgccgcagcctcccaagtagctgggattacaggcacccgccaccacgcctagctaattttttgtatttttagtagagacaggctttcatcatgttggccaggctgattcgaactcctgacctcaagcgatctgcttgcctcagccttccaaagtgctgggattacaggtgtgagccaccgtgtccagccaacaaatttctttatgtatctttcattgatattttaaatgtatttgtcttaatctccacacatatttaaaaagtcattttgcctttctcaacaactagtattttcttctcagaaagctaagttagaggatagtcttgagattcttaaaaaatctcttgtttaggagatacttatgtaacagaagagcttaaagagagctgaataaattctgaaaaaaagttaagtcaaatgtgtattttttattacatatttaattaaatcttaatataaaatagaaacacatttatttgcataaataaaactggacttggcatttttgcaaaataaaaatgatgtaaagatgactcagacactctgaatcatgaaagttttgtaaacctctaagtattttaaaaagagcaatagagttactttaattatttttctttttaagtctcagtttattttttgtactcattcctatatagtgtgatagttcacacatttatagatgctgaaacaatgaattcactgaattaatcacagttcaggaatacagatgccttaattagttttttacaagatataattttgaatgaaatttatcttccaatgcatatgaacttccaggtcttagattgttcatttctacatatttgaagaatcatgtttactaaccaaaagatatttaacacctcagataaatgtagcaattcttcccagatgcatccaatgtttgaagttattttgtaggtaagagacatttattttacatatgataaaactaagatgtagacatatgaagtgttccagatatactatgggtggtttcctcaggtaacaaacaactctcaatttcagtgacata

SEQ ID NO: 21574 - DNA, 1039 bp, Homo sapiens
ttaagggcaggtgtgctaaatttttaaagtgctatgtacagttaaacacaacacacacacacactcacattaagctttgttttgtctggccatgaaatgaatgaataaatatattttacatcatcatatgtcatcacccttccatgtcagaaaagagaagagcctaaaattggtggtttaatattagtctgatatatgccattgccatttttcagcagaatagaggggaatggagaaagtgagtggtggtcatattgaggatattgtgtggctttccacctcctcctaagtctagttttcaaagtgtggctttattatgtactttgaagaaaggtgatcttcagaacaccagcatatacctatgtttacaattccaataaaataatgcagctgacagagcattggccactgtctaaatctaatctgaaaggcagagatgcttccttaatacttttgattaacttcaaaatgatggcaaataatgctttcataaacttacaggtgtataaatttggtttatagagattggatttagaactaaaatggtaattctatttatttacaagatgtgtgttgaatgcagttcccagaagctaaacttggtgcccatcaaaaataccagtaaatcaatttgcctagtgtaacagttactctagaagaaaaaaatgaaaatgaaaaacttattttctgaatcctttattttccacttgtgcccatctgtgcctgttaccttcagggccattccttgccctgccctgcctctctttattccacagggactgaccctatgggctgtattttccagccagagcctctcctcccctcctacatgttacctccagcttcttccagtgacctgaaccctgaacctcattaacactacctcttcccttttgtcccttgagaatcatgagtgatagtgcctttggcttcctgaggctgctgatcttcaatttgatccaccattcccaatttagcttctcaattctttcatctttgtaaccatttccttgtattaaagttcatcattttaaatact

SEQ ID NO: 21575 - DNA, 1028 bp, Homo sapiens
gattctcacacactggattaaaaggttgtttattttggagtagaagggaatactctgcaattacaactcccaacatgggaaactaatgaaaaaaaacaaacaaacaaaaacgtgacgcagttctttttaacttaagaaaataatctagcttctaacatataaatgagtagacttaaaataactggacaaagccagaaggcaacaaggcagacaacttatacttaggcaaaactaatcaaaggaaattatcatgagccccaaaactactctgcttctcatatccatgcaacacccaaacaatatacaattttatcttgcctatgaaattcccaagtatattcctacgtatgtgtttgtctttgtaccacacactgtctgtattctttaaaaaccttcccttacctgacattgcccttgagtttagttatcttccttgcctatcggagacataaaaaatactcttcccctggctaatgctctgtgagaaccagtgattaaagtctgggcaggagaaaagaagtcggggcatatgattgtcagtattagggttttccggtttggctaaagtgaagctccttacttcagctagtattgcagctatttgagctcccctttccttatactccttcctaaaatgtttaaaaaaagtccaaattgcaacatttattacctttctcatttaaaattgtattaaaataatcctttgggtttaaatattatcttctgttagtaatgctaagatctgagattcttttgattaggttaaggttaggcaggaaaggaatattaaaataaagaagaatgtcacttgctagctattaaatatattataagctataatcacaattaagttgaactataatttaaaagggtgttaatatagacaaaccctggagtataaacaaatacttgcataggtatcaatatatgctagacaaggctgtgcatagcaacaggaaagattattattattatgcagtaaaatactactgggaaggaaaatattttcattcatactacaaaatgaa

SEQ ID NO: 21576 - DNA, 1029 bp, Homo sapiens
atgttaaaccaagggagatcaggcatttccagctcactcacagtgggcctcttttaatccatatttcagctaaccaagcaaataaactattagaatattttttaactccctgagctgcaacattaaaggcagagtttctacttagtgggaccaaattaataaattcagcctgatccaactctatgttccttctatcattatcccacacctttaaaatccattcccatgcctgttctccagatttttgtttatataaattgaagaactcaagcagttcttttcaagtgtagagcacctcctcatgggtcacactctcaacctcacctctaggggctgctgggattttagtctagttataggtctagaagcaaacagaggtattgagggtggctcctcaggagaatcaacattatcttgcttgacaactgcctcaggagagtcactgttgcctcaggcagtgcagggtttatctcttcagacaaaggtcgaaaggctgatggcagtatgggtcagggaggggatgttgactctactggggatgggaaagctctttcttctggcaaaaaaaaggttcatcagagtttacaaactcagtgtcctcagtttcatcagaatcttcccacacatccccattccaagttgcagggtcccattcttttccaatcaatgccctcactttaacagtagtcacctggcgaggctgtgcatgcatctttcattgcaggtcagccacttgcatgataagagcttgtctgtttttccacaatttcagctctttctctacaggagataagactctcattcagggcaatcttagcagatttgaggctcagtgtctgcttctgaagctgggagacagaatcccccagttcatcattttctttcaacactttgtccactgaagttagaagtaaccaaccagcttcattatgttcctttattctccatatatggtcaaaggtattatgtatagagtcaccaaactccttgcctctcaggagcagtgaatcagaagtgtcaaatgcattt

SEQ ID NO: 21577 - DNA, 1035 bp, Homo sapiens
atagttccgtcacaagaaaatccaacctatttatgagtttttctatattttaatatatttcaattcaacctttagtctttacttaaagaagtcttcagaatatacatcttaaatcaaaatgttcttcctaggaattattattgggaaccaatattcagtgtaaatatactagtacttcatcaccggtcagattctgaattcaagcaacagttcttcactaaggaagagtatactgagaacttgccaattccaatgcaactcctcactgttgtttatgtcatgctgaggacagatagatacattaacacggatcatgaactacaacttagtttagaagaaaggagctaaaactttctattttcttattgttagcatattaccagttttcaaacttctaccccatatcctaaaagatttgatgtttgaaaactaatcagatttagttgttttacataaatgctaaatctacataaggagcctctttcttaggggttgtagacctaacattatattccagggcactatctgtacaaagaaggatcagactccttgagaggacagaaggccctgtggtttgtggggcaaagagctgctgttgctgctgtcttaactgttctaagaattacatctcctaacaaaagccagagggatttcttgagcaatgctcttattacttagcttttaaaaaatgaggacaatagtcacttcattatattaccaattatggactctaggtataaaagaaagtgacaaaatttgaaatggtttcttatggaaaggaaaaacatggttaaggttttattattatgttggtgcaaaagcaattgcggtttttgccattactttcaaatggcaaaaaccgcaattgcttttgcaccaacctaatgtatgtggtaggctactttttataaaattttgactgtataacatcaggataaatttcccaacaatctaaacgaagaagaggcagcgtgattctctggaaataacctgaattttaaattctgaagactcagattgaagttccattttcac

SEQ ID NO: 21578 - DNA, 1049 bp, Homo sapiens
tgttcccagatcagcctgagaagccactcaacttggctcacatcgtgtgagtatccctaccctcccagtatagagacaattttcttcaagggcacatgtctggagccacacaaaagcaatttcctatcagtggtcagcaaccaagatttttaatttagtttaaaaaaaaaagtcagagtaatgccatcataattttttgttgttgttgaggtgtacagtacttccaccaggctggacaagtaaagtatgcaacactaacataattcacctggaggtggaaaatatttcagaaagcttagttataaaatacggatgttagtggtgtctgcacattggaagttaacaatgggatcactgtggtaaaaaatgatttacagtatattattccttaatttcatatgtgctttgagttccaaatataaaagctgtttgttttatttctctgcagacccagtttaagatgccagcaaacctagaaattacttttgtttttcatcccaagctgtataactttagaagaatcatagcctgtgcaggggaaggttgaagagggggagtggcgggaaaatttatcagaatatccatagattcttttcttcaaagtatgtgtgagtttcgtggcagaaggtgttgggccaacaaacagtccttccagccatccctgctacctcccagaagtttcatgcctttgaacctctctcaggcctgggtggccaagataacaagggggcttaggtagaagaaacaattttttccttggtgttacctggggctcataagaagaaagagtctcattacctgcttctatgcacaattagatgtcatgtagtcacagatgcctccttatgaactgcctgtagttttccacacttcagtgggacctatcacaccatagggcctgtgtttgcatgttgacatcaagaggtgggtgacgggacctaccggtataggaattcaacaatgcaaagttcatgcttcaggcagttcagcatatgatccataaggggcactgtggtgggtatgagaccttcgtggaagcagcaactatg

SEQ ID NO: 21579 - DNA, 1033 bp, Homo sapiens
gctccttgccctcaccacttgatgttattagccgctttgtttctgaacctctttcctcctcacttgagtattttcaaaattttcttcctattactgcttcttagatctatttttgcaagattaatacatgagataatttttagttctcatgaactgatgaacatttatgtgctttagtacatacatgtatcttaatttgtatttttaaaaatgtataaccagtacactagtttaattttaccttagatcctactgtttaaggggataaaaatgcactctttggctgacgtaaatccatctctttcttcaaattttgtgagcttctagattaaatagtatccactttttcacaactcaggctctcaaaactacaaaattgctttattcccaaggagtttggtactccagtgttacatggtagctgaagcagtagaactaagcattgaatttttttttaattgtattggtcatctttgaagaagaatacagtcagtgtagattcaattgtaagactatgatgcgatctcacatcatgtcctcttcccataattctaagcacactccagttatttctactgctcttctttgaccttttcttaattaaggttgttaacaaagaaatctccaaagagaaaagctcagagtttgtcactaccagccattttccctactcaagtgattaatcatattgacttgatggttacttaagaccataaatctgtctcagcagagacaccttgcgtctgcctgatgaaagctaaatgtgatttgtattttgaaaacaaagcagaatttaaggccaaccaatcaatgaaggaggctttgttttaatagctgcaccctccatatttctcatagttttttctatccttaaaaaattccaacttctttttcaaatttctcattttttcttcccttttctttatgtttaattagatcccaacaattcctcatacctgtcatggttctataagtaatgtaatgacctcttacctcctttaacatcattgtagctacaatgctttaccatcat

SEQ ID NO: 21580 - DNA, 1041 bp, Homo sapiens
atataatagtatgttactttatatggatccaagtgattgcaatgaataattcttacaaccttaatattggcataagagggtgtctttacaatatgtatttatgagttaatttctttaaggaagagccgtaagtataagaactgatgcagaagaatataagtatgtttatgaatgagaggaactagtttctgatcttgattctgaactgatacataccacaataaccaataagccaaactacaaccaactagtttgttaacaagattagtgctattggtatgtttcatagaattatttttaatggcacccaaaacttagtcttgaatggagcacttcacagaatgaagttttctgaaatatggaagaattagtaacgcttctatttgcattagtttttagggactcagatcatccttattctagtatgaacagtttctgtaaatttataggaggcactaaaaaattccattaaggtcattgggagtcactactaaaattctgtttctctgaaagtaaatataaaaggcaggttataaataagtagtaatattatagatgagacttgtattagttaccttatgctgcataacaaattatcccaaaagttagtagcttaaaataacaaacatttatcatctcagaatttctgtaggttgagaatccaggtttggcttagctaagtccctctggttcaaggcttctgtgaggttgcaatcaagatgtcacttaaggctgtgatctcatctgaaggctctaccagtggggatccattcacatggtaattggcttgcttgggtttctcatcacctaggtctttccataaaggctgctttatgacctgacagctattttcccaccaaacagaccaagagagctaaagagaaaacaagcaagtccaagatggaagccatggtctttttataatctcatcttggaagtgacattccattccttctgccatatgctattcattagaagcagattagtaagtctagcccatcctaaaggggaggaaattacatgagaatgtaataccagcag

SEQ ID NO: 21581 - DNA, 1137 bp, Homo sapiens
gtggcaaaaataaaatcacttcccaaagattttcagtcagaaagctgaaaaatcatttttcctaccttttgtgtatttgcctgccagagaattctgttctgccttccacctcacagatgtgctccagatccacagaaaagttggtccataggagaaaaatggcaattgaattttatgtatttgctttctttgttttgatagaaataattccctcctccttgtctgcatatctcatgactcctgccttcccaaatacataggttcacattctcaatatgaaatcttataaactacatattttacagcagccacctcagcagagaagtgctcctgacatctctttcaccatcgatgcgaataagcagcaaaggcagctgattgctgagctagaaaacaagaacaggtgagactttgtagacgtgctggcttgtttgatcaatgtgcgcattccttaataaactatggtcgtgctttaaagtttcagggctttacaccctgtatggctactcaagggaagacatctacactcagtgatgctcacttccaaaaagctggtctttagatctttagaacttcagaagctccatgagaaaacggcgtgtgcatgtatgtgtatagttctgagatatcaatgcaattaatgttgcccctctagacggtctcacttccctttttctgagatacttaattttgttcaagagcttctagtacaggaggaccctcctgggtactaggtagaaggtgtctctaccacccagaaacaggtaggaggctcaccagagaggccccctggaaggaccctgagctaaagaggcatctggagagacaccaccatcacccagttactctccaaacatccaaagatctccacctgcagcccatcagcaggttcttcctctattcaacacagattgactcacagtctacctccacagcatacaccccaaaaattgtccagctcatctccaccaccacccagttcagcctgtccttttcaaaaacatcaatcttatgttattccaggtttaaaccctctaatgtgttcccatcacacttcagttaaatcctactcctcttaccatcacctgcaaggtcttacctgacctgattccctcctgccattccagcctcagctca

SEQ ID NO: 21582 - DNA, 1116 bp, Homo sapiens
ctttttaaaagcactttccttctaaggtggacttccctgagatccattgttaaggctgagagatttaagaaaaaaaaaagagaaagaattttgtctaactggggttttctcagataaattcaatgagaagtcccttcttggtgagagaatgaggttacttagttttgtgaaatgagccccatttatccttattttcccttcaggctcctcttacttggtagctgcaggtactttacggtgtcagagtgtgatcgtaaataacaggaagatgcatttttgtctcttaagcagcatgctcttcaaagttggacacattaccttacttgctagtagtaatgcattacattacttgctagagagatgactggaccctggtgatttaactcaacgacatgctgcagaagcttctaggtttggatgtactggaaatgaagtcaatcttcccgtcacccacagcacccatctagctatagtcaaagcctcttaaatacactggaatctgttggttagggaaggtcggttctgctcctaaacataggatgatcccttctctctttgttctggtggccttgatctgctccgatgttagtttcctgaaagctaactaaccttggtttctcaccttcctcctctctcccaagagaaatcttacaggagatccagagacttcggctagagcatgaacaagcttctcagcccacgccagagaaggcacagcaaaaccccaccctgctggcagaactccggctcctcaggtaggagagagcacccatgtcatctcagggaatatatatgtgtcagatctttgagaaagtctagcagtgtctagccagaaaacagtcctcagctaccttagctgctgacatttgtttttttcatagcacacacgtaattgctgatatttgggggatttagagagaagctgtttatattttgttctttcatttggtacagggaaaagcagtgtgtttctgtttttgtttttgagacagagtttcactcttgttgcccaggctggagtgcaatggcacgatctcggttcactgcaacctctgccttccaggtacaagcaattctcctgtctcagcctcccaagagctaagattacaggcatgc

SEQ ID NO: 21583 - DNA, 1118 bp, Homo sapiens
tagatattcatctgtgtaccttgtaagtcttaggtcagaattggatctgattgtataagaaaaaaaatcttatgtaaagtgagatgtggacgaaggaatcaacttgtgcactgtggactaactggagaagcaaaagataaaattattaaaataatagcccaagaggaaagtataaaataggaaggaaaataagtagggccccttgtttgagattatccttaccatctgggttgtaaaacatttgattctaattccagaaacttgataccagaaataacttattaccagggacatatgctgaagaattgtcaggaatgacaaagtgtttacttgtttttaatatctgtatcacaaaatgataaagctgataaaccatacagtgatgtgaaggagtgagtcatagcttaatactttatgacacatatatttatgctgtatcttttacaccccaattcttcccttttcaccctataaaaggtcagagaccactgctgataagcaaagaatccttcaaaatctctcctggctgggcgtggtggctcatgcctgtaatcctagcactttggggcgggtggactgcctgagctcaggagttcaagaccagcctgagcaactcggtgaaaccctgtctctactaaaatacaaaaattagctgggtgtggcggcgtgcgcctgttatcccacctactcaggaggctgaggcaggagaattactagaacccaggaggcggaggttgcagtgagctgagattgcgccactgcactccagcctgggtgacagagcgagactctgcctctaaaaaataataataaaaaaaaaatctctcctctctggaggacagtactgaacatatgcagggtcttttcagtttataatctaatccgtagactgcacagtgctagcaattctgttcacagttatcttttcacaacagtcatcttggaagtacttgattcttaccttgatttataatatttattgagctcacattacagatcattactgtccagtcacattgataaaaccatgtcacttggaagctccagttcaccactcctagctgtgtgaccttaagcagtttacttaatcttactagtttactcatctttaaaatggg

SEQ ID NO: 21584 - DNA, 1086 bp, Homo sapiens
gtaatcccagcactttgggaggccaaggcatggatcaccagatgtcaggcattcaagaccagcctggccaacgtgatgaaactctgtctttgctaaaaatacaaaaaattagctgggcatggtggcaggtgcctgtaatcccagctcctcgagaggctgaggcaggagaattgcttgaacccaggaggtggaggttgcagtgagctaatatcgcaccattgcactccagcctgggcaacaagaatgaaactctgtctcaaaaaaaaaaaaatccgtaggcagctctccatcatacctcacaccaggagaggaggaaagtacccatagtttcttaaaattttatgtttaaaaaaattaatcagtggtatgttatagggaagtaagaaatgttttagtaatagctaccttgtttaagatcgcagctcctctccaccaggcactcatggtcctccctacctgactactcaatttttctttctttccattgcaataccttctgtgctataatctagtttacttatgtttattatttcctgtctcctactctgctcctacagaagtgctttgaatgcattgatctttgtttagtttactgatacgtactgagtgcctagaatatatttgttaattcaatgaattgcttttcctttggcttctagaagtggatgtacatttcttttggggaaaaatactcagcagactattcaaaactttaagaggcttctgtttctggcagcgtggcagagtagaggttaaaaaaaaggtcccacattatgaaatgttaaaaatactggacttaatattcaaaatatcttttaaatgcatcgttgagctgacaagaggtaaggaaactttccagaggcccagaacaagaaatcttgaatccagggaggtaagttagtagtgatactggctcccgtgctgagggttctggtatttgtaagtccttcaaaacccagaactttggcttttgcagggtggccatagggtaccagacggtgtctagggatcaagcagttgctaagtaagatccagagacctttgtgtaaagctgaagctccctgaaagctgtcagtgggtttaact

SEQ ID NO: 21585 - DNA, 1034 bp, Homo sapiens
acttttggtttgatcagaacccaaattagagaaatgtttctcttgaggaagcactggctttgtaacctaaccatacagccggagcccatcatgtgcccctgattttgcgaaattccaactgtggaacccaatagatgtcaatacttttttaaaaactatcaatgtcatatatggtctttgctgttattttcagatttggtagtatggaggtactttggaagctttttaccagtaactacaatatgttccatttaagtttaaacaaaagccaaacccctatttaattgaaaagaaaaatactatgggaaaactaaggtgaacatttcctgattactcagctacatgttacatggtcatctctgctgttttcagatttggcagtgtggaggaactttggaaattgttacatgctcacatgttggacatgtgtttcggaaagctacaccttacacgtttccaggaggcacagggcagattatcaataaaaataacagacgacttgcagaagtgtggatggatgaattcaagaatttcttctatataatttctccaggttagcgttgttttgcattagaaatacaaggctgtacctttgttgaccctgatcctggaggagaagtaagaaggttagaagtgaagctttgagcagaggtgaacacctgcctcataaggtcattgtaaggaatgaatgaaatcacacacagtatagaaagtgcttggcagaatgcctagaataatatataattaacagtaataaattatccaggtcagtgttgctagcccaggttttgcagatgttctattttttttaaaacctaactgcaacatttagtatttattcctgtgaagtttcatcttgttaaattttcagccatttttctagcttatatgactttttcttgattcttggagttttcattcaacataacaaaaccactgtttttgcagtgggtcatgaacgttctctataagcaggccctcaatgctgtcataggaggctttcgtcaagtatcacaaggccactgagagcccaa

SEQ ID NO: 21586 - DNA, 1039 bp, Homo sapiens
gttgtttaggaaactgaagcacaaaaaagagaagcttctcatagtgttacagagcttatgccagaattaggacttagaatttaggtcatcttgcagcaagtcaagtgtaccctactggaccccagtgcctttctccctccctcatacctctttatcgacctacatatctacctacttctctctctctctctctctctctctgtttctccatccatccacctacctaccttttctccgttgtcttttaaataatgtatattaccaaaaaaaacaccttttctgcagaggaacttaatcaccaaaactgatgcttgaggtgttttgttttcttccactctcatgttaagattttttctatttcagaaattaaccctgcagcatgtgaacagtaatcagtgcctggataaagccacagaagaggatagccaggtgcccagcattagagactgcaatggaagtcggtcccagcagtggcttcttcgaaacgtcaccctgccagaaatattctgagaccaaatttacaaaaaaacgaaaaaaataaggattgactgggctacctcagcatacatttctgccacattcttaagtagcaaaaaaggaaaagtgctttcctcctctgcaggatgtaaggtttatcagccattaaaacttagacttctctagcttttcactagctgtgaaccagccttcctgtccatggacgtgaaactgcatagtaatgagactgtgcacactgatgtttacaagattgaaagagtctttctccgaaaatcatggtaaagaatactgagacaatgaaaaaaaatcaacaaaatatgctttctggagaactgtaccttttatggtttgcttgcacatcagtagtttctgctgaacgtgctgtcataatgaagagatttccaagattttttttcctgattagaactggtagccagtatattaaatattgatataaaaataaaagaactggaaccagattcagaatcatgaaaacaacatttttacaacaacaaaaaaactatattaaacagggtttaaa

SEQ ID NO: 21587 - DNA, 1032 bp, Homo sapiens
ttgtgtcccataaatatatacaattattatttgtctttttttttttttttttgagacggagtctcactctgtcacctgggctggagtgcagtggtgcaatcttgtctcactgcagcctccacctcctgggttcaagcaattctcctgcctcagcctcctgagtagctgggattacaggtgcccgccactacgcccagctaattttttgtatttttagtagagatggggtttcaccgtgttggccaggctggtctcgaactcctgacctagtgattcgcccgtctcggccgtccaaagtgctgggattataggtgtgagccaccacgcctggcctacaattattatttatcaattaaaaatactcaaaggccaagattaacaacttgttcttatagttgcatgaaatgaaattgtgctaactggtgccagcaccaaaaggccaggtattcactttgtgtccacaacatttggcacaacacaatggtcatggtagctgctttacctttctgactaacttctctctagaacatctgtttctcttgaactcgtcttgctcctgatcacctggtcatagcgagctctttgcagttctcaatgcataccatgtacttggcagcttcgggcctctgcatgtgctttttcctttaggtctcactttggagactgccctccaccccaaccccactgcattatgaggggccactttttttcacagttctggtgaccctgtagtttcttgtttctgatcattaccaactgcctgtgagctctttgcagacctgagtggtctcacttgtacccccaacacctagtttgttgcccagcacatagcacaaactgcagattccaagacttactacatttaataagttctacttcttccacactaagaactaaggtcctttctgagcacatgattggaaagtagataaaaagtagtaaagatagaaactctcaggtgggaagttgtccacattacttcatttgcaagtgagggacactgtggattcttgacttttctgtttcgcagaa

SEQ ID NO: 21588 - DNA, 1033 bp, Homo sapiens
tgtatctgatgataagggacctacatccagaattatgaagaactcttaaaattcaataataaaaagacagaagatgatggtcagaatctgaacacagttctccaacatggctactgaatacacgaaaagatatttcatacctactaggctgactcacagacacagtacaagtggtgaagatgtaaagaaattggaaccatcacacattgctcctaggattgtaaaatggtggagtcactttggaagtttggcagttcctcaaaaatttaaacagagttactatatgacccaacaattccattcaggcatatacccgagataactgaaaacagatgtccacacaaaaacctatatatgaatgttcatggcagtagtgtttataatatgcataagacagaaatttcaacatagctaaaagagtgttttttgaatgtccagccactgttgaataaaaaaaatgtggtttttccatacagtggaatagtaatgttgtcataaaaaattactgatatatgctagaacatgaatgacccttgaaaacactgtattaattgcaagaagccagacaccaaagaccacatattgtgtgactccatttatatggaatgttcagaataggaaaataaatagaaatagacaagtggttgccagagggatagggagaatggggagcaacttctaatgagtatggggtttctttttagggtgatgaaaatattctggaattagatagtaaccatggttgtacaactctgagtatactaaaaacacaattctacacattggaaaggtaaattttatgtgaattatctatccttaaaaaaataaacattaccttaaatttaatgtagacatttaagttttaaatcctgtaaagagaagcagcagagatgcaacataggctcagactttaagcagctctaatttcatggctttcctgggcctccaccatattgccatagggcctgtcacatgcttatgcatcctactggctgcagcagtgcatcctgaagacagctcagtatagccatgg

SEQ ID NO: 21589 - DNA, 1050 bp, Homo sapiens
atacaatgggaacaaatatgtgttacttccaagaaagcagccttttttgttttaatttttaagttttctttgtatgttatgtttttctattgtcccaattagaaaggaggatgcttatctcttctgttgttagttggatggtagatgattaaataaattggtatttatcagatgacattagctgtcttgttcacatgcagaccttcttgaaaagttctttgtagaacttagtagactatatactacatgttgtaaacatgtattagcattgtatgcatatttgtcaatgttattaaaaatgaatatagatcaaatgaattggagggtaaggaaacaaagtattgttttttttctggaaaatctggaaatatatatattatagacaaaaaagtcttatacataaacttcacaatataatgttttaaaattaatacaacttattttttaattaggtagagatcttttcctagcaagctgttcacaagattgcctgataagaatatggaagctgtatataaagtcaacatctttagaaactcaggatgacgataacataagactgaaagaaaatacttttaccatagaaaatgaaagtgagtaataatgaaaatatccaatataacgatacttaggtctcctagttggttgatttttttttcaccacccacctatgtgaaggatagtttttcacaattgtcagattcctacctgaaatttcttttttctttctttttttttttgagacagagttttgcttcttcacctcggctggagtgcagtggcgtgagcttggctcactgcaacctccgtctcccaggttcaagtgattctcctgcctcaggttcaagtgattctcctgcctcagccttccaagtagctgggattacaggcacgcaccaccacgcctggctaacttttttgtatttttagtagaaatggggtttcaccatgttagccaggctggtctcgaactcctgacctcaggtgatctgcccgcctcggcctcccaaagtgctgggattacaggtgtgagccaccgtgcctggcctt

SEQ ID NO: 21590 - DNA, 1027 bp, Homo sapiens
ctgaagcctaatatacccaattttgtaggtgaagactgtaacaagggctatgggagttttgagccaggaagttttgtcagagaaaaccagtgtacttaacacctcaggccatggatccctcaggccagggatcctttacatcaaaaaatataggctgggtgtgatggctcatgctggtaatcccagcactttgggaggccaaggcgggaggattatttgagcccaggagcttgaggccagcctgggcaacatagggagaccctgtctgtaccaataattttaaaaattagccatgggcttgcagccctgggtatcgttgcaggcgcctgtggtcgcagctacttgggaagctgacgcaggaggattgtgtgagcctgggaagttgaggctgcagtgagccatggttacaccactgcattccagcctgggtgatagaccaagaccctgtctcaaaaaaaaaatgtgtatgcacacacagtcaataattagtccagtccatcatactgtatgaatgtctcccaggctgaggccactcaggtttgcagatttccttcaatcttgtcaggtttcagaaggagtagcctcagtcaatattatatacaacttcactttttcaggcatctgggataattaagctaagagacaatgtcatctcttgctcttgagactcttatgagttgttaatgtgatattgaattttcctcaatgacccatttattcatttctttactctcagctgctatttctccttctctccattaatacccaaagcttttcatctttgaaaggcacattagaattgccattgtgttgatctagattgctggcagtaatacaagtcaagcaagtagctcctcagtctactacgttcagacaggataaggttaggtaggtgcagaactagtgagctatttttaccaccaggcaatgtagctgttttcaccattagccctaattttgctagatggggtgaaggtacaaccgtacaacccattcccgtcatgccttaggaattttgatacaagac

SEQ ID NO: 21591 - DNA, 1029 bp, Homo sapiens
tgtgcattctcagaggccactgatctgttttctttccctgtagttttgctttttccggaatgctatatgaatagaatcatttcgtgtgtagccttttgagactggcttcttcactctgcacagtgcccttcagatccaagttgttgggtgcttcaggagttcctgccttttgattgcagagcagtttcccctggtatggatatcccacagtttgttcatccattcactcactgaaagacacctgggttgtttctggtttttggtgattatgaataaagctgctctaaacatttgcatagagattttgtgtgaacctaagttttcatttttctgtgataaatacctagattctttattcagcagataattacctggctctctccttagcagggcagtcaggaggtttcttatttggcaagttatcctttgtccgaataatttgtcttttttttttttttgagacagagttgcactctgttgcccaggctggagtgcggtggcatgatcatggtcactgcagcctcgacctcctaggctcaagtgatcctccagcctcagtctcctgagtagctggggctacaggcatgagccactgcacctggcctgtcagaagaatttgtcattcgagtttctgaacttcagaatgtaagcactttttaaaacactgcccacaaaaaagatcattcatttagatatcttgtttgttcttaattcttatgcctcccaaagccctgttatggatgaattgtgaggcaaagtactggcgtcccctgcctcatggcctcatcatcctgggctctgacgtcaccctggctcaaaaccctcatttcacaactttacacagggacaacgcctatgacagagctgtgtgagaatcacttctcaatccccatgggatacaaatcaccagccattttatcaattagcaaaatggtgtaaacaagcaaagcagcaagtggcactagagaaattagagtgtgaaaggtgcactttgatcattgcacacagaggtgatgtgagcagtaatgg

SEQ ID NO: 21592 - DNA, 1068 bp, Homo sapiens
ccctggggctgctgtaaaggacagcccagggtttctggatgtttccaaccttcaagagaagctggaaacctggctttttatgtaccgtgcctttacttttaactattggcagctaaccaaaagtattctaaaacgccatgtgggtcacaccgagtgtggcagtgttctgccagttgcagaaccatgatgtcctgcaggccccatcatttcacagctgtgatagataacaggctggcccaatattctgctgccagcttggctctgaggctggatttctttatcccttaagggctgttttctgggggatgctatggaatgactcgtgagttctgggttttcctggccagcaggcagctcaccctctagtattcttaaaagcttttcctagaagtccgcagtcacagccagctggacttccctgaggtgtggcttctgctcctgggccttcgtatcacagatgccaggtggagctagattcttggcccatttgtgtgttttccctggatctcagtgggcctacccttagaccccaggatatactcacttagcctgaagggtgccgtgtggataaatgtgacaaagtaggaaggagagccgggcactggctacagaggggaagttctgaacagattgggattcctgagtttctgctcttggttttcagcccagcctgagacttctgctctccccctgcccaggggagatgaagtggtggtgtctctgtcaccttttctcagggtggggccccaggttcctgcatcagatcacctgtgggtggtaggaaatgtgccatgtcccgggccccacctgctcagactcacagaattaggatattggggtatgttccaggaatctgcactttgaatgctcccaggaggttgatggagggatggcaagggcactgggcagtagggtcttgtgattccaagtcatgttctatgggccccaccatccaggaatgcaagcagatgagggcaggcagcagccaactggctgcttcgggctcatagcccagaacccaacaggaagtgttgagtggtggcctgccctaggaccgactccatgggt

SEQ ID NO: 21593 - DNA, 1031 bp, Homo sapiens
ttttgatttgcatttcccatgtggctaatgacattgagcatcttctcatgtgcctattgggcatttgtatatcacctttggagaaatgttcttcaaatccttggccacttaaaaaatagggttatttggcttttttttaattgttaaattttgtaggagttctttatatattctggatacaagtcccttatcagatatacgctttgcaaatattttctcccattctgtgggttgcctttttgtgttcttgatgatgttcttttaaacagaaagtttttaattttgatgcaatctaatttacccagttttttcttctttttgcttgtaattttagttttatatctaagaaataattgcctaatccaaggccatgaagatttacttcaatttttctctaagacttttatcattttagctcttacatttaggtctctgatccattttgtatttagtgtgaggtaggggtccaatttaattttttttgcatatggatacccagttgttgtagcaccatttgttgaaaagaccatcctcatatatttttgatgttaataaatacattttaaatttcacttttaaaacttttaagtgcttttgtaaatttctttgggatccgttgtgaagaaaattatcaaaataatgtaattcctcaaagggtatcatttgttactatgtgatcctgaatgaggaatcaattgatttcttatctgtctatatttgaaactaacattcataaaaggatatttaaccattgaattctggctcttaagacaataaaatctggcctctaaacacctttttgttcctattttttagtggctgcatttcatcttattttacttcatttattttttatgttaattgccttatttgctttttatttttgtcagtataatatagagtaaccacatttacaatgtttgcagtacaaaatagagcaactgatcctgtgggtttatctccaccacctggcctgagtggcccaggagaatgctgtagttattaattttcaaaaagggtgaagaaccaag

SEQ ID NO: 21594 - DNA, 1025 bp, Homo sapiens
aacattgatagctgtggttcttggttattctgtagctcgcctctaaggcatgtattatgccttaaaattttcattatttattggattactcttgaccttgactccccaagcagatgataaattcttagagggcaggaatcatatttatactctccccgagtcctctagcatttctaaagtggtaggtatgtctgtgtagtaagcgttaaaggattttttgttgatgaggccattactttgttgttttgttttgacaaattgcaaaatgcccccttcctccatctttggaggaagaatgaaggctcatgctctcttgtgagaaacacagccccactccggcctgtgaagtgtatgggaggtttactgcaaggatgcaggggtgtcgtggaaaagaggagccagaagagcaacgaggcttctgagggtggggctgggggcgggatgtgaaacagaagttcttgagagccaggcatctgtgtctgtctgtctgtctgcctgtcttgtcacatggtctctcatcccttcttttcctagggcaagtgccacacctcttgactttctctgctgactgggccctctaagaatttattgctctttgaacatgacagcagaatgatcattccagggaccatcactgactattttttccaacttcaggatatttcttcagaggaggaatttgattggtccccttaggtcaggtgttcttcctggtccggttagctgtggccagagagatggggtcactgggtgtcaacattttcaagcaggattatggaaacacatcttcagatgacagtgtgggctggctaggcacgccaagcttctggagtgaaacttgaaatatgttttagcagcagtcagtcgggaatgttaattaaggggccactgtcgtcattgcttggagtaaagatagaggtaccctctactgcctcatgaagctttggtctagggagtggcagcttgtgaacggtcttgaggtccaatgagaaattgaggattgttttccccagaagtccctgcca

SEQ ID NO: 21595 - DNA, 1033 bp, Homo sapiens
ataaggaattcttaggattggagaactaatcaggagatcaaggtgaaaaggaaatgaatatgcagaacggcagaaaggagacatggcagaactgagggccagaaggaggagcagctccgcacccatgaagctgtgtgaagacatgaagcacttctttggggagaggcctccactgttccttgcgccacccagaagatagcatgaaactgctggcactagggaggaatcttgttgttttgcagcaagaaaaagtgagaagcaggcctggtgagagcagatctgcgggcaggtctgtgggtggacttctggggcttgttctcaagttggggtggagtgttcgaccagactctgcaagctcactgatgggaatgggtgcctgttacctcatgtgggcaccaaacctctgcgcttctctccagagatcttgtggttctgggtgtgaagctgaagattcagaatgatacgttttcatctcttcttgcagttgaagggtcttcatttgaaagagaacaaagatataggactatgtcagccccttggtgttaatgatctaaattacaggttatttcattgtgcatgatctccatttgccacaagactagggttgggcaaataagccagattttgttttttgagacagaattttggtcttgttgcccagtctgcagtgcagtggcacgatcttggctcaccagaacctccgcctcccgagttcaagcgattctcccgcctcagcctcctgagtagctgggattacaggtgcccaccaccacgcccagctaattttgtatttttagtagagatggggtttctccatgttggtcaggctcgtctggaactcctgacctcaggtgatccgcctgcctcggcctcccaaaagtgctgggattacaggcgtgagccaccgtgcccagccaaacaaatttttaaaattttaaaaatgtttaattcctgcaagtctgacagtgatctctagtaaaatctatacaatctattacatggtagataataagtaatttttaaaagttgaatc

SEQ ID NO: 21596 - DNA, 1056 bp, Homo sapiens
gttcttcaccctgtctgcccctggagctgcaagcccatgctggtatcccaagggctgggcaaagcttccatccctttccctggttcctagcgcttcccctaacagtcacttcctagtttcttatgcgagaagtaaagggtgaagctcaggtctgaagactggaaggtcatcagtagtaaaaagctgggccactgagggaagcattcagcaggaatcctttaatcaggtccagtgttaattgatttgcctgaagccagaagcactttggagaggaagacccatccaacagcagaaaatctgacttggagtatactttaaaataaatgtgttatagttaccatgtaggcacattgagtgctggcttagttgtgctttaatgaacaataattaaattacttaaaatattaaaattaatattttatgtgattgttgtaacagtatttaatactactaaatatttgtatttaataattcaataaatttttttgccagtttatttatattattaacttatgttggaggttagcaaacttttcctgtagagagccaaaaggtgaatattttaggcattttggtccaagaggcaaaactgagattattgagtaggtacttctatgataagagagaaagaaaatttgcagattttttaattgactaaattcaaactacaatagtaataattgagtacaatgtttttataactcagatttaccaatgatatgaatgaaattttggtgggagaaaataacatttcacttaattggggtccaaagttagtgttttctgtcatcaaattgattataaatgtttatctgtaaaaacccattcttagctctctggctgtgcaaaaacaagttatgaatcagatttggcttatgggctgtggtttaccaacccttgattatgttatacaaattatacaaatgatttgtttagaaaattcatccctcctccccatggatggggccaaggtaactgtctggtcttatacaaatacaatttcatctcaatttcacagtctcttagtatttagaactttgcgacactttgatttta

SEQ ID NO: 21597 - DNA, 1050 bp, Homo sapiens
cctcccctttctggtgggactgctcagggacatctcctcctcctctcttaacatcttcccaggtgtttctttgaacagagcaatgggtacttttccagcaatataaaaagctttgaacagagaaattttacagatggtattaacttttcaaaaattagacaaacaacctaacttcagaagttggtatttcttacattaaaatcctgggaaaattaaatattttgccactagtttttacatctctaaaactagggtaatactgactacctggtgttggccatgaagagtcaatgaggcaatgcttgtagattaacttcttgtagattggtagtgtaaacttcagaatttaaaatttatccatgctcaccctccctccctctccttctttatctctccccctctctccctgtctcctcacctttgatttaagtcaacaaaaattcattttgtgccccgtgtgccaggactgggcatacagtggtgaacaagacacacatggctctgcctcatggaactttccattctggccaagatgatagacaaggaacaataaaggatatatgtaataatgacagctggtgataactgctgtgaagaaaagtaaagcaggtgtgaggcttctagagggtggcatgtataaggtgggcagacactatttatacagggtggacgaggaagacctctttgaagacgtaatgtttcacccaaagaatggagccagctggaggtaaatctgcatccaaaatgtaaaaagcaatggattaaggcattcgaagcagtttctgaatcgtcaggaacactgttgataacatgtcagtgttatcagctgagggatgattatcatgaaactttttaagttctagaatttctaaatatctgtgtgtgtgttgtatgcagggaaagtgcattttcctcagcatggattatgctttatctctgtctgtgaaaacactgttgcgagaagctcagctcaatttagcagaacataagtggaaagtagacatttgaacgatactgatggttgatttccattaagtaggaattgaaatg

SEQ ID NO: 21598 - DNA, 1023 bp, Homo sapiens
aagaagaatgagttaaagatgaactgagcagcgggaccggtgacatcagtcctcctccactcagaaggaagctgttaaaataggacgagctgactttgccctttcctcctttctgaataataggcttcatttgcatgtgattattgtttactaattacctaccattcacctacagcccccaccaatactacttcttccatacccctctgcactacattttagcatcttgcttgggcaggacacacaagccatttaaacagctgcacagtgattgtttttccctccttgtgtaaggtttgtgcctccctgaggatatgtctattttggttttcatcattatcatatcctgacctgagagagagtgatgaaatcagcttagatagagcccgtggccttaagtgattgctgttaaaataacttccctgtgcaagttgtataaaaatacagggccatgagaacacattgctagggcccctcccaaggtctgggaaggggcctgtttgaatgagggactctgaaacataagctttgttagccccccggtcccacagcatgaattatgttaactgccactcttgacccttacctttctctgtggcaggtatccattgggaaagacagttgcagcaagctgagagaggcatacttttggaaagtgaattctttctaggatccctgaaatcaaactccacatgcagcagacttttttacatgcttgcttgtccaaattttcaggaaccgtccttgggcacccagagtgagtgaatgagtgtgtaccccttgttgggtagatgaattagcataaaaaacagggttacaccttgcctaagttcgtcctttgacttagaaagctgttcactgctgctcctttctgtctgagggtagttagtctgggccttgcatctaacctgctggagcccattctcaagcaagcttatactaaagccagagcttccccaaaacatagttgcgagaccttggaatgaggactgttgaggatgttgataaacagtttccactggt

SEQ ID NO: 21599 - DNA, 1022 bp, Homo sapiens
ttatgaagagcaccttctcctactagagagtaaaatgtgcagactctgaggattacaacaatgtagtgtggccccttcctcagcagacagatgattggtgcagaggagctctgaaacagacctcagtgtatagaacaactcactgtacagttagttaacattggtggggacgggttaggtactgattggagaggtgttgttaaatggaagtaaacaaaaacatactttaaccatacaccacagtaagccccaaggagcttaaagcatttaatggaacatagcaaactgtaggaagaaaaaaaagagagagagagatgaagactaattagtctgtggttggtaacgtttattttaaaaataaaaccagtgaaacaggttccagaggaagagatttaactattttactgcataaaattttaaaagatcttatttacaaaatgaaaatcacaaattataactaaatgcaaatgacaaactaggaaattgtttacaaaaagaaaggtagaaaatgatgttatcctaaatatattatgaattcagtagaaaaatgaaagacattaaaccaactaagaacaaaagaaatacatatgaaaacaacaagacatgtttcccaggtcacattggcaatgattgccttttaatgaagtatcatttcttgatgaacacccaggaaactcctataaccctggtgggaaatgggcacaacttttctgaaacataatcctaagaattctgcttttattttcaaatctttttgtgagctcattttaccatttgatttgaagcaattttctgttggtttctaaggattaaagtcatctatttcctgtcctttttagtcactgccattgttttggaaaacaccgaattcagcaaaaatggaattttcacactgccacagtgttccccattgtaacattacctattttattgataaggccattcccagctattcttatgatcatagcagtacccacacaatgtggtactttgttgctaatcactggcagagacccagtgcc

SEQ ID NO: 21600 - DNA, 1021 bp, Homo sapiens
tccttatggaagtatatctttttgatgttacacttaatactcattcagttctcctatgaatggtaactttagaattagggaccaaatggaatgttagattataggtttggtttagcctgaaagaacctcaccaaggacttgagaagggtgccacagagggttataggaatcgtgaataattcatatgatctgtgacaccacaggattacttttcctacccatgacttgtgtgctatcaaggtggtagaatgcctccttcctcaacaaacactcctaaccagtggagtcatgtcttatgggccagcctttcttaagctacatatgagtggcacccactcgagtcgatgtcttaggcccaaagggcaatatgacacctctacaaaggcctgccaaccagtgccatgacccatgaatggcttattcattcctagattaaaaatacattgtctcagaagcatggatgaacgaatgaatgaaaccagaatgtcttccaatagacctgtcagtcaatggcgtagtctaaaatagttactatttggattttttcccagttagaatatactactagattttatgctttatattgctggtcactatgatgcagtaaaaacaagaagataaaagactttattagtttacatcttaggaattattgcattgaaaatccagtgtcttcatttggttgaatatgtatgtgccaagaggtattatatatactgatatttacttaatttctttcaaagtcagattacagttagtcccccaaattcttcttatcattcatattaatgtaattattgtcataatactgggtgtagggtaagtcttattgatcagattggtcttaaatcatgttttatttattaggaatagctttaagaattattaatcataactgggtttagcaggcctaaaacatatcaagaaattggattagtaaaaatataccaggcgacagggctttcttggatcagattgtccaatattcttccaaagaaggacaattttccaaaagtggaaa

SEQ ID NO: 21601 - DNA, 1062 bp, Homo sapiens
gattgctccaagatacaatctaatgggctcttgccagtcccttgaatcacaggacatcagggtggaaagagttcccagaggacagtgaatccagtaggagtttccccatagcaccctggggagcccctgcacacttacatgtctcccctgctcccgggctctttccccatctctcctgtctcagccccaagcctacctaggtcttggggggcagtggatattcagatgacagatgctcagtaaagtggagggtaaagggatgcatgacgatgccagagaccaacggaggtacatagtgcaggttcctttttcttaatgtgcctttacgaaacataaaaaccaggctagcatctcacttacctcatccattactgtaaggtcagttccaggcaaaaggctgaaattttctgggaatcctcctttagtcactatttattctttcttgaacagactcaacgataataaagtcatcttttttgatattgacaggtcatatttggaacttgttgaaggactctagagtgtgattttttttcatggtttggattgttgcccatggatttctcccatctgtgcgtgcatttgagtagcacatggacttctggcaatagagggaatggaatgaggaaaggattaagccacagggcgtgccatcatctgggcagttacacatttcaactgaaccctagttaggcagatttttgctgggggaggaagaaaaccaattaggaagacctcactgaagccgccctatgtgcacagacatgtgtgtatgtagtcagccaagcagagggcacttggttactgctctctagaagtccacattcctgagggtctgacttacatggaaggccagacacattaacttagcaattttgttataattttaagaaccacgggataatcatttctcttaccatccacctttgtgtaagctccttgttttcttggaattttctggacctttaggaagtgctcaggtcacttttgtgcagaaggagccctttctacagctctaccctgcacccaagcagttctgaattccagtgccatcagccaaga

SEQ ID NO: 21602 - DNA, 1057 bp, Homo sapiens
tttagatttacatttccccggtggctaatgatactgaaaaatcttttcatgtgctttttggccatttgtatatatcctctttgaagaaatgtctattcacatcttttgcccatttaaaataaaattggggtgtttttcttttttgttattataactggatttttagatattctggatgatagatcattatcagatgtatgctttacagatatgtcttccattctgtgcgttgttttttcactttctcagtggtattctttgaagtacaaaagaaaaggtagagaaatctaaattatctaccttttttattttattcattttgatgcttttgtaaatgagatggttttcttagtatcctttcagattgttcattgctagtgtagaggaacacaaatagctattgtgtgttgatcttgtactctgaaactttactgaatttgttaataagctgtaatagttttatttatttatttattgaggattctctaggcttttctatatacagtagtctcccttatcagggaatatgttccaagaccttcagtggatgcctgaaactgctgatagtaccaaatcctatatatatattttttcctatacttacatacctataataaagttcaatttataagttaggcacagtaggggattaacaacaataactaataattaaatagatcaataagaacaatatgccagcatcactactcttgtgctgtggagccattatttactaaaataagagttacttaaccacaagcactgtcatagctcaatctgataactgagagggatgctacatgactaacgcctatacagtgtggatatgctggccaaaggatgattcatgtcccaggcaggactgagttgaactgcaccagcattcattatttctcttccttgccttagtgctctgcctagaatttctagtacattgattagtggagtggcagaagcaggcatttgtctttttcctgatctaagtgggaaaactctcagtttttcatcagtggagtaacatgttagctgtgggtttttcataagtgccctttaccat

SEQ ID NO: 21603 - DNA, 1039 bp, Homo sapiens
aggtagaaaaaattttcacaaaaaaagaatgtaagtttcaagagaaaaggtctctcctttttaatgtatctttctggccctttagaagagaaggcagatgttctagtctttgaaatagttttgggaaagtaaaaaacctaaagttcttaaaatgaagaagactgtaaatagaagagaagggatatggaagaagaaagggtattttggtgtttggcagtgtggtgtactaatataaacaccttatcaactttgatgaatcttggcctttttgttttgaataagtattgggtttttgttttttttgtttacaaattgaattatttagtgaaagaatatattatgtacttggatagggccacttcgttccatttaacaagccctagaaaatgctgttttactgatctgataatcatcacgaatactacagaagttgtatttcttgaggccattttatttactctatgttgctgtacaaatttagcagattttggagcattgttattataaattgtcctggaatgacattttatatcagactaacagtttgaatgattctttccatttgtattacagagagataggcatgcttaaagaaagaactgattgttacttattttattgttgtctaaactattcttaaagattatttttgttctcttaaaaatatttagttattaatgctaaccacagggagaaattgtgacaaaagtttttagaaagtaaagaaattatatgctcactattgggtgactattacttacctaggtgaccgtaccccaaacttcagcatcatgaatatacccatgtaacaaacctgcacatgtacccctgaatctaaaaaaaagtcaaaattattttttgaaattatataaatgtaaccatatactaaaattcatcccaataagagtctctaggggttaagttactctttaataatgagttatatttacactttacttttttggaattcatccaggaattaagaataaaatgaggcactcctcacccactccagtcccgtatgtatgaacttactttc

SEQ ID NO: 21604 - DNA, 1037 bp, Homo sapiens
aatataaggtcatatcatcagcaaacaaaaaatttcacttcttccttttctatttggatgccttttacttttttttcttgtctaattgctctggctataacttccagcactacgttgaataaaagtggtgtagtggtaatctttttcttgtttctgatcctagaggaaaagcatttaacttttcaccattgagtataatgtcagctgtgggcttttcatatatgacctttattgtgttgaggtacatgttttctgtgcctaatttgttgagagtttttactatgaaaggatgttgaatattgtcaaatgccttttctacatctattgagatgatcaccacggtttttattgaacaaatgtctgctgttttacatgtatatatgaaaaaatatctattttatatattcttttatatatgtctttttaggaattaacatttagacatatttagtcaattttatctcagatatcttttgaaagagaaatagttgaatttttttatccattgtgtccaaagacactgtattctaacaaggtgggaaagactgataaaatggcacattttaaaaaatgaacattccagttaatttcttataaaaagatatgactttggagacagaaaagctgcttttcttgacttcagaagtgcaagatgggcagaaatggaacctagaattttgtcatagtggtttagacagtgcttgttaaccagtgctcctcaggctataaggtacacgttaatcacctgagcagcttgataaaatgcagaatcgaatccacatctagagtgcggctcaggattttgcatgtcttagaagttcccagatgataccagtgctgctgtccctggaccacacttagacttccttcctgacagtaagtttttctctttttatggcaggttgattatatagaaaggttaaacccagtgtagacaactattcatgaagtgtactttgataagaaaggtatgccgttgacaaagcttgctgtagttgtgaagcatttgatgtaagactattaactaagtgaaaggc

SEQ ID NO: 21605 - DNA, 1041 bp, Homo sapiens
aagagtactagtttacctgccttacaataaatactaatagaagtctgtttagatgaaaggaaaatgacataaggcagtaactcaaatccacacaaagaaataaaaagcatcaataaagatgtgtatttccttttccttaaacaattttagacacctgaataaaacaataataatcctgtattgagcttacaagatataaagatcgtgtgtgtgtgtacatttgtgtatacatttgcacaagggagatgagaagggagggagctatattagagtgaattttccatatactggaattaagttagtggaaaggaagtaaaactgtctttatttataaataacatcatcctgcatatagagaatcataagaaatccacaaaaaaaggtgatggaactaataaatgagttcagcgaggatacaggatataagatcaatatgtaaaaaatcaattttatttctgttgattaccaatgaacaattaaaatacggatatatttaacagaagtgcaagacgtatacactgaagacattaaaacatggctgagagaaactgaagaacatctaaatagatggaaatgggttccatggtcatggattggccgtttttcccaaattgatctgtagatttgttgcaatcctgatcagaattccagcagattttgataattccttttttgtggaaactggtaaaacagtcttaaaatttatatggaagtgcaaaggagtgagaatagccaaaacaattttgagaacgatgagaagagtagagggttactcttttcagtttcataatttgttctaaagctatggtatagtaggtagaattttaagatggctcacatgaccttggccccctggcaaaatggtttcactcttgtgactatgttatgttatatatttaaaaagattatcttggtaggcccgatctaataaataagaaaagcagagagttttctttagctgagagtaaaagatgaaatcagagagatttgaaacatgagaaggattcaacttaccatttctagctttaaagatgaatgggg

SEQ ID NO: 21606 - DNA, 1041 bp, Homo sapiens
agtcacttgtacatttataacatattagtaatgagaatggcagcctttgccttgccctcaattgagatagctgtttgtataaacagttaattgtgatttctagatcttccaaagaattaatagctctccttgctcatcattcttgtctgttcttcctatttatttattggtccttaatttattttaaaaagcaaatattttaaattataaaagtaagttacattatagaaaatttgaaaaacaaaggttaaggaaaatatccataacccttatgatttttacctgtatttgaaaaacatagtcctatagttgtgtgcttacaattttgaattctgtatttgtcacttaacctattttgcattttctcttatggctgcatagtattctgttagatttaacatggtttaatcatttcattatagttggcagattaagatttagactctggcttgtattacttgagtcttcaaaatttttcttctttattaatctttccatgtgccaaaaaacttattaataataaatattatgaattctgttaactaaccacaaatgcctggtagttgtatgctaacaaaacaacagcaacaacaacaaaacaaaaaccttgagactttactgggtagatttattttcctcaggatatttgacagttttttcatctttcagatttttgaagatgaaaacaataaaatgaattcagtttcagttatctattactgcttaaccactgcaaatcttagataaccaccattcttgaatttgagctaggtgcagttgtatggttcttctgctgattgtgcctgtggtcatacttatgtggctacatgcagctgacatgttagctatggccctaccatggctgggcctctatgttggttcagggcctctctcctcgtgtagcgtcttcacatgatttatccaaaaaagtagctagacttcttacccagagtgcaaaaatggaagctgccaggtctttttacagattgggcccagagctgggaatgtatctgtgggttaaaatggacagcttagccagaa

SEQ ID NO: 21607 - DNA, 1032 bp, Homo sapiens
gtaagtaaatatttgagttttttttcttttttccttaaagctctgagaagataatgtgaaaaataaacatcttaccatcgtttaaggcttctagttagtataccaacccttgccaagaagaagtgaataaatggggatgagggcagtaggaggaagggggtgttctttgtttctatattagagttctggcattaacacttgcagattgagaaaagctgaagaattgtctctaaaataccttctttcttttgctgtactttttctttaatgtttctaatttcaagagagaaaaccacatgtatttcatccagtcttcactatattaggaggctgaagttagcatgtattatcttggcaagtttttaggagaaaatttcttatgtctagaagtaaacgtttagatctgttagaacactgcctgtctttaaggtggacgtgcgcattggatttgtttttctgtctgtgtctgtgacaccatgagacattcaaatagaaggaagctactgtgacgtttctgattgatgctttgactttctagtatgaaactacttgcctcttactaggtttgcctctgtctttctctactcctctccatccccacctgtgaaaaaaaaaattacttttaaaggaagactagtagacagtccttcaggaaatattttcgtctttctgtaactggtatgacccattaggagtctggcttcattagttcaaacacttaactatgaatagttactttttcattttgatgatttaacacttgtgatttaggaaggagtatatttaattcttccctttttccctctcttcctttcttattaagattttgtggtttggtttgtacagctagcttctatgattttcgtaaaaggcagctaagagtgactttccaacacagggaaagggtgagtgagagaattccagcagcccataactctagtctggaattgtgcaatcctggctataggagagccccttgatcctccaaacctctgaaactaacacagggagctgccagtaaaccatgggttg

SEQ ID NO: 21608 - DNA, 1034 bp, Homo sapiens
tgcctacatcaaaaagtagaatgattaaaaattaagaattaaccaatgctcttgcaggaactagaaaagtagaaataaaccaaatccaaaattaacagaaaagatataatagacataagaacagacctaaatgaaatagagacttaaaaaacaagatgaaaagtggatttttaaaaaagataaacaaaattgataaactgctaactacattaactaagaaaagatgagagaagatccaaataaacaaagccagaaatgaaaaatgagacattacaatggataccacagaaatacaaaggatcatcagggccagttttaataactatatgctgaaaaactggaaaatctataggaaatggataaattcctggaaacatacatcctaccaagattgaatcaggaagaaatataaaacctaaacagacttataatgttgagcaagattgagtcagtaataaaaagtctcccaacaaagaaatgtccaagactggatagattcacagccaaattataccaaccatattaagaaaaactaatataaattcttcccaagctattccaaaaaatggaaaagaggggatttctccctaactcattctacaaggccagtgttaccctgataccaaatttagacatacacaaaaagaaaattacaggctagtatccctgacgaacatagacacaaaagtcctcaacagtatactagcaaaccaaatccaacagtacatgaaaaacatgattacatgagattacacaagggatgcaaagatggctcaacatacataaatcagtaaatgtagaacatcacatcagtacaatgaaggacaaaaagtatatgatcatctcaatagatgcagaaaaagcatttggtaaaattcaacatcccttcatgataaaaagctttcatcgaaccaggttagaagtaaaatacttcaaaataatgaagatcatgtatgacaaaccctaggctaaaatcatattgaatggagaaaagctgaaagccttttctctaagaactggaacaaaacaaggat

SEQ ID NO: 21609 - DNA, 1025 bp, Homo sapiens
acaggacatcaagctcctttgagtaaacaaatccttttgtcttggcttcttggcacctcaaactgtatgtattctggaaaattgcatttgaggtttaaccaataaggcaaagatagctggccacacatcagtttgttgagtggctactctcagcagatacctccttgctggcattatatacatgattgtgtattgagaaggcatgaggtgatcttaatgttgtcatcactcatgcttattttaatatcagtatagtgcttgtgaaggttctgattgttcaactgaaagaacaagtatttaagtgagcaaatgaatgcaagaataaaacaaatgagaacagttgcaagaaagcgtgctggtaatatatactctaaaatttcaaagtgcctgtggttttccaagtcataacttctggaaaattcttagaaattcgatgataatataaatagaagaggagccaatctgatgagaaataaaattagacaagtttctaaaaagtaagaatagcaataaaaccttctaactaaatgaagccaccaaaaggcttttggctgcaagaaagataattcaaaataaagcatgaagaacttcctgccaacatgggataagcccactatagcctaccccttctgctgattaaaactaaaaagtctggacaaaatataaaagcaactgtataagtaaacaaaagcagtcagatggtggtgaggagtcaaaacttaaaggggcaacctgtatggaaatgagtttcctagtttggaaagtttttcttttctttttttcttatggttttgccttcagttgtgaaggcaacagtgtggcactggaaactaaaactgatagaaatcttattttcttgcaccacaggaaccaagtaaatgagcttagcattccaaagagtttgggggcagtttccaagttttttctccctttaccagctttaacctaagacagacccagttgcaaagctgcatctgcagtgccacaagaggaaccaggaaaaggggccctttgggccactgagt

SEQ ID NO: 21610 - DNA, 1032 bp, Homo sapiens
gggttcaagtgattctcctgcctcagcctcctgagtagcagggattacaggcacgcactgccatgcccagctaattttagtatttttagtagagtcggggtttcaccatgttggccaggatggtgtcaatctcctgacctcgtgatccacccacctcagcctcccaagagttaatttttgtatactgtgaaaggtagggatctagttttgttcttctccatatggctagtcacttatcccagcaccattaattgaacaaggagtctttcccattgcttgtttttgtcagtttgtcaaagatcagatggctcttgttgtgtggacttatttctgggttttctattctgttccattggtctacgtgtctgtttttgtaccagtaccgtgctgttttggttactatatccttgtagtatagtttgaagtcaggtagtgtaatgcatccaactttgttctttttctttaggattgctttggctattcaagctctttttttggtttcatatgattttagagtagttttttttccaattatgtgaaaaatgacatgactagtttggtacaaatactgtctatctgtagattgctttgggcagtatggccattttaactatattgattcttctaatccatgagcatggaatgttttttcatttgtttgtgtcacttgtgatttctttctgcagtgttttgtagttctccttgtagaaatttttcacctcttggctagatgtattcctaggtatctttttgtgtgtatgaggctattgtaaatgtgattgtattcttgttttagcactcagcttgaacattgttggtgtatagaaatgctactcatttttctaaacttattttgtatcctaaaactttgctgaagtcatttatcagttccaggagccttttgatggagtctttagggtttcctggatatagaatcatatggtccatgaggagagagagtttgacttcttttcctatttgattgccttctatttctttctcttgcctgattgctgtggctagcacttccag

SEQ ID NO: 21611 - DNA, 1064 bp, Homo sapiens
tatatttcagttaacagtctggctgttatcattgagaaaaatgactaactcagtcagggactgaattaatttaatgtttgatgttagttttgatgagggcttttctattttttattttatttttagatggcttttcatctaagaataaacgtgaaagccttgggtttttgaacaggttctctctttcttggtaagccctgaaatccaaatgttgtttccaaccctgtgagactacttaaagctcctcttggctcctccactagcacttcttttacattttaaattaaatttcttttaaaatgtcttgaacagaaaagcaatgactaatgttaaggtcatctttttttgcttaccttctatctgaaatcttggctctttcatgttctcaacaccttggtaacacttcagtgccttcaaactaattttaaaaaatattttttcctatcattcattcttgcaggaagtatgcaaaaattgcattattatccgcaatagattgtgcctaaacattttgagaattttgctctcctagaccctgaagaaattttatagagtacttaatctacaaattttagaaaggttgttggtgcctgatttttacataaaaaggtagttccagctgggcgcggtggctcacacaggtaatcccagcactttggaaggccaagacgggtggatcacctgaggtcagtagttcgagaccggcatggccaacacagtgaaaccccatctctactaaaaatacaaaaaattagctgggtgtgatggcacatgcctgtagtcccagctactcgggaggctgaggcaggagaaacacttgaaccgaaatcgcgccactgcactccagcctgggtgacagaatgtgtggttcctttttgtgccttggctaggtatctaccatctgcctagtctcctgaatctccaaagattgttcaatataacttgcagattggaacattttaattttaatacaattatttcagtttaggctgttagttttgtggtctattgtaggccttcctttttgtcttctactatctctccatgtaaacttcgtgttttga

SEQ ID NO: 21612 - DNA, 1022 bp, Homo sapiens
tttttgcattgtttgtagagatagggttttgccatttttcccaggctggtcttgagctcctgggctcaagcaatctgcctaccttatccttccaaagtgctgggattacaggcataaggcaccgcacccggcccagacacttacttttaatgtaaagtgtatatgatttcccatatggttggccctccatatccctggagtcaaccaactgtggattgaaaatagttgggggcaataaataatgcaacaataaaactattacaaataaaaaatatagtatagcaaatatttatatagcattgacattatagtaggtattaccagtattataagtaatgtagagatgatataaattataccagaggatgtgcaaagattatatatacatacacatcacttgagcaaatccatgggattttggtatgagagaaggtctgggactaataccctgaggataccaaggaaccactgtagtgtttttgagtatgtttctttgaatagatttgttttattggttgctctaagtattctgttaaacacacataacttatcaaagtctactggtgtcatattttatcagtttaaattaaatgtagaaatttgatctccctttaagttcccttaccctcccccatttataattgtcttaaagagtttctcattgagaatagaacaagagaaattttacaatctgaacaacagaaatagactaaaccaaaaaaagcctaaacagagtctctcattgagaaacacatcataaaatattgtaagttttgcttaaatcatcaaatttaaaataagttacagaataatttagaaaagtgaagagaggaaaaatctattatatttatctgtgtttctatttttttctattgttcttcctttctgatgttccaagatttcctcttttatctttttgttgttttgtttttagatctctgtttattctttaaggtaagcctgctgtagttttgcttcatatgaaaatgttcttattttcacatcacttctaaagggtacta

SEQ ID NO: 21613 - DNA, 1124 bp, Homo sapiens
cctatatatagaaatgactatataggtacatacatgtattctctttccgtgttcacagcaaggacttgggagctgtggcaatccaatagctttttttttttttttttttttttttcccaatacaaggtaccagaccttttcaaagaaatggctgattccaggactggttcagaaactggacaatatagcaattgtttaggtatgatatggccagcacctgaatcaggccactggaagtgaacggaggaattaagaggtatctatctgtttctccagcctagattttatggtcttctaaatcaaggacttgttctttttcttttaaaaaaaaaaaaaaaaaaagactcatgccaaaatttgagtatttcatgtgctgttttttctcttatactctattcgcttaaatgtctacctttcttcccctggttttcctcacatcactgacacccctttccctcctgctgtcccccgaggatttcctacaggtgccttagagaatccgtgtttcctaggaaatgcactcttttcatctgcctttttctaaaagactgttttctcccactcttcacaataactcagtaattttcaatcctatctgaacattagaatcacctatagaacttttttaaaaggagaggagagtgagagagggaagcaaataatatccaggtcccaccctagactgattaattcagtttcgacaagtgggtgagactcagtccatcgctcttattaaaaattccccagattatttaaatgtattgccaagctgtgaatcactgcctaaaatcagcatcttttctgagagcaccacttctattagaggccattctttctgtcacatttgataaacaacagagagaggagtgccagcatttttcttgcatatctctttatttatgtgaatctaaatatatgtctagttttactgcagcagtccatccttttccatcctttgttttccatcattatctcactaggaccttgacgtcccacttaaagtcactttctcccccataactcctaccatcattctgtgagatcccaatatccatatggttgatgtatccattgccatagctaaagaatttctgcgttcctcaattcactccagcatcatccat

SEQ ID NO: 21614 - DNA, 1085 bp, Homo sapiens
atgaatgcgtgaaagttttagggagaccaatttgttggaaaatagggaagattgctgtagccctagaactgttcaatttggaacgtggtaacttggatgatggtgggataccttcttattaacgaatttttgagatgatagctttcagggatatgaggataagaattcatacaatgcaaaagaggtttaattagatgactttagaattacaaacttgtaggcacaaaatccttttagcagcacgatagttaccatgatttttgcagttacagctcatttacatcattccaactctttttgttctaattttatacatttctaattagattagttaccttcctcatcagaccaaagtggattaaaattgggacattggatgatgaaaacatgatgattgagataagtacaggtcatgaaagcaggaacggctgatggcctaatatcaaaggaagagatgggcagcagggaaagtagagtataaaaagttaaaaagaaaaggccacttgcggatctggtaggaacattctaaagaccttgatagttcctatgcatagtatagtagaatccagttaatcccaaattggcactgaattttcagtataaaatcaaattatattttacacttttgatattcagagcacacactaagtatgaagaaattcagttcagcctgcagttatagttatttgttaaatgcagaaacacattttaaatgtaaactttgggtgggactgagatgatatacagctgtatctgacaataaaacagactataattacaataatgtggtagtgacacacatgtgtaaaccaatatactggttgaacagaattaaaagcccagaaatacatccaagtatgcatggaaatctagtatatgatataggtggcatttcttcactaagtcataatactgaggaatggaattaatttggaaaaaaataataaaattatatccataactcatgccatacataggaataaactccaaatggatctgtaatctaaatgttaggaaatgaaactaggccaaacatggtggctcatgcttgtaatcttaacacttttgagaggccaaggcaggag

SEQ ID NO: 21615 - DNA, 1053 bp, Homo sapiens
tccacccattaatttatttacagaaagaaattcttttagcgtcagactctcagaaattatgatttaggttacttgacatttgggccctggggctgaaaagcttttctagagagaaggcagtgctcagaaaacaaattggaggaaattggttctcacaaagtcacactttttattttttaattaaattttgtctttctaccccctttttttttccttaatgacctaagtatttcagatgaaaaccttctagtcaggacttgatgtttcacccagaaagttcatagtaataactttgttcaattaaatttgttaccatttaaatttatgaagtattttcaaattcacagtttatagcatgtaggaagtgacccatttctgtggaacctgaaatatgaatactgtaatttttcaaaactatttgacaaaaactgcaattacttttgcaccaacctgcttttacaatggacttttttcttataaaaatactaatttaaattaactccatgccttttgattatgcttgggggaaaaaagcagttggaagagtcatgtatagtgaagataatagtgatgcactgagtgttcttataaggctgtttctgagacagtgacatgaggacaatcatcatatttgtgtctcctgacaagaaattgatggtgacccatgggataaatgaattcagttcagcaagtattcattatcacctcttggcctagcattatataagactatgagctttcaggtatcatgtccttgtattcatataaattaaaattgttttggggtaaggatatttacacataattaaaattaggaagtatagcatagtaattgattaagggtcactctcttaataaacatataagtaattaatataatataaatgtggaggatgaccagatcagtgtgctgtgacatgaggaaggtttcacagaacaaagattgcccttaaagtgtgagcagactttgatagcattttttatttggtggtcatttttttatggggcaggaaagcatgagtaaggtaggctgttaggttcaggaaacagttt

SEQ ID NO: 21616 - DNA, 1068 bp, Homo sapiens
acatcttattaaacactttgagactaagcttttgtattcgttcccaaagcttctcaacatcaaactgattggcaaataagcctttggtcctctcctctaatctcgtttctgttacagcctttgtcacccttgaagacatttcagtttctttaagtttaaattgcctcatctttgaaatgaggttgataacatttacccagcttcccttaccagggtaattgggaagattaaattagaaatgtattttataatattttatgaactaggaatcactacataggaccgtatagcatttagtttttatgacttatattttaagcacatattgtggtgctatttgaagttttctttttttaaaagttgatttttagttccttgaagatctatatctttgtttctgccatatacatgtatatatgtctagcacatttctgcatcataagccatcggatatttattgaatcaaataatgagtgaatgtattttaggatgaatgaattctatcttgtcacatggtttatgtgggaaaaaaatgcggttgtagatagaccagtatttgctgaagactcagataattttcgattgtggatggattagtggtgtttaactaagataagaggtttcttgttatttttgaatcaagataatctttttcagttttgctttctatttaagtttataactgtgagaaatatgaataaggattatccatgctgttaaagaaatccagatcattacgcaacatagaactaattttttctcactttgaacccttcagggtgataagtctgtcagagttatgcgttctttgctggctgcacaacagacatttgtagatcggttggtgcatctaatgaaggcagtacaacgcgaaagtggaaatcgtaagaaaaaggtaagcctatggtgtatgcttttgttcctaatagcatcttggcatcagaaaatactgaattttcactattgtctttttgggttgatacgtgaattttttttttttttttttttttttttttgacaatgtctcactctgtcgcccaggttggagtgcagtggcacgatctcggc

SEQ ID NO: 21617 - DNA, 1068 bp, Homo sapiens
tttctttgactcatttttttttctttggattaatatatttctccaaatttttgtcttatataatttcttctcaatgaccaaactcaatagggtctctctctctcagaacaattttctgaccatttatgtccagaatatccatcttagcatgccactttatgtgaggttttatgattccccctttctaaaaagaatataatttctttattttttttttgttgatttaaacatatacctaaactaatttagaccttcatataattaagggaaggactgtggggaaaacataatattattccagaataaaagatacagatatttgagatctcctctcattttataaatgaggaatttgagtcttaaagctgcacaactagtacagattgagcatctctaatccaaaaatccaaaatctaaaatgctccaaaatctgaaactttttgagtgctgacatgatgccgcaagtggaaaatcctccagctgactttatgtcatgcattacagtcaaaacacggtcagaactttgtttcatgcacaaaattactaaaaatattgtgtaaaattactttcagtttatgtgtgtagggtatatgtgaaacataattgaatttcaagtttaaacttgggtcacagccctaaaatattttattatgtatatgcaaatattccaaaatccggggaagtccaaaatcccaaacatttgcaagcatttctgttatgggatactcaacctgtagtatacttgccattaaaaaccagggctcttcactttgcatctggtacattgttatgttgtactgtttcaccttatttatttcagtatacctctaaaaataaaaaatgatgatagatatataaagaatgtcttctttgtattaggcatggtgccagactattgacctgtatagtttctgattgccttagcaactctgcagaagagatggtatcttattttacagatgaggaaacaagttaaaggatatgcataagactgtccagcgagtacctgggagagcttggaatgttttaaccacatgactgattgcagagcttgtgcgctttccatcg

SEQ ID NO: 21618 - DNA, 1050 bp, Homo sapiens
gtaaatttaaattatcttttaacttttcttaatctttcacctacccatcaaagaaaaaaacgttagctgtgtaaacagacaagtaagtgtgatatataaaggagtcgccaggagctgttaatccaagataaataggataaatgtgggataacatttattttgcacattggccaaaactagtcttgaatttcattgacccacctgtgctctcttgttccactgcagtcagcattgctgcacaactacccattaaaacacatgatatttaaaaaacaaagaatacaggcacttgctatatgacaaatgtttgcagcttgtaagattagttaattattgtaatagcaagagtcagcagaatgccccataattttcagcccaaatgccttgcagtttatttctcattcatacaaatttaattttcttatcttctccaaagaagatttttaaacacttgaatgtcatccttgatagggtttgccatgtttgcttcattaactgcttttagtaaggttagttttatactgttgttttctttccctctgtgttctgtcaaaaccttttataaaaattcttcaaatgtacagtagttgaatattttgggactgtctctgctatatgttttttatttttatttttttcctaaagacacagacatttcaaagtatttgggaaaaagaaggcataccttaaagattttttgatctgaagtccagaccactgcaataaatgacttttttgttttcccagtgcatataaaagttatgtttacatgatactatgcagtagcattatgtctttaaaaactatgtgcctatcttaaaaatattgctaaaaaatgcttaacaatcatctgagctttcagtgagttgtaatctttttgctggtggagggtcttgccttgatgttgatagctgctgatcagggtggtggttgctaaaggttgagtagttgtaaatctgtgaagtttgccacatcagttgattcttcctttcacaaaagatctctctgtagcatgtgatgctgtttgatagcattttgcccagagtagaa

SEQ ID NO: 21619 - DNA, 1035 bp, Homo sapiens
cccaaattcaagctctcccacaatcacttactgtatgcttcactggaatgccgagctgccatggggcctgtggttcatggcataataaacattcctctgggggctgggcctccagcctccctttcttgcagacatccccaggatctacaaaggatgctcttcaagcttcttccccagctttttggttgagaaaagccaagaactttcaattcctccctgagcctcctctcacatttctagtgtctttcacacagcctggaggatgtagtggtcttcagcttctctttctttagaatgtgtgaggactctattgccctcagtttttgcccagattctaggacaatttcattaaatacaaatgattttgaaccatgttggtaattgttgaaatggagccatgccactgaacagattcagccggagaaagagcaggaatacctcaggcagccaggcatggcagagactgggctctaggagaacaaatggaggttcatcaggaaggagagtgagggagaacactgggcagagacatgagaacatgcttgatgacaaaaaagggcttggtgaactcaaagcacagcacagtggccggtcatctgcagggagaagggagtcaagactgcagaggcagcttggaggcagaacagggaagtagggctgctgaagagcttcttggaggggaagggggtgaagttgttttctagtcagaaggggccaagggagagaatcaggaacaacaattaagaggcactgggtcccccaggtaatctcatttacctttaaaatgttaccctcttacatattccttaggttactcagttgtcttgtgttcccaaatctctttgccttctggaaggttaacagccactggtaaatggatggcaaaggatttatttgatagtcgtggaacagggtcacatggccacagtctatttttagccacctcagtaagactgaatgaagtaagatgtatgaaagtgttctataacattctaaccttagaaaacatagggaacacttattgttaagcagtta

SEQ ID NO: 21620 - DNA, 1034 bp, Homo sapiens
cttcatgaatgcagagagtacttctgatttataccctgtctctgtacaaggactggcaaatagtaatgctaaatccatatttgtagaaggaaggaaggaatgagggagggagaaggaaggaaggaaagaaggaaggaagggaggaaggaaggaacaaaggaaggaagggagggaggaaggaaggaacaaaggaaggaaggaagaaaggaaggaaggaagatgagatagaaatgagagagagagagagacagagtgggggggggagagagagagagagagagagagatgggatttggaaatagcccaaatgttctgatgtttcattgtttatctgattattttctcaccatatatagctagtagtcatctggcttcatacttccttgggaaggacagcagggccagacctgccaaatgtttaattgcagctcactgtaaaaagaattaacactccagtaaaaatggacccacaagcaagctgctcagatcattgtagatcctgaatttcagatctgtgaggaacttggatgcttatcgcatcctcattttggccttgaggaaattgaagctcataaaggctaggtaacttgctgaaggtcacacagctggtggcaggacagtgttacctctatttcatgctgcttcttggatagactgcagacaaaacatgtaccaaactttaatttctattgctctcagtgctggggggatgccagagttcttgcttcacaacaagtgttcagaagcagaataattgaggaacatcacagcaggctctgggaggaatttgtggccagtcatatgaaatttgagtgtctggctgaaactgactctagtcaatcactggctgtgtctctggctattgagaaggaggtagtggatttttggggtattgctttagttgctattacagggtgatattttgaacaaagacaccttttttttttttcaaatctctatttctggtaaagttaaattcagcacttgatttgtagtattcagcaccagggaaagattagtaacttctcccttaa

SEQ ID NO: 21621 - DNA, 1022 bp, Homo sapiens
tgtcacttcagagaacataactaagacttggttggaaggtgctgcaaagcagattttgtcttagtacaaataagaaagaatttcttgaaaagtaaatctgccaacagcataatgtttaactgcctcaaataaaggccagaatgcctggcatgagtagagatgtcttttgaggaaggagtttctttaagtttcacccaatttagatgctaagataaggaatttccgaggatctactatgtaaaatgcactgttagattgtatggagtttcaaaaagaagtatacaacaaagtttcttttttaagatgcttatactctagtatgagaattaaaatatgaaaacatgagcatctaccgtagccttctggagaatatgtgttatctaattaagagaatgggataatcacaatagacagggaaagtcagaaaagaattcatgggagaggccttaaaaaaaaaaaaaaagaatggtaatagaaagagtgatgggaattgtgaggcagataagttgtgaaagtgtgactatatatgctgtgatcagagaaacttagtccaggttattgggttgttttgggagagttgagaccataacaatagagagatgattgtgaatagatttcagtataacttgaaaggcatatttaggaatttaaacttttatttttatgcagttggtaaccattttgtgcctttgcatggataggaaatggtaggatgaaaatggtattgaaagaaaaagacctggatgtgcttgaataaggagaagctgaaagcagcaagcacaatgaaacaggctgcatccttggagaaacacagacagcattctcggaatggtaaatatgctgtgggttgcttcaaccacttcaggcatcaacaattgccttgacactcatttagcaacttgtctatgtcaaataatgagagttacctctttggagcctttagcaacctagcaactacagagccataacaatgttgtttatcatctccttgtccagcctaatgatgcatgattctgttgctt

SEQ ID NO: 21622 - DNA, 1027 bp, Homo sapiens
ttcatagcaaatgataccaggtaaagaatgtgagcagccctgaagtccataggatcctctgggaggtagctgccaccccctcccaggagcccatgatggttaatgatcagcagacccaggtagaacaagtgtaggcaaagccagctgagctgaccctcaggtaggcagaggctgtgccactccaagtgctgaggaggaataggggatgaatggtgagcagataagagttttagaactttgttagcttggaaaaatgtttccttggtccaacttatcttttcccaccaaaaataccccctttcatatgcatggcattttgttcttttcaaaaatatctttatatggcttccgcccccttgattctcctaaggaggaaggccagataagcattttatctccgtttagaggatgaggcaactgatacactgggttgcctgaaatgacacaagttggtggccaacctggggccagacggctgtggcaaagtgtgaagagcctcacatctgaagtgacaagatcctctttggatcgtgtccctgtacttcccagttaaatgacccctggcaagtcagttaacctctctgagcctccggaacctaatcagtaaaataaagataaagatgcttaccctgcctacttcacgggggttatgaggattaaataataccagctaatttctgtaattgaactctgggaggatttccatgctgcctcctggaaactggtgcctgggattattgttgccatagcccagcaattaataaccccttggaatgatcagaaatgcccacaagggctcctcgtgttctaataattcaaccgatgtccatataactgtatatattgaattattagatgcctactatgccatgtgctttttgaggctcaaagtctcaggtggtatccagttggactcaaagatgtcccagtgctcaggaaatgctctttgagttaaggatcagcaagaaaaaaggaaaaagatgtgcaaacacacagggaggggaggcgaagtggagagaatgagggg

SEQ ID NO: 21623 - DNA, 1022 bp, Homo sapiens
ctttgggaggctgaggtgggtggatcacttgagatcaggagttcgagatcagcctgcccaacgtagcaaaaccccatctctactaaaaatacaaaaattagccaggcatggggtggtgaatgcctataatcccagcatcttgggaggctgaggcaggagaatcgcttgaacccaagaggtggaggttgcagtgagccgagatggtgccactgccctccagcctttttgggtgacagaatgagactcaatctcaaaaaaaaaaaaaaaaaaaaaaaaaaaaaaaaaaattccagtagtgacagggttttgaagagtttccaagctgggcaaggcttagcagctcttctctttcgtgaggatgttgggagtcagggacacctgtctagattcaacagcaagataagggcatgggagttccaaatggatgccatacagtgactcagggtaggagatgtggtgtgatagtctgacaccaagcagctttgtgaatctggatctgcagtatgaatttgctgaagccctagtttcctcacctgccaaatacaggtgatgatttctacatgatataactcagaggaagattttagaagaaaatggataatttacagagcaaacatcatcataataactttgatttcttgagctacatggcagaccctctgctaactgttttacattactcaccttatctgttagtcctcataacaatgctgccaggcagatcttatttatttacaggaacttgaggctcagattgcttcaaaggaggaggagctggaaggggcgaggttttcctatgaagccaattctattagactccaagcaaatgtgtattccagtcccttagttgccacaccctataaaagtaaaggatttctgaaaggtgaggatcactagagtgttttttccatactttctcatatagctggggtggcacaagcataatctgccacattttccctaattctaagttttccatggttttgagagagtgttcaaagctcactagttaaagccctatt

SEQ ID NO: 21624 - DNA, 1053 bp, Homo sapiens
aggcagtgagtttccaatagctggctggaagttccagaacagggattcttagccttagaagtgtagttgtgttgggcctttccaacccgattgagtaactttcagctgatttggaatcccatcagcatgggccaaactgacgtcagcagggagacagacacagcattacgttgtttactctgtacaacctataagtgaattaatgacctgccatgtcactattttgatagcaacaacatcacccccattgtctaccatttatgaattatcttttttgggcttgtcaattgattggacatctgcatatcctagggcatgtgcagatccacatggtcacatgctcattctctgggtcttcctcctctgagaacctagcatgtggtgttctttgtgacttgcccatataaactgctattaaagccaaagactgggtgccctgtgctggctgtgtccctctgtgagagactcagatgctgaggtctccagtggcacttaatgctccaattgccattgtttgaagaacgacatctaccctgtagtcatatgtgcctatgttgacatctctttccacttactctttgcaattctcttctggtgtccatgctgctggtgatctttattaacagtaaaattcttcaagagctccatagccctgaaagaagaattatgccatcacttccattttactcaatttcatttttctggaagcattagaagatgagtgttcacattttccataaatttatttgcagcttgaaagaaggaaagattgagcgctgtggctcacacctgtaatcccagcactttgggaggccgaggcaggcagatcacctgaggttaggagttcaagaccagcctgcccaacatggtgaaactccatctctactaaaaatacaaaaactagctgggtgtggtggcacatgcctggaatgccagctcctcaggaggctgagccaggagaatcacttgaacccaggaggcggaggttgcagtgagccaagatcatgccactgcactccagcctgggtgacagagcgagactccatctcaaaa

SEQ ID NO: 21625 - DNA, 1119 bp, Homo sapiens
ccaccccagatcacagaaatgcaggcatgcgtagaaacacattccttacctcctaaaactcatctcctaaaactgcactcttgcgcatgtgtgtgcttattgaaatgatgtctctctacctccaggttgtgagctgggtgtagggaaaccacaaagattgctgcagcatcacagggatagtaatatcgcagatgaaccatgatcacactaggcttgaagaaggaggatcagtttcagaatgtgtaggtttgctggggatgcggagctaaaaagagggcacaagcaagctctgttggaggtatacttgataggagctgtggcctttggttaaggacacagctagcctggggtgacccagcatggaggaagctgggaaaacaatacttctgacctcactcacctcccttttgtgatctcctgctggtgccccttcttggctaaaaccaaagggtaaaggaacctgaatgtgtaggtatagaaatcagcatcactggctagatagcagaccaagaggcaagggcaagatgtcctgcccagtgtggaagctaccccagtctttgttcctttcatctccttttcaggtcagtaccttggaaactgtggacagctgttcatgactgacaaatcattccctaccagagttaatatttactcccctttggctactgggaccttaggaaccaggtgtgtgatgggcagggaaattgtcaaaactcaggctggtggttgtcagtggtttctctggcctgagggaagtggatttttattttatgctaggagacctcaaggctaattattcaccaagttgtggtggctaccgtcttagcccaacataaattttaaaaatgcctgctttggatgtcatttccttttgatgtttggggtaagtgatgcttctgctttcactttcttttgggggctgggagtcctttagaagcagcaatgaaaaaagcagggatttatattgggattctgtttataattcttgaaggatatctatccccattctcagatttgatcttcacaccaaccctggtggccttccgagcacggatccgacaatcaaaatgtaaataaacagtttcaaaatggcaagaactttgaagaaaacctgtggtg

SEQ ID NO: 21626 - DNA, 1111 bp, Homo sapiens
ctctggtaaggcttactgtgtatgtttccttcatttgcagactgtcacaaaaacatttttgaaagtaggtggaggtgcacatggaaatggaagctttttctctcacttaatcttcgtaagatccgaagtggtggcagagggtacccctgtattacagcagaggacactagatcctcagaggtcagcagcctgctcatggtcccatgcagggcagaggaaggaaactcccatccaggccctgtgactgcatatttagcatcttttcacagccccacaaggaagtgtaattgtgtgcccccactgagatcacacatggcttgactatcttggtctgctttggcttacatgataatcctgtcctcaggttaaaatcaggcaacaattggaccctaacaatttccattgagaatgattgtttcaatatgaactgggactgcgtgtaacctacatggacacctcttgaagacaaggcaaattgtaatgatctccaaaccagcagcaaaaagtaaggactcaacaaccaggttagggcgaagaaggatcattctttacaaaaaaaaaagttgccttgctgtacacgtcatcattgctgatggtggaaggaacagacaactggaagttgtactaggcttgcctgtcctggcagctttgggagactggctggttatgaggagtggcagcgcttgctggcagccctttctggccagctcagtagggggacattcctcaccagggcagcccaggctgggcttggagccacccagctgagcgccacgtggcgggcaggcagtcacatggctgggatttgggtttggaatcacagtgctgaacctacagcctagtcaactccctgttttagggcattcattttttcaatcacaccagttggttggcaggtgtaaatgttctgggggaggacaccagaatggagtgaagacatcatctgtttcctaactcttgtagcttttgactgggtactttcctggccatcaaatgctgagagatctagcacctgctggtcctctatgtgggcgggaactgtgaggtccagcctggtgtatgtctctgtcctaagccttatatttctgaatggtggtgggtgggggatggg

SEQ ID NO: 21627 - DNA, 1050 bp, Homo sapiens
tgaacttgatgtctctttgaatatggtgatttcaggggcagctgagggaatgagatattttttatctattccaatctgttttaaattattttgaaaattatttcttgaacattgactgtttttcctatcctgtataatatgaagggtcgtacagaaagggggtggatgatggaaggagagacaaaaagagaagaagcttctgctgacttgtgctttgtatctacagggctgctgtggaggaaattgtgttcccttccacccaaatgtagacaatgaagccctaactcccaatgtgactgtattcagagtgaaaaagtaattgcggttaagtaaggttataagggtggaaccctgagctgataggattagtgcatttattagaagagacactacagaactcatttgctttctctccaccatgtgaggacacagggagaaggcagctgtctgcaagctaggaaaagagctctcagcagacactacaccctgctataatcttgatcttggactttccagcctttaaaactaggagaaaataaatttctgttgttttagccacccagtctgtggtattttgttaagtagctcatgctaagacaagacatttttctggttacatctaccagataaatggaaaagagtgaaaaacagtgaaagtttccttcccaattccctaaggtcaatctccatttaatggtgggagtgacttagagtgaagagaaatggttcccactacaagccctgtttgggtccatgtgggttttctgaatccgcagattagacgttaaagtgttattataaacttggttgttggtgtaccttcttgtttctcaagattgcaagctcagaacatcgtatacatgttactgatctgccctattgcattgacgcctgtgaataattttttttggtcaagtataattctattgaaaagacgaaattttgctgataaagtgtatctaaactgagtttatttagacttgtaagtcagctgaacaacggaaaatacttaaatgttttttgaaaaaataaactgcttaagatgaataa

SEQ ID NO: 21628 - DNA, 1034 bp, Homo sapiens
tatttctggaggtccactttggctcctaccctgtggaagattcacacgtgcagtgattggttgcccagaaacatcagtgaggaactggaccaaagggcatttggctgtttggagagactgcactaggacttggggattttttaggattttatatgatgactttcacaccgctaaattcagctgcttccatatgaaaaataagagatgattcaagaagcacatgggttttggatttaatggggcattgggggagtgagagggcatctgcagaaaagagccatccaggctgcagaactcttgtttccagcaaatagtccattgttgacgtggtgatagggcaagtagtttgctgatggaaaaaagagaggtctgtgccaggcttaattgtattgtgagaaaatgcagctggctaaatttggcttcccgcctttgatatgtgtaggaacagaaatcccaaagtaaagaacatggggtgagcattgtattaggctgttcttgtatcgttataaagaaatatccgagactgagtaatttatttaaagaaaaggtttagttggctaatggttctgcaggttattcaggaagcgtggtgctggaatctgcttggcatctggggaggcctcagggagtttacaatcgtggccgaaggtaaagggaaagcaggcacatcacatggccagagcaggagcaagagagcgagtaggggcagaggtgccacatgttttaaatgaccagatcacttgcgaactcagagctagagtactcttatcaccaagaggacagcccaagtcattcatgagggatctgcccccatggtccaaacacctcccacaaggctccacctccaagtttgagaatgacatttcaacatgagatctgggtggggacaaatatccaaactatatcaagcatggtgtaaatacagtctgtgtgcttccagcaaaaagtagatgctcaatcaatatttgtgggacctattctagggctgcttatatacccaggggtcaaagcaaatcccttaacaaaaattcagg

SEQ ID NO: 21629 - DNA, 1076 bp, Homo sapiens
aaattcatctatgtggacgacctggggggaagccagctaagtaaagcatggccttatcagacagcctggactgccaagtagtaggccttgagagggcgctgccagcaagaggagaccactaggagcaaaggaatggcatagtgatcactgtgtcttatgctgattagtatggccatactgttacttaccttgatggtttaagtagttccagaccatctttcaattttgttgtatgtctcaatggcttcataaattctttcttcccaagtaggcaacagtgagtttttctcaaatccctgcctgaatgattgagttgcaatgacttgctccttgagagtgcactagcaagacacaccagcaaccaaaacctgtttgtcatccaggaatagcctgcatgctaggaggaggtggtttggaacatgtgtaaaatcaaaacatttctcactgttaatttcttttcacagttcagaatctctgttctattccatgtgaaaagtaaaataactcctttgctcggatttcttgctgacatttctttttggtgggagtcaggggtgggagttcactctgaatgcttactatacctcctgctacagctctgtggcattttcataaaataccaaccaccaaaattctagtaatcacaaaaacatgtgctttctcctcatatccactgaaattctttctctcattaaaaaatagaagtctcagaaatgtaattagaaagctaaactcgatatctttacattcctttggtttcaaggcgggggaagaaagctgcagtttttctaatttcccttcagttcaatgctactcttgaatggggaaaatgatacaaaacgtctgaagaattgagagtctgacaagaggggaggatttgtatttccttgttattaaaaaagaagaaaaagccctcagttatgtctaatctttaggaacgcagtgccctgtccaacccacgaactgttggcagcatcataactctacacagaatgttcttttaagcttttccctccttcccaagcctttcctgtgaagttataaatctcagcatttagagatattcttatgcaaat

SEQ ID NO: 21630 - DNA, 1031 bp, Homo sapiens
ccagaaatgactgtccaataatgaaacaatttgaagagagaaaaatctgtaaacatttagagggacagtgaaatcataagcaataaggggaaagatttgtgaatatcaaaccctgccaagtctgaagttctcctccccccacactaagattttagaattattcgattaagtaaatgttttagaaagccaccccacatttggggatgcaattaataatgagtatagaaaagaattacggcaaactaaatatagaagggaacttccaagagcatctggttcagccatccaatgtaacagatgaagaaacagagatggaggggttaaggggtttatctcagttcaccttgttttccagcttcttctacacggaatcgtttctactgtaccatactctgctattattcacacagaggaatgacaaatctgaactgaaagtttggataacaagcataaaggagaaataaatgaaattcagatgtttggtagatgtgaaaaaccctaaagattataatgtgcaaaagaacgagggatactaagtcctaatgcctgatgccatcaatggagattggctcatggcatatatttatttatgcagttggtgaaagcataaaacacagagaactcattcatgtttctgtgccattaaaacaggagggcagctacaagctaagccttctagggagatggtggatgcatgaccttcacggggaacatctcctcttatccttcaaaaaatatttaggtgaaataaagccccaagagggtgaaaattagagcactgtccagccctaagattttaggatgttttattgccacttatttataatttttttaacattgtgttatcaaaaatgtcagacatataccaaagtagacagaatagcattaataaacctcatgtacccatcaatatcaacttcagcttcaacaatatcaacttacagtcaatcttgtttcatcaatacttccacttacctcctcccttccttagtattttaaagtgaatcccagatgatagtatgtgatttcat

SEQ ID NO: 21631 - DNA, 1029 bp, Homo sapiens
gaagtcggggattcaagaccagcctgaccaacatggagaaaccccgtctctagtaaaaacacaaaaattagccaggcgtggtggcgcatgcctgtaatcccagctactcgggagtctgaggttgcggtgagctgagatcacgccactgcactccagcctgggcaacaagagcgaaactctgtcccccggccccccgaaaaaaaaaaacaattacagcttttcaaaaaacctgcaaatatgtggtaaaacattcatcattttaaaaaaatcattagtgtctagagcattctttggatggatttttgaaatgaaattacctacatcttttaaaaaaatttcttgaaactttttgaaaacattgagatctcagctaattcatagtaagattatgctgtatctaaagtttaccagcagccccagtgacacccctgtagtgtagcgtggaggcactagttttaatgctaagaagcaaaggccaaggtagtacagattgctcccatattgccttatccaagtctgtatgtagacccattaactgcactggttttctgtatgctatgaccctagctcctatgagacatgtttttgcagaagatggctgtagtgtgtgtgtatgcatcatctgtggttttttttaaagcaaaagtgagatttaatagattcatttaactgtgacaaatccagtgtgcaactggtctctggcccaattggatccagcactcatttgatattatctcggcactgttttttatctctttgggtactggctctgtgtactgcttttgggctttattttcagccaggctttcctctcatgagggcagagttgacccccagtagctctcaactaactcatttcctcagtattgagaaaaaaaattaatagactttattttttagatgagttttaggtttgcagaaaaatttaacagaaagtacagacggtcctcaacccattttgccctattaacatattgcattagtctggcatatttgttacaactgacaagccaatattgatacattatt

SEQ ID NO: 21632 - DNA, 1075 bp, Homo sapiens
caactatttataattatagtctaattacagataaagaatctttaccaaatatatatgtatcttttcagctccatttttgcaacctaagtaaagtgaatttcttctaggttttgttttaaccacacttggaaccaagtgctctatgaaagagcgatcctcctaggtcattggtaggcacgatttttttttttttttcatgattccatgattgaaagcactgattcatagaattagagaggttctggcctatagtggaactttggctgggagaatctgcctggagcagaagaaagcaacagtaagtagtggtaggagcagtgagttcagaaaaagatgcaagtaatgatcatgagtgtcagaaatttggaaggagcacccattcacctgatactctctgttggtttaattcattgtacacgtgacatgccttctaggtggtgatggctttaggcagggatctctctgtgtgatgaggattccctgccaagccttgaggacccatttgatagggtagtgtgaatgatgagagtgagtgctggcagcgaagtcagccctcagaaaggaagtgtggcagcagcagctggtataatctgctcatagaccctggcctgctgttgggaacacaccttggttgtaaattatatctgtctagcttcttaccctttagtgaaggaagctatttggtgccaactttttcttttttattaaaatttttttttccccattggccttgctgaagcttttagaagataccagctttttcttttgtgctttggtaattgacatctcagagtcacatctgttcccctttcatgattgctccatcccgagagtggaaaggtaaagtgtagtggactgttgagccctcacttttgtgactgattctaaagcaagcaaatctgacttgaggatggatcttgaattctgcagcatgagagggttagatcagaggccaggtgagtgagtttaggcctgacccagggaacaggagatcccagaaaggccaagtgactgctataggatttagtttctgcacctgtaaaatgaagaatgtcttgggtttcttttttgaaag

SEQ ID NO: 21633 - DNA, 1163 bp, Homo sapiens
gaaaatcttaatacaagccccacagcccctgatctagaagtgtcagctgtccccctttggagcatgaactgagccctcaccagctcttcccagagcttctgtgcccctccccagcctcttgctccaagcctgcacttttggcaggaccccctcgaggcagttaattaaaaaatcagtgtttgcctttatattggaaaagagatttttgccccctctgtaagtgataagtgtttcagctgagcctggtgaggtatctggggctggaagagttgcttttactaatacatgccaagaagactgtaatgctgtcttcataaaataaggggatggggctagatgacctcatggcggtgtgtggtggttctgatgctctggccccaagaaccccttgtctccggaagggagttgcttccaaccatctgggcctctttctcagctgttttgccaaaaataaagtattggggttcaccctcagttttgtgaggccttagaagcaaatgccaaggcccatctgtccaggggccatgttctcagggaaatgctgttagctacctacatgccagggtttctcttcctctggctgcctcatttcttacactggcgagggagctgaatgaaagccttctctgcacatacaaagatctgtagactgtccgacacccttctactctttaatcatcagcattgtcatcgttgccttcatctctgacatttgtacaaatctgatggcttaccaggtaccatcaaatatatagtcatttcatttgagacacaagctccccttatggtggagctggggcaggtgtaaacttcattgttttataggaagcagaggcagaggggttaatatcaatttttttttccctaaggcctggtaaggactggggccagaactagaatccaggtcttttgctaagctatcttatgtcttgaccccccatcaatccatccatccatccatccattcacccacccatccacccatccatccatcattccatccggcagataattattaagtgctcatttcattccaaccatgtagatagctatagagtagtgaacaaaacaggatcttttccctgtccctggcagctgtcctttcagtggagattctctttctgggacatggtgctgtctttataggtaggaagaactgggga

SEQ ID NO: 21634 - DNA, 1027 bp, Homo sapiens
cattgaatggtttgggaagtctttcctcatctactttctggaagaggttgtgtaggattggcattattatttttaattaattaattaatttttagatacagggtcttgctctgtcacccaggctggagtgcaccttggctcactgcagcctcgatctcctgggctcaagtgatcctcctgcctcagcctcccaagtagctgggactacaggtgtgcaccactgtgcccagctaactttttgttttttaaatttttgtagagacagagtcttgctatgttgcctaggctgatcctctacttctgtgctcaagcaatcctcccacctcacctcccaaagtgctgggattacaggtgtgagccactgtgcccagacgcaggctggtcttacatgcctaggcccaaatgattctcctgccttagcttcccatgtagctgggattacaggtgtgtgccactgcatctggtaattttggtagtttgtctttcaataaattttctcatttaattggatgtactggcataaggctattcataatattttcttatcattttaacatctggaatctgtaataaagctccctctttcattcctcatatgagtaatttgtatgttctctctttcattcttgatcaatctagatagaaatttaatcatttgtactactctttagaaaatagcctttgatcaggccaggcgcggtggctcatgcctgtaatcccagcactttgggaggctgaggcaggcagatcatgaggtcaggagatccagaccatcctggctatcatggtgaaaccccgtctctactaaaaatacaaaaaattagccaggtgcagtggcgggcgcctgtagtcccagctactcgggaggctgaggcaggagaatggcgtgaaccgggaggcggagcttgcagtgagcctgggcgaaagagcgagactccatctcaaaaaaaaaaaaaaaaaaagaggccgggcgcggtggctcacgcctgtaatcccagcactttgggaggccgagacgggcggatca

SEQ ID NO: 21635 - DNA, 1064 bp, Homo sapiens
gggattggggtggaagtatggacagatgaaaaccatcgggcttgtgggatgttattggctacaggtaaaagaacagtgtactaacgatggctttaaaaacaaggtgtttcaactcagccagaagtctaaaggtaggagctctagggttggttcattcagggagtcagcgatcatttcaaggactctgtctaacctaggctgccatcttcagcacattggcctttgttctcaggccagtccccttatggtcatagcatggctgccactgctccgggcatcatgttctcacataactgcgtccaaaggcaggcaggaaggttagattctccttgtctgtcttaatttgtcaggaagggaagcctttcccagaattcccctgctgaagattctatcaaggctccttgaagagaaacgggtcagtacccatgcctccgctccagtggaggaggagaaagcaagtccctggtgctttcgcctcatctagagcaagaggcaagctgtgtttgcaaggaagtggggaagggagcaatggttggctaagcaaagaggaacatttacttcaccaagtttcaagatgtttttatttattgggggggagttagtgaattagctttacttttttttatatctcaatattgttgaggtttttgtttgtttgtttgtttttttaaaatctcaccccctagttctggcaaccaccaacctggtttatatcactataggtttgccatttctggtaattattacttcttaagccacaggtaatgctggtgcataggatcccaggtgttccatggatgccttttttgtggtcccaggacatgggttctgtggtctgttctcccagcagctcctccactttcccgacactggggccaggtggagaaccccagtaggcagaattgtccagagggagggagcatatgtcactggtggcctaggcagcaggactggaaaggcctgagggcctgaggctccagtgggttggtagaggatggcagtcacctttgcaggcagctgtgggttggggagaggaattggtgctcagctgtggcctgcacatt

SEQ ID NO: 21636 - DNA, 1052 bp, Homo sapiens
tctgggatcttgggagacagtttcaactatggtatctactcagtttccctatgggaccccactctggcctgcagctcctctgccctgtacagaagggtctcctgttctaaggttttttttgttttgttttgttttgttttttggacagattcttactctgtcacccaggctggagtgcagtggcgcgatcttgactcactgcaacctccacctcctgggttcaagcaattctcctgcctcagtctcctgaatagctgggattataggtgcacaccaccacacctggctaatttttgtattttcagtagagacagggtttggccatgttggccaggctggtcttgaactcctaacttcaggtgatctgcctgcctcagccttccaaagtgctgggattacaggcgtgagccaccgtgcctggccctgttctaaggtttttgctgtctctgttttctccttggttggcctgtgcctgacacagtaagatttgggacccctgagattgagtggggtggggtcttcccaggtgcttccctcttgcttgtggtctctggccctgttccccgccccagccatcagcaccagtcccctaccccctcaaaaggctcaaagacttcctgagaacccggaatctcagtttcatctctgctggagatttttgatctgggggaaaggctgctctctatatggctgctttcagaccacacttggctctcccttggtttagccaaattggggttttcctcattttcaggagccagcttttctgaagtgttccttcctggcagctgcattccccatggtcctgtctatcttaggggcaaggacttaggcatcgggtgtcctagaggctagaagattgttctacagagaaaagtggttttgtggccgtaggtggtacccagacgtgttgcctgccacctgggtgcaagcaggaccggacctctgtgggtggtggagggagcttcccatgtgtggatggaggccttgctggggaagggtagatgagtacagctccgtgtcacagcccggggacagccccacctgctgca

SEQ ID NO: 21637 - DNA, 1022 bp, Homo sapiens
gaccatgtgatccgcctgcctcggcctcccaaagtgctgggattacaggcatgagccactgtgcccagccaacctggggcagttcttaagtctctgtatttcatgacattggcctttttttaaagagtgaccagttatttttgtagaaggtccctcagcgtcggtttctctggcatttcttcatgattggacttgggttataggcactgtagtgatgtgaccttcccagtgcaccatgtcaggaggtacgtgctgttctttaatcccctgcctggtgatgttaactatgattacctggcaaaggtggtgactgccaagtttctccactgtaaagttacaagttttccctttgtaattaagaaatatctttggggagatatttagaggctacgccaatgttctgtttttcttcaaaactttcatccactgacttccattgatgattcttgcttgaaacaattgttcttatggtggttgccaaatgattttctaattccatcattccttctaaatgtactagttgtcttttatcataagggaaagcctttcattgacttttaactcactgctctaagcctcaggacctcagcatttgggaactaggagagcaggtccttgtcccagaatacacgggctgtctcctagctgagtggtgtttaatgtgaaggttatcagcgtcctgctacaagtcccttgtattttggaaggttctagacaaagaaactatctgctggggagccatgtcccaagatggctgggctgggggttccactatgcatgaagccttgaggagtcctctctgtgataacgtctcaccatggccccatcagttccaccagccctggctcaaaaacgtggcccaggggaggccctactccagctaactccgtttcacatttcctctccttcccaggatggaaaaacagcccttcagggacaagcgaacctgtcagtaattaagtcatgagtggaggaggcagtcccagaagggtggctgggctgtgaggcctaatggagtgagg

SEQ ID NO: 21638 - DNA, 1044 bp, Homo sapiens
tttactaatctctagtaatttaatcttggattattaagtcactactactataaaattcttatttaaattacattttaaaattaaatatcttctcttccaaggattatttctggcttttgattccattgtataaccaaaattataatgacttattttaacttaacttaataagtctacctggttgtagtttcagttttcccttctgtttcttctataccatggtttcctcagagttaaatcataaattttgttggccataacatgcattcggaaagttctttttattttttattatttttaattgtagttttaaaataacataaaatatactatttcaagcatttctaagtgtacagttcaatagtgtagagtcacattctcatgcaaccagtctctaaaacttcttcatcttgcaagactgaaactctctacctattaaccccccatgtcccctgctccccagctccttgtaaccaccattctactgtcgtttctgtttatgggtttggctactttagatacctgcataagtgaaatcatgcagtattgtctttttgtgactggcttatttcactttgcataatgtgctgagggttcattcacgttgcagcatgtgtcagaatttctttctgtttttaaggctgaatagtattccactgtatgtatatatcacgtattgttgatccattcatctgtgggtggatgcctgggttgctcccacctcttgtcagtaatgctacatactgacatctctttgaaatcctgatttcatttcctttggatatatacccagaagtggaattgctggatcatatagtaattctgtttttgatttttcgaagaatcaccatactattttgttttttgagatggagtctcactctgtcccccaggctggggtgcagtggcatgatctcagctcactgccacctccgcctcccgggatcaagcagttctcctgcctcagcctcccgagtagcttggattacaggcacccaccaccacacctggctaattttttatatttttagtagaggcggggtt

SEQ ID NO: 21639 - DNA, 1046 bp, Homo sapiens
tactgctccatcctcaccccagcctcttcacgttgccttgtagtagtgttcagtaacggtagcagcacatctcactgcatggacgcctccatctcaatcgagtgcctcgtgtgttcttttctcttttaactcagacagcactttgaagattatcatccccatttttcagaggagagcagagaggtcaggcaacttgctcagggccacacagccaccaagcggtagaatcagtcctggaatccagatctgaccaccccatttcactgccttgcaggcagagcaggggctactctgtttgttttcttggtgcataactcagcacctatatggtaggatcccagtagatcttggtggaattgattccatttttgccccaactaacatgccaatcagagatccttcttccagagatgaaaaagaagaattttcaatgtgtgcttttcttgtttaagaacaaatagtttctgccgaggtggttttcaaagtgattgaagaagattattggtcatctgtagctgcaggagtctccttgctctgctatttacaactcatatttgcttagcaagctcctttttattttttaaatatttttgaatttctatttttagttttactgtggtaaggatactgaatatggatctaccctcttcacaggtttctaaggataaagtacagtattgtatccatagccataatgttgtgcagatctccagaacatatgcatcttgcataacttaaactttcacccattgattagcgactccccatctgcacttccccctagcctctggcaaccactattcgttgcttctttgaatttgactattttagatacctcatgtaaatggaattatgcagtattcgttcttctgtgactggcttatttcatttagtaatgtcatcagagttcatccatgttgttgtatattgcagtttccttctttgtaaaggctgaatagtattccatcgtatgtatataccactttaaaatttttttcttggaggttaatatttgtacatatttatggggtacatgtgatattttg

SEQ ID NO: 21640 - DNA, 1022 bp, Homo sapiens
gtggtggtgcgtgcctgtagtcccagctcctcaggaggctgaggcaggagaatcgcttgaacccgggaagcagaggttgcagtgagccgagatcacgctactgcattccagcctggtgacagagcaagactccgtctcaaaaaaaaaaaaaaaaaaaaattatgagctccaaccagcaaaataagaattagctaatgtgggaaattaatatcattccgtaaaggagagagcacagatccaggactctccagcaccttccatttccacttagacctgctgtctgtctgggttgtgcaagccacttaactactgagcctcagtttctctaccaattaagcagatatgataatacctgtggcctttccctgtctccacaggagtgtcatgagggtaaaaggaatggtgcatacaaagcatgttgagatcttcagggaagatacatgtttataaagatagaaacatcataacaataataacaccttacgtttgaatcaagctttgcacttatcaaagctctttcacatacgttatttcaattgactctccaaacaatcctaggcagatactatccctgttctcaggtgaggaagctgagatgcagagtgattaagtggcatgccaggggctggtcttagtgtgtagcaggtcttctgactccaagcctgatgcccatttttgatgatagcctttcttggatagattatctacttccctgcctccctgaacggagacctagacataattggcccttttcttgatgactcgtcattaccataggcacagtccctgggctgtcctccaggtttggctgtaggtacaggtccaggtcccgcagaggcacagggtggatgggccagctgtcccggagggtactcctgacgtgtaggtggcaaccatcctagagccctgcaggtgtggttcttctgactctgcctcattcttccccctgtcccctttgtctccactgtcagcatgtgtgcccatttctgtggcttcctccgccaccacggcctttacccgtc

SEQ ID NO: 21641 - DNA, 1055 bp, Homo sapiens
acccggtcgctgctcctagaggtcatcgagctccacgctaacagctggaaccctctgacgccccccatcacgcagtactacaacagaaccatccagaaactgacagcctgacagccagggggcctggcaggcggcccacgggcagctggggccctggtgcacagggccagatggacaggcgggaggacaggggtggccctggcgggagaaagaaatggggaggagggcaggcagagtcggtggccagtctggagccagacggggaagggagcaaatccctgagaggagtgcccccgcacaagccccccagcccgagcatgcaagctcacaccaataagggaagcatgtttctttttcctggtggccctggccctccccttcctcactcccgcctctcccctccccatcagacccatcccccacggagctttgtgtgagggatctcatcgctgtgactcctcggagaccttggcagcctcgcacgccggggcaccgcttgggtcagaaaggacctcggaaggctgaaaaagtgggtcggagacgggctcgcattgttcccgcatgctgtcagccgcagtcgccaactggcagcaggcgacgtgtagcagatgtccgggaggacaaaggcaggcacggtccccaccagccgcccgtaattgacggcctttgtcagccatggcagagctgacgctccacctcccacctccaagtcctcctcactgcagcccccacagcctcaggcctagggggtcaggcgcagcgggggagatggagtttgcagttccacttgcactcttttgtttattgtgttttatttttcaaaagtcggttgctttgaagtctctttggccaatgaaaatgcccgtgatgtgatcacacagtcagcactgttgaggacccccggattagtgggagatcaaacccagctcccctctagaagaaggattcgagccacagacagcttgccagtagccaattagggtaattggaaacttctgccccggcggggggtccccgctggaatcctgtgttcctcgccactggcttccagcgcc

SEQ ID NO: 21642 - DNA, 1074 bp, Homo sapiens
tacataaaatttatctggatactcacacgtagaagtttttcttttggtatggaaaggggtcagaagattctccaggttttgaggggccctgaagcttacacaatttgcaagagtgtctccttcaggaaaataatacagaattactgatcataattcggtgctgggtcctggtagaggcccaggctgtaatgtgtccagaggcacaaggctcagctccacactctaccctctttcgttgtgattaaaggtccacaggcgtcctgggcaaatatcagtttcttgagtctcagagacccttgagactgtcacaggcttgagttggcactttgcaaacctgagtgtctcccgcgcccatcctgccctggcccatgttttggccgtgacactgtgttgccaggcaaccatctatcctataggaattcacactcattcttccagcagacacatttaatttcaggcccagagtgcttggtgacgcggggtgacaccagcctgcgccctcacagaaatagcctgaaggactgagtcaaaagtagctgggggaactgatccccacatttgatcttcttcccctaaaatagcttggtcctgtttatggggctgctctgagaggggacgtgggcgtggggctgtgctcacagcttcctccctcctgctgggtgcttgcttttctgtggccatcaggagagacatccgtagtgactcagggccctggacatgatgtaacacccctggctcccagggtggtggggaatgcgtgactgccttggaattccaggcgggacccttggtgcctgcctgccagttcttgactaaggtcaggtgcggctgagagctgcgctcaccagccttggggtggaggctgggagggtgtcctggccccgagccagacctcccactgacaacaggcccagtcctgagccccgtggggacacccttccatcccattctctagagcagtggttctcagcctcggctccatgctggaaccacctagggtgctttaaaatatcctgattctgatgtaaccgtgagattctagtgtgcagccaaggttgagagccaagggactcc

SEQ ID NO: 21643 - DNA, 1170 bp, Homo sapiens
tctccgtttccaaaccgagagaatttggtttgacacctctcacccatcatatcctagccccgacaggcgatgactcttcccctttgtctccgccaacaccctaaacactgggcaggagccaagggctgaggaacttggcgcgcgggcggccgcggccgccagctgggggcgggaccgaacgtcctgtgggcggggcgcggcggcggcggcgggattggctggggcgggcgggtgcgcagtccgctgggcagaggcttgggccgccgagctggacccggaccggttttgggtactgtactgggggcagggcagagaggtgggcggcagttggggtgcggtgattgtagtaggctagggcgctttcgggtccccattgcagcccccggatgagcccgcagtattttccttatatgatcaggtcccattgcgggcggcgccgcttgcccggagcctgagaggattatgaaaacgtggcgagcgaaatggggccaggggacctggagcaggggcgtgaggagagtaggcagcgggtgaggctggacgggagggaggtctagggaggcctctgccgcgggcactgtgagtcctggccgatgatgacgagaccactgcgcaatctgagttctgggaaccaggtgatggagtatgttctgagaacagactgaggccgggcaagcaggaggcggccgcggcaggggagaggcggagagcccctcgataccagggctcggagggccgggctgcctagcgagggcttcttttgagtgcgtaggggtggtgggtggcatggacggtttctctgagtcgtcagcgaatgccccccctagaatcctgcttttcaaacactttggtgacactcttgcaatgttggggtgtttttaaatccaaatttgtattatgaaaacttacaaacttacagaaaagtgggaagacttgtacagtggacacatatcgacccaattgttaacattttgctatattgctatccacctgttcttccatcaaaccatcttatctttttaatgcagaccttagtactctacacccatgaacacatcagcacacattattcatttacagttctttttaaggcaaaatatccacgcaatcaaatgtacaaatcttagacaagcttcacaaatgctcatgtataggccgggcgccgtggct

SEQ ID NO: 21644 - DNA, 1030 bp, Homo sapiens
tattatcatgaacctatcacaaggcatatgtatgtaaaatgtgaaatggcaggaggctctgggaaaaaaagtcatctttgtagcacttaagggcccttgtatttctccacattagttagatgtgacagtagacttcactacctaaagggtttgaagaaattttagagagtataaaaatgggaaaagaaagtgaaatattacctatattatcacaattcaacagcaaaaggcatgtatacttttaatcaattaaagtatataaggtggtcatttcacagaaatcctcctgtgaatgctttggtgagtttaacaacttcaaatttacatttttaaaggtcagtacaaagctataaaaagcccagagcgcccaagcaatggtttgctttaacaagtaacttgtctttatcacacatgtgagttcaaatgtaggagggcaggactgattgttcaccatttcttctgagcattgtataggtagaaacaacataaagctatagctcatgaaaaaaatattttgctagaactgcgagacactgaaattgattactgaggaagattcagaatctgactgtacatattttgagagaatagttgggcttaacctccattatattttccctttgtccttgatccattaaacctgcagtatgatgtggcatatattttttaacctgaattctcataaacagtggggttgccaatttatgagcagttatagttctccctctaatgtgtgtctcagatattcgaaactaaacaagactttctaaacttgcacttttgtataaattatcagccctccataaaaatccatataatgggtccaggttcagatatctcagtggcttctgtcatcaaactcttcccattcagcagctgactatgagcatcctaactggatcctttctgtcagcgccacccacaaccccattgttgtatacatgttggtgagtagagagactcactctgcctgccccattctgcggcctgtgtctttaacaatcgactgtgtttctgtcattgcccttag

SEQ ID NO: 21645 - DNA, 1033 bp, Homo sapiens
gctggtctcgaactgctgaactcaaacaatctgcctgcctcggcctcccaaagtgctgggattacaggggtgagccactgcacccggcctggacttgtaattctttatagttgctttactttttgaaaaaatgttaatatctttaatctgtttgaaaggttttgctaactgtagtggcaaatccttctacctattctttttcaaaatttcttggattttctcacatgtgctctttcaaatatatatttaagctgagtctaaagctccataaagttcaaggctgcagtgagctatgattgtgccactgcactctagcctgagctcagaatgagatcttgtctctaaaaaaataaaaatgtaagctctgtaaatattcttggaatttttgttggaattgccttagaactgtggattgtttgaggggaaactgaaatgtttactgttgactattcccatccagaaatgggtatttctatccatatatttaggacttctttatgtctgttagtttctgtgttggtgtattcctaggtattttataatttgtattagtattgtaaatagaatcttttatcctattacatatcttaacttattattgctgatataatcagccactttgctgaagtcttcttattagttctagtatttttttcagttgattgtctcagattttctaggtggcagttatatcatctgcagctttagaccttcgttgtaaatgggcccaaaataatgctgcttttttattctaagaaaaacaattcagtggagtcatgaagtgaaaagtatagcaaaaaattactctttaagggcaggtgcagtggctcacgcctgtaatcccaacactttgggaggccgaggtgggcggatcacaaggtcaggagttcgagaccagcctggccaacatggtgaaaccctgtctctactaaagatacaaaaaatcagctgggtatggtggcgcacacctgtaatcccagctactcgggaggctggggcaggagaatcacttgaaaccgggaggcagaggttg

SEQ ID NO: 21646 - DNA, 1051 bp, Homo sapiens
cccattacatttctattttatgtttgttagccaaatcacatttcccacctcagaaaaacgtaattttgattaaaagagattaacaaaatcccaacatattcataacttttatctttgtaaaaatagcataattcatttctaatcttctttaaattattgtgattgttagaggaattacatacatacttctggaacctgctcccccaccaaaaaaagtcttaattctggtgggagattatccagaattatcattaaaatttttgtcaataaagtcaaattaagagatttttttttctcattttttaatcagttttaatttgtttttgtttttgagacagagtctcactttgtcacccaggctggagtggagtgcagcagtatgatcttggctcactgcaacctctgcctcccaggttcaagtaattcttgtgcctcaacctccctagtagctggaattacaggtgcacgccaccatgcctgctaatttttgtatttttagtagagatgggatttcaccatgttggctgggctggtcttgaactcctgactccaagtgatcagcctgcctcagcctcccaaagtgctgggatttacaggcgtgagccactgcatctggcctgttctcctttttttaatgaattttcattccaaatagttgtagcacctacaaacattataagtgggaagagtactgaaatggcaaggactgactcaagttcttgaatgagtcgcgtgatccccatgaatgtgtttcctcatgtgtaaaatgggaatagcaggacctatcaaagagctattggagaaaccaatgtgacagttctttggaaaattatcagcaatattatacacacacacacacacacacacacacacacatatgctgttttcacttaatctgagttttcttattcctctaatccattattatttttctcaatccttataatattttccccatgcccaattaacacattcttccacgtgtagaaattcagtctcctgtcgccttgtctagtggctttcaaactttaatgtgtgtaagaaatacctg

SEQ ID NO: 21647 - DNA, 1046 bp, Homo sapiens
aactgtaatagtagtgccaaatttaagataccaatgagaaagttaaacctaagatcagtttgacagcaatgaggatccactggccctcatgtctgcctgacctgtgttctagaacctgcgtttcttctttttttcctccttctctcccttccttctttgctttctcttttgaaatctggattgattatctgaattaggtaacaatatactgtgtctaaaatgactttttgttagccattccacaatttatacatatttcaaaacatgttgtacatgataaatacagttgacccttgaacaacacaggtgtgaaggtccatttatactcagattttcctgtgcttctgccacccctgagacaggaagaccaacccctcctcctcctcctcctcctcctcctctttatgattttgttaataacattttcttttttctagattactttattgtaagaatacagtatagaattcatatggcatacaaaatagtgttagtcagccaggcacagtgactcatacctttaatcctaacactttgggaggctgaagcgggtggatcacttgaggtcaggagttcgagaccagcctggccaacatggcgaaaccctatctctactaaaaatacaaaaactagccaggcatggtggcgggcatgtaaaatcccatctactctggaggctgaggcaggagaattgcttgaaccctcggtggaggggcagaggttgcagcgagccgagatcgtaccacttcactgcagcatgggtgaaagagcaaaactccaagtcaaaaaagaaaaaaaattgttagtcaatctgtgtgttactggtaaggcttctggtcagtaataggccattagtagttaagtttttggaaaatcatatgtaaatttttgatttgattttctaacacccacattgttcaagggtcaactgtatatccaatttttgccaattaaaaaataatattaaataagtaaaagtaacttcactttttcctgatgcttcaggtgtctcatcttttgtgtgattttactgtaattttcttctc

SEQ ID NO: 21648 - DNA, 1050 bp, Homo sapiens
aaatcctagagagatttgatttgtatcttatcactgaagattccatagaatatattgatttaggttcatttttaaattttagaaatgtaatacatagattgccttttgtatatgaataattgatctatcgtctaacttttaattctgtgttattcagtgttttgttatttaataataactttccttcttcaaggagacaaaacaactagagattaaaagtggggtatggaaaaataatacattggtatattataattcataattaggagatagcttgaaaacctaatgtttctgcattatagagatttgatatatggaggctatgttttttaattgagacagggcttttgattcttatcaaaactgattgtcttacaatttagacaaatgtaatacggaattaataatatctttaaatgttttcttcaattgtgcttgggtttctcataaaatattttttacaggggttcaacagaaatatttggtggttacctgcaactatgaagctaggaaacttggagttaagaaacttatgaatgtcagagatgcaaaagaaaagtgtccacagttggtattagttaatggagaagacctgacccgctacagagaaatgtcttataaggttacaggtacaaatgataagcaatgtacttttagcattaatttttatgtaggatgcctgttcattacatgaattttttaataaatgtaaaataacataagtcaagatgctttttcctaataacttcttattttgggtcttgtcaactttaaaaattatgtgaaaggataactgtatgctatgaatagtatttttaagaagatgtatagttggaagtaattttaactcttattattgatgtttatataacagggaaaagtggaaaacaaagtttaaaagtgagaaaatgggaaactgtactgtaaaagatgccaggtctttaaaattttaagtttaaatgaattacgaagaaatatgttgttttctaatgcactaatgataattgaaagaggcttctgtaacatttgatcaacataattaaaaactga

SEQ ID NO: 21649 - DNA, 1029 bp, Homo sapiens
ttctgttttattcagtaataattggacattttaaatattattttgttttgcctcttttaaactcttggagaaaatatagctaaaatatactattacttgtttttaactttcctgagcagcctatagtttattctttgacacatttcttcaaggtcaccaatttactataagcattgatatttaatgtactacagatataaaaattataggtgtagaagattgagctagatatattgccatgaataactgccctaggaatgtcatttttagacttttttgaaaatattgcctttatacaagatgtggtacagaaaaaacgtcaattaactgagggctttattaaagatattatggaactatgaatgtatataaaacctttaacaataaatttgataaatttttaagcactagatagttaaatttatcctagttataacttcatttacatttgtgctccaatattatttcaatttagaattactggaagaatttagtccagttgttgagagacttggatttgatgaaaattttgtggatctaacagaaatggttgagaagagactacagcagctgcaaagtgatgaactttctgcggtgactgtgtcgggtcatgtatacaataatcagtgtgagtgggttcttattcattctacctactaaccaaaagtacatacatttcttaatgttcagtgagttcgctgtgtgattctgaaagattcatgacttttgttggaggtatagttatatttagtcagtaatctgtctaggacagctaaaattaggtgctgctattccataataagtgttaagattttgatgacatgtagctcaatgctctgtgcacttttcatttgcacagagcattgttcctgttcatctgcacagagcattcatctgtgcagagttttcgtctgacacagtgcattggttcccattttagaaagccatacccagctgggcacagtggagcgcccctgtagtcccagctgtttgggagactgagctgagaagattgcttgaacccaggag

SEQ ID NO: 21650 - DNA, 1125 bp, Homo sapiens
tcttcttgttagaaatttctcaaattgtggtttcagggctctaacagtttagagtaggtgtgcttctctaatgattctaggaggactaactgtatttagagaaaatggtttttggttggttctaagtctgagaaaactgaagaagtgaaatttcctccaactttgctgtcgtgtgcaatgtggcactcaaatgtcttgagcagagccatgcagctcattgttggctgcatgcagctggggctggctgtatgactggcctcccgtgatatgactcaggctgggcctgcgagtatgctagtgaaactgggtcatttgcttcagctaaatagaagactaccctgaaatgcctaacctttggagacagttcttcacatagaaaaaccacaagaagtataagttttacaggttctcttatttgaagagtcaacccagaagtgagaccaggtgctctaaacctgtgacatacaaaacctgtgaaattaaccatttgtctgtatctctgcttcccggctccttttctcccacaccacgggcccttatttcagtgactgaattataacaccatctaagtgacttgcaaaaaaaaaaattacaggagtgtgtgtgtgtgtgtgtgtgtgtgtgtgtgtgtatttgtgtataattagttttgttttctctagagtatgttatgattaatactataggtatgtaagaaatgtaaaaccgtattatttttaatccatcctctaggcactagtttaagattgcttacgatacagcctttttctaatgtgtcttaattagcatatcatactctttgaattgcataattaatataacacgtttaactggaagatatttaaactagtaaccatttaaggtattttatcctagttaagcagccatcgagaagttttgtcacaaagcagtaagagatagaaaaaattatttactacagaactatttaattttttatgtttttgcgatagggtcttgctctgtcacccaggctggatggcagtagtgcagttagggctcactgcagcctcagcctcctgggctcaagcaatcctcccacctcaaccgccagaatagctgggaaggcacctgccatcaagcctagctaatttttaaatttttgta

SEQ ID NO: 21651 - DNA, 1034 bp, Homo sapiens
gtctttttgagagcagggatttttgacttatttatctctgtgcttttccatgacatctagcagcagctgctgtgcaataactatgtgttgaattggatgatgtggaacagaaagtgcagagagccttttctttcgctgttttgcccttgtctttgccattccctcataactgattgtcttaagacccctgcattgcagcctcaaggctgtgttcatgaacctttagatgtggagcattcattagtaacttgcattcttcctttgcaaaaggaagttttgctcagttttgcattcttcctttggttttggtgagtgaagttgtgtagatataactcattctccttccttgccttctctgtattatcagtgttctaacccatcctggacttatctcagctttatcctttcctttattcccgttccttttgactgtagaccatgataactcatttgtgacagattgacattttgggatgggtaattctttcttgttggaggactggagtctatatagtaggatgctgagcatcatttctgtcttctacctacatcacatcatgctggtagtagcctcctctttccagttgtgacaatcagatgtctttagacgttgtcaaatttcccttaagaggcaaaaattgcccccggtttaaaaccactgcttttgaaaaaaaaaaaaaaaaagcttgaaatagcaggaatcctgcatcctctatcctatccctcttttcccttccctacccttgttttttaatctcactcttcctcaggacagtgaagccattaccaacccttagcccctccacccattttggcagagttagttcttacattctttttatgctcacattttttttgttcatacgtttcccaaaacacttttccctttgtatggggtattttttgttctttatatttgtcttccctactagattttaaacttcttcaggacagcagttcagtttttcatctttttatttccaatactcaatgtagtataactatattgcattgtagtataactacacatagag

SEQ ID NO: 21652 - DNA, 1027 bp, Homo sapiens
gaacaggattaatgagcagttctgtgaagggggagctcaggctgcgtggactatttttccattcatatttttatttaaaatacctgtcatctctgatatttcatattgggtgtgtacactgaaatgctgagtaaagcagagagtctgtcatgtcctcttttttttttagaataaagagaaccgaaagacccatcctgtaaacctgtgtaacgggtgatccgcataacagccagataggtgggatcagatgacacaaatgcgttccatatttacactgcagtttccagaataaggttgacactcctttaatttcaaacctctgatagtatggtccttcttcattcagatagaatctcacattaaaatatatcacacagacaatgcactcttgactttaaagataaccaaatgcagaattagacttcatctgttgggactaccagatcaattgctttgacttcattgcctggtcaattcagtccaatagctagcttaaatgatttttttttctgcctgctgaatttgccagctacttcacttactgtgtaactgtggagctaccaccatgtccaggggctgtaccgggcactttggggagttacacagaattgtcaggcatgtttcaaatctgtgcagagttcataatataaaactaattagtaaggcctggcaaaatgtgatttagtattaagggcctggaataaatggggtttgctgttgattatttttgtttcactagaagtcaatgagtgctatcgtagttaagagaataccatgtgggaagacaagaattgaacagagaggagggaggagactgcaccaatggggaaagggctagaggagaaaccttagcaaaatactagaataaaataaaggaacagacctttagggaccagcttggaaattagcctgacttcaggagcattggtgttgaaaagagtgagttgaaaattagggaactagattatggagggcctagaatcttaagccaaggtgtttagagtttttcctagaggtggtagagaag

SEQ ID NO: 21653 - DNA, 1059 bp, Homo sapiens
ggcgggcggtctaggggaacaattcgtggtggcgatgatttgcatagcgcgggtcttgggatgcgcgcggttccgagccagcctcgcacagctcgcttccggagctgcgagctcaggtttccacccccgatcccccgggctttcctcgcaccgctgagcccagcttgtggggtgcactcgaccaacgcccgacagggctggggaatgtgacaggcagcaggttcacccgggcttggggagggggagtttccgctttgacagcattttcctttgccgtctgctggtggattcctattcccagtcggtaatcgccccgcagtgttgatctaagaaggtaaagaaaactaggtttccctgcaaagagcctcccccaaatcggcggactccggatactttgagtggatttagaaatttatgtaatctttctcctttagtttatttttcatcctctcctacagttttctctgatttgctgttggttcggggcaagataaagcagccagtagagagcgataataatagcggcgggaaatgaactggagactggctgacagttcttaacattttgtcatagatccccccgaatgtcccaggctgtctctggtgggttttagtacccgccggcttcttgggcaccggggaccagaaggaacttggcagctggtcttaggggtacagttaaaggcaggatgacagctattctcctgctcatctcagagcgctgccgccccctcatgccggtcgcgcaaagaacacagcttttaaaaaacacgtgccttctgcccatataggtctgaaagtgatgaggaaagtaatgcttcgcctattagcgagtttcagcttttaaaatgatcccaagcgttgctgagatgagaaagcgtggcatcccgggggtcctcagccccacccgcgcccatggtgcaagtctgcagggacaggcccgggacagcactgcccacgctgctagattttccgcagaggatcgctgaagctgccttcgtgggagacagaatgcctcctccagcgagtggaaaaggcctgctgaggaccccgctttgc

SEQ ID NO: 21654 - DNA, 1059 bp, Homo sapiens
taaattgtataaataggtagaaagacagatagatagatcgataggtatcttaggtttgcgtattgttttcacataagtggcatcacactgcatgcatcattccaaagctccttctttcctttgatagtatgcctacccagcttctacatataaatgaggttcttgcaacccacatttattgcatagtgtcctatggcatgactattttcatttatttagccatttctgttttgatgggcaattaggctgtttaccatttttggttgtttgcattatttgctaagcagtgatgagtgaacatccttgtacacacctccctgtgtacccatgggaatgtttcctagggtggacaccgagaagcaaaatgagaggtcatggagatgcacatactgtaattttgataggcactaccacactgtcttcgaaattggctccccatcagcagtggaggagagagctcctatttccctgacacttgccagaagttaatatattagccattttacttttttttgcatagttgctggatttaaaaataacattttgtggttgctttattttgttatatttttatgatttctaatgaaccttgatataatcatatacttgctggtcatatatatttccttttctgagaatgtcctgttcatatccttgtttggcattgttttttatatattctggatgcaaatttttgctttacaaattacaaatgtggtctcagttctccagttaaaaggcataaagtgattgaatggttaaagaaacaagacccatctatatgttgccttcaggaaacccacttcacccataaagacacacatcgactgaaagtgaaagagtagaaaaaatatttcatgcaattggaaaccaaagaagagtgggagtaactatacttatatcagataaaatagactacaaatcaaagactgtgaacaaagatgaggagggtcactacgtaatgagaaaagggtcaatacagcaaggggatataacaattataaatatctatgtgcccaacactagagctcccaggtatataaagcaaacattaataga

SEQ ID NO: 21655 - DNA, 1027 bp, Homo sapiens
ccggtggcccagaggaatgaaatagttatccaaatcaaataactcttgagagtgaaagcccacacatgcctcctggttcctgccccagtgctccgcttattgtacagtgctacctctgcatgagagcggtcccacattgacaaataggatggtggcaatcctttagcaatgagcagggactggggtttatctcttaacattttcagctgtaaaattagtcacaagcattttcagtgtcccattagtacatagtcacatatggtcggttgcttcgtgaaggtggcctgtcttgaaatactagggctcatacgggatttttgccctaggaaaaacatgttgatcccaatgatgtgatcacttttgaacctttccattacaaagcattgtatagataactttttaattcagtaggaggagaaagttcattcttggcctgttggctttgattattatgggtactttaaagtcagtatttatcaagaaagggaacttgaccaccattggcacatgtgacatttaagctcttcagccttttcctttttagttgtaggtgtttacatttcatttctaagccaactctgtatttatgagagaagtttaagccttacatcatttgatactaaagggttatttgtggtaaatgaaaaatgaccccaaaattacagaggaatatgccagtttaagaaatggctacttaaagttgcttctctctttccttcttactcatgaaattaattggtcttcttcaagtttctttagattccattaaatgattaaatcactattaagagccattcatcaacgtgatttgtgtgttagccaatgaatctgtctcagcttttgaccaaatgggttttagacaaatgcaaagatctgcctctagtccatatggctctttttgagtgctagtattttgcatttcacataatgtagttattttgagcttttaaagagagcatttagacaaagaagcaaagagaggaagggaccaatcaactcatcagttccatgcatcaacaaagcatag

SEQ ID NO: 21656 - DNA, 1052 bp, Homo sapiens
atattactaactcttctctgcccacttctcttttgtccactctcctagacattcccaccaactgttccagtgatttgggcaaaaatacgcagccatttcccaaaacttcacatgtgcagctatcatggctgtccctccctagacttggaggtgactctcacttaatttttacctgcccaacaatgttccatctaccatctaaaaggtaatataagaagaagttttgaaacccactttaggaaaaccatcttctttaaatccttcaattatctgaggcctctatatgtcaaaactatttttcagttgcaggggattgggcaaacttgttctttcttatacttgggttcaaagacccattctccagtttcatatttcccaaaccaaaatgcttgacataaagccaaatcaactgccaagcacactttattttgcataggagtatgcagcctagggaaccttggttgaaaagcagcagtctgctatgcaaaatattggaaatcactgacagtgtagcattcatattatctgtcaatgagggtatattgggaacgtgctctcgtgaataataaaaagcaacatatttttatttggccttataaattaggttgtggtaatgtaaactttgatatatagtctttttatttttctcttattaatctgccaaagatgggaacagatacaagaatttttcaaattggcttttgtaagacaattgatgattgtaatagtgtttaatcttccagaaagctttatatgttgttccacaataaaattgatatttgtttcagcaaagttttcctgacactcacaaacccacaaactgttcctcttaatgcagatattgtagaatctacaaagttcaaatccatttttgatccaaagaaagtagaggagtatttgagacatgagtgtacccagccctttttttaatcacaggcaatgcatgggtctggctggttacactttgccaagaagacttgtcttatgaaacccaaggtatattttgttatgccattttatgtccttttcttttaacattgtggaaagtggta

SEQ ID NO: 21657 - DNA, 1089 bp, Homo sapiens
gttcctcaaatcatgcatactaagaggtagaaaggctgcccttgcagataaagacaagggcaggtggccacattttaaagtgagacagagtaaaataccctggaaagaactgataatgttttctaaatgctttctaaagacaacctgtaaacacatattggagaaaaagcagcaaggtactctccaactgggcatatcctgaggaaccaacaaacagtgttcatgaaggacccgtgtccatcagggtgggtttcacaatgcagctggctgtccctggaaggatgcagggatgagaaggagcctctccgatgttaaccagtgccacatctcgtgggcagatctggccagagtgagcccaaaacacatcactcactggcctagcttacgtaccctcagagcagctgttcaatgaacagtcttcagcaagaactactaaaagacagagaaactagatttttaaacagcaaaaacttcattaatttagcatgtacaatagttcaaatgtccgatttgtacatgattttttgaaagaaaagtttgaaatatgtagcaaatgcttactttgtatcagatcatgaaccctgtgccaatgatgaattaaaaagctcacgtatattgaacttttgtcatgttaatgcctctcaggattatcgcatttaattttcacaaggatctaagagttgagttctgttaccatccccattttctagctgaggcttagttaagtaagtaaactgcctgaaccagagcagggaagccaacaccatcagagaaaggaacccatacgcctatccacgctgcatccgggaaagaacagaattatttcatgagcatcccttacttatagcttcactaaaagcagttacaagctaaacagttaaactataatttgcaaagcatatttgagatttagactttccatcacatgattacacttctcatctatttctgtatctattctctacatttctgcaatgcaatgtaactacatgaaaccatttcctgatataactcactgtcttagttaactggtcaattctatgaaaccagtgcaagtctcaaaacgtccacactggctaccaagcaaca

SEQ ID NO: 21658 - DNA, 1033 bp, Homo sapiens
tgcaaaatattctgcaatttattactgatatcctcagtttttaaaaaccccctttttaagcccataaatatttatatgctttaaaaaatgagagtagggaatcaaatcatttggtactatgggaagctgctaaaataatatttgatagtaaaagtatgtaatgtgctatctcacctagtagtaaactaaaaataaactgaaactttatggaatctgaagttattttccttgattaaatagaattaataaaccaatatgaggaaacatgaaaccatgcaatctactatcaactttgaaaaagtgattgaacgaaccacttagctttcagatgatgaacactgataagtcatttgtcattactataaattttaaaatctgttaataagatggcctatagggaggaaaaaggggcctctgggaaattatgctgaagatcaccgaaaggaaaatgtaactgtaattttataatacaataccatttgaactgaaatacaacatgctttgtaattctattgccctggattgagactggattaaaacgttccctttcaaccataatgtacataaccagttgaataataggacttttattattattaaaaaattttttttgagctggtgtctcactctgttgctcaggttggagtgcagtgccacgatctcggctcactggaacctccacctcccaggttcaagcgatttccagctaatttttgtatttttagtagagatggggtttcaccatgttggccgggctggtctcctgacctcaagtgatccacctgccttggcctcccaaagtgctaggatgacaggcatgagccaccatgcccggcctatttttaaatttttcttaagacagagtcttgctctgtcacccaggctggagtgcagtggcgcaatctcggctcactgtaacctccatctcccaggttcaagcgattcttctgcttcagcttctcaaataggtgggattacgggtgcccaccaccaagcccggctaatttttaatttatggtagagacagggtttc

SEQ ID NO: 21659 - DNA, 1033 bp, Homo sapiens
cgctgccactgctcctccgccttcaaccgcttgcgatgcttctggatctgcaagggggagagatggggagggatgaaaataagatccacaccagggaggaggcctggccagacggttgacagaaatgaacactgatgaactcccctgacacctgccccattttgatgcaggcagttctgtccccacttgtgtgtgtgtgtgtgtgtgtgtgtgtgtgtgtgtatgtgtgtctatatctttttttttgtttttgagacagtctcgctctgtcacccagacttgagtgcaatggcacgatcttggctcactgcaacctctgcctcccaggttcaagcgatcctcctgcctcagcctcctgagtaactggggttacaggcacgcactgccacacccgtctaatttttgtatttttagtggagacagaatttcaccatgttggccaggctggtcctgacctcaagtgatctgcctgcctcggcctccaaaagttctgggattacaggcatgaaccacagtgcttggctatatctatctatctatctatctatctatctatatcgacatatatatatgatgatataaatctatatccatctctctatatctatacatagattgattgatcaatcgatctacctacctacctacctggagatatatattgaagccaagggaaggttatttaacttttccaaggtcacacagctagaaaatgcaaagccaagattcccactcctctgaagctagtgcccttttctagttcagaccagatgggtacagtcaaagagaaaattcagtagggcctctttcctgggttgttactgcatactgttggcactgcaaaagggagacccgagggatactgaaggttgcctcagtagcctctactctctccttctttctaatggaaattgattgtattcagattgccccccccaacccctcacagccacatttctcatgggcggtgggcaggttgatttcccttgctaaactagtccagaatgggcaagtgacctaattttggcacgtg

SEQ ID NO: 21660 - DNA, 1174 bp, Homo sapiens
ggggttcctggtgcaaatctatgtccttgttccagtatcttcctgaggcctggcttcttcttggacaacaggaggtgtttaaataaatttacttttttcttttttttcttttaagttacaggatacctgtgcagaacgtgcaggtttgttacatgggtatacgtgtgccatggtggtttgctgcacctattgacccatcctctaggttccctcccctcgtctcccactcctcaaatttaattttttcttaagctagctttggttgttctccaatacttgtaatcaaaagagttttaaccaagaaactattaaactttcaaagtcttattcatggccctctgggaccttaagacattttttttttctttacgggggaaggtttccagaatatataaaattaaagtcacaattttatttatgcttccaatagtcataaataacactttcaaattagagaatgattagttttgtctgggtcttaaaagtaacgaatgtgaagatagacaagatcatttagaaaagatatgttggagaacacaacctatcattgctcagaccctgaaaagtggctgcaatgctgcggcgttccaactaaaaagaagcttcaaaaatcctgccctagttacagaacacaaggtctggcaaattcaaaacataactgtagtgatgtatccaaacctacgttttcagtaacacttctaaaaaaacagaacaaactgcatctcatataatatttatgttctctttgaaaacacacaaatatttcctatgaccagcatggttgccaaacttgctctttcctgccaaaccatggccttttctttcctgaacaagccactgaggaaaatgctgagattctcttggcttatgtggctgaggaagaggaagccctgccccaggccctggtatccagtcctcaaccttcccgctgagcagaccaaggacaaatgtgaaatgaacactgtcatagttcccagggcaaccaaaagcactgaacagatacactataaggtaacattggtcttttttgtaaaatttaagtacaggcatttagagtttcctgaaatctcaaatgcggtgttaggtgcctcactggtagacattcttttatcattccttaacaaaaagaatatttcctcgctacagcaataatccctcttgccttttttttttt

SEQ ID NO: 21661 - DNA, 1049 bp, Homo sapiens
cttgtcttcaatagctgtagctcccaggagctagaatgtatattaaaaaaaaaaaaaaaaggaattagcaaacaaaccaaaagttttctgtaattacaggttgccaacctgtaaaaagaagggctaattatacatcctggttgctgctctcctggggccaatggccagtgttaacagggaaggctgccatgtttcacaattactgcaaaccaacacacctaaaaactttttccctaaaggatgaactatttaatttaccaagacaaaaatgcaagtacaaaatcaaggatgttaaaaatacacttttcttgtgtatttgtggctttatactgacataaaccgtaaaccagttgcaatactagctatttgttgaatattttccacttatctaaaccctacaaaaactatgtattaaatttggaaaacttttagaaacaatatatttttcttatttcaagattttgcagaatatgaattgtttcggtaattcccccaatgtaataagtattagatgcaggtttgttattgtttaaaaattataataaattttaataagtgatatacaaattatggaattaaattagaacttctcctaatgtattttgtcttttggtttctcataatggcaacttctgttctgctcctattttggtgaataaaagaaataaccttcttccattgtgccagtgtcaaatgctgaagttacaattatctcttaagcatgagatcaaatattcaataaaacttaataaaaatttcaattctgcttagaatatcaaagaaaaagttattaaggctaaaactcacaattaagtctttttcaatctcctcatatactttatccagagcttcgtcccggttggtggaggccacactggcagccataaactttttattccattctgtaaattctttttcttcaatttccttgtagcaaaggcatagggttctaagagtttcatttgcaaagatctgttttatttaaaaaaataaatccaccaatgcaaagaatagttaatttatgtaattcaggatcaagtctgaaattt

SEQ ID NO: 21662 - DNA, 1058 bp, Homo sapiens
ggctgaggcaggaggatcacttgagcccaggagtgtgaggttacagtgagctttgatattccactgcactccagcctggctgacagagcaagatgcagtctcttttaggaaaaaagaaaaaaccaataagaagaggaataaatctcacagccagatacacaaaagagtacatatgctacatgattccactgaaataagccaaaaaactgacagagctaacctgtgttattcgtagtcaggaaagtacttttcttgtaatcactggaaaggaatgtaaagggaattctagggggattgataatgttcttttttaaaaatctgggtgctcattacaagagtattggtttgtgaaaattcattgagttatatacttatgatacgtacatatctctgtatacacatgttgtacttcaataaaaagtttaaaaaatactctgcctacccaagatcttctatttttctactctagttattttgtctcaaaatagaaggaaaagcatttccgtggccagatgactttggacagaaagagcatttagttttccaaaatactttgaccaggatgaaggccacagatgcatgagcagcctcacttggaatggttggtgctctggggtaacggtggcagagagagctaaacacaccttccttccttccttcacaattggctcagaggattcactttttaagtcaatattaatcacttcctaattaataattaaagatgacacttagggtctctctgtatttgttcactcagaaagtcattcactagaagctataaacgcacttcctaaatccggccatctagcaatcatatacaaatgctagagggcaaactatttaaccagagacaaatcagcagcggtgagaacaaagcctttcccttcggcaacttaagttggcacagcgatatatggcataatattgacagcaaacgcatttccagcagagaaaaggaacaaaataataaaaagtggtaaagttcccacaagtaagacactcatatctagagcaaacaccttgatatttttatcattaaagaaaaaaaaatgttt

SEQ ID NO: 21663 - DNA, 1008 bp, Homo sapiens
atacatatgtaactaacctgcacaatgtgcacatgtaccctaaaacttaaagtataataaaaaaaaaagaaaaaaaataatcccatttataatagctatgaataaaatagctaagaattaagtttaccaaagaagtaaaagatctctgcaatcaaaactataaattgattgcaatgatgcaagaaactaaagaggacaccagaaaaatggaatgatattccatgctcatggattggaatattgttaaaatgtccacactgcccaaagcaatctacagattcaatgcaatctctatgaaaataccaatgactgtcttcacagaaatagaaaaaaaatcctaaaatttgtatgggaaccacagaagacccagaaaagccacagctaatctaagccaaaagaacagaactgtaggaatcacactacctgacttcaaattatatgacagagctataataaccaaaacaacgtggtattggcataaaaacagacacacagatcaatggaacagaaaagagaactcagagataaattcatacatccttagtaaacttgttttcaacaaaggtgccaagaacatacattggggaaaggcagtctcttcaataaatgatgcaaggaaaaactgcatatttatatgtagatgaatgaaagtagaccccatctcttgtcatatgcaaaaattgaatcaaaatggattacagacttaaatctaagacctcaaactatgaaactactccaagaaaaccctggggaagtctgagcatggtggctcacgcctgtaattccagcactttgggaagccaaggtgggtggatcacaaggtcaagagatggagaccatcctggccaacatggtgaaaccctgtctctactaaaatacaaaaagttagccgagcatggtggtacatacctgtagtcccagctactcgggaggctgaggcaagggaattgcttgaactcaagaagttgaggttgcagtgagccaagattgtgccactgcacttcagcc

SEQ ID NO: 21664 - DNA, 1084 bp, Homo sapiens
gtgaatgtacctaatgccactgaactgtgcactgaaaaaggatcaagatggtcaatgttatgtatattttacatttaaaaaaaaaaagtcaggcgcagtggctcacacctgtaatcccaacactttgggaggctaaggtgggcagatcacttgaggtcaggagttcaagatcagcctggccaacatggtgaaaccctgtctctactaaaaatacaaaaattagccaagcctggtggccatgcctgtaatcccagctactcaggaggctgaggcaggagaatcacttgaacccaggaggcagaggttgcagagagctgagatcgcaccactgcattccagcctgcatgacagagcgagaccccatctcaaaaaataaaaaaatttaaaaactcccatgaaataaacttctacaccaagaagacaagatcataaggaacctctcctcctctcaaagttgtactggtacaaatcagagcacagattttcttttaattcttacaatctttgtagcctgatgaacttcacacacttggagtccttactgtaacaaaagttctggaggttgctgggtgcagtggcacatgcctgtattcccaactactcgggagactaaggcgagaatcacttgagcttaggagttcgagaccagcctgggtaatatcttgagaccctgcctctaaatgaaaaaaacaaaaacaacaacaaaaaactggaggttgatacagcagctactagtgcctgacttagaggactcacactttaatttttcaatataaagataggggcattatttcccagcatgaaatgtacaaaacctacccatctccccaagtgagtaaatatttaaaccacccaagccaaagggttacctatgctgttgtttgtttgtttgtttgtttgtttttgagacagagtctcgctctgtcaccaggctagagtgcagtggtgcaatctcagctcactgcaacctccgcctcccggattcaagcgattctcctgcctcagcctctggagtagctgagactacaggcgtgtgccaccagggtttcaccatgttggccaggatggtctcgatctcttgacc

SEQ ID NO: 21665 - DNA, 1026 bp, Homo sapiens
ccttcaaatggatgaattgtgttgtgtatgaattacatctgaataaaactgtttaaaaatattaagaatgattgagtgtgacattattgcagcagtacattggagtttctgctaaattacttttgcattcatttcaaaaggaagcaactatgcccattgctaatttaataacctgtttgcttgtgcggtgtttaaaatggcatcatgaaaacatggcaatgtgtgatagattaagagccaattaaattttttattttgagttacaagatctgcattaaacagattttattgttgcccttgaatttccagtcttagatgagtagcagcagtgaaaaaaagagatcctaacttaagagttttcaagctttttgatgttgcaggtatttgaataagtgggtctgtcttactgaaatatttgttaattagcgataaagcaaactatatgttgatcttttggtagtccatgctaaggaggattagaataatatataaataatataatggtaataagtatcagggcaggaggattaaagaagggtggaagaagtgtgacaaaatgttactttctgtttttacattgtttctcttccaggtcacaactgtatttcaaatgtatttcattttcagactataggtggcaatgtttgtgctgttcactgtttaatgttactgttggctcgggtgttgcttgttgctggaatatggaaatgatagcataatttagagttgagaataaaaaaaactagatttagaaaactagaaactagatttagatttagtagagactttctaaatagtcctagttctgctgtgtggacccttctgtaactttctgttactctgagaaggagctgataattatcacaactactggtgtttgattagcagagacattcttgattcctgatgcaagaccgtggctgaagttgtagcagggcgtttggtggttggcgatgtaaagatctgggcctcttgtttcatgaataatagaatctcactatgattgtaatattttgttttgaactg

SEQ ID NO: 21666 - DNA, 1025 bp, Homo sapiens
tccagatttttaatagctggacgttaatagaatatttgaattggaggagccttatacaataactcatttaactcctgttgttgtcgatgagaagaaccaggtctagagcctttacataaacacatcagtcagtggaggtgccagggtctgacctgctggcctcctaagtcccagcccagtgatagtttgggaatgtattgaatctcatatgattagtattattctccaaaagagaaaactaacagattttggcctaccatcctagtatcttttccattaaagtatgggatgttgggtgatgaacagtcgtacagtgtaactaaaccacttttgttgtatgcatcaaagtactttcttgtgaaattggatgagagattctgctgagggtgcagttcttgtctctccatctctcatccagtgaggaccaagtgagttaagcagtattgagtagtataacagtacgttcctggagacatgggtgtgtctgtagactaatccttattctccaattattgagtataatatctcttgtttaacatgaggaaagggtcaaatttgaggaaaaatggcctcttgtttgatgtgttttagttcattattctcttctattaagagaaattcactgttaaaaaattgtttcccatttccgtatctgaaataatgactgtagttgaggtgatcttgccctgggtctgaaatcatacttccaaaccaaaaaggactttgaatacaaaacttttaagaaatcttgtatgaatacaagctatatctgaaaaattgtgttttataatattgatgcctagttttgccccaggccatctgcagtgtggttactatgcaaagaatgctggtgttgctgtttttttttttttctttgttggctattaacccagcggagacaatatgtggctatggtagtacttggaagttctagcattacacagactagcttccatttctctcatagaggtcatttttggcatttaaaacacatacttttagaaaacagatttggatgtatgtaa

SEQ ID NO: 21667 - DNA, 1041 bp, Homo sapiens
cttcctagttgctcatgtgcggcctcggtgatgtggatgtgaatgactggagacagcattctatttacaagaacggctactgcccaaaccaccccgtcattcagtggttctggaaggtaactccggggcccagccccagccggtgtcctccacctgaggcaggattgagggctgtgtggcgccctccattgtggtctgacttcaggactgatgctggctttggggtctgttagagcttggactgctgggggagggaagaggcaaactgagccagcagccccgtggtggctcctctgtaactgtagcagacagctagacttgaatgaagttggtccctacaaaagcacactggccttccttgaccacctcgtgaaagtgacttttatttgagggactggtcctccaatgcgtaaatagaaatggggggcttctcagggcagaaacaggcttcagggatggctttgcaagatgccactttctgttaagaagtcgttttctcaatttttaaaatatattccaacaaatattttgatctgtgtatctttcaaccaaagataacacaacatttgatttattatcttagggccactgtttgtatcctgttcagcttaggagggaagtaaaataggaatgggttagtccaaaggagatatagtaaacaaacttaaaaaaaaaaaaacagttatcccccaaaaaggctgattatttacttcaccccaaaaaggaatcatttaactttttcaaatttatttttatttatttatttatttattttaaagatggggtctcactgtgttgcccaggctggattcaaattcttgggcttaagcaatcctcctacctcggcccctcaaagtgctgggattacaggcatgagccaccatgcccggcctttttcacatttctaaatgccttttattactatttcaaatgccagcaggaatacagagataaaaaagcaaaatcttcaaagcctagtccaggtctcacttggcttgttttagatgtttgcctacagcagtccaagtggcattaccagta

SEQ ID NO: 21668 - DNA, 1035 bp, Homo sapiens
taggtggatttttttagggcagtggaactattctgtatgattaatgatgaatacatgtatacaaattttaatcatttaggaggtcagaggagggggattccaagatggaatacagactataagaaaagaacctaactgtattgcaaatgtatggtacagcctcactgaagaggggtgaaagagtacagtgctactgacctaaataactaagtaactgggaatgagttgagcctaatactgaaggcaaaaaaaattgcacataacacatgtgctgactcagaccttcttcaattgattttatgtaacatataagaataaagtttctacattaaaaaagtatgaatagtatataacatttgtaatttattgttaatgttaatttttatcttcataaaacttgaaaaaatagatagctataatgtcattacttattttacctatccattggccatgataagatgtcccatggggtacaggttaattctgaaaccactatttctcccaaaaacaccttacaccttgagaaactatgaatctaaccatgagaaaaacatcaaatctcagttgagtgacattctgcaaaatacctgacagttactcctcaaaaccgtcagtgtcatcacagacaaggaacacctgagcaggtgtcagaaccaagaagatacaagcctgaggagacacaagcagttgtaatgtgagatcctgaatggagtccctgagcaaaaaagaccattaatggttcattagttgtgacaaatatactattctagcataagacgtgacaaatacactaggctaacataagatgttaataatagagaaattaggtatggggtatataggaactctctctgcactaccttcacagtagttctgtaaaccttaaaatgttctaaaattaaaagttgacttaaaaagatcatttgagattactgtttttaattagccagaatatctaaaactatgaataaattatgaaagagcctagtttttgtcacttaatgaaaacagtgatggcttagaagtcctaaatga

SEQ ID NO: 21669 - DNA, 1102 bp, Homo sapiens
ttgtggcaggggttggttaccaagtcctggcctgcgtcagagggggtggcctgcagttctacccaggcggctcttcagccagttggctggggctgcaggtgctcttgtcaccctgtctctctgctccctggcatttctgtcactgctgctactattacgggtgctgcacacgccccactgtcagccctcaagaagaaagccgtcagaggctattattgtcacgggatggtcttgaggttttggtgtgttctttatttttttttttttatttttttcttccctttgataccagtgggtcttgagtttttaaccattgaccccattccaggctatcaaagaaaggtaccgtgttgaagacctcataagcactaagctaggtctggctttccacactgttttagatgggctgcacacctggttaagctagctgctactttttaaggcatagatacagatctttttttctcttatgaacaaaaaaactgtttctatcagaatacattatctttgagcaaagtctcagtgcactaagttcaaaaaatgaacttttaaggtactcatacacaaaatcttcacatacccctgaaatagcctcatctgagtcaaatgggggagtatttttaaaagatgctaagaggagacggtagtacatccacatggctactgcagaaaccaagaatacagtacccgtgaagttctctctctctttgatatttcccctcattcactctgatgggattcttcctgtcccttttttagttatcttgtttttagcctcttccattctcagcaaaacagaacctaatttgatgggaacccaatttcaaatattccttgtttaaattttctccaaaagtctagttgaatattatatcccttttgttataatttaataaaagtaaactttaatattaattactgttatgtttcatatacagctaataaatatcctttgcctggctctcaaaagtgtgaatatgcttaatttcagtttgatgattttagcatctgtgttcctcagagaatattgatctgcttacataaatagttctaaaatgaaattaaataatgaaatcttatttgaaatgaaataatgcaatct

SEQ ID NO: 21670 - DNA, 1135 bp, Homo sapiens
cggtaaaattttttttggatatgtgctatatttacatagtttaaaaatttaaacaatatgaaggaatatagtgaagtcttaactcctaagtttcttatcttgaagtctccttatgcaagtattagcatatatgcatatattctcattcttctaatacagaacacagcttccatctataattttgtgtaccagtactttctccgcttagtagttatggttcttttcgtatcagtgcattgagatcttccctccatttctgtagcggcacggcatcttgtggtatgagtgcatgcatgtatttagccagttctcctttgatggacccaccgtacacaatggtgcagtgaataaacttgaacacagtgacttctgctataacacttatgctgaaacaaatttatcccagtaccaagatttatcagaacaatgggagcttaacctgaatttcatgtttgcttatgtgtgatttcatccctgagaaataccaagtgactacagaatgctgtggagttgtgtaggaaaacacaaaacacatacacacaacaaacctccgatttcaccagggcctccctctcaactgtgggtcacatccatccacagctggtgttgcaagcttcccttccactaagattgccctccttcccccacttcacagtaactcacaagctgcaaccctctgacctccacaagctcactgcaggtctttttcaaggtaaagtgcagtgttttttgcatttcttaaccatttgacgtagttaaaactaaatattttcattcgatgtgtcactgacaaagtcttgagtgttgtctccgtgactccatttttgctagaggccctgttgttttgttgaagttttgcatagtgcagtgatttttaggagcaccgatgttgcattacagcagaaacgggctgtagtaagtatgcaggtctcttcatagaatagattgcccagtggaaggggtcagagctttaggagtgaattttggagggactgctgctgtgctatatttaaatcatgtgattggcttggtttttcctttttcataaaaaggtgtgagctgaagggcatgtgtcagcaacggttgaggataatcctgtagcctgcagtctttaagtttgtgggagtttctggct

SEQ ID NO: 21671 - DNA, 1050 bp, Homo sapiens
agtgctggaggcctgctctaaagtgaagggattgccctagatgattaactagctgtcagcctgcagttctggaggaaaacactactatatttgtagatgcaggactttttttaaagctaaaaattggtagcttttacttcagagttgacaattatcctggtttcttttctacctgatacaaactgcagagggtcctgtcagtgctcatgacatgttaatctcagtagaagtcatttcctttcgcacatgttaccaccttgagcagttaagaaggaagccacattggctcgttttatagctcctgagacctacttgactattgagtttcacctctgacatgtctattctgatcgccttttggacacagggtaatgctgatactgactttgtgcttctttccagtggcagtatggagccggcctttcacagaggagacctcctgttcctcacaaatttccgggaagacccaatcagagctggtgaaatagttgtttttaaagttgaaggacgagacattccaatagttcacagagtaatcaaagttcatgaaaagtaaagaggctttatttccttttggttttgttatgtaaatttttggtagattcatggctaattagaaactagtaaaagcactggattatgttctgagttctgccattgactcactgggtgactttggaccaaatgcttaactctttctgtaggatgggagttgtagtagttaaacccatagtaactcacaaagtgattatgagaattaaatgaactaatgtttactaaagcaattcataaacttaaattgctgcacaaatataaggtatgatgtattatgacatgttagttatttgaaggagctcaaagaaaatcaagtcacattgcaacagaggatggttttgatatgaaaattattttctgaaatgcaaaaaaagctagctgtttttctatgttacttgggccaaagtggcattttcagcagtaatattagtcctggatggataaaaattcattttccaactcatctcatgatttggccgttgcatattctgcatt

SEQ ID NO: 21672 - DNA, 1049 bp, Homo sapiens
aatgaagtgagtctggaaaagctccttgtcagcagcgtttttgtgtgttatgaatctggacttgaaagaattgcacagaggtgattcacatgattttgcccactgatgaatgacactaatacacttgtttacaggttaaaaaatgtcaggtcctagtttattcgtcattcccagaagccatgtggtaagaaggaattcttcattgtgtgctgtgctggaagcaaattgttgcccttgtgcttggtcatgctttttgttgtcaaggatacttgagtgttttggaatttaagtctacaaaactgtcattagatttgtgcttcagttgaatggttgtcttaagcagtcatcttagactaaaggaaggtcaggttatctttgactgtttttctaaatgctcctgtctgacagtaaagtcttgagtaaactaatatttttgttaatgatgctgtgctgaaaataatttttgagaagacattattttgctttccagagataatggagacatcaaatttctgactaaaggagataataatgaagttgatgatagaggcttgtacaaagaaggccagaactggctggaaaagaaggacgtggtgggaagagcaagagggtgaggattcacctttaagttatatagaaggttatgaaaaacacttagaaatgaagaaattaaatcaataggctaatgagtcgttaattacaaatatgacatatcaggagagttttaagcagttctagtttatcctgtgaagactaaatacaacttagaaattcctaaagacctaaaatctaaaactgaacccaattatattatctatatgatgggttcaaatctgtttcaaaataaatccagccaggcgcagtggctcacacctgtaatcccagcacctttgggaggctgaggcaggaggatcacttgagcccaggagttccagaccagcctgagtaacatagggataccccatctctattaataaaaattttaaaaaatttgttctaaaaaaagaagaaatataaatcctcactgagagattagttatttgtggatt

SEQ ID NO: 21673 - DNA, 1051 bp, Homo sapiens
aacaagtgcaagtgtaggcggctgtctctaggagaaagtcattgtcgcggcagaaggggcaggagagagccccggggaccgcctggactcccagcgcttccagagacggccccacaagggcccctgtgttcaggagcctagaaaatcttgtaacatttaaataatcgatattgtgggaggtggggataggagaataggagttagtccgctcctttttttcattcattcattcgcactccccaccccgatacatacagctccatcgtaagttttcaggccagcgccccggccccatgctttttctaaatctaaacagagaacccagtcactgcccagagcccgaagtctgtgtgggccatactgctgttgcatcagacgattatacgccccccccaccttttaagttactttcattttatagagctcctggggcgtgcgaaggaagtggtgcattgcaaatgtgaccatgcctaagttggtaacaggctgctgtctctggcgcttgtgtgggatggaaaaagctttgtctaccttttgtgatgtcttaggattctgaccttgtttctttctgaaggatcttacttatgcatagcactttctggtccgacttaattcccaagaacaggaagcagcacaaagtccctcttaaacttgatttgattgatactaatacatttataggtgtgtaatgcaatttttaaaaaattaaggaaatgaccgggaagtattttctgccttgttttctacatttttggtgaaagggataacttttccacttagaattcagggcttccagtgtcggacgctgaatggtatttggtttttcttttagaactgtatattaatatatctcaatctctgtagacaacatgtctatgtaaatacttcccaacatatttgatcttgtagcccataaagaataacaccttaagggatttattaggtctcttggtgtaggagttaggaaagatttcactcacttcttgtagagagaaattggttgaaatataggtttaagattttgctttactatatattgacagctttgatt

SEQ ID NO: 21674 - DNA, 1022 bp, Homo sapiens
tcctctcaatcacggagcagaaaccacctaaagggtcaaaaatcctgtaaatctcattgtcaatcgtcaaaggggacgatccatcaggaagagaacaaacaccttaaaaatagaatagtgactggaagtgctgcggtacaaggagtatcccactttagaatcttgaaggtggactttcaaggcaaaatcatgaatgagctgtgtgaccttgggcaagacaacctctctgagccacagttaatctctgaaattgagacttagatcatctttaaggtcccctgaagtttgaatcataaaatgggatggcaaaggagtctgaaggtctcccaccatagttccaagtctgtcggcccccactcctgagctcatttcagacactaagaggaaagttaagggtttgcaaaaagaagcaggggagtgggattttaaaagacccccccccccaaatttctgttttctggattcttcccccaaacattgattctaaatcttagaggaggttgagtgggaacctcttggacttgtattttcttagaaaggggagtttgctatgcatgcaagctttcccagtgattgtatcactgccagaattccttcttatgtggagctgaaagtagatagggtcacttgatagacataccctgcggtgtcatcacgtgaatcttctcaagtaatagttcatggttaaagagcaaaacatttgtcaatactgcccaggcactaactttagtttctcttttaaaaactttcagaaatctgtttagccaattcagggtgaaacattcatgctcacgatttattcccttatggttttcttccaaatataccattcttcaaatcaccagagaaacaggagagttggtaagagttatagatggggattttggattctttaatttatcaagtaattaaccacatgctctgggcacctcccaaccaccccccgccctgatacagtccatgtaatctatgctgtctgccattagacattgctcagtgcgagaagcctcagcttggattta

SEQ ID NO: 21675 - DNA, 1046 bp, Homo sapiens
ggcatgatgtctgctcactgcaagctctgcctcctgggttcacgccattctcctgcctcagcctcccgagtagctgggactacaggcgcccgccaccacacccagctaatttttgtattttttttttttagtagagacggtgtttcaccgtgttagccaggatggtctcgatctcctgacctcgtgatcctcccacctcggcctcccagagtgctgggattacaggcgtgagccacagcacccaggctgttcctttattttctttatagcatttcttgatatttgaaatattttattgtttttctttatgtgcttctcttctaccccttgtatttatatacgtaatggtgtgggctccctgtattttgtctgctacatacagtgcctggaagagagccaagcatagggtaggtgctgagttaatagtttgattctgacttaatgaatggatcagtggttttcctgacctgtcctgaactgttgacccttctcttcactacactcttacccatttttgactctgaaatgaataataccataatgctgcttaattctatttgaatttttaattatatttcatgttttcttgaatttccatattgcttagttggcttatataagcatgatttttttggtcataaaatatatttgaggaaatgatttcaagttgtttgatatattcactggacttttggtttccctgttttataagcctctgattttaattattctataataaatactggtgcaatggacttttttttctgagtgactatattctggggtttattattcacaattggtctcacaaccttctgtttttaaaatctaagtgcacacattaagtagttcctcacaaacatctctagaaacctttctgaaataaataattaagacattcaattttcacattctactatcagacaaatctctaaatctttgaatactaatatttttagctatctgagttttgtttctgattccaacttggtaaatataataagtgaccataatgtgatgttccttattccatctacattttgcat

SEQ ID NO: 21676 - DNA, 1023 bp, Homo sapiens
catatgcttgaatatacatatttatattacatatatacatgtttaatttacttatccaaaatttctcaaaaatgtcatcacttttggccaatgatgaaatgcattaggagcaaaatcatagttaactaacctccacagaagataaagcctgtgagtcaagagactgaatatttaaatgtcctggagaagttgtcttcttgccatcatcgtgacttaaggggcagaaattaaggagagcagatgcaccttttatgattaattaatgagtgtttatcttgggcccttaatatgcccagatctgtgcttgatttgtgaggaaaagaaaaagaagatatttgatcttctctttggaaagtttaccgtctagcttggatgataaaaaataacatacttaaagcatctcaggagccacttgggattcaggtaagcagtattggcagctacacagcatggtatattgtgcaggttgtttacagaagccctcggtgcagatctctttattgagctgtgtactttttatggtacccaagaattttcctgcttaggaattctactctccatcaagtaataatgtaacatggcataatatcatcctttctattatagctaacttatagtgggggaaaaagtatctctcatggataagaactaagactaaacatagatgaataagagacgtcaagaaaattaaaatatagcattcctttaatgtatttggtattatttcaattaacaaataaaaaggtgtgtttttagtaaatttgaagcattttttgttcttctggctgagagagtgtcaaccttgaatattcgtgttgtttaaagtgatgcttgtgttctggacttgtgctacatgccaaaagagaatagtgacttacttattgcagatttatgaagaaggtctataaaattttatttcgtcttacttaaaacaagagtcagggaattcatcccaccggatggtagtaacagccttttattacatcaaagttggtggtagcttacagaggaaaaattggcctt

SEQ ID NO: 21677 - DNA, 1080 bp, Homo sapiens
aattctgtccaggaaggaggaggcgccatgaggatgagtgagctaaacagaggaagcagtttatgaaatgagccttgatggatgagtaatatttttatctggccaagaagagtgttccaagagaaagatcagcatgtagaaactcaaagatgagagtacagaacatactaggggaaggacagttaatctggagtgacagcccttatctgatgtggcaaccccaattgtcaaccccttccaactcaatgtttagtcttgattaacttttaatttctcagtatgcatttgggttaaaactgatttcttattttactatggttgacaataagtaggactgcatgcctcatctgtctcaatctgaagattatttcaaaaattgaactaatttcaaaattaaacggatttaagtgctcagccaattcatttgatttgcattttggagatttctgttgagaaattataatgattcctcacagctcattatttttcacaatttgattaaaggttctgtaacttagctaactcaggtgtggaaaaacatttaggcaaacacttttaagtggttttatgacatgcgtgtggatgcgaacagtaatacaagttagaaattctttcaggtattttagtcagagtcttccctgaaccaacagaaagccagtgagggaaatcatttgacggcaacaaaaggactggggctttcatctctgctcctccatctactaggcaagaaattacagaaaatgataaactctgaaccttgttttcccatccgtgaaacagacataatagtaccatgcactctttacttcacaggacgattaaaatcacatcaggtagcacatgccatcgtttatgcaattcttaaagaccttagagatcatcttatgaggtctgtaaattttgctccgagaagttccattcagggtcccctcacagcaaaatgaaggcagggttgagacaggctcaaggacactgctgcaggatgggtggggctccccctctcacatctctactttcgtctgaggagtcctcgattacctgctttacatagtaggctccagaaaacctttcatacgaaga

SEQ ID NO: 21678 - DNA, 1035 bp, Homo sapiens
agctctcgggcagtggtcccctctacccactgaagcgatagccgggagggtattcctaagccaccactacaaccacccctcaattccggaacgcccccaatacctgcccggccgctgctgctatcgcgataattctcgggccagtctcccgtcagtccgctccacgccttccttctctgaccaatcatggaggagtcgtgggtggagttttgcttttgagcggagagcggggccttcaatctttgctatctggcgctgggaatgggcggagctgaagtgggctggggcggggctggggcggggctagatcggggagaggggcaggggcacgctccagttctcgcgagactggagaccaggaagacgcctgcagagccgggctgctggtgcagcagaggctgaggcatcaggtgcagctgcatccggatctcctgccttggagcgtactccttgtctctaagtcgggaggcaggacgtggtcaggccggggctgtggaggtgcgctgtgtcccctgaggcctagaggattcgggctgcggcccgtcggaaccagtcagggaggcgcccacactcctgacaggataagatggcggcgatggcgcctggaggtagtggcagtggtggcggcgtgaatccatttctcagtgattcggatgaggacgatgacgaggtagctgcaacagaggaacggcgggcagtacttcggctgggcgccggaagtggcctagatcctggctctgcgggctcgctgtcgccacaggatcccgtggccttaggaagcagtgcgcggccagggctccctggggaggcgtcggcggctgcagtggccctggggggcaccggggagaccccggcccgattatcaattgatgcgatcgctgctcagctgttgcgcgatcaatacttgctgaccgccctggagctgcataccgagctgttagagagtggccgggagctgcctcggctgcgcgactacttctccaatccaggcaacttcgagaggcaaagtggaaccccgccggggatgggggcgcc

SEQ ID NO: 21679 - DNA, 1030 bp, Homo sapiens
aagattggtagtatggattatctaaaacattattttgatttgtttttgtatatattttgattgatatgtgtctgatctgaaaattcagaatacttcagaacaataaatgtataataaaaagtggttttctttatttaatgatgtttaagaacaatgcaatcctattaacctttataattttagatttagtgaattatctccctaaaactgttgacttaatactgtaatatagttgtacttttaaacatactttaagaagtcttcatactgtttaatttttttcttgattataagaataatccatatttacaaaacattcaaatatgaacaggatatatagctttataagtttgatgttttcaatagaatttctattaactgaataaaattacttttaacagatattctaaggaaatctcagttttggataaattcttgtagcatcgttgtaatgttcctactaaatttacatgatgaaccaattagatcttttatatgtaatattatttgctggaatatacacacactctgtgtgtgtgtgtgtgtgtgtgtgtgtgtgtgtatacactgtatttttgccaggtgagccaggatagcttccattcagtactttgttttctagttacattgcaagataaaaattgtggtaatgacattgatgaacactgagcaggttatagtaacttagcaagagtaatgctttttctgcttgaagcattagggctctaatcaaaattagactgtaatttcttatgattagcccagttctttgcacagtagagatgtaatgtgatcaagtggagagggcaactaacatgccttttggtgatagatttcttttaccatgccttcagatttttataaggcagctaacaggaggtagtcatttatgtttgaatgtaatcatttcacctatgagcttgcagccttccaaaatcatcttccttttttttttctttttttttcgagacggagtctccctctgccaggctggagtgcagtggtgcagtcttggctcactgccatctcc

SEQ ID NO: 21680 - DNA, 1029 bp, Homo sapiens
cgtttcttattataaatctatacatatctctccctctatggggagacagagagagttgttggttttttgttttgttttgttttttgggtttttttttttatttgaggcaggttctcacactgtcactcaggctggagtacagtggcacagtcatggctcgctacagcctcaaactccagggcttaagcattaaatctacatttttataaaactcctgtgattgaaggattaatattttgacttcttatttctcaagtttgatatatattctcttgtcagcaaaagcctttttattggtatttaaataaaatttaaatgttctttagtaaactgaacttagtaatatcttagctgattaaataaagcattggaaacagggtttaatgttttgattaatatgtttacatggtgtaatttttttaatgtaaaaaaaatgtacaatgaaaattcctttattcctgtccttgagcttctgtcacatgcagtcagttttgctagcttctagagtattctttcaagtcctttgaccatttttaaatttgattgtttatcttcatgtttttgagttgtaagagtttttttatatattctgggtagtaaacccttatcatatatatgatttgcaaatattttctttcatcctgtaggttttctttttacactcttgaccatatcctttgatgggcaaatgttttccatttttatgaaatctgatttatctatttttttgttgtgttgtttgtgctctaagtatcaattttaagaaaccattgccaagtcaatcaatgttatagaagatatatatatctatatgtatatgaatatatataagagctaaagctatgaaacaattagaagaaaacatttgttatatatatttaggtcaacgattcattttgagttaatttttatatatggagtaaaacagcgtctaactttattcttttcatatggctatccagttatccagaaacatttgttcaagataaaaaaattcctcttttgaatagtcttgctacttttgtcaaa

SEQ ID NO: 21681 - DNA, 1050 bp, Homo sapiens
atttgatgctcagcctttcacttctgcaaaacaggtcattgaaatttttatagagattacattaaatctgtagatctctttgggagtattgtcatcctaacaacattaagttttccagttcatggacatggaatgtctttttgttttagatctttaatttctttcagtaatattttgtaatttttagtatacaattctttcacttctttggctaaatttattcctaggtattttgttctcttggatggtattgtaaatggaattgttcttttagttttcttttcaagaagggaaaggtttatcctggttatcaaaacaacactggtcattgtgtgttgatcttaaatcttgcaactttgctgcatttgcttattaactctaatcattttttatgggttctatgagattttctacatatatagaatcatgtcatctgcacgtagagagatagttttgcttcttctttacaatatagatggcttttattttttcctcttgcttaattgctctggctaggatttccaatacaatttggatggtaatgttttgagaaagcaatatccttgccttgtttctgatcttacaggaaagcttcaatctttcaccattgactatgatgtttgctatagaatttttataaatgccctttgtcatattaaagaagtttccttttatccctagtttgctaaatattcttatcataaaatggcattgaatttgccacatgctttttctgcatctgttgagatgataatgcgatttttcccctttcgttctactgtcatatgcctgcattatttatacattgcctgattttatgttaaaccacccttgcattcatgagatacatcccatttggccttggtttataaaccttctaatgtgcttttggatctgtcgttagtattttgttaagtatttttttgtctatattcataagggatactgttctgtggttttcttatcttgtgttttggtatttggtattggttttggtattgggctaaggctggcttgatagggtataggaactcttcagtctgtttcctt

SEQ ID NO: 21682 - DNA, 1077 bp, Homo sapiens
ctagtctatgtttcatttatctctgtaatctttattatttctttccttctgctggccttgggtttagtttgatctttctgtagttccataagatattgaattactgacttgagatcttttttaatgtaggtatttatagctataaatttccctctgagtactgcttttgctgtatctcattagttttggtatgttgttttcattttcattcatctcaatgttttctcattaattcttgatttcttccttgacctattgcttatttaagagcatgttgtttaatagccacatatttgtgaatgttccatttttcttgtgttactgattcttaatttcattctgttgtagtcagagaaatattttatatgactttgatcttttaaatttactaagaattacctatgcctaacttatggtctgtcctggagaacgttctgtgtgcatttgagaagaatatatattctgctgatgttaagtggagtgttctgtataattttattagatttagttgttttataaagtttgggttctctatttccttattgatcttctgtctagaatttctgtacagtatgaaagtagggtattgaagactccaactattattgtagaactgtcttatattccttcggagatactttgtgcatgtataaattcaaatatgtgatcttttccccatgatttaaacaaatgatactgtattctatgcactactctctactttgctgtttttatacttaacattagattttactttttatatcatgatataaagaactttctattagtgttttcaaactttgactacaccttcagtaaaaaagatgttttacatcatgtgccagtatgtacttacatatataaaattaaaagttttacaaaacataaagtaaagacaagcaataccaaacatgattttataaatattttggaaaaataaagaaaaaaatccttaagtaagcaattaaaaaagaaaaacatgctgttcatgacccattcaactgattttgtgacccactgttttaaagatagtaggataaaggtttaatcagagctgtctaataaattaactttttt

SEQ ID NO: 21683 - DNA, 1027 bp, Homo sapiens
gttgccacaacttatagaaatagttggcaaaattaatgttacttcaactgcctgtgtccatgaattctccagatttttctggcgcctttgccggacatttggcaaaatttttacaaacactaaggtaaaaacttgtattccatgttttcttatatgaaaaagacatagaaatgtaatgtgttaacactgtaacagggtaaataaaagcatgaaccattcttttatctaattcgcttctttaatatcctagaatactatgatagtaaaaaaaagttctagttggtaatattcttatctttactgattttcagaagatgatttagcctaagcttagttcatatccagacttggatataagctttactcattgtagatatcctcaaagattttcaatataggaagtgtcagctagggaactcaaccacaatcctttgaatgtgctgctggtacttactgtctatcacaggttcaggaagcagctgtttgctcagcacactttggtaaaaacctcaagcgattatggaaccacagcaacttatatataaaacttgctgcgaagatgccacctcttagaatagcatggacactggagataaattctacatgtttcagtcattaccaaaagtatcatttgtcacatttgcctatccaggttattttgtagtttcaaatattaacattggaatgtcattagatcctaatttattcattaatcctattaatccatttgtcttcataacattttgttaagccagtactttagagagctaataaaaacataaaaaggtgtagtttctataatcaaatgttaataaacacatttaaaaggtaagcattttaattattaaatttaatttagtgtagctctttactattaaatctatagttgaaacatttaaagtaaatagtatgctataaggaactggacaaaattcagaagacttgggttatggtcctattatctgttgactaatgtttatgatctttactatttaagttaaattatgtgggcttagtcttttcatgt

SEQ ID NO: 21684 - DNA, 1012 bp, Homo sapiens
taatcaaaataattaaactctcatttcttgaatgcctgtttgtcaggcacagtatttaggtatgttatttgcaaattcatagcacaacagccctttgaggtagataataatatcaccattttcagatgagaaaacttgcgtttcaagaggttatggaaaatactatgtatctaagaccacatggcttatatgtggagaactgacgtctgaacccagatctgattcccaagtgtaatactttccaataggcagccttatatctctgtacctcaaaagagaaggctatattatttaaaagattaggaattgtcctatatggttttaaaatacacttgctatagcacaataataagtggtttagtggtgactgctactcctgtgagtttggtttaaaaacagcccagtttgtaccctgttggtcatgataaaagcataccacccttactttgagaattttaaccatagagcacaatatgtgtcaaacaagctaaaaaagtattcttttcagttgcattttgatggacattgaaattgcttagactctttgaccaaaagtacaaactgctgttaaactggtgacaaaatctgttttcatggacgctaggctacttaagctttattttcctcctaagcattctctgcctttgtaaagcactctagcagcagtatttgcttagcttctaattttggttttgcttttgtgttttctctctttctcttggttgttccttccttcttcccgtggcgcactgtgtttgctctttccgtgcatcacctgtgaataccccctgtgctgaccaatcagctgttggtgaagggggtgaatgaaactctggtagctcagagggttgttcctgctctcattactctctccagtgaccctgaaatgtaagtgtcatccctgccttttatattcggcatccctttcaaaatgtgcctgtcaagaaataaccatcagctcttaaatttattgaagaatctctttaaattaataatactggattatgcttat

SEQ ID NO: 21685 - DNA, 1025 bp, Homo sapiens
tcatcaacaaaaaatactaagtcaggatttggactgcagtgtccaaaaaatcgattgaaggcatgcacactgatcaaactatagaaacacagtcatgacattttttttcactaggtaagtgtctttataattagccaactaacagaagaaagttgatattttagttagcactagggatagttccacatgttgcagtgtcaaatttacaggtgattctaggtaggaactctgaaggtgctttgacttttcgaggctgtagttgctctgaggcaaggagaccaactcttggctgctggattaaaggataggctcaacaggcaatgggtctttggtgtgtgccatgttgtcaagttaaatgggtatttgatatgttgtcatgttaaacgggtctttggtgtgtgcagtgttgttgcattaaatgggtccttgctgtgtgccgtgtcatatagttaaaacttttctagagcatgatttgacctttctatgtatattcaaaagaaagactcatgataatctgggaagaatccatctggattcttataggatctgctccaattattttgttgattcttcggaatcttttttcagtaattctgggactatagttatttttcaaattaaacatagtgtcaatatcttaatttctctttctagaattttcaagaatatctaaaaataacccttccattttatttgacagttttattgtagaatagatacctacctatcaaatttgtaggagttgttcaagaggaaaaaatgaattttcttctcataatggcccccaaataacaattaaaggttgttttgggaacagattgaggtgagaaattcccactgcttgaatagttctagtaaaccattatccttaaagcctcctgcaacttactgtgtacccacaagtatgtcttatacagtcttctttcacattttggtacaaccagatttttttaagataaaaattagcctttttttccacctttgtacttacttcccagtcaagtggcttctcttttgctttagaa

SEQ ID NO: 21686 - DNA, 1048 bp, Homo sapiens
agatgaaaatatagaagaaagaaggatactggaggaaacagagacaatgcaaggaggataaaaaaaaatacaaaaaattccccttaaaaaccaaaaagcaaaaaactagccaaacaaacagatgctataacctgtgagacaagagagtggggaagcagagaatacattcaaaaaagcgtaacctagagtttcccacatgatgcatgataaaagtttcattctctcagaataatccccaaagtccttatcataatctcaaggcactataggatctggccctctcttctagtacatctaagacttcatcttctatcctgtctcccttgctcaccctgcaccaactctgtcttctttccttaggacatggcaggtctagtcacacctcacagcctttgagcagcctcttcctagcatctgcagcatttattcctccatctccttcatgtttttacttaaacattatcatctccatgaagcctaccctgaacacttccatgtgaattgtaccgttctccactttggccttcctagtaccccttatcttactcaatgttttttctaaaacccttatcactttctaatacactacataatttacctgctttttgtgtatctgtctctcttactagaacataagctccacaagtagggaatattgtctgttttatttgctttatccccccccgtctaaaaagatacctagcccgtagtaggtagacaataaatatttttttagggacctccatgcccaaacatgggccaagaatattcagaagagccattcattttctggtgtggttgccagatattagagcagcagtttagttctctctaacctttctatcactcactcagtctccctgcaggaatcgtgttaacttttacacacccagcatatccctcattatattttaatagccatggtgctgtacctagtctcagctctagacattaaaataagggatcttgctttttgcaacctggagaaagcaaaggggcgtagaacaggacagcttttactgggaaaatatgtgtgtgaccatagtgt

SEQ ID NO: 21687 - DNA, 1050 bp, Homo sapiens
actttatttataaaaacagcaggctagatttggcctgctacctgtagccaatacttaggaactttggttgtctagcgttagtgtccatcagaatcacctggaaattgctgagtaccatccccagagtttttgattcagaagattggagtggagtctgagaatttgtattggtaacaagttcccaggtggtgctaatgctgcaggtctaggaaccacaccttgagaatcactgctttaggaaccagactctagtgaatagagaagtgggtggaagagatgagaaagctgttacaggaacccatgataagatgaagtgtggtcttggatgggaaagtaacaataagtaatgcttatgaaccagataccattctaaacatttttcatatatttgctaataattgtcatactaagcctacaaagtagatacttttactattctcattttacagatgacagagaggcaggtaagttgctcagaggccacctagctactaagtggaggaaccagaacccaggcattacggtccttgagaccgtgacttgaaccaccatgttataatgccagtgtatggcagtgaatatgagaagatggatttgagatccgtatttcagatgtgaactcaatttaacttggcagctgattaagagtgaaggagaacagaatcaaaagattcctacatttctgatctgaacatttaaacggatgatgataaaatacaacaaaatggaactataggaagaactattctgaagaggaatatttaaaatgtgaggcacaggtagagaaacactataggcagttcattgagatttaagaaccattagcagcatatgggtggtaattaaaggcttatggttggagcagtggtagataaatgatatcacttgaaaagggggctctgatggggagaaggtgaccaggcatggaattagacaccaacatttcagatgcatatggaagaacttaactgagaaatagaaggcaaaccagaatggtgttagaaatcaagtggagattttatttttgtttttgtttttgtttttttcaag

SEQ ID NO: 21688 - DNA, 1027 bp, Homo sapiens
tactcaggggctggcatgggaagatggcatgagcccaggaggatcacttgagtatgggaagattgcttgaacccaggaggtcgaggctacagtgagcagtgatcacaccactgcactctagcctaggtgacagaatgagactctgtatcagaaaagagtcccaaatcctttatcattcgttttgggttttctttgaaacagggtctcactctgtcacccaggctggagtgcagtggtgcaatcactgctcactgcagcctcaacctcctaggctcaagcgatcctcctgcctcaacctcctgaatagctgggtccacaggcacacgctaccacacttggataatttttaaagttttatagagacagggtctcaaactcctgagctcaagcagtcctcccacttctgcctccccaaatgctggggttacaggcgtgagtcactgtgctaagcttttttttttttaatcaattataatattgtttgtgacagttatagtttcttcatgatcttctccaataaactagacacatattttcatattgtacaaatcacaaaatgtatgagcctaacttttggcagcagaatttttttttcaagagctatgtgtaaaatatatttcttagaaatgaattatattttaaacactcagggcattttctgttaaaccctgtgattctctgtatctacctctgttgtgacttaggccatgtacctgactggtataacttaggacctccaagtttttaatgtgttacatgattgacaggtttcccaggtagggtgaacacacccatggggtgtgccacgtgatccagcaaggtgagcaggggatcctaaaacactgcccctttatcctcacggtctcttataacacaccatcttggtaggcgcctatgcgatgttgttctgaagcttgaaatgtgaagctctggtttgtacaaaagaaacatgcctgatattttctctgtgaatctgtaagattgaaattctatctgccgagcttatttaaaatgagaatgtctagga

SEQ ID NO: 21689 - DNA, 1050 bp, Homo sapiens
cctctgttaaaattcttcatttagaacatttgttctggaatatatttatgttgccatttaatcatgggacacatcatagacttgacataatgtttccataatgttcccacctatttttgtgtggtttaatcctccctgaaatcctgtaggtagccatacttatcccttttattttatttgtttatttatttatttatttttttaatttatttgagacggagtctcgctctgtcgcccaggctggagtgcagtggcgcgatctcagctcactgcaagctctgcctcccaggttcatgccattctcctgcctcagcctcctgagtagctgggactacaggcaccccccaccacgcccagctaattttttgtacttttagtagagacggggtttcaccatgttagccaggatggtctcgatctcctgaccttgtgatctgcccgcctcggccttccaaagtgctgggattacaggtgtgagccaccgtgcccggcctatcccctttaaagattgagaaacggagattcagagaggttgaataacttctccaaggttaacacgtgtgaagcaggactcaaaaccagctctactcttcacctttttcctaaactataaatattttattaacacagtctgatctccttaccagactgtcttaagtttcttgcctggaatgttttttaaagtatagtttatttgaaggaatcaggagcaaaatatgtctcttaattctcttaagaaacagaggttcctttctctcccttctttcctttttccattgagctcattttttgaagaaaccgtgatgttagtcctgtggagattgcacaggccacattttgttggttgcattcccttggtatcatttaatgtattattctgtcccttatatttcttttttctttcttttttttttttttttttgagatggagtcttgctctgtcacccaggctggagtgcagtggcacaatctcagctcactgcaaccactccctcccgggtttaagctattctgctgcctcagcctccccagtagctgggattacaggca

SEQ ID NO: 21690 - DNA, 1109 bp, Homo sapiens
ccacccgcctcggcctcccaaagtactgggattacaggcgtgagccactgcgcccagccaatggtcaggaatttaaaggcctagtttttgcccttccacaagcctcacggccttccaaaaataatattctttttttttttttttgagatgggggtcactctgtcacccaggctggagtgcagtggcatgatcacagatcactggagcctcagcatctctgggctcaggtgatcctcccacctcagcctcccaagtagctgtgactacaagcgtgtgccaccacacccaactaacttttttgtatttttcatagaggcagggtttcaccatgttgcccaggctggtctccaactcctgggcttaagcattcacccacttcggcctcccaaaatgccaggattacaggtgtcagccaccgcgcttagttccccaacaataatattcttggttcagtccatgaaacaaaggattctgaaatgtttagatattctacttaggcaaaagggtttgaggtccatctgaaaaaagaaaacaaaaatgaatataggtcctatagaatatttaggttatcagtatcaaagatactgtttgccatggagcaatggcatggaatgaaattctcaagatgaaagactttacacaaaccataggttttacctggattcagactcatcagaggttctcacaagaaagaagtaaacaacaatggattcatgatgatctgttgaaaaataaaatttaaaatggcagagaaataatatataccatgacataagcagataaatcagtgaggaggataaagaagagatgagaacgaattcaaaaccataaatccatcatacagtggctggagatatcctctgtgcagttttacgtgatactgaagagcaacagaaccagcaggcgatgatgtcgtagtgagaacacctcatgatggatggttttgcatttaatctcatctcttctttattctcttcatagacttatctgtttgtgtcatggtgtatattaaaactagaggaactaggtcaagaataatcatacgactaagcaactttaaattgcttattttattaaataaacatggtatgtttttaatcagaatagaa

SEQ ID NO: 21691 - DNA, 1066 bp, Homo sapiens
gaatggccttttcagtcctttccacactttattggtgtcactgattggaagagttacttgttagataaagagccctgcttgcgattacttcatgaccatagaggtgttttaaatttttatatactcagatttattgatcttttctcttctggtttcagggttttgtgtcatgcctagaaagaccttttcaaagatatgtttgaaaatgtatctgaaatatgtttcaaaaaatatgttttcttctgatacttcctttttaaaaaaatcttggattcatttgtaatttattttgatgtagggagtatggcgggaattcgtatattttcccaaatggctggcctgtggcctcaacaccattaataggatgtcaggacacttccttctcagtttgtgggttttaaattagtaggtcatcatttgtgtctcagaagtgtagcagttataaaggaggcggaagaaaggaaactgagaaataggaagtacttattagtgatacagatcttggttggtacaggacacactgcatttagtctcaaatatgctgtaggttaggaaaatgaaaatacggcctgaaatgtgcatttggggttggatgatttctgtcatgtcagaatgtgaccttgtttttctcactcatttgatttatcaaatagtttatggccactttgattttttaatatcggtataattgccatctgtggttattcattaatgagccttgactttagtttgcatgctgatttcagtccccgcctttatctcatttgtggtttaaatgtaatactcagtgttcctgtagtggatgtatacatagtatttggagttatatctgggctgttgcctgggactcaggccttgaattgaaggtgtgcctgtgcttttgaccagttggtttctaacatgactgggtgtgggttccaccactgcctttggattttaatgtcagccttaggtaatatgttcagacctggaaatctagatttgctcctgaattcagatctcagttctttcatctcttaatttcacccatgtcttcctgttgaatgtttactttcacattagaaga

SEQ ID NO: 21692 - DNA, 1049 bp, Homo sapiens
ttccaaaatcctcagtattgtatttgtcaaccatgttaagcactgttacctgaaagtctgtgtccaataagtttatcatctgaattctgctggggcctatttctcttgtctgtttcttttggtttttgatctcattatcctgttccttcatgtgcccagttacttaagtgctcatgacagcagtgctctcaagatgcaggttgtataagcctctctgtcccagctgtaagcagtgtatgatgatcaccatcgcatagtgtctaaaagcagagtgtgcagctgttactactctttttagagacaagtattaatgataaatagatgtgtagtggtttatttctcatagtatacttttttttcttagacctatcattaggcattccttgaagaaactaatatattgaagaaagggttactgtaacttctttgttgaaatgaaataggttattattgagggcagattttcacactttcataaacttttctttggtagcaatattggtacaagttgttctccattggatgggcttaccatgcaatattctgaacagaatggaattgtggattggaggaagcaaagctgtaccaccattcaacacccagagcactgtgtgacctcggctgaccaggtgtgtggggagtttgttttggagctatatagttaaagcattgctcctctataagaaaaaaattaagttctgtaagctttcagtcagacagtatatctggtaagaaatgaaggaatgtttaagttttagactttatacttatatatgatctaagctcttctgagacctgaaaatgtgtatttagattacttttattgcttgtgtaagattagtacactttaatatgacaccttcccaggcgccatgggtcacgcttctaatcccagcactttgggaagctaaggcaggaggattgcttgaggccacccatttgaccagcctcggcaacatactgaaaccctgtctgtataaaaaatttaaaaattagctgagtgtggtggtacacacctgtagtctcagctactcgggaggctgaggcag

SEQ ID NO: 21693 - DNA, 1046 bp, Homo sapiens
ccaagattctattgcattaatacaggaacaaaatagttcagtactattttgatttgagagtaaaggaatttgaacaaagtttaatattactaccaccagaaagaagaaaatggtcttacctatgtttgagtaagataccaaattttatgtcaacttcaggctgttattttcacttgcatttgacctttgtcgttttgccaaatcttacccagaaacaaaaaaagtcttaaattgggaatatatttacttggcattcttaaagaaagatcaagtttgatagcttttagattgaattcaaagcacaaactttacattgctttttaaagtgagcggattggccatttggagtggcactagagctgacgaaggtgccttgtggagagcatgcccgtgtgatagcttgtacgtagtggtttgtgatgacgtttgcttgtaagcggtgacttagttctgtctttcccattttaggcacttacagactgagatacgcacctcccctccccccttctaatgatacgttggattctgcagactgaaacgagtaaagcttgcctacttaatacactcaagtgtggggagtcatggggtgtggaggggaggaaaggaaaggtattttgtttctttgtctatacatttcctagatttctatgcagttgggatttttcatttctcttgtaccaatgtccaaaacaagaaagaatgcaatgcttttgagcctctggtctcctggttcaacaacaggcttatatgtatgatacatgtaatttaaaccttcagacaaacttaaatgttggtgcgtgcttttttttttttttttacactgaatacttgctgtgtgcaatgtttactgaatctttaaaactgtgtatttgaccttttttttacaacactggtgacagtcatatggttttgaaaaaaaaaagaaattttgcttcttcccagcttttctcactttcaccctaaacgacacttcctccccagccagcctcactctgtctccggcccgcagcaggagcagccagcagtgcattcaccccacttttgta

SEQ ID NO: 21694 - DNA, 1059 bp, Homo sapiens
tatttaggtaactgtgaaatagcaactctttgaagatgtgtgatattatgctttttatcaagcataataacagttactggattaatgaagtgttgttattctttgactttagagttggaatggttttgttgtgttaccatgacttggcctcatatactttttggtatgttaggtgaaacaaggcataaccattttgtaatgccacatgcatactgaagtaatttttttccctgttgtattttttacatttgagatttttatacatcgtaaagtgtgtttaacaataaagtgtcttgtggaggtgtaagcctagtggcctctgagtttgtgacctagaagttaataatgaaaactccataaaatactttgtttggaggttgcacatattgtatgattttggagatatcaatactttagaaaaacacaagcaaaaaacatccagaattttggcatatttttttctaactggagcttggctaaaagtaaattagccttgcttctagtttgtgaaagcattcagttgaagactgatgaaatttgaaatatttggttttggaccatttcaataatgagtgaaatctaattagaaagtgaagttagagagaatttgaattggttgtaatttttttaaagggtttttctcacattctgtttaagcaggaagagatttgtatttgttgctctctatttcttctgaatcagacatctgaggaagagcaggtggagaatgaatcttttcatatacctgcctcagttaataatgtgttagagtgtttgggctttcttttcaaataccaggcatgtttttaaatacagcaagagcttggctggtgtgttgggggtgggggttgggtcaaagtcactctcctcttcaaaaacagaactttgggaaacaattttttccttttatctcacactgtgagagaaaatgtactgctttttagagaaagtagtctgagagttgggaaacttggcatgactttgggcattcattttaacctaccctgggctttgatttcctcatttgtaagacgatggggttggagtagagcgagtcca

SEQ ID NO: 21695 - DNA, 1045 bp, Homo sapiens
tatttattgtaatatgctttttctcgagctcatcaaccaagtaatcatagtgtataccatctgttgtgaattcatgagtgatttcaactactgctgaatttttggaggattgatccttccttgggccatcctaaagcaccttactgcactggaagggaaacggggacaaaggagaggtggaggagctgattgccaaacttggttttacaggttcggcaatgcttgcattgggtaggtttgttttgatagcaagcacagcttgtagttccctgctcctaatctgtaggggtgtgtatgtgtttgggcgggagggagggtgggtaggtcgggaggcagaaaggcaggatgttcagaagccttcatgaaagctgcgggtagtaaataaccaagctgggattgtgctttctattatattctgtttcctttctgtttataaactcatttatggatatttctgagatagatttgatttttttcttatgacttcttttttcttatgacttacaggtaagagctgattctgaagaatgtattttccattcttagattatcataataactcatggattaaatctgtttataaagtgaacataaagacatggtaaattttaagttcaggtagatatgtagatataaaccagatggtatagaggacaattaataaataataaacactgttaagaaaccatgctaaacctatcatggaaatcttgttaattgtagtaagcattgtattttcattttgtgcttaggactgggctagatgccaagattttaaattatggttattgaaacaaaaacgagcattattttagtttttcttaagaacataattatggctgggcatggtggctcatgcctgtaatcccagcactttgggagactgaggcaggggatcacctgaggtcaggagttcaagaccagcctggccaacatggtgagaccccatacgtactaaaaatacaaaaactagccaggcgtggtggtgcacacctttgtaatcccagctactgtggaagctgaggcaggagaattgcttgaacct

SEQ ID NO: 21696 - DNA, 1043 bp, Homo sapiens
gctcttttgcccaggttggattgcagtggaatgatcttggctcactgcaacctccacctcctgagttcaggcgattctcagcctcccaaaatgctggaattacaggtgtgagccacagcgcccagccgatttttgtctttctttccctttcctcctcttacctttcctaccttccctcctctcccaccttccctcctctcccctccccttccttcgcttccttcttcaacagggtctccatgtgtcattcaggctggtgtgcacagtcatgggtcactgcagccttgaactcctgggctcaagcgattctcccacctcagcctcctgagtaggtggactgacaggtgtttgccactacacctggctaatttttaaaaaatgttttgtagagacggggtctcactctgttgcctaagctggttttgaactcctgggctcaagtgatcctctcgccttggccttccagagtgctgggattacaggtgtgagctactgtacctggctgattttttttcttttatttcatgaattgttttaaaggtcattttgatgttttcaaatacatcagaatttgtaaattcagattttactatttcagattttatcgtataattgtcaaagtgcctggatgatattgattctttggtattggttgagattaactttgtgatctggtataattgttccatgtctgcttgaaaagaaggtacattctaattgttgggtgttggttaggtctaatgtgttccttagatcgtgattgttaagtatttcattcatcttctatagttttactactcaactattcacagtactatatacatgaagtccttcttccataattgtgaattcatgaaattccccctttaattcaatgtattttgaggctatgttgataaatagcaggcaaattcaggatagggttttttttgttttttttttttttgagatgagggtatcgctctgtcatccaggctggagtgcagtggcacaatcactgctcactgcagcctcagcctcctgggctcaagtgatcctcccac

SEQ ID NO: 21697 - DNA, 1027 bp, Homo sapiens
tagggggcattggaatggtaatgtgctccaaaggaatttattccttacagtgaatgtattttaaaggatttaaaaagatttttatttttaaattttgtgttttcttttttagagacaaggtcttgctctgttgcccaggctggagtgcagtggcatgaacatgcctccctgcagccttaaacacttgggctcaggcagtcttctcgctttagcctcctgagtagctgggaccacaggcatgagcactgtgcctgtccaggccccccgcgcccccacccagtaaagaatagctcttaaggttgtgttagtagtaagttgggagttgacacagagaagcagggtgttcaagcaaacatctaaacattttaaaatctaaacaggaagataaagaggctaaggaatgcttttctcttctgcatggtctttaaaagtaagtattatttaggtttggtttagagtatgcgaccttttacaacagacgctgaattgttgttatatctccagtcttttcaaatagatatgcagataaagaggggaactagaatgattttgttttgtttcgagaggccagtgtggtagaaaatagataaagatgagtgtagatggattcttgagaatagcatggcaccaattttgaattgccaggatgttctcttggttaatagtagttctgtaacccaagggaagcttgatcttgttgcgttttgtttgctttgaatgaatacattatcaggggatggtcaaggttagattccactcttgttacatgttcaatatctttttcaaaacttttgggatcatttcaagtgtctgctctcttactgtctcagtagatccttattgaagctgaccatgcagttaaaaacaacaacaaaaaatcaaacagcttgtcaaatccctgaaaaatcttcagtagacaataagtgtgaataactggatgaaaactaaataaaagtggagagtgtagttgtgtgttgtgccatattactactgtgacatacatttaaaaattataaacaaagaaaaa

SEQ ID NO: 21698 - DNA, 1034 bp, Homo sapiens
gaacccttgactagatgcataggaaaccaggtaatagaataaggatgaagaactgaatatcagtagtttgcattgagagaaatagtgcagagctttttctgttttgttttttagtgaggtgggcatgaggatatgctgcacattttattatggttaaggatgttttcttaggtaaagttctcttttttaatatgggaagctgatgacaaaaaatgtttttagttcacagtattctatatgatttatcattttaatgtgctcttttctgatttaatcaactgagtttatataagtcacttaagaagacttttacaatatggtttatatatagagtttgattagaggaaaataactgaaggcttgtttttataatagtaatataataactatcatttgttgcacccagcaatgtcccataagttgcacaggcactttgcatgcattgctggcatctggtcctgttccctagcagatgtttctgttcactgccttcctaaaaatttaatcaggtcactgtagatgtgtgtagctgcattcaggtgctctactaaatagtgggactttagaaattcattagttactaaacattgagacaggagcatgccctgtccatgctgcccactctaggatgggcttcacccttccttttcaggatataacatgttactattgttgatgtaccttccaacaaattaggctaataaaagtataatttccctaagattatgactttttaaagtttgcagtttatttctctgcaagttcaattaatgaaattgactgttttgtaagatttcttactatgggccaaagaaagagaaaccatagtaatttttgatcctgtgagattgaggctattgcttttccttgaagtcagcccttttggagttgggttggttattttcttgagctgtcacctattcctgattgtcaataaaggctgtgtggtgaaagcattttgttacacccatgtaactagcccttcagcttgtagttcccaccctgcttgtcttaaacacttcagctgttcttct

SEQ ID NO: 21699 - DNA, 1064 bp, Homo sapiens
cttgtagctactttaaaaaattacataaatatgacagagggtgatttagtactatgtggtgggatccgtatcaagggtttgcatgcctataatggtatggagtgtatcagatggccctgtcattcagtgagaagactgctgcagaaaaaacacaggtaaaaataattgtcttgcaacctcaaaaagtttgggaaaatgtttaaaaaatgtaatcatttccatagcttaaaaaaatctccactcacctgttaaatgaaaactcttttcagccttaggtcagtgtgtacttttggagattctgttgtgtttgcagctaaaatgtttctgaatttattcacaaagatatttctttggaaatgcaacagacagaggatgcatagagagatgggaagagttagctatattgagtatgttctcatttgtgtctttggcttaagtaatatttgtcaaaatctcttgaacatactaaatatttgtcttaatttcaagatcttgcttgaaatgtaaccacactgatatgcttactttcccttggctatgctttgatggctaaaattaaggactaataacgaaatgactaattctacccacccaaattaatcttgttcagaattagtgatatcttcaagtttctgtaactggtggttgactgactcagttaagagcgggttttgcctgagcattaaaatcatcttaccatttatgtatcatttcatcattagctatattgttcctcccctcccccaacccaatcttctcttttgcagccttgctctttctttgggaaatagaaaactaaaaccctgggaatgaaatatatagttagtgactaatttcatcttggcttaaatggatatgattcatctagtttttataatcttccggctgttctcagacctgtgtctctttgccccttgggttccatacttgtctttgtatttctgtttctattagaaatgatagtagtgcccccagaatactggaggttgaaaactggcagttctaagggatggatactagtggtctacagatttatattgtttgatcagtggtgtgtttaattt

SEQ ID NO: 21700 - DNA, 1816 bp, Homo sapiens
ctgcattttggggaataactttctttcttctggtttcgtgtttgcatgcttgtatgggatgggcattcactgggataatactcctggcctctctagtaactccctcactttagtcttccctaggggaggagaagtgacttatcttcgagtttggaaaaaggaactgggcctgtctagtttcagctcattcctttcctacagatcttgcattctgctgtgcttgttcacgctgtgagttttataggggcagtcctcctcagggaggcctctgcctggtgagctgcacctgtgactaggtagagaaactggcctaattctggggtgaaatattagccaagaccactcaactaatagagctaagctaccttttccaacctacgctttattagtaataaagctattatctgtgtatatcactctatataatatatcagctgtatattatatatcagataaatatatatttttctttctggctttcctgtcttactggttttgaacttgggctggaaaaataagggtgttaaatattgaatctcttttacttcaacaccaaagacttcatctctaaaatcgagttaccaatcactaactcttaagagttatgtgagggtaacaaatttaaaatgagaagtttttgaaagataaactgtctacagatgtatagatttataaatgttcttgggggtggaaagtagaaacaagctgggacctgttattttataattaactgccatccacagattaaattctagctcctgccagccactctcctgccagatccttggattacaagaaatggtggagggggtggcagtgagtggatacagcaaatgaaaaatatctcgctttgagcatttaactcggtatcaggccctaaatcatagtattatgatatctcagtatatggaaaggagacaatatcagatcaggaaaattaattttccaacaggaatggggaaggttaaaatacataatttcaaaggagaccactaaaaccgagattccttcagcttttcaaaagtgccacaatgttatttggccttctctcagttaatgaacagtgggaaatgtgcttacattggcttaagagagccaaaaccgcaattcctgcaaccacttgagaaagtcctagaatttgggagaataaacccattactgtataaaactagagagaaaatcatttgcagttttctgttggatttgatccattcttccgtacatgaaaagttacggcccatatatggcaaaacccaattcagtttttgagcgctttaaatgaaatgattgaacagtttggagcatgacttgcctgtggcataggcgtgaaatcttaggtaatgactcataagaattactgttgccacagagttttagaatgcaagaattgatctgtctctgaaaatatttatatttgattgcatttctaaataggtaagtgggtaacagctgtttgaatctggtggcatgtgtgtttggaggcatgggggagaatatagactgtactgcttttgtgttagagaaattgtgctgttttattttttcctatctggttaaatagagtacaatagcagaaaaccaatcagttcagggagtggcccatttcagtgtggccctcttcatccacaaagtggtttggaatgaaaaatgctaagatgcagtatttggctggcacttagataactaagaaaagagaattgacttaactgtagcaaagagagttgacgtgaggctcaagtcatcttagggctcctaggagaggatgagaatccattagcacctctatatctggggagaggggtgttgccaagaaggc

SEQ ID NO: 21701 - DNA, 1046 bp, Homo sapiens
aggttctttcatctctttgtattcttatgtctgtttttctgttgtgcaaagggaaccagttctaccaggccctttcatcttgttgttagcaaataagaggtgtgtttaaaaaaaaataataaaacagaaaacccagcttaacgtgcaatggaagtggcttgcctccattcccatcgctgagttcttaatgttgtggcagggaagcccataaagctaaattaaacaaagccacatcaaggctttgtgtcaaggcaataaaccaggcagggagaaccacactgatgtcagatgagcacacagggggtggggaagcaagatgagctgaaaatatttcaggagtctgaactatgccgggtgatttctttccttaagcattagtgaatatatgtaagattttgttgttttccacagaaacaaacaatggcagagagcattttcatataagtaggtgacatttttgtcttaaaagaatcgttgcttgaaaaaaatctcagatggctatatgtgtgtttatgtgtgtatgtgttgtgtgtagctgtattgatcaaatgacagatttagttgttaaaaacaatgcctttgtttttgaagagtcacatggacaaataacgtttcagattttgtaaaacatctgaattgttcccagaattttctgggcttttttaaaaatattgtttgcagaggtgaaataccttgttctctgcctcaatggtgtaggtgcagtagggggtggggactgactccctccattcttcatcagtgtcttctcacacagcacaaaccttctgcaccctgatgcctagtctccaggtaccatactttttatcttcaagttcctgctctgtctggcttttgtttctttatgctgcaaatccctgatgctgtttggaatgcacctttttagttctatagggctgggaagttctgagtgatgaaggcaagtagttcaaggccgcacccgagaccaatttaatatatacatatatatgcatattcatctacatgagtataaggaaagtaaacatataaacctttgatgcttttca

SEQ ID NO: 21702 - DNA, 1035 bp, Homo sapiens
tgtaatcccagcactttgggaggctgaggtgggtggatcacctgaggttgggagttcgagaccagcctggccaacatggtgtaaccctgtctctactaaaaatacaaaaattagctgggcatggtggtgcatgcctgtagtcccagcaacttgggaggctgaggtgggagaatcacttgaacccaggaggcagaggttgcagtgagctgagatcataccactgcactccagcctgggcaacagagcgagactccgtctcagaaaagaaaacaaaaaacaaaacctgtataaagcttatcgagtgaatgtagattgcaggggggtgcttgtcatgatcaacaagtcacctagatatttgcatagaaaatccattctggaaaattgaataatggttctggttctttccaagtctaatgaatcaatcttcaaagctaggttttaccacctgctgctgtttcgccttcatatcatcttgcctgcctgtttgaaccatttcattctaactgccagatttacctgttgatggaacttgatctacttatagtttagcgctggccattcctgacactggtccttgtccagacagtcagcctgctccttagctcttccatagtaacaaccataacctggatttattgaacatagaacttaatatacattataacattaatttagttaacagttattgagtgcttgctatgtattaggcactataccaaatactacacataaatgatttaagtgctagttttatctgtttctacggaggaataaactgatgattgaatttgtaacttgcccaaattcacacactagggagaggtggagccaggactcaaacacaggcctgtctgactctagagtctattctcttaactcctgtgccatgatggtaattccctgctctacctcctgtggtttggactagttgaatgtttctcaaactggggtctgtcagcctgccagttgggtcttaatttcctttatgttcaatcctatatcaaactgaaattatacaagtttggtttcccaata

SEQ ID NO: 21703 - DNA, 1056 bp, Homo sapiens
gtggctgatgtctgtaatcccagcacttgagaggctgaggcgggttgatcacgaggtcaggagttcaagaccagactggccaagatggtgaaaccctgtctttactaaaaatacaaaaattggtggcgcagtggcaggcgcctgtaatcccagttacttgggaggctgaggcaggagaatcgcttgaacctgggaggcagaggttgcagtgagctgagatcgtgccactgcactgcagcctgggcaacagagcgagactccatctaaaaataaataaataaataaataaataaataaataaataaataaataaataaataaaaataaattactggattttgatgcaacattttgttcaagataaatctttgtgaccatggttacctgtaagtttcctttctgttactgttctcatgtgggtcttggttatactatcctcatagaatgggttggggtgttttccttcatttttttgtttgctggatgagtttgcatgagtttggattgatctattttttgaaactttggtaaaagttacctgtaaagctatatgggcctgattttttttgagacattaaaaaaaaaaaaaacttctatattttaaatggctatataggggccaggcgtggctcatgcctataatcccagcactttgggaggccaaggctgtaatcccatctactcaagaggttgagataggagaatcgcttgcaatcggaaggcggagtttgcagtgagctaagattgcaccactgcactccagcctgggcaaggagtgaaattccgtctcaaaaacaaagttataggactattcaatttttgttttgttttgttaacactggattttactccattgtacaggttggagtgcagtggtatagttactccacactatagccttgacctccccaggcttgggcgatttccccactttagacttctgagtagctataggactacaaggtgtgcgctgccacacccagctaacttttgtttttctgttttttgtagagataaggttttgccatgttgcacaggttgatctccaactcctgg

SEQ ID NO: 21704 - DNA, 1177 bp, Homo sapiens
gtgaatcttttaatatctggctggattctcatatctctttctgtattccatcaggtatgctattacaaaagcaggtactgtctggaagtctccactgaaatatgagagtgacagttaggtgtgcggaagaaagtggcacaaagcaagtaacatcttagtattgttataaaaatagtttgaacagccaggtgcggtggctcacgcctgtaatcccagcactttgagaggctgaggcgggcggatcacgaggccaggagatcgagaccatcctggccaacatggtgaaaccccgtctctaataaaaatacaaaaaattagccaggcatggtggcgggtgcctgtagtcccaactacttgggaggctgaggcaggagaacagcgtgaacccaggaggcggagcttgcagtgagccgagatcgcaccactgcactccagcctgggcgacagagcaagactccatctcaaaaaaaaaaaaaaaaaagtttgaccatgtggatcttctgaaagggtctcgggtacctcctctggggtcccccaagcatgcttttagaatcactggactaggaataagaggctctgtaattctagcttgtgttttgcagtgattataaataatcagaatagtggataggcttttttttttttttgaggcagagtctcgctctatcgcccaggctggagtgcagaggcgtgatctcggttcaccacaacctctgtctcccgggttcaagcaattcttgtgcctcagcctccagcatagctgggactacaggtgcccaccaacatggctggctaattttttttgtatttttagtagagacaaagtttcatcatgttggccaggctggtcttgaactcctgacctcaggtgatctgcccacctcggcctcccaaagtgctgggattacaggtatgagccactgcacctggctgaggataagcattctttaagaaggcctaacggccctaatataaaacagtttaaaaacgattatccagatttaggaataattcttccctaagtgattttttttaaatttaaaatacaattaagtctattatactcagccatccaagtaaacaggtattatttaaaaatcaaggtaacactcaacctgtcaaataggtacatggtcagctttccatttagaatcaacttttatttaactatttagaa

SEQ ID NO: 21705 - DNA, 1043 bp, Homo sapiens
cactgtgctggatgcataggacattgagaaatgactaaacataggaattatcctcaagaagcttacaatcgaatgaagagtttaaactaactgcacaataaactatagtgaaaggtaggtttaagaaggtagaatagacggaaaattacacggttggtctagtataatttaggctcatggtataatgagcaacattttgttgttggatgatacaaagctgtgtgtttggcaaatagctgcaggcattggtgagactttgcttcagttgcccttccattcagtttgctacttaatacaaatcttaaaaatatggaaattccttttttatatttttttgtgataataaattatggttacagttctgtgtttcgttatataactgaggaaagggctttatatgtttcagtggttcgtgttctgaagtagaacttgcactaccaagtgtcaagagaaatatcagagaagcatgtgttgttggacacagagcagaagaccatattttgactcatgagagttttcctttgctctgaattttgcctgctaaagccagtctcatagttttaattacgtgatactgtctgttaagtattacagggccagacacagtggctgacacctataatcccagaactttgggaggccaacacgggaggattgcttgagcctaggagtttgagaccagcctgggcaacatggcaagaccctgtcactacaaattgaaaaaaaaaaaaaaaaaaaaaaagtcaggtgtggtggcacacacctctggacttggaaggctgaggtgggaggatcccttgagcctaggagttcgaggctgccgtgagctctgatcacgccacctacactccagcctgggttacagagtgtgaccgtgtctcaaaaaatgaaaaaaaggtattacaactttagaatagtatatattaatctgctatacctggtagcaggaagctatttggtaaccaaataacaaacaggggaatctatgttacattagacaacttttagttatcttcatcttcctctaaatacttgaggaagat

SEQ ID NO: 21706 - DNA, 1511 bp, Homo sapiens
agctaaaaatagaaatatcattccacccagcaatcacactactgaatatgtacccaaaggaaaagaaatcatttatcaaaaagacaccttccctgcactcatatgtttattgcaacactattcacaatagcaaagtcatggaatcaacctatgtacccgtcggtggtgaattggataaagaaaatatggtacatatataccatggaatactacacagccataaaaaagaacaaaattatgtcctttgcagcaacatggatgcagctggagactgttatcctcagtgaattaatacagaaacagaaaaatactgcacattatttcttaatacatgggggctaaacagtgtatacacatggccataaagccggaaacaagagacactgaggactctgaaagagataagggatatacggtttgaaaaactacctattgggtactatttggtggtacccaaatatttgggtgatgcctaaatgccagcattacacaatttacccgtttaacaaacctgcacatataccttctgaatctaaaataaaatatacatgtacttgaacttaacttacccccaaaatggaaacaacccaaatgttcctcagctcatgtgtggataaacaaggtgtagccatatgtgaattatgaattatatctcaataaagctgttaataaaaaaataaggaaaatagtacctcaggtatggagggatacttctttaacattatatacacacacacttagtcctaaagccaatttcttaatggggaaaccccattggtatttctactaagatcagtaacaggacaagaaagcccgttattttcactcttattcaatattatattagatatattagccaggtaattagacaagaaaagatcaattagaggcatgagcgttgggtaaagaagagagaaactatctctattgcagttaacatgatagtatacttggaaaaccctagagaatcactgataaatgaattcagacaacaaagtatttcaacaaagtagcagggatataaagttaatatgcagaaatcaaaagcctttgtatacacaaacatagccattggaagacatattatattggtagtgaaaatcccatttaaaatagcatcaaaggaggttacttaagaataaataagaaatgtgcaaaaactgtatgaataaaacgttaaaacacttctgaaatttgcaaatttgaacaaatgaaacaatattccttgttcttagataggacgacttaatattattaagatatcagttttttgtagattactttgcaaatttaacacaatcatcatgtaaataccaaaatgcttttatgatcaagttagacaaattgatgctactgttcatatggttaaaagaatcatataagaatagccgggaaaacactgaaaaagtaaaactattaatacaagggagagacaaaccttaccagacagctaaacatgtatgttttagttctttctgctgagaagaaggcctagaaatagtgacacgcca

SEQ ID NO: 21707 - DNA, 1043 bp, Homo sapiens
cgtattcaagtgattctcatgtgtcagccaccttgaatagctgggattacaggcttgcgccaccacctggccaatttttgtatttttagtagagatggggtttcaccatgttggccaggctggtctcaaacccctgacctcaagtgatccaccctactcggcctcccaaagtgctgggattataagcgtgagcctctgtactcagccttctttgttttttgttttgttttaagaaattcctttaaagttcattttaatgtttgagctatagttctcatggcacggagattttgtgagcaataagaaaatctattaggattttttagttaatgcttaattttaaacgtggagataaaattaagtgaaaaatataggaagaataaagaacatggattttctgttattcaaagaaaattaaaaaattttttttgcatttagcaaaatctattttaaatgtttatggcaaagtaacagataagcctccttttccacatttgtctagtgtattataatgaatggtcagactgatttgcatgcaaagagtaggagtatagaattccctgaagagcttctctagaccatctctttcttgtttgcacttgttcttttttcagtgtgtggacctgagctgtaatgagctaagtgaagtcacattaccagaaaacctgcctcccaaactgcaggagctagacctgactggaaacccgcgccttgtccttgatcacaaaaccctggaactactgaagtaagtattctgtaaagcactgtatccccatcattgtccactggcaatgggattcatatcttagtgaaaatgggaaacaaaatatgaagcatcattgacttgttagctgtgttaacacacacaacaggatatacaagatgcagggaagcaatgaacaaccaagatgtaacttaaatctcagtagtcactgataacgtggttgtgacagttaatgcaaatattaaggaaggattttaaaagagatggatgatgtagggaaaattaacagtgtagcgctgaaatccaggttatttaaata

SEQ ID NO: 21708 - DNA, 1051 bp, Homo sapiens
aaaagagaaacttaagtcttgaacatcatatgtttattttacacttagagcatatctcaatgaagaatagccatattccaagtgctcaatagccacatgcagctagtggcaactatggtagacaacgaaaatttaaacgactattttatggctaattagaaatgatgattgttcataagagaccatatagatgatggtgtttttggtaaagacttacttatccctcaagtcacatttcaaatgtcatctcttatgttggactttctctgagaatcctgggcagaaataatccctttcccatacatattttcctagcatattttatattgctttatatttaattcattctataatatttaactctttattttttattcaaattgttgggcttgttgatggcaagtccagcaagtctacatatttctagtcacatttccttgcctataacttattaatccatttatcaaatatttattgagcacatacttactatcatgtattattctttgtgcttagggtaaatctgtagaaagcaaagtcactgcccttcatatggcttacagttttagcaatcagtactcattaaaaatattattgaattaaatggaatttaggctttaaacctgtggtagtagccactaaacaatggattaaacttaagaaagtgatatttaacagatacaaacataaatttatccaatttggttttaaaaaactttctttacagagttttaggctaggaaaaaacctagtgggatgtaatttacattactgagtgattttaaaaggataccagattcaacattttaaatatgttaaaaaaaattagtggagttactttctctttaatataagtagccttagaaagccaaatacctcatgttctcatttataggtgggagctaaacaatgcgtacacatggatatagcatggtggaataatagacgttggaaactacaaaaggtgggagagttgacggggagtaagggttgaaaaactacctgttgagtacagtgttcactgtttgggtaatgtacaccaaaagtccag

SEQ ID NO: 21709 - DNA, 1017 bp, Homo sapiens
ttacactacaatacctaatgcatataataaattgttaacatatttttgttaaacagatatgtaaattcctgaacaaccagaacaatctaagtgtcacacatggctaaatttcagctagacctaaatcttttcttctatttccactcagaagtagaggtcatatgacacaaaagagaaatgataaaacctcttaaaatatataatcttctgcttacttaggcagagtattcttcttaatacagtgattagcaccagagtctatgaagaacagttaattcttgttctatgtaaacattaaattctattttttatatgcgcttacatggttagaaattaatattttctgagatcattcaaatgttaaaattatctaaccttccaaaataccatgtttttctttgccttggacaagattgggaaataaagcaaactgcataacacattaatatccttgatgtgtattgtaccttagggctggtatacccacaggcactgtagagttttactttgattgaagacctgagaatcagaagtcaagtttatcagtagcatgaaatacatttacaatagaatataagaaataattgatatatactatatatagcaatatatttatgacaaaatttattataattaaagaatttataattttgaaatgttttgtctacttagacattgatttaaattaagagaccgcctaattattatataactcttaccctctttatacccttactgactctcatactcattcatttcttacacccttttgttctcaactggacatttctcctccttaattatgctgttcaacatgtgtaacaggtgtcttatttctacctgcctccatctgtgcatcccatcactattttctctcaacgtccctcttcattccatgctttacttaatttgatttctcactaagaagtcctactgggttctactttctttctactacaattgctttcattttggggaaactatgtgaaaaatttcagaaactaaagttgtatatga

SEQ ID NO: 21710 - DNA, 1049 bp, Homo sapiens
gttttttatttttgaattatactcatcccagtgggtttggtttctcattgtgattttcctttgcattttcccaatgactaataatgttgaagatattttcatgtgttattggccatttgtatatcttcttggcagttatgtgtactcaaactctttgactaattttaaattgagttgtatttttgttggagaattgtaagaattctttatatattctggatactctactcatatgtatgaaatgcaaacattttgtcccattgtttatgtcatattttcactttcttttgatacacgcagttttacattttgacgaattctattttttttttttttttgtcatttatgcttctggtttcatatctaaaaacccattgttaaacccaagattctcccctatgtttatttctgatacttttatacttttacctgtcatatttacaccattaatctattttgagttaatttttgtatatgtaagaaagaggtccacattcatcattttccatgtgaatatccagttgtgactgcaacattttttgaagagactatttttttctgccactggattgtcttggcatactcatcaaaaatcaattatccatataggtatggtttatttctcaactattttggtgtcaattctattattttggtgtgaatgtttatctttatgccagtgctatactgttttgattgctgtaagttttgaaattaggaagtgcgagtatttcaactttgctctttttcaatttcattttggatattcaaagcctcctgaaattccatatgaatttgagaatcagcttttccatttttgcaaataaaaaaaaaacgccattggaattttcagggacttcactgaatctttagattgcttttcagagtattaacagtttaatgttacgtattcttatctgtgcatatatctttccatatatttgtgtctttttatttcagcaatgtattgtagttttcagctgataagtctttaacctccttggttgaatttattcctatgtatttcgttctttcaggtgtacttaaaa

SEQ ID NO: 21711 - DNA, 1076 bp, Homo sapiens
aacatgactattcacagacacattgtatgcagacaaaatagtgtcttctacagacattttacatttcttactcaaactcaggtgagagattggtgttgatatgtgtgggttctgaaggagtgtctcaggatagggtggtgtgtgtgtgtgtgtgtgtgtgtgtgtattcaggtacacactcaagtaatcaaattatcttggagtgcccacagtttaagaggcagtgtacactggtgtttgtgtgtgtattacagagtcatattgtgttaagcctgaattagttataataaagaacccctgcatcattgctactgagagtacatcgggccagtcattgtcactttgcaccaacttcgctgtaggggaagcagggaaatgtggagggacagattgcgagttttgaagagcactaactttatgagctgagcacctattgagaattttgctttttcatatttttgttttaacatcttattgtggattcacctacctcttgccctttctcccttcttgattaaaaccttaagacacctccattcctggcttaaggataattgatctcctttctgtaaacactgtgagttttcctttcctctctcaacagctttcctcggagtatttgttcatgagagatatttatgaaaattcacccttttatagaagctcaatgattaaaataaatagaaatagctggacacggtggctcacgcctgtaatcctagcattttgggaggctgaggcaacatggtgaaaccccatctctactaaaaattacagaaagtcagcggggtctggtgatgtgtgcctatagtcccagctactcaggaggctgaggtgcgagaattgcttgaactcggaaggtggaagttgctgtgagctgagatcatgcctctgcactctagcctgggtgacaaagcgaaactctgtctcaaaataactaactaaataaaataaaataaaataaaataaaataaaataaatagaaatgtgcatatgtgcatttgtatattttgtcctttagaccattttacaatttctttcatctccaagtctgtaaaaactagtttgtaaagaga

SEQ ID NO: 21712 - DNA, 1013 bp, Homo sapiens
tttagagaaagtgaccatcaagctgacaagtcgtgaattaagaagtgtttgttaaaaagttctatgcataagacacaacatatccaggtaacaatatgtgtctagatgagatgagtgtggagtaatgagaaaagatccagaataagggtgcttgtagtgttctaagaagctgggaagttactgatgtgttttacaagaggggttaaatgttcattgtcaaattaacaaaattcctgagcctggggtgtagaatagattgtagtgaaataggactgttggcaaggagccaataagaagtgagtttcagtatctaggaaaggtactgtatgcttccacaggctagccaggatggagaaccattgccacagaagtattttgtttttctagctcttgggaaaaatgagtctttcacctactattgtttgcattgagaatccatctggcagtcttatttttgccatttgaaaatgattagtctcttttcttctgtctgcttttaacatgttctttatctttggttttcaggagttttgttatgacatgtagaaatatagttttcattccattcatctttcttgatgtttatagggcttcttgattctatggcttgatatcactcatcagttttgaaacattctccaccactacctcctcaagtatcagttctgtccattctttctctttgtccttactcgtatgtaaggaagcagatatttggcaagtaattactaccttatctcaaagtgtctttacgcttttactctttcatctctttgcctctcagatcttcaagataaatatttttcttgcatttctttcagtttgctaattttctattcaactgcaaataacctactgttaaaactattcattgctatcaatttcgatgattttattttcatgtctagaattatcatttggttcatttaaaaattatacaaataaagtatcagttttatctttggtagttttcgatgccttcgaatatatatactttttgtatgtgtgcagca

SEQ ID NO: 21713 - DNA, 1030 bp, Homo sapiens
ccacctctaatgcagtgtctgtaatttgtgatgatttttgcattctcacagttgtaatttctaagcctagtataacaagttaaacctgttaaaaagagagaaactattgttttcatttagatgcacagtataagattcattgctcttatctctggaatttttccaaagataaattggttaaactattcattatcattatgaaacattattattgattatgaaatgctgataaattagccgtttttatctaatgaaatttcctttttatgaaagtgaaccataaaaacaatctcagtgcataaagggttatgcagctgcttctgaaataaatttctaagtgggcattttacatcattgatcttcaaaactcttaattatcaaaaagcttttaatctgtagagggacaattataactattagatctacctgtgttggaaggtctaggatttgactgattacgaaggagaagaaaaagccatcatttccaaaaagtcttaggttgtctacatcaaaactgtcatctttttaacatccaattttagaatatttattatgcctgtatcttcagtctaagcattcagaaagggactgtagttaatgacaaggaaagtaggtcatttttggcttattcagatttaaggtacaggttatttctttttactttcgcttttttattattttttgagagcaagggactattctcttcaaaatataaaaaagtctttcatcataaaaatgagttgctctttattaaaatagcaatcacaaaacgtagaaaacgataaagaagttagttggacttacccaaaatctcccccgcttcctcattaggattagtatcattattcattctttgaatgaatctacctagatgtttttctttccctaattggaatacatacataattttattttgcaaaaatagcagagagtatatgcaatgctttataggaatttttttcccgcttgaaaatagattactggccgggcacggtggctcatgcctataatcccagcactttggaaggcc

SEQ ID NO: 21714 - DNA, 1038 bp, Homo sapiens
tttataaccaatttatctcattagtcgttttaatacttaaattgttccaaatgtagccagtgagagcttatttaagctgacttctgggcccttttgccatttcattgttagtttttaagcacttctgtactttctggcacaatatataagggatataagggagaggagaaaattcctcattactaaggaatgacaagtgaaaatgcaaaatgattgatgtaaatagaaagacatatttttcacaattactaaagcagtcactgaaccactcaaacatcatcaatcgttgggtgaaaaacagaaaacaggatattcacaacttaagtaataaaacttatcaccaatgataggtcaggtgtaattattgtacattgacatgatgcaataacaaggagatatatatgttaatacatcaatcatatatcaataaaatatacatatattgaggtatattaatatcaatgttttatgcaggtgtagctaaataatatcagtcagtttatgctttatgtaaaactgttagatgaactcaatcaatgtatttgtacatgaatatattaatgtttccgtatctatataacatcccaaaatagtaattaaatattaagtcatgcatacccttcatgaacactgaagaaattgtaacaaattgttgatatctggcaaactcattggtatggtaaatttatataatcagttatgtgtttttattattttgcaactaaaccactgaatatactacttttctactcataaagacgtgttaaaatagtggcttcttgccttataattgtattgccctctttcattcttcataagcatcatttaaaagcctacctctgcctttcctgcagtctcatcttgacttcgatcatgcccactttttaactgtcagagcagcaacactttctgcttcatacttggtcttttgaacctgtcttgtttctgtgtgtgtgtgcacgtgcaaaataatatggtactatgtttgaggaaagcacagaaaagccttaaactgagttacatttcccgaagtgcctt

SEQ ID NO: 21715 - DNA, 1032 bp, Homo sapiens
atgtgattcccatacctagccctcaatataaaagggatgtcgagccagttaatacatgagatgaaatgtagaagcatgttttgcagggttctgggattacaggaatacaacgttttcctcagcttttactttgctgcagatgtgctttcggtaatatggtcatcataatacacttttataggattaattctgagctctttgaaaggaaccaattcattaatacaagttaatattatgtaacttaaaatattcttctccaagtaatcattaactttggcaaattttcacacacaaaaagaaatactccttatcacctgtggtatcagttggaatggaattataatttcttaccatgagcagaaaaaaggtatttaacactcttaagttgagatataaaaataattgagcaaattgcttagaattttataaagggctttgaatgaaggatgccactaatatgattaaacatttcttttgcatctgtttagtctcttgtgagtgtgtggtagggacctgattttaacttaattatcagaagcattaatagatttagacacaaatcaagagggaaaaagtcaatttcaaaacttattagtaaattggcacactcaaaactcatttatttctccagcttctaaactaatgaggtgttacagtctatttgttggcatattaataaaactgaatgcctttttattaatcaaatatgcactacttgaaatggtaaaataaatacaagttagtagtagtgataattcaaaataagtttaactttaagatgaatgataaattttagtttttaaaaaatattttatggactctatcattttaaatatccttattggtatataatttaaaagattaaagctaataaatgatacatgtgggaaacttcctttttatttcccaaatgtcatctaacttttgagatgaaaagtttaccactcattttgatatgataaaatgagtgtcaaagatatgaatcttgactataatattgacaagaaccaaacagatttttatttgctagtt

SEQ ID NO: 21716 - DNA, 1033 bp, Homo sapiens
tagtttgagtaaaaagaagtggaagttagtctgaaaaggcagaatggagatggtgtggatggccttgtgtgtgggatttaggcagttagaatttacctgctagacaactggatgctctcaaaggtgccatgaaattacaaaagcattagtatgattatttttattgtggtttatagaacagtttggagaagaagagaaggattaaataggaaaccaacttagcaaacttaacaataatttagtattatgccaaactttaagctacttcgcttttctgcctgaccgacccattttgtaagcaggaataatgatattgcctgccttgatggatttgggtgtggcttaaactatgttaatgtttgtaagtcactttacaatggtgggaaacagaagaaattaagatgttagttattattactgaaagtcaagattgttgctgctaccctatgaaagtgatgaccaaaatgttgacccaagagaaaaagataagttaagccataaaattaaaataatattaaaacaaatctagaacccctccaagtccagttacgtagcgctacacgaaaagctggtacattttacacagcagctaacattaaatttaggagaacaataaaaatgaaaatataaagtaggaaagaaacaccatgtactttttgcagtttcagagattgatttttttttctgagtaaaaacgcttgcttaagacgtttcatttcaagggagctttgtacatttgaaatcagtcattcttgaagttatttcttccatgggctttcgagcctctgaagctttcatgactcgttcatgcaatgaggtgaaaagcttctgttcatacaccgagcgtggattagttcctaaggctgcaaggtgccatggtctcaaacatcatttagttgagatcttgacatttcttttacttttgattttaaaacatacttattattgcagtcgatttgtcttcttctaatgaaaggatagaaagattgtccaaaggggtattttcaaaggagtctgctttgggacaaaaatc

SEQ ID NO: 21717 - DNA, 1028 bp, Homo sapiens
actcataaagaaggaatatgatctaatttattttatgaagccagcatagtaacatctgatattattttgttttaacatatttttaactttaagtttaaaaattaacaaaaagctacagcaatataccatagcaggaaaaaggtaaatattcgagagcgatttaattactatataaaggaaaataacaagtcttatttataaacaaaatagatcatttccttggatataaaaaaaattaaaataataaacttcttccaaaacacaatattaaaatataaacctctcccatgttaatactgcattttaatatagttcctacttggatgtcaacaaaattttacttttggagtagggaaaattatttaaaatttatatggaataatatctatgactaaccaaagacaatatgttaaagtctaaaaaattttcaaagaaaatttggaaaactgtgtgcataatctagggagagaccttctttataaagacagagctccaaaactataaaacacgacaactgatacatctgagcctaaaaaatcaaacagctctcctacagcaaaggattcacaagcagagtcactacacaaattagagttttagaataatattggaaatgcaggtaacagataaaatgttaaaaactataatgtgaaaaaacccttataaagtgacaaggaggaaatgttaacaattacagttatgcaaagattatgactaggcaattcacatttttataaatacaaatggcaaaattgtttttttaagaagacttaaattataaaattgttagagatataaaaaatcaaaatgataatgagaataaaaccaagattaaaaggaaccctcagttcaagttataaatttatttaaaatcttataacagcctttaatctattttgatttgatgtttggatgtagtataagataagggtccaatttcattattttctatgtggatttccagttttccaacactatttgttgaatagcttattctttgaccactatgtgttcttggcacccctgtt

SEQ ID NO: 21718 - DNA, 1041 bp, Homo sapiens
ctgagtttatgtagaaattcttcgatattttcttgtagtgcttttttttccccatttgctttctctgaaatttatatcaatggaggaagatacatggattcaaatttttttttttccaaatgactaccattcaacagtttattgaagaggtcagctttccctaactgacttgagactctacttggaccatatgtttaactattatatgaactgggtctatttcttgactttctgtactgttgctttactgacttttctgtactgttgttttttacaagctgtctgtccattttgcctagagtttcttagattaaagtctgactcagagtaaccaatcttttcatagcagcaaaaaaaaaaaaaaaaaaaaaaaggaaaattctagcatcgttaaatgacaataaagattaaactgttaacagaataagtgttaattggttttaactgctctgtggaaaagctgtgctttgaagaatttcattatgttctataattaaacgttaaattttaaatactgaatagaaataccactgggtttttaggaacatgctcctactctaccccattactgagagtttaaaatttctgtgttcacagagactaaatatttggttattaaatatgtacacaatattgcaaaacttacagtgacaatgaaattatacagctgtgaagatggacaaaattgccagatgtcaactaattcatctgtagcaaagttttatctatagacccacaaaaaattatcttaaagtatctacacttactttaagtaaaatgtctccataatttttgacttggtaaatttctttcacacatcatgtgggaagaaagagtggcatttcaaagtcacgccttcatagagagccaagtttgagagttacagacaagaaaaagagggcgtggtctagtagttcaatgctagtaatattttctccagaaaattcctccacgcaccatgttagggctgattctgcccttgaaggcaactaagagaaccatgaatagtggagcacctcctctggagttcggtttccttca

SEQ ID NO: 21719 - DNA, 1031 bp, Homo sapiens
atatatatgtctattcctattttacaatgggtttggggtgtcaggaattgatgtttagtattttttcagatccttcttgtgactcatagctatgatcatattattttactcctttgatctaaggtaatatatattaataaacttccaaattagagccacgttagcaatcccaggatataccttatctagttgaattgttttctccctaccactcccaatgtttgctggtatttacggtttgtacttcaatgttcataagtgagatcagtttgatttttcttttttttggtcgtctttgtcaaattttggtatcagtatacttttgacctcaacaataaatttgggagctttctgttttctgtgtgctctgaagtgtgttgtgaattttggacctatgtctttattgtcctccccttttttctttctcctgaaggaaaaagagccatggtagctccttgatcactttctcagtttccttgacaattattagcttcttttggatttctgtgtcttctgctgcaaattttgatgatatatattttgctataaaattatccttttcatctgagtttcaaattaattttcatagaattttcaaagtagttttacacattttgattcctcatgcatgtgtggttattgctctatttctgattttgtataagcacattccctttcttgattatgccagctagttgtttaccaattgagttttctcttgcataatcaaagaatcaactcttgtaatgtttaatgctgttactttttattttctaattcattaatttgtgcttttatctttattttttctgatttttcttttgctggctgggggtttataattagcgacttcttgaattgaatgcataatttatttcttttaattccttaccaggtagttttgtaagtgtttaaatctttgaatttttctgtggacccagttttagggtcttgcagaatcacatatattttgatatgtttttttgtttttgtttttgtggttttttttgagatggagtttcgcttttgtt

SEQ ID NO: 21720 - DNA, 1032 bp, Homo sapiens
tcacggagctattgtctggacagctcttctcccatggaagtctctgcggttcctcctcaagtgggagggcgcgctttccccgaggatgagagtcaggtagaccaggacctagttgtcgccccagagatcttcgtggatcagtccgtgaatggcttgttgattggcaccacgggagtcatgttgcagagcccgagagcgggtcacgatgatgtccctccactctcaccattgctacctccaatgcagaataatcaaatccaaaggaacttcagtggactcactggcacagaagcccacgtggctgaaagtatgcgctgtcatttgaattttgatccgaactctgctcctggggttgcaagagtttatgactcagtgcaaagtagtggtcccatggttgtgacaagccttacagaggagctgaaaaaacttgcaaagcaaggatggtactggggaccaatcacacgttgggaggcagaagggaagctagcaaacgtgccagatggttcttttcttgttcgggacagttctgacgaccgttaccttttaagcttgagctttcgctcccatggtaaaacacttcacactagaattgagcactcaaatggtaggtttagcttttatgaacagccagatgtggaaggacatacgtccatagttgatctaattgagcattcaatcagggactctgaaaatggagctttttgttattcaaggtctcggctgcctggatctgcaacttaccccgtcagactgaccaacccagtgtcccggttcatgcaggtgcgctcgttgcagtacctgtgtcgttttgttatacgtcagtataccagaatagacttaattcagaaactgcctttgccaaacaaaatgaaggattatttacaggagaagcactactgaaagattgagaaccctgcatcttgcactttgggaataagaacaagagattgaaatacagtttacaaactttcattgccatcaaaatcttttgctgccataactatttcagttttatgtgtaaaagagtcatca

SEQ ID NO: 21721 - DNA, 1084 bp, Homo sapiens
ttgaatttttctgttgccttcgttttcatcttctagtttgtctattttaataaatggccttacattaaaaaattgtaaagaaatgtataccaccaatttagaaattgttgccttttctgtaattaaactcgggtacaaattggcataacatgaaaacctatggaactagaattattattaaagaaatattagatgatcatagcttcctgtgatagcatttttttgtgtgttacctatccttttggtaaaatgttttatctgtgatttctttagcttagtcaacattttcttgggtgaacttgattgtcaactaattttcataaatggactggattctcttgcaacattaatgtttataaaaagttttaaattgatttgaatagaaagaaaacattgttttaaagttggatttatatttttcttctatgtagttactataaaagtgtgctggatttgaccaatccttacccccactataaagagaacccgtgatgactttagtttaaaaattgtggaaattgtggagcaatttttctcacaatgtgagaaaaattctaaaccatattagataatgtggaagtcatattgtctatcatatatactgccatttaaaaataggtttttaaaatttagctaagtcttaagtaatttgccgttgctaataattttatctccttgagtcggttgttggggagagatgttatattcaataatttttagttattttgtaatgcagagtgtttattcatttcacagttctgcaatggatgtagtattttgggattgccctgtccagaaaattttcagctacacacctttaaaggaaaatgtttctatctcagatgaaacatgtaatttgggatggttcttcctttgtcacttaaaggaagagataggaaaagtctcttacccactttaaacatgagggtaaaggtttaggtcaaacttactggctttgtcattcaagcatatctgaatcctcacttttttctctttgctttttagggtcagaactgagatattaccaagaaaaggcacaatgccataatattatggtgttatggtattttgacttaaaggggaa

SEQ ID NO: 21722 - DNA, 1065 bp, Homo sapiens
ggtgactagggccttacagcatagtttcaagtcgagtaatgtaatgactccagatttgttctttttgcttagtctagccttggctatacaggctcttttttggttccatatgaactttagggttgttttttctagttctgtgaagaatgatggtattttgatgggaattgcattgaatctgtagattgtttttggcagtatggtcattttcacaatattgattctacccatccatgagcatgaagtgtgtttccatttgtttgtgtcgtctatggtttctttcagcagcattttgtggttttccttgtagaggtctttcacctccttggttaggtatatttctaagtcttttattttatttttttgctgctattgtaaaagaggttgagttcttgattatcagcctggtcactgttggtgtatagcagagctactgatttgtgttcattgattttgtatcctgaaactttgctgaattcatttatcggttctagaaactttctggaggagttgttagagttttctaggtatacaatcatatcattagcaaacagtgacagtttgacttcctctttactgattaagatgccctttatttctttctcttgtctgattgctctggctaggacttccagtactatgttgaatcgaagtcgtgagagtgagcatccttgtcttgttctagttctcagggggaatgctttcaactttttcccattcaatattatgttggctgtgggtttgtcataatagcttttattacattaagctatgtcccttttatgctagttttgctgatggttttaatcataaagggatgctggattttgtcaaatgctttttctgtggctattgagatgattgtgggatttttgtttttaattctgtttatgtgatgtatcacatttattgacttgcgtatattgaaccatccctgcatccctggtatggaacccacttgaacatgatggattatatttttgatatgctgttggatttggttagctagtattttgttgaggatttttgcatgtatatttatcacagacattggtttgtagtttt

SEQ ID NO: 21723 - DNA, 1059 bp, Homo sapiens
agatcatgccactgcactccagcctgggtgacagggcgagactctgtctcaaaaaaaaaaaaaaagcattctcctacctgtgaaatatctgttcgttgttcaaagtttgctaaaaaacggacaagtagagagaaaaatacttgcctagaatccaaagacagttagtattttgaaatctaccaagattttctgttgcttttttcctagttgtgatcatgctgtatagacatctttgcatcttgcttttatcttgtatcatggtgacataagaataagataagcatttttgtcaaagcatggaatgttaggtctgaaaagggtcttagccctgctggtccgggggattactttacatggtggggaggtgacacccagaaccacctggcctggtgcggccgagcctgcatgctgggcgggaactaggaagcctccccaacctctggccccgtggagccctcagcctcagctgcagtggaggcacctcgggctctggggcaaccaagtgtgacaggtggctgtgcacgggcagaggtcctgtggaagatttcatgtgacgggcagaagaggaggaggaggcaggggaggaagcacatccatgaacagggctgtctgggggcagcctgggtggtcgtgaaataggactcagtagccttgagtcctcatttaggccctgatgttctttagcctgcctggcctttggcaaatcgccagcttcacgcacaacctcatttttcacctttgggtgtgggggtcagagtcgggagagcacctgcaaagccacaatgatccagacacacggcaaggtgggcacattcccatcaggctcctcggggagagcagcgcttctgtgcccgggagcagcgaaggtcacacaggaggacccgcacctcctcgtgtcggtggctccgctggtataatcaggactcacgtggtgttcctcgtgtcgtggcccttattgcagagggagcagcacaggctttcctggaagctcccctcggtcatgtggggtgactccagagagccccaccttgcgagactggaccagtccaagtggcctgg

SEQ ID NO: 21724 - DNA, 1036 bp, Homo sapiens
gcagagagtgtgtgtgactacctcagaaacccaggaggcagagcagggccaggggagtgcccgtcctccggactccgggctgcattccctgacagtgaagccagcttctggctctcagacgttgtgtgcttgtacagactgtgggcaagtagctacaaataggacagatttggaaatccatgtgaaaaggtgccatgccagagagatgaaattttactgccgtacttgtgacttctctagtatgtcaagaagggacttagatgaacatttgcacagtaaccagcatcagcaaactgcttctgtcctgagttgtcagtgttgttcatttatatccttggatgaaataaatcttagagaccacatgaaggaaaagcacaatatgcattttctttgcaccccttgtaatctgttctttttgtctgaaaaagatgtggaagaacacaaagccaccgagaagcatattaattcattggttcaaccaaagactttgcaatcatctaacagtgatttggttttacagactttacctttgagtactttagaatcagaaaacgcaaaagagtctatggatgactcaggaaaagcatctcaggaagaacctctgaagtccagggtaagccatggtaatgaagtgaggcattccagtaagcctcagtttcagtgtaagaagtgtttttataaaacaagatcttctactgttctcacgagacatataaagcttcggcatggtcaagactatcattttctttgtaaagcttgtaatctttattcattgagcaaagaaggaatggagaaacacattaaaagaagcaagcatcttgaaaatgctaagaaaaataatattggcttaagctttgaagaatgtattgaaagggtatgtataggtgcaaatgataaaaaagaagagtttgatgtttccggaaatggaaggattgaaggccatataggtgtgcaattacaagagcattcctatcttgagaagggcatgctggcgtctgaggaactgtcacagtctggtggtagcaccaaagatgat

SEQ ID NO: 21725 - DNA, 1046 bp, Homo sapiens
tagttttagggttgtgacaaaaactgccttttaaagttttgtataagttgtatgaacctagactgattttctttgaatcttcaggatcagttttaagataccattacccccttttgccctgccccactggcaaatcttaactaccgtatatcttgggtttaagttagtttgacagaagaagctgaatgtattagatgcctaattcctattaggtcgttaggattaagagttcagaatttaagttttgtgtactcaaggtttacctgctcatgtcatggtaaaaatttcaaaaatgtattgctttgtacatcatgttttaagtacatgttatggataacttcaggttaagagccatttattttactttcacttttgggggaatctttttttttttttttttttgaaaagttgagtttcttacttgttaaaaatatccaaatgtgatcgagagaggaattttatagaatataggtgtgtttatatttaggcacttgatggatagttaacatgaaaatctgttatgactctgacatagggcttagtgagagagaaagtaagaaataatagaaactatacctattttttatagttaatgcttttatttaataattttgtgtttagaaaataggccaaatgcatatttttattacatccatgatctttacctttatttctttcagtagtcaaaaacgtaaaaatctcgatgacttacaaaagttattttaggcaccatgtcttgttaaattcttttaagtttattttattctctatgtacatataaggtagtatacctggtactctaaatagtatttatgcagtgcattgtggtctaataaatagccttgattaacttttatctcacttgttgatttccatagctttgtggattgcttaccttatccttcttatccccattttactgatgggaaacttaatattcaaaatgttttcagtgatgtacttaaattatttgactagtaatggtagaccactctttcttccttttaactatttcttttctatatttctccactttttgtaatatc

SEQ ID NO: 21726 - DNA, 1032 bp, Homo sapiens
atcttcttgtagagtctcaggattctgtaaccttcctgatccccacagtagaatattaggtgggtagccattctcctgatttcctttgcctgttccgtatttttttttcttgttaaccttcctctccctgttctgtttcttacagtcctttactttgtgggtacttttgctgtttcttttcacaagagctggatgagaaggaggtatgagaaatgcagatagaagggaggcataactgctgatttattatttgtttatgatttctcatttggcagatcctcgtgttttcttttttgtgtgtgggcatggtgacaaggtggtgcccgggctgtctgtgttgcggaagccactctaggagaaggagcaaggctgagtgagaacacaaggctgggaggacgagctctgctgaggagcagaaggaaaatcttttctcacaggagggttatctttgagttgggtcttaaaggatgaggggccattcacaaggcacatttggacgtttttaacagagcgaacatgaggggaagtacagagatttggaagagcactgcaggcaatttctgaagtgtatgtgactaactgggggaagtgaggattaaacaaacacctgttggatgtcagtatatgccagcactgtgttagtctttagggttaaaaaggtcaaaacgacacctgcctcagatggagaaagcttaggtcaagaaataccaagtctccctagctgcttcagaaaacacttccttgggctggtaacatttgatatgcagcaagtggaagttaggcagattagcaggggcagcccattccaggcgggggttgcagcaggatcaaccatggcgtgcgggatgtgcacgaactacagggcagtcaagacttctggaggctggattgtgaagccaggtggacagttccagggacaattgggtgaggtgggcaggggtcaggtcacagagctgggccatgctgaggtgttgaatgctggcctttccctctgctttccatcaactcgttttttcgcttgtctttcttccc

SEQ ID NO: 21727 - DNA, 1035 bp, Homo sapiens
actaccagcggtggtgggaaggtactcccccacccctccacctccattcttagggtagcgttcccaatcacggtgtttgcctttctctcaggctctccttttgggggcatccagtgtagagaccatttgttgttttgtttgctgtttcatcatatgcctggtacttagtaactacttggaagttagttattgaccaggggttggacaatggtgcctcagtgtttctgtgtttctctggctctccacctcctccagctgagcctgcagcttgtgtgcctggcctgtggcacgtgctcatctctgtgaagtgctgacctggacctggacgaactgcatctctgtttttagtcctctcaggttagcctggttagagtagaattttcagaacgctccttgtggggaaaaaaagaagtaaagttgttacaaaaataattgaaaaacatctaaagaattgtgcaaagtagaattctcttttttgaggctcaaacacagtttttagataatttaattgacaaaacccgtagactccctgtcctttttcctcaaccctctctgaggagagcccattctgtgagagagcgatagcttcaggcttagtgggatcttctcccacagcctaatttctgatgttctctgtagtctgacatgtagtctttattctgtcccaggactacagtgataggaaccaagtaacatgttcacatcaccagagtctgatcaccgtgccaggcattggggaatatttttgagggagttcctgacagttggactggatgacattaagattttttccaacacaaagattctaggattctgtgtttttataacccccagttaagaccaggatgctcttggacttagattaacatgtttatttagtttaaagaatcgcatcattattttcttaaaaaattggtggaagttagatgatttaatgtagcatataaataagagcacaaaattggatgtctgaaagatcttaggttagatcccatctccagcactcattaggataggcttgggatgaatctgcat

SEQ ID NO: 21728 - DNA, 1045 bp, Homo sapiens
cggtattcccaaacgcaccgagtcacgttcagttataagcacaattcagtgggaaactttgttctctaaagagcgttctttttgagattttacagattgtaaactgagtatcgtactgtaaaccgaattatttgcatgtaataatttgaaaagcacctgacaattagaatggacttagtttaatcacagttcatggaaaactaaggagtaaactgactttacaggaagcttctgtgaatggcaaaggttgcctctttgtttaatgaattaccttcacgtgagttcgaactttagttatctagtaattttccctttggaaaccatctgagccatctcccaagaacatatcagaactcagcaggtggtattccttcttgtcatttttatggcctttggaggaaatgtgtttgactataaacctacactttcttcaccagtttatttaattggaatgctgaaaaaaaacctgatcaacttaacattatttattgttttctgttttttaaacttagagacagtgtggcactcatcataaacattttactataacagtaactttaaagttgtcaaaactatataattttttgttagcttttttcttttcttcacattatataattagtaatagaaaaactcaaagtcttaaggattatagaaggttgtttttattataaaggtcagggagattatgattgctgttttaattgtctattttttttcagggaatatgaagtataatgccttctgttatcatggctttaggaggaattcagaattgatataaataagtagacattgaaacacccacgtgaagagatgtggttatgtgttcatctgtactttcaaagtatattcagagcccagctgctcaccatctatcctggcatcccccggtcctggcactgtcttccttctcctattactgatataggtctcctgctcaatggctgaccctctgtcctccctcctcagcaccatcacagtcttgatctttttcaggcatgtgcaggccatgtcacttctgtgctcagcacattgttgtact

SEQ ID NO: 21729 - DNA, 1020 bp, Homo sapiens
aaaacacacttttcccctttcttccccatgattttgttctaagcgtgttcatctgttctccgtttgtgattggttacctagtttgtgaaacagagatacagtaatttttctgtgtctacattgttggcatgctttacaagcatttaaaagaagagatctacataaatatattatgagactacggtgtagtgtttcttttaagttgatggaaagatggtcttccagtcaggatttcctttaaggttaggtttttggttagggtatttggtgttacatgggaactgtgctgctagatcattactggctagttttcctggagaatagagtgcttcggattatgacttacacgactttacagtccaatcactgtaaggactgctgttcagaaacaattgctgtggttctcctagagcacatctccaagaacgaaaatctaggtggacacaacgtgtgctggctgttggagtggtgatgagaatagagcccttgacagggagagtggagcagaggtctgttagcttgttacttttggtagtttcaaaaattaaactccaaaaataatttattttttcctgttctcccaaattatgtgatcatataaagtcaaataataaacaaatgcatactttggaacatgaaagtttcctgttctccagagaaaatcactctaatgtaaccagttttccttcctgacaatgctgccaggcatgctggatctaagtgttgaaaatattacttagcaaaataatggaaatttagatgcaaagctgttctattcggagcaatgactgtattatagttctgcttctggctgtgaaaccattgatcttaagatgcctccacggaacttttcttagaggttctgtttcccaacaaatatatcatagggttataatgtgtgtgtgtgtgtgtttgtgtgttcacatacatacatagacaaatacacatacacatgaatgtatgtatgtatgtattttattttatcaaaactggcagtgggtgctgatgagaggctttgca

SEQ ID NO: 21730 - DNA, 1039 bp, Homo sapiens
tacttaattaaaaattaaatgatgaattaaaacttagattattcaaaactaataagctacattaccaagaccagcaattaatacactacaatatattcaggaaagatgctaacattttaacatttgttttatgttagaattgcaatttgcagtgcatgctgttttgaaacatttattttgaagagctcagcatgtctgagttaaggcataaatcaatgacctaggatttttaatggttatagaatttatcatagattataattctcgagaatacaaacagcacagaagaaaaaatccaattgtttttaaatcagtggcaacatcatatcagcatatttgattacatttattcattgtaatgtgcaggtcaacagtgcagagatgcattcaattgacatcatcctaaaagcgatctattattttatttgataagattgtttttcctttgttcatgcataatggatataaatcataatcctgacagttaccaagggtttgaacttcagggactttctacaaatgaatattaactaaaactaaggacttctgcagttaagaaaatatgagccatttagaaacattctatctagtgattcaataaagcagaactttaagtgtacattttattttaagatggacatatcaacatctagacttataaccagcatagctgagttagtcatttgtctctcacctgatggttcataccgttgtccttctgagctggttgtatgtataatgagctgttgtccttctgagctggttatatgtattatgtgtgtatgtttgatgtttgcatcttttagactgagcaatctctgatgtttgataggagtactccgtatgtgtgtgggagtgaggggaaccttcccaggtcaccctctctcattaatccttgcaggggacattcatggtgtgtcaggtgttgagctctttgctccacactcagcatacaaagaacaaaaaggctcattgggcctttaccctcaagaacatatgattttagtagagaaagatgtaaactgagaattgtagcata

SEQ ID NO: 21731 - DNA, 1045 bp, Homo sapiens
ttagttccagccttaatggtttaggctgtggtttagtgtgtggaaggctttgaggagcatgtgctttggttagtccttttcccagtagtcatggcgaagccatccaagtggtcacatctcccacccctgagatttgtatgtgagaaacagaattcattttctgaggctttcctgtggaggccatgagaggaggctgtctccctggaggcagggaggctggttctgaggctgacaatctaggcagggtgtgatgcatgttggatacaggtgggaggaatagagaatgtagaggactattgggtagatagctggactggctagctgagcaggttctgcagtggggaaagagtatgaatttgtagaagcattgaggttttgctgtcagttggctatccaggaagggctggtgagatcagaagtggtgttaaggccagggagcataggctgtgggtcactggtgtatgggagagtgctggagcatacagaaggaagaagacaggaagtcagggtttggtgggagaaaaatagcaatgcatgggacttgggcagattttttcttagaagatggctaaaatggcatctggaaagcttgtcattcccttttaagtagcaagggttggaacatagaggacctgccagtcagggccttttgttagatacttggccttattgatacctgcatttcaactttctgcttcagttttctgaacggtacagctagcgcttgggtaagtgatctctgagcacactggcagatgttaaattccctgtctcatgcctttgctccacattaggaaaggaacacaccaggggtttggaataaaggaactccaagactcctccaatctttaaaataaatgacatgggcaatttatacattaaaaaatcagcatttttctatatttattaaggtactgagtaaaacttactagatttacctggaacattttagcatcttttttttttttttttttttttttacatatcttgcagtgacagtatatattgtgttagtattatgtgattaaaacatagtttcatttaa

SEQ ID NO: 21732 - DNA, 1026 bp, Homo sapiens
gttttgcatttgttcttcttttactgcctattttgtgttaatatgaattttctccaccttctttatttgggtatgtctttacttcccctttattatttaaatatagttttgctggatggagagttcttgattgatactttgaccgtgttattcttctgacttctaccttccattgtttgtcataaatcagctcttaattgtattttttctttatatggtatgaagttagctgttcttgtatgtgatgaaacttttttgttgcttgtaggattttctcactgtctttgtctgttttttttttcagcagcttgattatgatgttttgggtgaagatttcttagtgtttatgtttcttgatgttgaacttttatctgtagattactgtgtttcatcaaatttgaggaactttcagccattaattttttttctctactgctttccgtatttctcgtaggatccttactgtacttttattggaatgctttagatttttccataggtctctccggctcattcttaaaattttctccttctgtttcacctttttaaaaaaagtttttaaaataatttttgcgtggagatcctctctagttgtcttactggtttttcatttatagaatctccttgccacatttcttgctagcctgtcagttgctcaagcatggctcacacttctggggttggctgtgtgtcaggatttcctcattggctttctgtcaactttgttacttttagctgacaaggatgtggggttttgccctcaccccagatttcttcctcccttcctcaccttggcacagagctccagttttttgtttcagtcttgtgtcagtaaaattaccattctgcctctccaagttgaggagttggtggagggaactgtaacatcccaggcaggcacccctcccaccagctctcttacccaaaactctagtagtttttcaagataaagtgcttttcaatttgttgctttcatttgattttcagaatgttgaaattgttgctgttgacaattttatgcagttt

SEQ ID NO: 21733 - DNA, 1034 bp, Homo sapiens
gtaatggcttctctagcttgaatgatttttaaaacatagattctgttacattatcagtcaagattaaaatgcaaggaatggccatcctctttaaaaaattagcacgatgacaggtcatttaaccccttcctgttgatacttggatgtttcacttttcctcctgactggagaaaagaagcaattgctgccttgtgtcctgtcattacccgaagtagctactgcccgtcacaaatgcttgtgtctctgtaaatcttcattctcttcatttatggttcaggtcgctgctacttttccttttgctgtcactggtaactatttcttggtgttgccctttaagggtatcttgttcaacattgattacacttaatgggtttaaccatcaccctgtacaattcttcgaagacccttggcaaccttgacctttggctaaaattattgttagtctataaatgtattcattttctcactattttccaaagtggctataggattatagaaagaatgatgtattatataaaaagcttttccaatgtagaaactacaaaagggaaggtttaaatgagcattttgttcagctggtcatgaagtaaaagcataaggaggatataaaagtccaatcatcccccttaagaatttttgatgttgaacaatattttaggtttgtttttctgaataacttgtacattaatatctttaaattgaaaaataactttattaaaaggtattcactgactgttcagacttacacttaaatcttaattatgagatattccatctcttattctgttattttactacctctttagaaggagagaagaatattttttatcttgatttttcttgaaactctgtaggctctcctgtgtttttggcattgatttagcaatttatgtaaaaataatggaatttacagattttgagtcagtgtaagtggaactgtataataatttgtccaaaagggaatgggctaatctacaatcataagcttcctttaatttagaaagacggtaccgttggtaagatgcatttcgggc

SEQ ID NO: 21734 - DNA, 1034 bp, Homo sapiens
taaatcacttcatacatttatatacacgtatgtttttgggtagaattttaaaatgaatctaagtgaagtttaatggtttgtaacattgaagaatttgtcaagaattatcaactacagttctacataggaaatagttaaatgttctagtttttaggattataaaagctgtcaggcattagaaaattaaaatgttgcttggtgatttttagaatatttaaaaaatgtgcttagtatgtttgtaaatatggggatatgttcaactattttaatgctataaagtttcttttcccaggttaagctcttgtgattaggcatgactcagggcttgcaaataataaaaattatgatcaataattttcacacagcaagttttcagagatgataaagtttttcagtgttgctgacatttaaaaattctttcttttttttttttttgtcctctgcaataagtagtcaaattcttgaggactcctaatatatatctggacaacactgatcagaaaaagcttgggttttactattgagaacatgattattcaaatagcctttctaccaccaaaattacacattacaggtttaatttaaaattagctgacatatcattgctgcacatttttatttgaaaacattaaaagacaacttacaaagttttaatttaaaattgtttattaatacaaataagattttgtttctgcttcagttttatcccttttgactttaaaagccaaagggaaaaatttcttccaatcactttcaatctatagaaaatgaaaagaattttaattttatggccataatcataaacagtacattaggttttgtataataacatgtaccattaaaagacttcattatggcagtatcctatgatcttcacatcaaaatgaggaggaaagaacattattaagtatgggaatttcatggcagttttacctgttgtggaccctgttatgtcaaaaatatagtgcagtgacttctgaactagctgacagacacgaaagccgttgtgtcactgtgtgttatcacctcctgta

SEQ ID NO: 21735 - DNA, 1127 bp, Homo sapiens
tgtagatagattgtttacagtaggcacctctgaagcctttttaaggcttttcgggcaaattagcctgcattatttgcaagaagtaatgcaaagagagtccctgtattctgaggctgagtaggaacgtgaatgatgagaaaggcagcattaaagagtattctaggtggagggaacagaaagtacagtgaaactgaattaggaactgaaagtgttgggctgcatgtgctgaaggagggtcctgtggctgtaacacacatacaggccagcttgtaaagagacatgagcagggtcccgagagtcatggaggtagtcttcgttgtgcatggatattcatgggaaggttttcacagggcaagcaagactttgaacagtcacactagttatgctatagtatggtgctcaagttcccctatgatagtatttcaaacttctgtatcccctgccccagttgttggcaactgagtattttcatcctaagtacagaagttggacaggatataatttcaagtgtagaataaaaattgacatagtaaagtaatatttgtaccactttaaaatgtatccaatagaatgttaacaccatgatgatttgattcccaccgtccattcatttaaaagtacatgaataagttctttaactgtcagaaaatttgtttttcttcttgaactcacatcccttatttcccccacagattttattgtatttgtatgtggacatattttaatgatcatcttatcatttctgggtatcagtacatactcacggacacatacattgatgtaaggtttttttaattgttttatttttaaaaaataaaagatgaggtcttactatgtttagcctaggctggtcttgatctcctgggctcaagcgatcccccacctcagcttctcaaagagctgggattacaggagtatgccacagcacctcacatttttttttttttgagacagagtttcactcttgttgctcaggctggagttcgatggcgcgatctcggcacaccgcaacttccgcctccgaggttcagatgattctcctacctcagtctcccgagtagctgggattacatacatgtgccaccacgcttggctaattttgtatttttagtagagacaggggtttc

SEQ ID NO: 21736 - DNA, 1039 bp, Homo sapiens
tgtccaacaatgatagactggattaagaaaatgtggcacatatacaccatggaatactatgcagccataaaaaatgatgagttcatgtcctttgtagggacatggatgaaattggaaatcatcattctcagtaaactattgcaagagcaaaaaaccaaacaccgcatattctcactcataggtggtaactgaacaatgagaacacatggacacaggaaggggaacatcacactctgagggctgttgtggggtaaggggaagggggaggggggagggatagcattaggagatatacctaatgctaaatgacgagttaatgggtgcagcacaccagcatggcacatgtatacatatgtaactaacctgcacattgtgcacatgtaccctaaaacttaagtataaaaataaaaaaaaataaataaatttcattgaacttaatctttgcctattactctgttaactttgttttaggaagcctttatccttttgccattgtctttgcatgaagtagcatggcagactctctgagagctgtttcagaaagctctggatttgtgtcttcgcttttccacttaggatttgtgagatgtctggcagtagcttagaatttttgtgtgtgaaaggaaataatatttatttgagaaggttgtgaaatgtaaatgagatacacattttataatacatagcacacaaactacttagcaaattgcttacaatgacttctttactctgtttcacatatactaccttcaatgtaatccccctctacacccagagaaaacagccagaatttggttttcccatattattgtttatttttttctagataacctataattcctttgaaggtaacatctcttttttccaccacttctgcttttatgattttgtctttggttttcaacacattgattataatgtgaagtgagagtgagagagagaaagttgtgtgagcgtgtgtgtgtgtgttcgttctatgaggtttgattagcttcttgaatgtaggggttgttgtttttctgcagttttgaaacttccc

SEQ ID NO: 21737 - DNA, 1109 bp, Homo sapiens
tgtctcgttgcactcttttaaaacaccaatgtgatacttactagtgggttatctgtggtgagttatgtaaactctctgattgtattttcctaatgcataaaaggggttaattttcattgttgccttattggattatgatgatgaaatgaaatagtaaatgtaaattctcagtatagtacctgctgccttagggctaaccgtcctcctctacctccccctctgcctccttgtctataactgacaaatcagacacaatagaaagggccccacatgttatgttggttaaacagggggccagtgggcagcaacttaaaaatcacattttcaaagtatacttaattacatgggaaaattcttcatgtcccgtattttaatagcttaattctaatctttacatttacataaaataaaaagaactgtcatgtgactcacacacaacataaaatattaaaaggaaatagagatggtcttttgacaatgggctgtttatccatcattttaattttttgctttatgcttttctgagtagcctgtagtcagaatgcactgtttagtaatgtagaatcatttgtaataggcattcagtaaatggttagtactgttatgaacctacgaattccctttgtatgatcaaaaaccgcccattttaatttttcttagctgttgtcatagttcaatgaatccatcgtaaccttacctatttgtaagatcttggagagcaactcctggatctcgatttgactttcttgaaaagaaagctggcagagactttcaaagcaatgttcagcatttctgtaggtctaatttgggtgagtgaaggggaacagagatttagtgttttgagtacaggctttgctaaattttgagcccagattgaaggaaatctgccccaggaattaaataattttaaagaatgaggcttgctaccaagagtagagacaaaaacactctggaatgataattattgctttaggtttctttttgtttgctttttttatattaggttttatagcatctttaagatgtgaggtttctggatcacatttgaaaaactgctaattctggtctttcacctaagagagcctgtttttttttttatttacaaaatt

SEQ ID NO: 21738 - DNA, 1036 bp, Homo sapiens
aagacaattgcaaaggtacacgcagaaaatcaccttaaactaatgctgtgatggaagggcagagagtggcaggtgatgggaaggtgaacgaatggatctgtgggcccagtgaatggactgaggggagggtgacagagagctgcacgccatccttcgggtgtgctggtcagggctgctgggtgagtgaccgtgccagtcagggaggtcctctctcctggaggaggatgtcctttaggaaaaggatggtctgggatgagctgcttatgagatgcccatgtgatgtccaaatgaaaccaggtcaataggtgtatagttccatactaatctatgtggaacttgatgtgattgatgttttccttggaaaatgtgaaaaagtgaaacaagaagagaggcaaatagcctgtatgggagacagagaagcaggctcacagacaggggagggacctccaggaaagagaggtgtcatacaccaagcaaagagtgggcggcgtgccaggtgttgatgaaataggagagtgcagcccgccagccacagccactgggtctcagattctcttgggaagacccgttttagtacagtagtgagaacagaaaacaggtaagtggagagaagtgcagaaatgataagcttgccttttgcctggtgttcacagaaactttgccttgaggcggctctgtgaaaacactgggccagagggaaagacagagggtggcagctgaaggcaggtagacggatgcgtgctgtctttgtgttggcattcatttgtttgcgtaaaatcactttctgaaatgtactttaatgtttatgtgccaaatgtttaaatgtccattgaaaccgtgaggctgaaaactgcattattcgtgatggctagtacagtgtatacgtgattagggttggtgaagcaggggcactgctaatagttagatcctctgaggacttctcagaacactcccgagttgagccagtgcctcactattgtcctgtgggtcgtctctctgcacatggagaactgtggcttcaggccttccctgtcat

SEQ ID NO: 21739 - DNA, 1050 bp, Homo sapiens
ggaattataaaaggtttacattctctttgcacgacttaataaaattaataaagtatgcatttttcgattaatactcagcaactgtagacttagggagctctgtacagcatagagttaaagctagaaaacatttttttgaaagacttttcaaagataagtaagttcactcttgcctatggcaacgtagtataaatattggactgacaagagctcccaaaaaatgaactctcttatcatatgttgcaccttccccctctacctctccatgggatggatcacccaccagtgcctgcagtatgccaggtgtggaggatggaatctttcagacacttacatagtgtttaaattttatggctgcccttgccccacctctaataccctaggtgagtctaagagcttgtggtgacttatgtgaccaggcctgccagactgcccactaaactgtgctcctatacatgaatgccaaaagttgttgttttaaatctagtctttttcccttagacattattagattgtcccaagtgaagccagcttccggcttgaactctcagaaatattgtgaaacatgatgctgcttcagtaaaaatgttacgtacatcaccttaaatttgaaaagctttcaactagaaaaatacggtaaattattcatatatgcacacatatatatgtaaatacttaaattgcttgatttgtcaagtaatatttttttctagacaacgtatttcaagccaaagttgtatgtattattttatagagttcatgtcctttttgggaatatatttctgtctaccatttttactgtacctaaccactctaaaaaaatgatggcttggatttttggaggttggttaggctcccatttttctgttgtatttccttaaagatcttttttttcctcagaagtttttcatccatctgccttttctggttttgcagcatctcactttgctacacctagtgagttaacagaagtggaaagaataaaacttttcctatgagggaataaatatgtagcgatgaagagttcgggggtctatatttatttcagag

SEQ ID NO: 21740 - DNA, 1046 bp, Homo sapiens
tgtgcatacaaggttagggaaaatctctcttaagaataagacttttaaaaaacagttttattgaggcataattaacataaaataaattgcacatatttaaagtgtacagtgtgatgtgttttgacagaagtataaacccttgaaaccatggccataattaaaataatgaacacatcccatttctcccagaagttgtgaggaaatggcagatatctgaatgaagggaaggccagggccgtgaaaatgtgttgggaagagcactgcctggaatggttgacggaacacgaggccaacatggacttggcagagccgttggtgatggagcagtgggagtggaatggaatatggtcatttgggcttggagtgaagagagaagtaaggtagaccacacagggcatgtagagatgtttcttctgactctgacggaaagccatagaatgacggtgagcaagagaggagcctacgttgatttgttttttgcaaaaagtcactctggcttctaggtggagaaaggactgcgtggaaatgagacgtcttggcaagagagagtgatcacttgaatgagggtagtggaggtgatgaaaatggttggattcaggatgtccttgtcaaggggacattgcttgagagctggggtccgtccaggctatctgactcctcagcctgtgctctcgtcagcttggcatgccgccttctgtggtggataaagaccatcagtgctgcaggagcagcaaccaacgccttaatgtgtagattttgttatctgtttttttctactttaatttggtggctttgtacatctgccgtgtatgtctgcttacgttgtatcatggccatcttttctctgcaggcatccttagtcgccttaacttggatttttttaaacttccagattgctaatttcccttgtattacatttcattcctgatagacatgcagcttccttgaggaggagctccctgcctctgtgtcctgccccacactccgtaacgctaggcttcgtttagagaggagcttttcaactcttgttagatgtcctaaattgt

SEQ ID NO: 21741 - DNA, 1057 bp, Homo sapiens
ctttatcggctattttaaacatttggactcgatttggagcctgcctgttaattgtccatgtttaaattcagaaggttgactttgaatcaatgcttgcacacagtataggatacagggtggtggggaggggtgcggcgggcattggatgtagggtagaggcctgggtctttgttctttcattaatctctttttccctgttctttctcaagcctcagtttccttctctgtaaacaaagggcttatattattagagaattcctaacgcgtgctattctacaaccatgtgatccattgcacccatctttagcacccctgagttggaggaagtcgccgtcatgaagcaacagctgtcctttttttttttctttcttagaaaagctggttgtacttagagaatttgcttttggtaaaatttgagtttatttctacttatgaaattggaaataagctgaaatcaacaacttctgggccctcctgccattttcatgtcaaggcacatggagacatgtcagtgcacgtgggacgtggaagctgcacaaggggtgttcttgggtgtggacgtgcatggtgggcgcacaggcctctaggaaatgcttcctcggttctgggcaccttcaatcatggatgatggggctggaaacttgcctatagctttttaaagaaaaattaaatattttgaattgaattcagcaatttcttgaacacctactgtttgtgagtgaggcctggcggtaggtgagcatggcgtggagctcgcgggagagttggagatgtgatcgcttctgtccgtgtgtcagcgtgatggcctgtccacgccgctttcttctgactgtgagctggcccatctctgtacgcttgccccacaacctcagcatgccctttggaacatcagaagtcccccacagcctcagcaggtcttctgagaactaggaattagagccccactgtcgtggaaatcaactcgtcatcaagtagggccgacaatgagacagctgaccatcctccacattccgagcctgaaggggaaaggttttcccaaggagaggtgctggtgggc

SEQ ID NO: 21742 - DNA, 1023 bp, Homo sapiens
gaggacactattcaacccatgagagataccaaaggacaaaattacattatgtcctgtcatttgtgcagcagcctttattgaggactggaggtagagaagtaacccactctgaatcacagatgtgctcaggatactttgtcaagaaaacagccattaatttggtttgataaccaatagttgtggataacccatagttatcattgataataagcaactcacagagtgtcctcttgaccatgtggtgttttgactttggccattgctggccccacagtgacacacgagctggctggtcccagcagggagtcatcgcatctacaggcacttactcagcagctgcaaggaacctatcactttaccaggtggggagggtggcacaaaagaaaggtccccaattgcttatcctcaagaaacttgcactgttttgattccatggtacatgttgaagcaaactgaggtcagtaaataggtggaccatttgtcattctgaatacatttccatgaaattcggcagctcattagcaaaatatttcttttatttggtttgggcatattgatttggatatcatcttcaaacaaaatggtagctgatgtctgctacatagggtccagcttttgtagaataaatatcagcagagctgtcgttattagatttggtaatgacagagatgtgggcagttcagcagtgagcagtggtgacttaaagtgagagagggttgggtgaagggtactagctgattgttgcttggattttatggccataatgcatggtgtttccatagcttatacttattcgtttgaagcagatctgttcctaatatccgtgggtcctgagtcttgaaattctttgctttccaattctgtcttcctccacccctagaggggcctcctagtgaacatgtgttgctctatcctgcatgtcactctgctgtccctgaggtgcacacactgggggtgctgtggtcatgcaggagaacagcccgggggatggggccggtgaggtctggaggcagatcagagagg

SEQ ID NO: 21743 - DNA, 1098 bp, Homo sapiens
agtagtaaattgggagtgggaaaagacacacagataacagggagaaatgatagcagatgacctaatagtaagcaagaagagaaggaaaaaaactatagcaaaataataaataatatgaaaagcacagcactgtgggccttttcttagaaatggaatagctctttgccctttctggttatcactgatcgctcacaggttttatttctagttgttagagaactttaattttattcagcatgctttaaatagtgtggcaaaagcatgtagattttatgtagatttttccagtgcttaaacatttttataaaattctgtttaaaagggtaaactcccaattatccagaaaacccagcctccaaaaatgactccccagaatagttgtgattttacttcatgatatactttcaataattgatagtataaattctttaagtattttatggacacattttttgcatatagtctctcgatgatgaaacacaccttctgtatctgttttaatgtatgtatcctttgaattgaatttgctggaaaaaatttggttctgttcctctgacatgtatatttcctttcttcctcctctaccatctgggatgctttctctaatatcgcatttggaagaggatgacgctcactgtgttgtttcagcatatgtgggtctggttgaattcacgtctgcctgttcacctctagtttttcattttcacacctccatggaggtggtatgctgctcttccatgcctggtagagctgtaggaaatgttacttaaatgtgtgaatgtgaccaccagggtacatttatctcaataggaaacaaatatgctaaatacaggtaacatgctatttatacttacaggtaataacttatatcttctaaccaatcattttccccctaacatagctggggatattttacaagccaattgtcgcattaaaaactgtaactctttgattttatatgtgatacaatatctaataatactcccaggaaaatgccagttgtattttttagtacctgtgtgattttcttgattgctaaaatatacgtatgtagattgaacataaatgaaaaaattgaagtccgggtttgaagatttc

SEQ ID NO: 21744 - DNA, 1083 bp, Homo sapiens
cttacccaaaattgagcagataatatggagcagatagtatggagacaccttctgtctctcctcacagtttctcctattggtaacatcttgcattggtgtagtaaatttagccaatgttgatacattgttattaactaaagcccatcattcgcattaggatatattttctatgttgtgtatcccatgggtttggacaaatgcatatttgccgtatagtgtcatacagaatagtttcactgccctttcctccgcctgttcatccatcccttccctgaccaatggcaagcactgatatttttattgtccttatagttttgccttccccagaatgtcacatagctggaagcattcagtatgcaacctttcagattggctttgagtaagacatgcattcctccatgtcttttcaaggcttgataggtatttcattttgttgctgaataatattctactgtatggatgtatcacatttatccatttacattttgaaggacatcttggttgcttccagtttttagcaatatgagtaaagttgctataaatatttgtgtgcaggtttgtgttggatgtaagttctcaagtcattgggggtaaatctcggggactgtgactgctgggttgtatgggaaaactatgtttagttttttctaacaggctgcgaagctgttttccaaagtggttgtaccattttgtattctcaccaggaatgaatgagagtttctgttgtacatcctaaccagcatttgggattaattagttttttggattttagccattctgttaggcgtgtactggatatctcattttaatttgcaatttccatcgtatgtttaatttttaacatacgatgttgagcatcttctcataggctcatttgccatctgtgtatcttctttggtgaagggctgtatgccgttttattactgatttataggaggtctttatatactctggatgagttttttatagtctcctattcactcttttaaagataccttctaatcaattaaacaagttcttaataacaatttgtcagtcctttagtacttttcggatctatttaaataatatttgaaaataagt

SEQ ID NO: 21745 - DNA, 1027 bp, Homo sapiens
tacaggtgcgcaccaccgcacttggctaattttttgtattttcagtagggatggggtttcaccatgttggccaggctggcctccaactcctcgcctcaggtggtccgcccaccttgacctcccaaagtgctggaattacaggtgtgagctgctgtgcccagctatacgtctcacctttagattgacacttcatctgaatgtgatttgaagagggaaaggtcaggatttttttttttttttacacatatagatacccaattaatctgtagtatttgttggaaataccatttttgtcttttttttacatggttgcaaatcaggtgaagaattgttctgtacttactcttttccactgtttttttttttgttgttgttcctggctagtcagtttcacactgtcttaattatgctattctgagtcttggtatctggtatgggaaatataagtcctccatttagtttttaatttttgcgatcatcttgacaattgttggtacttttcaatttcatgtagatttttgaatcagcatataagttttcctaaaaaaacttgctgggatcttgatcaaattatattgactctatagataatgtgggtggaactaatgtctttacaatcttgagtctttgaatctaaacatgatctctcctatcatttctttcctcgttatcgtctcttggtaatgttttgggacttcaagatacaggacttatacaaatattgttaaatttactcctagatatttgatatttcctgaaactattgttgatggtattttaaaaatttcattttctatatgttgcttgttcatagaaatacaattggtttttaaaaattggtattgtatccaaagtcttttacatatttattatttgtaatagtttagctgtagattcttttggaattttctctgtaatcatatttgtaaatatcaacaggtttatttcttcatttccaatctttatcactttcgttactgttttttctagctcattgtactggctaggatctcttctataacggtga

SEQ ID NO: 21746 - DNA, 1049 bp, Homo sapiens
aaccctgtgagtaggtaggacagaaatcattatctttatctttgggtgaagaatcaggctgagagagtttatttggcttgctggagactcacagctcttggcaggaatgagactcaccctcaagtcgtctgactccaagtgctgtatttatcagtgtcttcccagtctctgctgtgtatctgtattttgatatacagatatccacctttcaagatgcatgttttattgaacatggggacagaatctcagaatgggctctccacagttctctgtggcgctctttagctctatttatctaaaagttaatatgtgtgttgttttgatgttcacacaaattgtatgtttgtagaggtgaaaacagaataatggcagcaaacaaaacaagaaattatgctatatatagaaaattagttttttgcactgtcaatggaagcactctactttgcaatatgctgctggatcattttcagaaaggccctgttactttcagatcctgagcctagaattcttagagttctggttaaaggtaaggctatagacacttgaggtgttattttgttataatttaatatgctgtggtttttttaaatttgggtaatgtgtgtgtagtgcatgaatatacatttacccaagtttacagtctttctttagaaatacaaatttacaggtagtaaagcaagtatttcaaagggggtcgatgtttctttaaaaaatgagggagaccggccgggtgcggtggctcacgcctgtgatcccagcactttgggaggccgaggcggatggatcacctgaggttgggagttagagaccagcctgaccaacatggtgaaaccccatctctactaaaaatacaaaattagccaggcgtggtggcacatgcctgtaatctcagcttctcagaaggctgaggcaggagaatcgcttgaacccaggaggtggaggttgcagtgagctgagattgtgccattgcactccagcctgggcaacaagagtgaaactctgtctcaaaaaaaaaagaaaaagagggagacgttaataacattaagcat

SEQ ID NO: 21747 - DNA, 1067 bp, Homo sapiens
gagatgaaagtcagtgaagcacccagcagtttgttgggtgtagacagtattgggggcaccagtgcagggtcccctgaaaccttggaaataggactaaaattgcttcctaagggttaaactctgaaatcatcaacattggattggagtagtaaaaagttacagttaaaatgggtgcatttgttatatgtaaagtatgcctcattaaaattggtttagaaaataacctgtaaacatgtcttcttaaatatacttaggaactaaattaactttttagtttaaggtgttccgtttttaagttttactttcagaacactgaaatctaatttttagttactgctctattgagatttatagtctaaaattcacactggtcactactctgtccaaataaatctcaaacccagaagagtaaaccagaaaaattactgtagtttttaaatcacttaggaatttttcttaaaagtcacataattattgaaggtcacattattttttgagtaaatcacttcccttaaggggtgttacagaatgtttggagaaacaacacatgcatgcccacacacactcaacacaaacaactttcccacggaagacattgttcacatttattgatcatctcagtggcacgtacaaatgaatagtgatggatcaggttctgtaagtgttgagggaagagcagcgttttgtggggtgggtttggggtttattttgtgtgttgagcagtagccgaggtcagcagaggcacactgcattaggaaaagaagcatggcttctgagaaggccaggacaggagacaggatgatgatgggggggatcctggaggggattcggagaaggggaaaatcccaaacactcggagtctggtgaacacacgctgccatccgagggccggggttggacaggagagcagccttgatgcagtcagtacctagcattgcacgctctggtcttttagagatgatcgtatcttcagcaaggtggagacagatgaaaatgccatgcatttctcttgatgatttcccatggccacttagcatcatgagaattaccccaggacagcctctgcc

SEQ ID NO: 21748 - DNA, 1130 bp, Homo sapiens
tggtcttccaatagctgtgcctcacagtgtgtgtgatgatgtgaggggggtgaccagaatcctgctggaccatgcctggattgtgtatgccccagcagggctcctgtccaaaggaggctgagtacattgcagcatcgtcatctagaacaggaagggtatctcttcgcaggcagtgtcgtgactgggccacactctcgccgtgcctcctgcctgcctgccctcctctcctgtctgccctcctctcctgtccccacgtaggcagtgctgtgactgggccacgctgtcaccgtgcctcctgcccccctgtcgtcctctcctgtccccatgcgggcagagccgtgaccgggccacactctcactgtgcctcctgcccgcctgtcctcctctcctgtcgccacacaggcagtgctgtgactgggccacactcaccgtgcctcctgcctgcctgtcctcctctcctgtccccacgcaggcagtcccatgtccaggccacactctcactgtgcctcctgcccgcctgtcctcctctcctgtccccatgcaggcagagccgtgaccgggccacactctcactgtgcctcctgactgtctgtcctcctctttcacacccttgccccctccgagttaaagcagggatttttaccatttgtgtactgtccccaagcttgttatatctcattcacttatttaaccctaaagctgttcagagaagcagggatctgatgttattatgaactcagctgctttctgtttcttagggagtgaaaatttagtaagactagaaatttaagtagccttgcagttaggttctaacctaactcgattttgtctttttgctcattccttcattcatcagatccgtactgcatgctagtgtgcacagggccctgttctaggtgctgaagagccgcagcgcacaagcacttgccttcttggagcgtgcattctagggaggggaggtggacattaagtaaaatgtaaaaggtcaaatgctgagaagtctgcagaaaaatcaagcagagaagggggctaggggttcccagggaggacacaggagattttaatgttaaatggaatggaccggaaagtcctcagtgtaaagacgattttgagcaaaggcctgaagaatc

SEQ ID NO: 21749 - DNA, 1050 bp, Homo sapiens
agagcactagccattgaaccagcacctgagaagggggcaccatgagatcctggaagagcttctgtcaatttctatagcaagcctgctgctcctgcagcttctgtaaaccgtgtagcctaccagtgctgtggtgtcgaaatataaactgcgcaggagtcagcagtaccttggtgaagcttgagctagccggtccaacagtaacttctgttgttttttatagttgacaaacatggcttcatcgttactctcgttttcaaagatagggtcttcatcataagttcctttgtggcaactgacatgattgccgctgcaccggctttctgctgatctaagatgtttcaaaatctgaacataatcacagcaaaagccagtatcttagaggaggtcccgtcatcaggagctagtcaccgcagcgtcagtgccatccttgtttcagcagcttctagtgcctcttgagcattcttgatatccccattctgaattcacgtagtccagctaactatcagtgactgtctctctcctgtgaccagctgagaaaacctggccaggaaatcaacatcatcttcgtggtcaatgctgaaaaacccagcagactgtagtacttgttaaaaagattctactggctgggcgcggtggctcacaactgtaatccccgcactttgggaggccgaggtgggtggatctcctgaggtcaggagttcgagaccagcctggccaacatggtgaaacctgtctctactaaaaatacgaaaattagctgggcatgatgatgcgcacctgtagtcccacctactcgggaagctgaggaaggagaatggcttgaacccaggaggcagaggttgcagtgagccgagatcacactactgcactccagcctgggtgacagagtgagactccatgtctaaataaataaataaataaataaataaaaagattctactagctccatttcatcagcagggtccgttcctcgatttacagtttcagatatccagtcacgtgcttctattaacccagtcctagcagcatatctataaacctatcattggt

SEQ ID NO: 21750 - DNA, 1046 bp, Homo sapiens
tataactaatattttaagaatttggcttcagctgttctaggagaaaaccttaaatgagttaatgaaataagtttggtttcaactttgggcttcagattgttttttctcacttattatgatggataatgagaattggctatacagttccttatcccattttgaaagggctgcaaaaagcatttaatttatggtaacctgttaaaagcatctagatattccatagaaattttcaaagatttcatagtgtgttcttttttccattaacacataggattataaatgcatgcaagtactagagaatgcacaaatcacttcagctaagttttgcagactttaggcagttcatgagtcctagcattcagaaaaaggttacacgttgagtgaaaagcaaagacagtcctttgcctcccggaattaccctgtccagatacaatgaaagtccttttacctgatgttttcagcccagttattaataaaaaggtatataaaattgggaaccaaacaagtgacatctgcatactttggagattcatccacggatcttttgaatatgggtctgctcaggtgataatacattttctactttttaaaatttttgcctgtactcatgttcatcatgcagtttcatctcctgtttctctttctttagcattgcatgagaatgtaggtcactataaagcaatcatagtgcagcatacttttgtcttttgaatctttttctctctgattttgtgtagttgtcttgcctacacctattttgacagcagaatgtttaaagtatcttgtctttaccaagtttttccaaggcattcaatttggtttccattggatgtccaacagattttttattctcatattcatttctagttgccatactatttgatttcattatatcattacagtagctgatgaagctggcataaacgggttttgaatcaagcaaatgtgttttagtaggaatgtattgcaggcatgttagtgtgtacttgagagcattcagaacacataggataggaacacagcacacgggaaaccgcagcatcgtg

SEQ ID NO: 21751 - DNA, 1045 bp, Homo sapiens
tgtcagtccaattaaacctctttcttttgtaaattgcccagtcaagggcatgtctttatcagcagcgtgaaaacggactaatatagcatcccctcctcaattcttaatttccttttgggggctcagcttgtgtagttccctaaaacattgagaaacacccctcaccttaaagcacaggagccaagaacatcagccatgcttcctgtggtcagccacggttttaactgtgtgtaaaatatgtttagaatcagtgctgattacagcagttcaagttgcatgctgaattatttctataaatttgcagtagatattcagaccttttaagctgcagcttcctctctgctcttgtgccccataccaccctacctttctcattctctcgtattctctcagatctgctctcatagctagaggtgtgctgggctggtaagaagacttacagtagttttctatagcatagcaaaattgtatatgtgtttctaagcaaataagtgttttttaaatatacacacatgtagagactctgagatgtaatttatataagttcacctaattatttaaagtatacaattgaatggttttcagtgtatttacagagttgtacaaccatcaccatggtctaattttagaacgtttcatcaccccttaaagaaacgtggagccatgagccatcactccatgttcccccgacccccggcccaccctcaccgctgcccctggcaactgccagtccactttctgtctccgtagatgcatccgttctgggtatttcatagaaatgtgatcatccgtgtggtcttttgtgactggcttttttcattccttagagtatttccaaggctcctccatgctgtagcatgtaccagaactttgtaccttcttattactgaacaatattcccttataccacattttcatttgtgcatttatcggttgatgggcatttgggctgtttccattttttggctatgggtaattctcctgtggacatttctgtacaaggcttctgttttcacttctcttgggttgctgggttacatggtga

SEQ ID NO: 21752 - DNA, 1050 bp, Homo sapiens
tggttacatgagtaagttctgtagtggtgatttgtgagattttcgtgcacccatcacctgagcagtgtacactgcaccctatttatagtcttttatccctcacccccttcccattctttccccccgagtccccaaagtccattgtgtcattcttatgcctttgtatcctcatagcttagctcccacttatgagtgagaacatgcgatgtttggttttccattcctgtgttacttcacttagaataatggccttcaatttcatccaggtggttgcagatgctattaattcattcctttttatggctgagtagtattccattgtgtgtgtgtgtgtgtgtgtgtgtgtgtgtgtgtgtgtatttatgtatataaataccacagtttctttatccactcgtcgatttatggacatttggtttggttccctgtttttgcagttgcgaattgtgctgccataaacatgcgtgtgcaagtgtctttttcatacaatgaaaaagattctacttattttcctctgggtagagatacccagtagtgggactgctggatcaaatggtagttctatttttagttctttaaggaatctctacactgttttccatagtggctgtactagtttacattcccactagcagtgtggaagtattccctgttcaccacatccatgctagcatgtactatttttttttttattttttgattatggccattcttgcgtgagtaaaatggtatcacattgtggttttgatttgcattttcctgatcattagtgatgttgagcattttttcatacgtttgctggccatttatatatcttcttttgagaattgtctgttcatgtccttagctcactttttgatgggattgtttgttttttttcttactgattagtttgaattcgttgtagattctggatattagtccttttcagatgtatagatagtgaagattttctcccactctgtgggttgtctgtttagtctgctgactgttccttttgccattaaaaagctctttagtgtaatgaagtcccagctatttatctttgtt

SEQ ID NO: 21753 - DNA, 1031 bp, Homo sapiens
ttttgttttggtgtcagggtaatactggccttagtggaatgagttaagaagtgttctttcttctatgttttggaagagtttgtgaagaattattattaattctttgttaagcgtttgatagaattcgcccatgaaaccctgtgggactggactttactctgatttttaaaaaattactaattcagtttctttacttgttacaggattattcagattatctatttctttccaagtcagttttggtagtttgtgtctttttcataatttgtccactttatctaggttatctaatccactttatctaggttatctaatctgcggccgtgcagttgtttttaggatttccttacagtcctttttatttctgtcaggttggtagtaatgtaacctcctttgttcctgattttagtaattgaactcttctctctttttttcttggtcagtctagcttaaaggtttgtcaatcttgttgatcttttaaaataaccagcttttggttttaatgatttttctcacttgtttttctgttctttatttcatttattggtttctgtttttattgttttcttccttccacttattttctgttcagtttagtcttctttttgtagtttaaggtggaaagttagattatttacttgagggtcttttttagtacaggtgttcataactacaaatttccatctaagtactgcttttgctgtatttcatgaggtttggccatacatctcaaaattattttctaatttcccttgtgatatcttctttgattcattgcttatttatttttagtttttatttttatttttattttatttttgtagagacagggtcttgctttgttacccaggctggagtgcagtgacatgattatagttcactatgatgatcactgtaactttgaacccctgggctcaagcagttctcttgcctcagcctcccaggtagctagcaatacaggcatacaccaccacacctgggtaatttttaaattttgttgtagagacaggctgtgtctgttgctgtgttgc

SEQ ID NO: 21754 - DNA, 1026 bp, Homo sapiens
gataatacactgtttattataattacaatattttaaatcttaggtatgatggaagtcctaagtgttaatatatgcagcatatcccagcttgaacactggcagctgggtgcttgtcagtacagcatggtgggttgctcatggcatcgtattgactgtgtattaacacagaatattctgttgggctgtgagctgattgtttagaatgtaaatgaagctgctgatggatctggtgactgatggcttaaattccaattaatcaattacttcatcactttcttaattcagatcaaatatctccagagtgcacacaattcttttagtggtattaagagaaattaatgctttagaactaattttcatcaatctcttataaatgtcaatatctttttcacttgtctcctaagtgatgacattatactttaagtgtttgggacatattatagtacctcagctgtctgtcacttgttagtgggacggggtggtggttaaatgacactgtactcatccacatggtctctgtagtgctattcgtcttgctaccagcttgaaaatttcatgcagagtcattaaatcgtatgaatgatttaaaaattaagtttaatggcagacaatctggtattataaatgcaaagtcaatgcctatctttcttttgttggccgtataccctagccgatctctttcagagctgttggatttgtgagctgttgtaggaagtctactaatattacagggtaacttattatgcgatatgacagactcgtgctccgacggtgtcctgtcagtttcttcagcacacttgatgcaccctcctatgtgacacatacacgagttgatcttaattgtcattaagcctgttgactcttgtcagttgtataaaataaaatcaagtattcataagcagtctgtaataggatataagcaggccaacttagtaatacattttttgctgagccttaactggcgtcagttttagcgagtgctttctgttaaaaaattattagatgcagttcttgtgaaataagtca

SEQ ID NO: 21755 - DNA, 1054 bp, Homo sapiens
ccatattacagggtacttaaaaggattaaaaataaaattggtgactgggcatggtggctcatgcctgtaatcccagcactttgggaggccgaggcaggcggatcacgaggtcaggagatcgggaccatcctggctaacatggtgaaaccccgtctctactaaaaatacaaaaaaaaaattagccagacatggtggcgggcgcctgtagtcccagctactcaggaggctgcggcaggagaatggtgtgaacccgggaggtggagtttgcagtgagctgagatcgcgccactgcactccaggctgggtgacagagcgagactccatctcaaaaaataaaataaaataaaattggtgaggtagttacatagatagggcagatttaggcactgagttgctagaagctataattagttgaaaatgcatcagctaggagagaaaagcatttaatatttgtgtagagtaagagaccacaagaatgctcagtagcatgtggaaatacttttaggaggttcagagggggaaatgagggtattatggatgtggatttgcatggacattttagttgtagaatgttctgtggaaagggtgggctggactaagccatgtgaagatctgttcttacataatctactttaatgatttctccaaatttgagaaacaactagctaccatgatacgagttcccagtatatgacactcatgacaggctttcacgtattttccctgaattttacaacataactccagggtaagtcttatacagattaaaaaactgaggtctaacaaggtcaagttatttgaaagggagcattgagtagtcagttacagggctggtgttcagcttctgactgtctggctctgcctactctgttatgccagtttgggatggaagcctccagagcaggcattctcacctctacctagcactgttggtgctttgggcccaatatgtctctgctgtggtgggcaggtctgtcttctgcactgttgggtgttgagaatattcttgtcctcattccaccagaagccagtagcattctcctaacttcctttc

SEQ ID NO: 21756 - DNA, 1033 bp, Homo sapiens
tggaagattggcaagaaatactcaacatgagagtcttgaaacaaaatcatgaaatggtttgaaacattgacagctcaagtgtgtgttattaaatacaaggatgtctgaaggtacacactaaaagggcccagcatgcacgtgagaaaactccaagacgtgtaactgctgtcatattttacatatacagggaaaaatcctttgatctccctgggaaaatgaccagctccccacagttggaaggggccaggttggtgtcagtgttctcagcatacggagccatacaagagcagcacagcctttccaggaggctcaggggaagaatgtgtgagtggagtgttttgctccttcaaaactgtcctgcaagtgccaattctgtggagagcagtctcaagcatacagagttcaggtgtgttgtacacatgagccttttgtgaataatcttacagaggattagctctgcctggctgatagatgacctgggtggaagttttatggtgagcactgaagatctaacagacgtaagaataaaacagtggagggaggatgggtggaagatggtacagtgtatatgaattttatacgcttcctctaataatcagctgaaaagcaggaagaggaggagaaaatagaaggagctcattggttgctacgtgggtgttaaggcagtcagagactattgaaagctgacgagctcaatagtagctgtcaaagcaaggagagtaggatgaaggcaggctactgggacagtggcaaaatggtagtgaccagaaaatacacacctcaccaaaaaataaatttggttttaaaaattagacaacagttgatcaattcatatggctaaagatgcatagtatgcaggctctttcacacagaaaattaattggatcagaaagcctaaaggaaagatatatcaagcaaatacaaataaaaaggaaacaggagttgcagtcttggtacttaacaagaataccagtatagaatcgagaaagcatttagaatgaggtgaagaaagatgctataagataataaagtc

SEQ ID NO: 21757 - DNA, 1126 bp, Homo sapiens
aagtcactggaaatgtgttcaggaaatgtgaacctgacttcagctccacaagcaggctcactggcctgcgcctgctggccctgccttccctgaggcgcatccttgcctccatagttttactgaggttagtgttaccattggatagaaaactaagcttttctaaccttgaaaagctcctgcttatcctccttgcggcctttagccggctcctgtttgcctggtcagctttgttactagcacttaacataatcactgcccgcttggttctgggggacttgccgcttgtctttgccattcctttcttcttagccttttggagacattttgttttaaggtgtagctcttaaattgcataaatcagtatttatttatttttaaactaaaagtgctagcctttaataggaatatttcttcctttcacaatcctggcataggtgttcagccttgctcctgcattcttgcgcgttcatttatatttatatgcacacattcatctattctatgtggcagctctgtgtgtgtgtgtgtgtctgtgtgtgtgtgtacactgtgtatatgtttgtactgctatacagaatgtattttactttaaaatttttaaattatttgaaaattgcaaaactctcttaaaatttgccactgcttgactttatccaatacatatttaaaccttgatttcaaatatcaaagtcaagaaccaaacaataacgtgtgactcctcttaaatatgaggattttaatcttcatttattctttttttctcctttgtacttcctagtatttgatcatttaatctgtacctgcaaaccctaattttatagttatttccttttaatatggaaatcttaactttcaaccagcaatgatggctctcctttgaggttggcgcccatgtttgcttaacaacatggagtcattaatctcggtgctcacctttccccattcctgagtttccaattttgattcattctcaaccaaccagagtacttttcaaacagtgttcttgagcttgcctggggaatgaagccccatttgtccccagagttcaggcacaggcccctctgtgtatttcacagtgacttcccacatgaaagtcggaagagtcctgagtgtgagggaagccctg

SEQ ID NO: 21758 - DNA, 1035 bp, Homo sapiens
gtggaacagccctgctatttagtaaccatttgcaggaatgtccttagcttttcctgagcctttcctgcctgtcaaacactcctctgaacatttggcaggcagcagttcacatagtcttcagcacagctgataaaggtttcgtctctagcccatttgttaggaggcactggaggcatacaggtgggtaacttgtaggcgtcagcatggccagccagcactcctcgccagggagctgcagccgtcctgcaccaagaggccaagtggctgctgtgtccggccttgagtgtcatcttgcaggggagctttgagtcatcttcgcttagtgcttgtgtctttgattagtttgtattttaaatagcgaaagatggtgaggtgctggtttaaaaagctgtgtaattgtcaaaggcttactttctaactagtacatagaatttttaagatatgaactctatggacagataagtcaaagtatgattatttaatgttctttaacttacatacagacttccttcattgactgtgattcctaaagactatttttcgagtgtgtacttattaatagttgagctatgtgaattgccattttgctgggtcaaaaatgtttgaatatcagcagtttcactctgtggtataagtacatcctgtctgctttcttgacaggattaaattagacacatgtgaacatttttgagttgctgtataggaagaactgcgctgccagcagccgcatgagcagagcctgcctcctaaagtgatgtgatgtgagctcatgttctgacatggccgctctgtaggtttccaggcctacagggttccagccttctgctccactccactgcctccaggcaaggttctgcagaattgtccccagtcagatgactcatcatatgtgctttaattgcagtcttactacacggacttaaattatgaaattttaaaaatgactaaaaagtccagggcatagttagcagataccattttatttgtcatatcatatcccatttgttctgttttccagtttagctcctgaaacac

SEQ ID NO: 21759 - DNA, 1029 bp, Homo sapiens
ccatccaccagggggtggaagagctgcattgtgtccatagtgtgagacgctggcctgcagcacagagaaagcagaggacacgctcggcaaggtgggcgagtcctgacaccgctggcccgaagagacccactcgcagagagcggagaccacccagagagaatagccaggtgttagcctgcggggaacagccatttatgtgagactcaacggcagcgagggaggcaggggtctcccacctggcgcatcacaggcctcgtccttgggggtgacggagatgctccgtgtcatggtcacacggcggttccatgacacttgtcaaaattcatcacatgctgaaagttatacctcaagaaagtaggtttatgaaaaggaggcagcaatggggtttttgttgttaaaggttgaagagatagggaggggttgttcaaagaaagttaacaaaagtaattaaagatttcgagggaagtacaacagtgttgtacaagtttaacgtaataaagaaattaaagattgaatttctggatagagttctctaagcatgtagatatttagtgcccagcagtaactcatcaagaaaacagaatgatgtgaaatagactaaaagtaccttagaagaaaatgtttcatatagaacctacaatagttttaaaaatagaacggtctgcatttagtgaccgtggaatctcagtcatattaaaacagaatataacctttaggtatccgcatgtttcaaggctaaaatataacgtggtgtcatgggtgtttctggttctctgccacggggtaactttcccaacttgagataactatgagagtgtgttctcataggtgacaatgtcatttaacaacaacaaaaaaaaccccagccaagtgcagtggctcatgcctgtaatcccagcactttgggaggccgagttgggaagatttcttgagactaggagtgtgagaccagcctgggaaacatggtgagaccctatctctacaggagaacattagctgggcatggtggtacacacccgcggtcctagc

SEQ ID NO: 21760 - DNA, 1044 bp, Homo sapiens
agagagcaatcaagctgcctttcttcccgataccgcatcagcgcctgttgaatggaattcctctgccgtcatctgtcggcgctggagcatcctgagtttccggacgggcccggccctgcgagggcgcgatttcctgcgctcccacaaggtgtcgctggcgtccgctcggtgatgtgggcgcgtctggtcgctgccggaggctgcctgggagtttcccttctgtgccccgagttggtgtctcctggaagtcacgtcctggctggggctgacttggatttcacctgtcttttcgcttctgccgcagcagtttgcgttaggggcattgggacggtagaaatcttaagtccacagccagcagctcaggagatggggtcacacactcaggcctcgggggtggaggccaagggcaaatcagaggctgctcccccgtgcacctttaaaagtaaaccacccacctgtgaaactgactaatagaataataacattgtcgataacctcagaaaagctgaacccctgagcctttgggaataacactgcagtacagctttcagatacagaaacgaccagccttcgatcagttggatcctgattgggagacagttgaagatttgtctcaagaaatcgagatgtattaagggcaggtagagactggaggaggaaggggtcttttcctccgtaaacgaaaatcaccccctgcgggggctgctgctgtgagggttaaatgagatgcacagggcgttcccagcagacgacgggcatgcagcaaggcaatcagaacggggtctgtgacacggattttctgctaaagaaaataatagcccactaaagggtcattagatcggcattagatctagttccagctctagttcaggagccagctcgggtcaggcgaggggtggagaggctgtgtttccacctgcttgcggcgtaacctcatcgctttttaggttctggacctgtgtcagccctagaaattctgagccggccgtacagccccagaggccttcaggagggcgcccagcctggggagagcattctgcatgt

SEQ ID NO: 21761 - DNA, 1050 bp, Homo sapiens
ttaacagctgtatgttttaaaagaaacttaagagcacatgtgaaaaattgtgtacttcaagtttactggttgttttttgtttgttttttgtttttttgagacagtctcgctctgtcacccagattggagtgcagtggctcgatctcagctcattgcagcctccgcctcccaggttcaagcgattctcatgcctcagtctcccgagtatctaggactacaggcgccggccactatgcctggctaatgtttttgtattttttttagtagagacgggatttcaccatgttgtccaggctggtcttgaactcctgacctcaggtgatccgcccaccgtggcctcccaaagtgctgggattacaggcgtgagccaccgcgcccggcctgctgtttcatttttaatctcttaaatggagtttgctttaatatatatattttctcatcataaaggaacttcatactcatcgtggacatttggacaatataaaaaaggaaataaaacctagtgtagtctcaccaactgagacataaccactgctggcattgggcatgcgtcctgctccatttgctgctgtgtgtggatgttcacgcagacacacacacacacacagagtacattatattgtggatatatgtgtttgtgtgtgtgtgtgtgtgtgtgtatatgtatgtgtatatatatatatttatttatttatttatttttttttttttgagacagggtcttgctgtgtcatccaggctggagtccagtggcttgatcatggctcactgcagccttgacctcccaggctgaagcagttctcatgcctcagcctcgccagtagctggggacacaagtgtgccctattctgcccagctaatttttaaatttttgtagagatggggcctcgcggtgttgcccaggctggtcctgaactcctgggctcaagcaatcctcccacctgggcctcccaaagtgctgggatgacaggtgtgagccaccgtgcccgcctgtgcatattttgtgaacaaaatgggatgtgctgtgtctacggtttttgtactttctat

SEQ ID NO: 21762 - DNA, 1033 bp, Homo sapiens
attttcttcccactagagagatgtgatgagcaaagatttccgctcagaactcctaacatccaagtatgagttggctttgcaagccgaaggggagcatggtgtctgtttttcttcagagaatttctgactgtttgctaaggcacgtttccataagaaggactggagagaagcaggccttctaaactgctggagagcatcttgaatcagctctcccccaaagcaacaaaaatacagcatcactgtcaaatcaaccaccaaatctggcagtcagccaagaggacagaacaaacacagatgcattcactcaaggaagagcggccccagggggaagaacaggatggcagcgtcttcacttggggccgctccagccccgaggcgcacagccgtggaaagccggtgacagcacagaccgtggaggagctgggctctgttgaaaaccccatcccaggatgcagtccgcatttggactggtcatggagctcctggaaaaggcccgttccgaggcacaatcaccgttggctgcagtcgtgatcatgggagctgccccaaggctgcgatcgacattggagcaaacaagagcctggccagaccaggtgaccccggggactttgaaaaaccttggagattcccgggcacatacgaaaatggatgtgtgaaggcttcggtacagagagggccccagccactcttctctggctgacctcaaaaccccaccaagcagaagtgagaggtaaagctgcctgtggctgggaggcaggtcctgacacacaggttttgtgattagagggaggagactggcttcgtggctcaaggatttaaggaaacttcctgtctggtaacagcagaccattaaactctgctaaccagagggtgatccctaggcagcctggcttaaagacagaaacaagatttaaaaacagagagaacagaaaactcagtgtccacattctgcaaggaatacagcatctagataattagtccaggaaagtcatgagtcacataagcaacaaccaaggagaggggaagccgagaa

SEQ ID NO: 21763 - DNA, 1030 bp, Homo sapiens
ctgcgaagcctcctaccctggagccgctcaggcccagcccacagccactctcaccactgcggtgatcccagggactgggaacaggtctctttctgtaacaccagggcttagtgctttggtgctactcttacttctttatttgacttaattaattccaactctccagccagttgacaaagctcctggacacttctgagaacagcagggcggaacctggcctatgggattgctgtgggccagtcagtgaacgggccagcaccacctagagcagaaggatgtggagaccccccgtctaggaagtcagggtctgttctgtactgtcattctaatcagtagaagcacgatggcaggacagatacgtgcactgaagtgatactgctgagatttggtttcgaaattatgtgataatttaaagcagccacacgatcagtactgcgaacagcacctgttctttagacgctgcttttcatactgttgaataaaatatccaggggggtggctcgcactgtagtcccagtgctttgggaggtggacccgcaaggatctctcgagctcaggagttcaaggctgcagtgagctgtgatcgcacccctgcgcttcatcctgggccacagggtgagagcctgtctcaaaaaaaaatttttcttaataatttaaaataaaatcacaaacctttgacttattttttcttcagtatttttatttatttttttttttttgagacggaatcttgctccatcgtccaggctggagtgcagtggtgcaatcttggctcactgcaacctccgcctcccaggttcaagcaattctcatgcctcagcctcttgagcagctggaattacaggcacgtgccaccacgcctggctaatctgtgtatttttagcagagatggggtttcatcatgttgctgaggttggtctcaagctcctgtcctcattgtcttaaactacataaagtggttaaagattagatacaaaactggtgttttaataattcagccttgcttgaagtgagctaggaatttctaaga

SEQ ID NO: 21764 - DNA, 1091 bp, Homo sapiens
cataccctgtcattgtggggttttgctgggttctgtgtgtgttaaacactttcctactttctggcactacaagatactccaggctcatcttgtgtgtttcgtaccacagccctaaaatcagccatttctccaagaagccctcgttccttttattggagagagagattagaaaccatgggtgctgggtgtgttcattgcttctggggtgtctgtcttttgggccatctcatctgacgaaaggatatatgtgtttctactaacccttgtgtaaatatgcacctataaacatttccgtgtatagccatctgtctccaactccagacgtactgtgtggatcattctagcctcctctccttgctgatctgtaagtcgcactccaatggtgagcgtggctcccaccatccatttgcttaattgttcagtctcagtctatgcctataacagtatctgaatcctttacttgaacttccatgggaaacatctttatcaattagcgtatagtgtttatgtgcagtttggtaggtgtctttttaagatcctctctctaaccttgggactagaagtagaatttaggtaaaaattatgaggttgaattaaaaccatcttcagcctcttccccacaacccatgttgttatcaattaaattctgaaattttttaagatgtccagtaatgtaacatctaagtttagccccctataaacagttatggtatcataacctcttaaattagcttatgtaactttttgactttgccatcactaacataatgcttattttctccccaaagaaaaaaggtttggtatgaaagtccttccttgggttctcactcggtgagtataagccatgagccactttataatcttgatgggagtgagggtttaaaagttggcaaaactcttacctggaggtctttccatttctgtattggaggggatagtgtctatgtggatgcgactggatgccattggcaacatggagttttgatcttttcaaaaaaaaatgtactgacattaatgttttctggaaagtcatatcttttatcaaattataatatggtaatatccattcagtttttagtgtgtgtgtactg

SEQ ID NO: 21765 - DNA, 1048 bp, Homo sapiens
taatgtcccagcccctgtgagctgtcaggttctaaattcagaattctctcaattctgtcaggttctgcactacgagtcagtgtcatccctccaagccctggctctctgccagtgcagcagggctgtgagaatcaagacggcacagggaaggcatctgtcccagcatttgcacatgacaggtgcccacggtgcaggagtagaatctgtggaagcagcagtggctttagttgctgtgccctgccacctcctccccaaaaaggagaagtgtccaagggatagcagacccgtagcactgagcggcctgccgtgctgaccactggatccaggccacgtgctgcagacagcggctgtgggcgagtgatgaggccactacccagaaagctgcatgtgcactgtgtggggtaaggacagtaggagatgctgctgcaagatgctgactcccttgtttttcttttcatttgtgctctgggactaagctgtgtataagtcatcaaatggcagaagcaagatttttcttttgagatctaggaaattatttgtttatactctacactcttatttcctatatcaggatggggaggccactacctcaggccagttaaactaagaagaaagaatttaaggcaatttgtaaggatagacaaaaccccacatgatggtatgagtaggagagagaaaaaaaaaagggagccagaaattaggttacaaagtgtacaccacacataaaggctgatgcctctgttacaccgtgagccaaatgtttatctctagggtttctggtagccagttgcggggtgtccagtgaaggggtgtacatgtctgtggttaatcatataggtcaggataatgaggtgatactgcagtgacaaatggcaaatctccctggcttacaacaaccagtttgcctcttattcttctaggggaccatcatgggctgaggtcaggccaaggccttttgtatctggtgttactggaacatggctatgtgaattcatttatgtacaagagacctccccatcctgatgtaggaaatgaatggtgatgattt

SEQ ID NO: 21766 - DNA, 1078 bp, Homo sapiens
taggaatagaagtacagttttcttccccactccttttgtccagaaggaaaacctggttttacatcagaaacttgaggtactttgaaaatttgccagctgccttgaaggagagagggcttgagtgtattttgggggaagaatgaggggacaacagggcagggagaagggacagagctagaggaaggacaggcctgtgccacccaggccagggtaaggggagcagagaccttttggttcctggtttgtgacacaggaagggagggaactggggaggacaggtcatgatcagtgtttcctgattaaaaattttttatttttatttttaattatcatgggcacagagtaggtgtatatatttgtggggtacatgagatgttttgatacagacatgcaatgtgaaaaagcacatcatggagactggggcacccatcccctcaagcatttatcctttgtgccacaaacaatccgattatattgttttagttatttttaaatatgcaattaaattgttattgactatagtcacccttctgtgctgctgctctactgtggcctcaaagatcataaatgctgtgggtgctggcaagatactgaaataaattaattctgtatttctaaaaataatttcatactttctttttacagaaggaatatatattctttgttgaaaaatgttaaaacagataccaatagaatagaggaaacaaaagccccatgtagtctcagctaccagagacaccactgttaaattttggtgtagcatcaggtgcggtggcacgtgctgttagtactcaggagactgaggcaggaggatcactggagtctgggagtttgaggctgcaagcacattgattgcacctgtgaatagtcactgcactccatcctgggcgacagagtgaggccctgtctcaaaaaaaagatggtaacatcagaatgttaaccgagcatgaggtccccatgcccacatgggcagcacacctgggaagccagccctgatgtcagttaatcctcaggcctctttgaggtgtgccatttgccctagggatgtcctgtatggcaaagggcctgttccagaggc

SEQ ID NO: 21767 - DNA, 1034 bp, Homo sapiens
gaacatagttttggaagttctagttagagcatccaggcaagaaaaagaaataaaaggcatctagccaggcacagtggctcatgcctgtcatcccagcagattgggaggctgaggtgggtggattgcttgagcccaggagtttgagaccaacctgggcaacatgatgaaaccctgtctgtacaaaaaaatataaaaattactcgggcatggtggcatgtgcctgtagtcccaactactcgggtggctgaggtgggaaggtcacttgagcccaggaggttgaggctgcagtgagccatgagtgtgctactgcactccagcctgaatgacaaagcaagaccttgtctcaaaaaacaaaacaaaacaaaaaaaaaaccccacaaaatccaaatgggaaaagagaaagttaaattatctgtttgctgatgatacgatcttatatctagaaaatcctgaagactcttccaaaggactcctagatttgataaattatttcagcaaagtttcaggatagaaaatcaatgaacaaaaataagtagtagttctatacaccgataatgatcaagctgagaaccaaatcaagaactcaattccatttacaataactacaaacaaacaaaatcctaggagtacatttgaccaaggaagtgaaagacctttacaaggagaacttcaaaacactggtgaaagaaatcatagatgacacaaacaaatggaaaaatgtctcatgcccatggcttggaaaaatcagtatcattaaaatgaccatactgcctaaagcaatctacagatacagtgcaattcctatcaaattaccaatgtcatttttcacagaattagaaaaaaaaatcctaaaattcatatggaaccataaaagagcccaaatagccaaaacatcctaagcaaaaagaacaaagcaggaggcatcacgttacctgacttcaaattatactacaaggctatagtaaccaaaacagcatggtactggtataaaaatggaaacacagatcaatggaacagaataaagaacccagata

SEQ ID NO: 21768 - DNA, 1033 bp, Homo sapiens
attcagttctgtgtttcccctgtacccaagatgagatttctaatacagtgatgtgtttaaaattaaccatatctccagggcagcatccagctgtgagccttggtgaagaaggtcctggagacgggagtgaatggggtggggccatccttggacacacaggaggttcctgggccctggggatgtgtccgtgggtgctgaggagatgaggggtgcatgctgtctgggttcttttctctccgctccatctcttgcaaggtgaggaggggtctgctgttgattcctgtcctgcctgtggtgctgaagctcccctcaagctgggctttctcagcagggagagtttcttcattgcttgtagaagtttatgcttccctgctttagtctgggcaaattgctccccaaaggacatgagagctgaggctgtgtttttagagatagggagcagctacagggacttagcttcttaatgaattaattcacaaatctcagcagctcctggcgataagatatgcagagctgatggcagggaggacacgaggtggctcaaagggaactaagctttgcgtgtgaatttagggtgaggctaagagccctccaggcaggcagaggagggtgctggagggaggagaggccggtataggaccttcgccttgaagaaagcacccaggtaaggctgggcagtgttgggagagagctttagttgatctttttgtttttggatgttttctgatggtcctctatggctttggaaaatggagagaagacagagaggcgtaggcactgaaggctgcagctgtgattgaggatcacgacgcctgttggggctgctcacctgcctaggcctgggtgaggaggtgctggggcctggctgcacacacgttcctgccccagaactcagttgggggctcggagcaggagaagctgcacacggtgagtgtgtggggcgcagaagcccgtctgcagaggttccacaccatgcagaaagtggccagtgaaagacaaggaggtgttcccgggagtggaagggctggggcct

SEQ ID NO: 21769 - DNA, 1048 bp, Homo sapiens
cttgggatggaatgcactcacttggtcgtggtgtataattgttttaatacactgttgaatttggtttgctagtatgttgttaaggatttttcatctgtgttcataaggaatattggtttttaattttcttgtaatgtttttatttggccctcgtatcagggaaatgctgtcttcaagaatgagttagaagttgttccctcctctttttttttgttttttgttttttgttttttgagagggagttgcgttcttattgcccaggctggagtgcagtggcgcaatcttggctcaccgcaacctccgcctcacaggccaagcgattatcctgcctcagcctcccgagtagctgagattcaggcatgcgccaccacacccagctaatttttctatttttagtagagacgggtttttccttgttggtcaggctggtctcgaactcccgacctcaggtgatctgcccgcctcggcctcccaaagtgctgggattacaggcctgagccactgtgcctggcccctcctcttctatttttttgtggcgagtttgagaaaaattgatgttagttctttctttaattttttttttctttttttggagacagagtctcgctctgtcgcccaggctggagtgcagtggcatgatctcagctcactgcaacctccacctcccaggttcaagccattctcctgcctcagcctcccgagtagctgggattacaggcgtgcatcaccatgcccagctaatttttgtatttttagtagaggtggggtttcaccatgttggccaggctggtctcagactcctgacctcaaatgatttacccacctcggtgtcccaaagagctgggattacaggcatgagccagcacgctcagccttttaagtattttttaggattcaccagtgaagccacctgtacctgtacttttctctgttaggaagtttttgatgaattcagtctcttgttacagaaatttgaaatttttctatttcttcatgggtatgaatcagttttaggtaattagtgtctttctaggaatttgtccattac

SEQ ID NO: 21770 - DNA, 1007 bp, Homo sapiens
ggactagagcttccaggccctccgcgggtactcaaccctccaggaacctccatgagtccatctatccagaagaccaccaaacccaatcctgttgggtttttgtggtggcttccttatgcaggcatgattgattaaatcatcttaaccttcagcccttctccctgccctggaagttagctgaaagtcccccaccctctaaacttgccttggtgataagcccccatcctgaagctacctaggggctgccaaccaccagtcatctcattagcacacaaaaagacaaaaattaacataactcttaattctagatatttcagggtaatggtttatgcgtgagtcttattttcttgtttctgtgtctattttctaatttttctataaaaacttctatattgcttgaattttcaaaaatttcataatatataggcccaactacaagttaatctgacttgggagattccaagggttttaggagttgtatgtcaggaaatagggatgaagaccaaatgtatatttcagagtatcatacatggcatgtatttttctatttttaaacctttaatccataatgactttatatttaaagttttaataggcagcatgtaattggtcttgctttgttacccaacgtgttagcctatgccttttgagtatctggacccaggggttggcaaactatagcccatgggtcaagttgggcttgctgttattgtaaatacagtttattggcgccaggtgcaatggtaatcccagcactttgggaggctgaagtgggagtattgcttgaggccaggagttttagaccagccgggacaacatagcaagactctgtctttaaaataataaataggccgggggcggtggctcacgcctgtaatcccagcactttgggaggccgaggtgggcggatcacgaggtcaggagatcgagaccattctggctaacatggtgcaaccccatctctactaaaaatacaaaaaattagccaggcttggtggcgggtgcct

SEQ ID NO: 21771 - DNA, 1034 bp, Homo sapiens
ggaagagatttttgctaggtgtggaatgctatttttttcccctttttatattttaaagatttcactcttgtcttctggctggcattttttccaacaatatgttttctgtcatttttgttcctctctgtatttttaatactttgactataatgtgccttggtttggttttctttgtgtgtcttttgcttagagtctggtgagcttcttgattttgtgggtttatagttctcatcagatttggaaaattttgtggcatcatttcttcaactagtttttcttcccctcacccgtttgtccctgatactcaattacacacacagtagttcccccgtatcctcagttttgctctccacagtcaaccacggtttgaaaatattatatggaaaattccagaaataaacaattcatctgttttaagttccatggcattctgagttgtcttcatcttgtcacgtgaggcgccacacaggcatcgtgtcatcgcatgccaccacaagaagggtgagcacaggatgtaagatactttgagagaccacattcacaaaacttttattactgtatattgttacaattgttctagtttattattgttgttaatatcttcgtgtaccaacttcctgtaccaaatctaatttataagttgtattttattgtaggtatgtctgtataggaaaaaacgtagtatatgtagcgtttggcactgtccacagtgtcagcatccactggggtcttggaacatgtcctttgcagataaggggggactcctgtatattaggctccttgatactgtcccatagctcattgatgccgttgttggggttttttcagtttttttttttttttttttttaaccattccctctttcattttgtgtatttctcttgctttatcttcagatttaccagtcttttcttcggcagcatctaatctgctcttaatcccatgcagtatatttttcatgttagtgcatttttcattcatggaagtgcaatttaccatccatctttcactttctttcacttctctcgttgcgt

SEQ ID NO: 21772 - DNA, 1031 bp, Homo sapiens
ccatataatgtggcatttttatcttatatctgataattgttctatcataatatgaagttttcattttttttttttttttgagagggagtctcactctgtcacccaggctggagtgcagtggcatgatcttggctcaccgcagcctccgcctcttgggttcaagcgattctcatgcctcagcctcctgagttgctgggattacaggcgcctaccaccatgcctggctaatttttgtatttttagtagagacaggctttcaccatgttggccaggctggtctcaaactcctgacctcaggtgatccacctacctcagcctcccaaagtgctgggattacaggcatgagccaccatgcccagccagttttcatcttttttaagaggaaaacaataactaaattttcttttacgttaaacattcttctatttctgttatccatttgtaattcaaaaaatagtgtatgttttgttcacgacagaacatcagataccaaacctacgagaataattcggaagagaacagcacccgaggacttcctagggaaaggacccaccaaaaaaattctgatgggaaagtaggtgaatttgtcttcatgtgggatgttcttagttatttttatattttgaagatgttactttaagaactctccatccaaaatatagtatgagattgtgtttggtacacacatagatagccaaagcaaaccgcactgtctatactgcccattgtgtgggttcatgcaccagataaaccttcattttgtctccagcttccaaaatctgtgtctctaggctgtgccattttttccgtttcagacagtagaattgtttagattccagttgttgcaaggtaccataatccttgagttctcttaccttccagttaactattcattgctttatattgtgctggaatatttttagaaaaaactaaagattatatcattatcattagtcatgattaatgattatatgctcatatagagaataattttaggtattttaaataccaaaaattattgagaaaagtaa

SEQ ID NO: 21773 - DNA, 1024 bp, Homo sapiens
taaagaagaactcataatggaaattccaaatttgtaataaatgtatatcaaaattgtaattataggaagaattacatgtcagaagtgtgggttgcaaataaagggagatgcaaagggacagttaaagcttcatatgcattaatggaaaaaatgtcaagaaagagtgacaaattgagcgttcaactcaagaagttagaaaaagtacaaaataaagctcaagaaaatggaagtaataatagcacaacttagtgaaataaaacaaactaaaacatatcagcaaaactgaaagtgtttctttgaaaagaaaatgttataaaaagaaatccagagcttgtgcaaggaaaatgaaaagataccagcaaacaatattaacagtaaaaattgacatagagatatttcaaatgattaagaggatattatgaacaactacgaataaattttgaagcctaataaaatgggaattgtttagaaaattttaatgaccgaaatagactctcaaaaaaaaaaaaaaatagaaaaccaaataaatgaacaaccattaaggaaataccagccagaatgacactttttgaatgacatcaggcccagaggtttttaaggcatatcttatcaacacttcaaagaataaataatttctaccataaatgaaaattttcagaagttagaaaaagagaagccccccagttcattatgtaagattataacttaaaatcccaataaggacagaacaaggaaaaatgtgtatgtatattcatctcacatataaatagaatgttttctatttatagaaataaaaaatgtcttacaaactcacaaattaagtaatttttttaaaaatagagacatacagtttatcctaggaatgtaagtatggttcatcagaaagatgaatataatgccagattaacaaccgattggctgggcgtattggcttacgcctgtaatcccagcactttgggaggccaaggccggaggattgcttgagcccaggagttcaagaccagcctgggcaacacagcaagac

SEQ ID NO: 21774 - DNA, 1055 bp, Homo sapiens
gccaagcaggataaagaaagataaatctactcttcattacatcatgccataactgtgggcattcagagaaaacctaaaagccactaagggataagaaagacaaatatactgggaaggcacagcagtttgactgttagcagatttctaacatatcaaccattaataccagaagacagtagagaaatattaaagtgctgaaagaaaaatgacattcaatctagaattttataccgagttaaatatactcaagactgtcgatgaaagaaagacatttttatttaaagaccaggataacttaccactcagtgaccctcattttgaaaaaaactactcaaggatgttcttcaggaggaaggaaattgaacccataagaatggagtgggatacagaaggcaacggtgagcacaaaaattgaaaaatatgacagtaaatttactattgactataaacacaaaaaagtcatgaatgatttaaaatttttttaattaaaaaattttattaacgtggaacttaactagatgacagtaataatatggaaggggaaagcagagatgtttagtgagtaatttaaaattatggcagtccttgtaatcttcaggagtaggaaaggaatactgaatattccttttcatgtatattaaaagggtaaccaccaaaagaaaaccaacttgttgctctcaaagaacagagatcaaagggaggcagggaggaatctagaccactttataaatccagcgaatggcagaaaaaaggaagagaaaggaggagagaaataggtcagtaataacaagtatagactgatttaatatacctaataagactttatcagattggatttttaaaactccagctatatttgttaatttaaatgaaacaaatatagaaaccttttggttaactaaagaattcaaaagttttattctacttcatgtgtaagaaaatcccaaagctcttcttgcttaacaaagaaccttcccaaggttacctacttttagaatgcagaggtgtcagtttaatattatcagggcaaaaaagttacaaaataaaacaaccag

SEQ ID NO: 21775 - DNA, 1039 bp, Homo sapiens
tagctgtttttaagagttataaattagatgatactcaggcctcaagaaaaaagatggaagaattgaaaacaggaggagaacatgtatattttgcaaaatttttaacaagtgaaaaggtataagtttttctttttcattaagcataataagaaatggtcttgttttatttccgtttagctgacagcctttctaagttaaactgaatagaaatgtttcttattttactttgggttaaagctgattgattaatgttagtttgaaagtcccatttcttcctttcagaagtaggactaatttggtttcaaaggtgaaagtagttctacattaagtctgttttgtaaactaattttggaataaatgcagtttaattactttcatgtctatatattttaaatgtcaagttaggatttaatttgtatatgaaaatatttcataattattatttaggtgcaagtaaggggtttaaaagttccttgttaatcttatttatacattttaaaaagtaaattttattcaaatataatgctacaagattatgtaaagtttctagtcaagatggcacattgagtttatgtttcgactcactccctttgctccaaacacatagcaatgacgggtaaaatataaacgagaaaacaaaagagacaaggctgggcttccagaaacaagataaatatcttcatggaccagaaatgccaagtagtgagcaaaactgcagcctgggcctgctggactctctatccaaggcaggtggtggtgtccaggaatttggctacaagtaacagagactaaatgtgcaccatgtgggacaaggggccagagccagattcacttcttgaagccaaggactagggtggaacttttatccagttttgggaagaaactaagaaaaaatattgccagtcttctgccaagggctatggttttataggaagttgtgagcctagggataacaaagacagctttgtgtccatctgcttgctcagtgaccagatatgtgatatgctcagtatacttatgaaacagctgctccaagaag

SEQ ID NO: 21776 - DNA, 1041 bp, Homo sapiens
agagggagactccatctcaaaaaaaaaaaaaaaaatcatactagccctgaaaaggaccatgaaattggagatcatctagttcagtgtttctcaagcttcttgtgaaatgcagattcttgttcagtaagtgtggaagggagcctgagattttgcatttctaccagcttcctaggtgatgccactgtagctgctgctggtagtaaaaatctacaaaaaccctcttatttaactggtgacgaaaatgaagcacaaagagataaaggaacaggccccaaattactcagcctgttagtggcagagcaaggaatggacacatttaggatagatctaattcctgtgaggtaataagatgactttctaagtgtatgtgagtgttcatagaatgaatgccttttgcaatatttttgtctttaagttatgattactttaaaacaatctacagattgtcagcatggttttattgagtgctacgtgtcagggactgaacaagatacctccaggaggcgagacctgacatgggtgtgggagaatggatagaatttggatgagcaggtaggaagagcaacatgaatgtgtgaatacagtagaatgagtttgatataaagtgatgaaaaatggctagactttagtgcaaagtatgtgttagggagtattgggaattaagtttgggtaaattgggataacattatcaaggaccttgagggatctatgaagcttcaaaactaaaacgggcaaataaggagccatatggagattttttttttttgtaagcacaatactcatgaatgtgatatttaaagagacagaaatatcacctagaatgaaaaagtccagcaaggaagctcttgccagatttaaagtgatgaggatccgtatcatgaagtagcattggaataaggattactgagagaatgactgataggtaatttttcccaggtataagcattttttagttagtaagatacactatcaatgaacgatatatttttcagcaaataataagcaaaatctttacaattatttgccattttaatttttttt

SEQ ID NO: 21777 - DNA, 1034 bp, Homo sapiens
acagagtctcgctctgttgcccaggctggagtgcaatggcgtgatctcggctcactgcaacctccacttcccaggttcaagcaattctcctggttccacctcccaggttcaagcaattctcctgcctcagcctcctaagtagctgaggttacaggcgtgtaccaccacaaccggctaatttttgtatttttagtagagatggggtttcaccatgttggccaggctggtcttgaactcctgagctcaaatgatccacccaccccagcctcccaaagtgttggaattacgggcgtgagccaccatgcccggtctgaagtctttttttttaagctattgatactaagaaggacagtcagacttgatcccaagctgctagaagctgtatctcacataaatcacttttggagaaacatcctcttatttaacattttagaaacgtgtacttgaattcataactgtagagaattactgccttctgaaaatgaataagaactgaagcttttatttagtgtggctgtattagtccgttcccatgctgctgataaagacatacccgagactgggaagaacaagaggtttaactggaattacagttccacatggctggggaggcctcagaatcatggtgggaggcaaaaggcacttcttacacggcagcagcaagagaaagtgagaaagatgaaaaagtggaaacccatcagatctcgtgagacttattcactaccatgagaacagtatgggggaaaccgcccccatgattcaaattatctcccactgggtccttcccacaacacatgtaaattctgggagatataattcaagatgagatttgggcgagaatacagccaaactgtatcattccacccctggcccctgccaaatctcatgtcctcacgtttcaaaacaaatcatgccttcccaacagtcccacaaagttttaactcatttcagcattaaccctaaagtctgcagtccaaagtcccatctgagacaaggcaagtcccttccgcctatgagcctgtaaaatcaaaagc

SEQ ID NO: 21778 - DNA, 1033 bp, Homo sapiens
tgcccacacagtacaggcagtcctggaaaatgacagagtcccgttgggggaattgcgttgtaaaatggacagcatggaggtgcaggccagaatgcatgctctttgcctgtagatgacaccccaaaaaatcattgcatttttaaaggattctgaatgatcacaacacacaaaaaaagaaatgataaatgtctgaggtgatgctcaatactataatttgatcattacacaatgtatacatggatagaaacatcacattgtgctcatgaatatgtacaattattatgtgtcacttaaaacaaaatttaaaaataacatttgcttgaatcagcaaaaaggagaaaagaagcaggcacttactatacactggcccactttgtgccacctatactgtattcactgtaaatgcataatttcatttaatctatacaataatcctataatgtggctgtaatgatgcccatactacacattaagaaaccagggctcggggggattagtgctaataagtggagtgtccagatagaaacttgagcctaaggtaagcagggacttcattcctgttgaatttcattatattgggtttgctccagagttccagcctttcaaagtcgttttcaatcctgttttttcaggtcatgtatttgcgaggttaggaaaacctactctgttgtgatgagatgcagaacacttagaagacactcttcttgcctacaagtaaatttactatataaagtagtaagaccacatatctgtgaagctaattatattcttgattctgggcatgaaaagcagaaagaaaaagggattttttttccatctgtatctgatttatacagggactccctaacttaacacaggaagggtgaattattaggcagattttgataatttaaagacacagtttgccctagaaataatgtttttcactggtaatcagatcatctggccatctgcaatgcctgtttgacccacagtatacctggtatgtgctagtaaaaatactgttccaactccgccatgggtgtgttgcaga

SEQ ID NO: 21779 - DNA, 1022 bp, Homo sapiens
tcaagaagcaagatctcttcccatgcgggaaggtgccactgacacagtatctcttagatggcataatcatagatgacctgaattgtgtgtagaaaagggagtttactggaagatactatttttgttggttaacaaagggctgtaagccaagtaaagcctgaatgtatgtgtcatctgcatagtgtgaagaggctttcatagggagagattccacgtgtgactatctgacctaaaggccatgtaattcccatggtgaagtccctccctccaagcacaggagccagaggagcccttaaacagccatcctcttggacgtggaaagataaacactataaatgatcaaggataactgttcaggtggtactgaccactctaggtaaactgttaagagttgaacatagaattttttcaaaagcctgttgatgtatttatgtgcctcaggacctttaaattctgaagataaatggatagaatgattcaggatgatttagggagaaggcagatggaaaatgggaatgaaatacatgcctttttgtttttaggggtgctcagttataaatatgaaaggctgagaaaatgctaattgtacagtaagatcaactggacttgttttaataagacaataatttgaaattagtaaactattttatacaaatagtgctaaaactttggaaggtcctcaacctcctgggctcgagcaattctcccacctcagcctcccaggtgtgtgctcccatgcctggctacttaaacaaaaaaaaaaaaaaattttttttttttttttacagagatagggtcttgctatgttgcccaggctggtcttgaacttctgggctcaagtaatcctcctgctttggcctcccaaagtgctgggattacaggtatgagacactgcgcctggcccaaagatgatttttatagtaaaaagttaaatatcataacaatctggcagttcctcaaaattgagtataaaattttcatatgacccagcagtttcactcttaggggtgtgtgtttgtgtg

SEQ ID NO: 21780 - DNA, 1051 bp, Homo sapiens
gtagttgtgattttgttacttttagaattttaaaactacataaaaaagaaaaacattaacattgcctgtgaaaaatcacttcgtgtgccttgttagtaaataatttgcttgatctcccaattactcagtatcttaattcccattgccattggaagtcccaacaactgggaagagatagatgactttatgggaaatactttgatttggctacaaatgcatagtcagtacccactggggcaccagcatgaggcttcctttctctaaaacctatcgtgtctcaccagcgctgtagagtgaacctcagactccacagcccagcactcagagccctgacctcttcccacctttgccttccaccttcgcctactgttactcttgttgtagtctactgatattcatttacacgtgtttattaattaatttattcaacaaatattgagggtttgccctgtgccaggcagagtcctaagtccccactgacaaagagaagagcaaaaaccctagaacggtggtaccctcatggactgtaggtctcgggatggagatgaacgttcataaagagtcacatgggtaaatgtcaacttacaagagttgagtgctacatggtgttatggtcatgtgtgaaaggggagagagggtatgttgcccctagtttatgggtagaagagggtatattgcccctgaagaagtgactatttgaactgagatctgttgatgactcagtaacctaaacaaaggggtactacatggggactgtcaaccaagactctcctctctcctggtctagaggtagacacacatgtcccagctgggccagccagattcctcctggcaagtcacatcttgagcagagtgatctgaggactaaaaacaactgcagctgcttcaccctgagcgctgggccctgaagcagctgtccatcggtttcctcctcccagactctagacctgacccgtttctgcctggctctgggcatagacgtccagcttcccctctgactcatgagtcggtatccatccatttcttttagctgagctggtcttggttgctt

SEQ ID NO: 21781 - DNA, 1043 bp, Homo sapiens
cagaggaagtacacttctgtggtcttgcagtaggcgagctcaaacaaaaataagcaaagggactaatagttttacgttttttaattctgcagaactagttaagtaagtttggggttaaggatcctttcttactaacacagatgtacctgagcaaacagttttcccattggtgctctggtgtgtcaatcatgtaatctcccctcctagctcctcaggtaggagggtgtcagggggccattactgaagaaatgttggaacttcagctgagataaatgtaaggatcagtcatttctgatttgtatttttataaaccagttcttacgtgtaaaatattttcataaagtcacagtaagatgtttttatgaggctttggaggcttttttgcataagttaaaatagaaattttgagttcttgacccaggatcactatttatacatgaattaatgctgctttttttttttaatgaagtcatctgtatccaaataacttatgataaaaattgattctgggctggccagatgctgtggctcatgcctgtaatcctagcactttgggatgcctaggtgagtggattgccggagctcaggagtacaagatcagcctggcaacatggaaaaaccccatctgtaccgaaaaatacaagaaaaaaaagtgttagcattatatggctcatgcctataatcctaacactttgggaggctgaagcaggtggatcacttgaggccaggagtttgggaccagcctgggctacatagcaagactctctctctaaaagaaagaagaaaaaaaattaaccaggtgtggtggtgcatgtctgtaatccctcctactttggaagatggggcaagaggatcactgagctcaggagttggaggctgcagtgagctacaataataccactgcactccagcatgggcaacagagtgagatccagcctcttaaaaaaaaaaaatccattctgagcatactgtcctctggttttcatagtgtcctgggagagagctcttatcacttagcacattctgtagagatgtccatttct

SEQ ID NO: 21782 - DNA, 1028 bp, Homo sapiens
taaaaggcacccacgggctaggatccccctggctcatagggatgcataagagaagtttccccttaggccaggctctttctctaaaggcaggatgtgagtcctcattagaattataggccatcagagttgaaagaggcttgggagattgtttatttcgggcactaacctagagtagaaatccagtctttactgtcagtaacagcgttgattcagtttctgcatgaacatctccagaggcagcgagcttaacttggtgaggcactttccattctttgagggctttgagtattaggtgggtcttttcttctcttttttttttttgagatgaagtttcactctcgtcacccagactggagtgcagtggcgcaatctcggctcagtgcaagctccacctcccggattcaagccattctcctgcctcagcctccctagcagctgggattacagacacccgccaccacacctggctaatttttgtatttttaatagagacagggtttcgctatgttgatcaggctggtcctgaactcctgacctcaggtgatccgcctgcctcagcctcccaaagtgctgggattataggcgtgagccactgcacccagccaggtgggtctttaatatcagcaaccctttgcttccatgtaatttccagccagaggtcccagttcccaagagccaggctgttcctcttccacttgagtgccctcctctccctccaggccacctcctttccacactgctcatctgcacttctcccttctgactctcgcctgtgcaggtaaagacctctggccatcctaagaccttctctggatgaacctcgatggttgatgaccctgcatcctgaaacagggcaggatgcagagggaccatcatctcttttgacccagtcactgtgtgtccctcagcacagctcacggtggcactttttgcctgtgacatgtcaccaggcttcctatctgacttgcagccactctggtctctgagcctcctgctactcagtgtgtcctgtggagcaggagctccag

SEQ ID NO: 21783 - DNA, 1539 bp, Homo sapiens
agagagagagaaagaagagaggaaaacacaggtgtttttcctgctattcttaaaactcttcaataggttagcaactgttttttttaaacttaacctttaggtgggtttctattgctaccttttaattcttgagatgtgtccctggacggaagacctaaatatctttctctctctctctttttttttttttttgagacagagtcttgctctgttgcccaggctggagtgtagtggtgcgatcttggctcactgcaacctccgccttctgggttcgagagatcctcttgcctcagcctcctgagtagggactacaggcacaaaccaccacacctggctcatttctctgttttcagtagagacggggtttcaccatgttggccaggctggtcttggtcccaaagtcctgggtttacaggcatgagccatcacacccagccctctttttcatttctaaaaagtgcttttgtactttgcttcctaaccagattggtccagaaaagggcgtggtgcacctggcgacagcggccgtcctaaacgcggtgtgggacttgtgggccaagcaggagggaaaggtaacccctctcacaaacgctcaggaggctcctgggagctgtacgacactgactttccctacgcacagaggaaagacagacacactgcagcccccaaaaggaaatacagataattgctttggtgtttttttctcctctgagaggttttggcagtaggtagggaactgcaggaggaggagaaagaggagacaggatggcggaaggcgcaggcagcagtagaggggggtgtggggacctggtggctgacagccagcattagagctgccaacgcgtttactgtcaggaaaaaatggggactttacacatatgtcttacaaatcctttcttttttacttcaagcctgtctggaagttacttgtggacatggtgagtagcattgttaatgttacaattgtttctgtaaatgaaatggatatcattgatgacatgccttttgatgatcagtaaatatattcaggactatctgttgatcactatagcgatgataaagcaaaaagccaataaaatatgacattccttttctgatatctgacgtaacagatggctgtgctcatgcaggcagggtggcatgaggggaagcagtgagggggtcctgcctcccccactgtgcatgtgtaacacacggtgccagttctctgagcctccattgcctgactatgacaagaggatcatcctaacttctctaggaacctcacaaaattaaagatcaatgagaaaagcacctcataaactctgaaaagccagatgttataatattatgaagatattatccaggccaggcatggtggctcaagcctgtaatcccaatactttggaaggctggaggatggcttgagcccaggagtttcaggctgcagtgagctataattgcaccactgcactcaggtgacagagcaagaccctgtctcaaaaaaagaaaaaagaaaagatactatccagtcactttgacaccaagaataagatcagg

SEQ ID NO: 21784 - DNA, 1067 bp, Homo sapiens
tggtggccgaggcaggtgtatcacttgagctcaggagctcgagaccagcctgggaagcatggtgaaaccctgtctctaccaaaaatacaagaaattagctgggcatggcagctcaagcctgtggtctcagctactcaggaggcggaggtggaaggatcacttgagcccaggacgcagagattgcaatgagcctagatcccgccactgcactccaggctgggtgacagagtgaaaccctgtctctaaaaaataataattaaaggtaccaaaaataaataattgatggtaatgccgacccaaattaaatttaaccttcaaattacttatgaaaaatgtagtatatcataagaaagtcaatagtaagaaatttcatgttaagacagtgttttcatatattttaacattttacatataaatagtatgctaattgcaaattcattttatttaatgtttaatagtttatgttatgaattcaaggcattttctatacttgtcaataatgaaaaggcatttctccttttaaaaattctatgaagtcagccttcttattccttaggaacatgaactagtgtggtttggttttgaatctgattgttcaaacactttacaaagtgaataggaaaataatttgggaacatttatatttaaacttgtcaatctatgattctgtttttcatgtgacagccaatcacaatgtgttctctactcaggaagtttagctcagtatatggattaacacgtgttctacttgtgtgatatttcttatgacaaccacagaaaacatatggggctgggcacagtggcttatgcctgtaatcccagaactttgggaggccaaggcgggtggatcacttgagcgcagtaatttgacaccagcctgggcagcatgtcgaaactgcgtctctacaaaaaataccaaaattaaccaggtgtggcggcacatgcctgtaatcctagcttctcgagaagctgaggtgggaggattacctgagccggggaggtcaaggttgcggtgagccgtgatagtgccactgcactcaagcctgggtgacagagtgagaccctgc

SEQ ID NO: 21785 - DNA, 1216 bp, Homo sapiens
tccagagaattgaagtccctgagcagatagaatcacaagagaaaaccccccgggtttagttgccaagaagctgctttcaagggccttttttttcttttccaagtcaatttcctgccacagccaaaatttctcttgttttttttttttttttttttttttgaggcagagtttcgctcttgtcgcccagactggagtgcgatggcgtgatcttggctggctcactgcaacctctgcctcccaggttcaagcgattctcatacctcagcccccacaagtagctgggattacaggcatgtgccaccacacccagctaatttttgtatttttagtagagacagggtttcaccatgttgatcaggttgatctcatactcctgacctcaggtgatccgcccgcctcagcctcccaaagtgctgggattacaggcatgagccaccgtgcctggcctcacaacccaaatttctattgaatgcgacaaattctagtctcctgttgagcaagaaaaatccatacactgtagatgaatacataagtgctgcttgtgcactctgagagtcataaaaatgagatcatccttagcttttgttaagtgcatttggtattgtgacatgaaccagaggtatgcttcagtcaatgatttatagcaacaatcaaatccttgagacggtggtttggtgtcgataataacgtacctcactgtgagtcactgacttacttcagattttctttaattcaagagcatcaaccttcaagaagtgaggaggactctgtcttctcacaattctagggaatgaatgtctgaaccagaatgattgtgtatcccattaacaaaagccctagagaacctggaatggctggttcagccctaaatgctacatctgacctaaagtgtgcaatcatccgagagctgtttcacccttagccaggcatgtgctaaaagcttggggcatcactttctttctttttcttgagatggagtttcgctcttgttgcccaggctggagtgcaatggcatggtcttggctcactgcaacctccacctcctgggttcaagtgattctcctccctccgcttcccaagtagctgggattacaggcacctgccaccatgcccagctaatttttgtatttttagtagagatggggtttcaccatgttggccaagctggtctcaaactcttgacctcaggcaatccaccggccttggcctcccaaag

SEQ ID NO: 21786 - DNA, 1045 bp, Homo sapiens
gtggcacggcccctgtggcattgtctgtcctcatgtgacatcattctcatggttcttttcgggtttctcacactggcattgtttcggcggggaactcttctcctgcagcacacggaccctgactactcggctgcctatgtcgtcatagaaactgatgcagaagatggaatcaaggggtgtggaattaccttcactctgggaaaaggcactgaagttggtgagttgaagattctctcgaggttccagaatgcttaattttcagatgagattctaatttagattcttagattcattagaatcttgatttagattgagttctgatcttgtttttatctgtatttacactgctcaaagtgagtaaaaagtttcatggtttgttacttgtttcactgggagaaatttaaaagtgacagaatttggcctctctccttgcaatcatctctagcctgttagaaaatccttggctgttagtctgtttctctgtgtcaaatgacagctacaaggatgcttttcacctgcctttcacccggggccactgtcgagctttgacaacctgtagtgggcgagtaaccaagggcaatgagagggaggagacatgagttcccatagcaaaaaaggctcattgtgatgtgcacagcacgtctactcgcttttcaatatatatatgtatatatttttgagacagagtctcactctgtcgcccaggctggagtgcagtggcacaatctcagctcactgcaacctctgcctcctgggttcaagcaattctcctgcctcagcctcccgagaagctaggattacaggctcccaccaccatgcccagccaatttttgtatttttagtagagacagggtttcaccatgttgaccaggctggtctcgaactcctgacctcaaatgatccgcctgtctcagcctcgcaaagtgctgggattacaggtgtgagccatcacacccggccttttcaaaatatttcacaccaaatcggtttccagttcactattttcatggcgaaaagggctttggccccgcccaatctcggaggt

SEQ ID NO: 21787 - DNA, 1051 bp, Homo sapiens
ctgaacgcgacggggttggcgctgagggagaacgggaagcccggggctgggagttttgagtggtgatcccgcttccacaacttgctgtgtgacttggagaagttccagacctctctgggtctcttggacccgtctgtgtaatgaaggtgtcacagtcgggttgagaaaccaagcgcgtgctaactgcgtcacatgagagggcgctctcgtgaaattacccgcaaacacgcttagaaaggactgatgcaaatgtcagttcgtcttaagagatgtaataaagtaagggcaggaactctgactcctacctaaatattgaaggtcttttttgcttactgagggtgttagaatgtcaggccttccctcccctgcccccgtctagagcggtgtttcccaaatacagtgggttctgtgcagggttttcagggagcctgttccccactgggtcctcactgcccctcgtagtccactgatgagattggccgcgctagaaaagcagagttgtatgggtatgtagtgaatgtgtgaaagtatgctgggaagtgaggaacggcaatgttaggaaaatggttaccagtagggagggaaggaaatggggtcacggaggggaccacgaggtctctaattcccattgtaatgttttacttcctaaattgggtggatggcaagctggtgtccattacattatctatactctttttgtacctgaaatgttttataaaaatagatctctcgttaaagttattaaatgcaaaacaatgtcctttttgagattaagttcatcctgcatttttaaatttttattttattctattttatgttttaaatttatttatttatttattttgaggcagggtctcttatctgttgcccaagctggagtgcagtggtactatcatggctcacagcagccttgacctccctgactcaaccaatcctcccacctcagcctcccaagtagctgggactacaggtgtgcaccatgatgcccagctactttctgtattttttgtagagacagggcccaggctgtcatcctctttaaaatcttcat

SEQ ID NO: 21788 - DNA, 1036 bp, Homo sapiens
atggggttttgccatgttggctaagctggtctcgaactcctgacctcaggtgatccacctgcctaggcctcccaaagtgctgggattacaggcgtgagccaccgtgcccatcatggtatatttttttaaatatgtacttgccttgttttcttcagtagattattttgagattcttttcttgttttatttctctaacctatttataaaccagcactttaataaatatatctgccattaataaagaggaaaaatgaaagtgtttccctttcaaaattaagagactttttttttttttttttttttgaaatggagtctcgctctgtcgcccaggctggagtgcagtggcacgatctcagctcactgcagcctccacctcccagcttcacgccattctcctgcctcagcctcccgagtagctaggactataggcacccgccaccacgcccagctaattttttgtatttttagtagagacggggtttcaccgtgttaaccaggatggtctcgatctcctgaccttgtgatctgcccgcctcggcctcccagaatgctgggattacaggcgtgagccaccgtgcctggcctcaaaattaagagatttatatagtttctagggggaaggagaaattttagctcacttgaaattcagcgatcagtattactttagtttgttacttctaaactcttgtactgaagtatcctaatgttgagagtgaaagcatataaaatttaatctttaggaaaaactgttttgctaatcttatgggttttgcatgttatctaacatattcctcttccctacagttccctccagctgtagatctaatgccatcaaattttatcacccactttgtctggttgctgttattcactgataccattcaagttattctcatttaatgactcaccattgtcctctccaacaaaactcctctcctgtcttaactcattgtcatcttaatacacatggtgatgattcttctattaccctggtctcttgtagcttgaactcttctcctgtgtaatcttgtctttc

SEQ ID NO: 21789 - DNA, 1035 bp, Homo sapiens
gggcattgtggcttatgtctgtaatcccatcactttgggaggctgaggcaggcgaattgcttgagctcacgagttccagaacagcctggacaacatagtgaaactctgtccttacaaaaaaatacaaaaatgagccaggcgtggtggtgctcgcctatagtcccagctgctcagaaggctgagataagaggatgtcttgagcctggaaggggaaggtttcagtgacccattatcatgtcactgtactccagccagagtagccagaccttgtctcaaaaaaaattttttttgaatgtaagactattataatatattcaaaaattagcttaaaatggcttgataggcctgacttacagaagagttcagacttacagaagagttcagacttacagatgaacatgtagaaaatcttctggtgaagaattttccggacacataaaacataaaccataaaaataaaaaattttaattgaacttaaaatttaaaagcatgttcaaggatactgttatggaaatgcaaaggcaacctatgaactgggagaaatatcacagtttagtataaacatctgacagagaactagattccagaatatataaagaatataatagtgttagagtagtaaatattcttgtttccagaacataacagaaagaagacagcccaattaaaaatttgatttgaacagacactttagtttaaaaactgatttgaacagtcacgtcaccaaagtagagatgggaagcaaataagcacatgagaacatgctcaaaataaggtgtagtcattagggaaatgtaaaaaccacaaagggatatcactacataccaattagaatgagaaattagaatgttttgattctagaatgaagttgatgattatcttttctatgtttttgtatttatggaagtattcctaactctaatggttgcttcctattagagttgggaatacttccataaatacgaaaacatagaaaagataatcatctttcactaatcatgtagtgctatccctttgcggttttaacttacatt

SEQ ID NO: 21790 - DNA, 1047 bp, Homo sapiens
aatggcaggaactgggagaccagttaggctattagaataattcagtattgttgaattagtgaaaggtgatgtgacctagaccagggtagcagtgggaggtggagagaagttgtcagatactgaatgtattttgagaatagggccggggggttactgaggagtttaagggtgtgaaataggtaataagggtgacttcagagtttgggcctgaaaaactagaagaatggcgttaacatttatcgagttggggaagattgcaggaggagctgctttggggaggaagattaggtttcttggaaatgttaaatttgaaatccttttagacgtccaagtgaaggtattgcgtagacagttaaaagtgagttggagtgagaagtccagaagtccgtaaagatacaaacctggtaatcatcaatttgcaggtggtatttaaagatataagactgggtgatatcaccaaaggaatgaatgtaaatggagaagtcttttcggcaacagtccagtgtgtagatgtcagggagatgaggaacagttagcaaaggagactgagaaggagcagccagtaagacggggggaaaccaagagggtaatgtcttacaaagcagatgggaaggccaggcgccgtggcttaagcccgtaatcccagcactttgggaggccaaggcgggtggatcacaaggtcaggagtttgagaccagcctggccaagatggtgaaaccccgtctctactgaaaaatacaaaaattagccgggcaagatggtgggcgcatgtaattccagctactcgggaggctgaggcaggagaattgctcaaacccaggaggtggaggttgcagtgagccgagatcacaccactgcactctagcctgggcgacagagcaagattccgtctcaaaaaaaaaaagggaaaagtgttttaaggaagagagagagagaacctcagtttttttcttatttttttcttttattagtcagcattggatcagattgtattttaagtgaatgcgagaaacataggaaagttggaacaaagtttgctaaaagaag

SEQ ID NO: 21791 - DNA, 1017 bp, Homo sapiens
aatgtacttaattcatcatacaagcatttaacagcaggctggcagggtgcaatggctcatgcctataatcccagcactctgggaggcccaggtgggaagattgcttgaggccagaaggtaaaaattagccttggcaacatatgaagaacccctttctacaaaaaaattaaaaaattagccaggtgtgtggtggtgtgtgcctatagtcccagctactcaggaggctgggcaggaggatcactgaagcctaggagcttgaggctgcagtgagctatgatcacgccactgcactccagcctgggcaacacagtgggacctggtcacaaacaatcaaacacccagcacgccttctttgtgcccaacatggccttcaggctgagaggaatacaatcctgatcatctggaatttatagtctaattggagagagaagacataacagaaaaattaaataaacttacaggaagtatgtgattgaatgtcagtctgaatggtaatgacaataagtactgtatctcagataagagatatgtacaaaataagcttcctagaagatgtgaaatgataaagactttttggactttctctataggcttcaattccctgtggtgggtttttagtttcatattttgacaagactcaaatcagaagcaagttcccttgttttgttttcacaatctaccttttttagaacattgtttagaaagttatatattgaggggtgagctgacattatttgactagatttccaaaacttaaaatatgtaggttatagttttaaaaatttggattgaattttgtttatcccagtttcttctgatatagtagaaggttgtgcgagctcatagagaaatcttggccgttggtctagaggattgttagtgagtgacagggctcagatccacagagcctttggggaatggctaattattttaacctgggggctctcatgagcttattgacaagtagtcagacactctggccttccctaggcatttccagttgccctttctagttta

SEQ ID NO: 21792 - DNA, 1027 bp, Homo sapiens
taattttccttactgtctctgtgttttccattttattgacttctgtgtttttttttattatttcttttggtttactttgctcttctttttctaacttttttaatttttaattttcttgggtattttcttaaagtggaatgttatgtcggttaacttacatctttttttcttttctaacttaagcacttaaagctgtaagtttccctctaaatcactgctttggttgccttccacgtattttgatattttgtattttcattttgattcaataaaaagttattttctgattttccttattatttcatctttgacctatatgaattatttagaagtgttctatttcatttccaggtaatgagtttatctcagtgtcttcttgttcttgatttctaacttaaatccaatggggtatagaacatacgcttgggatttcagtccttttacatttctagaaccttgttttatggcccagcatacgagttatctttgtgcctgtattatatgcttttgggaagaatatgtattgtctatacatattctttccaaaaattgttagatgcagtgttctatgaatgtcagatgcagtgttagaggcagtgttctatgaatgtcagataaagttagttgatagtgtttttcagaacttctgtgtctttagagatttttgcattaatttctcacttgctgggtagatttttttgggttggtttagaatagtgtttaaggctaattatgcccctatactgatgcaagatcggtctaattacccagtacccctgtcaagaactgtgaagtgtctgaaattttaccctatttggaagctaacaaattagcttgctttagtttcatggatgctagcagaagataggagactcctaggtcagggacaaaggattttactgctcctggcacagcatgtgctttatgctcacaggctccctttgcaccccatgtcacatgaggacagtggcaatcaacatagttagatgctgtgcatgcagtgggtttcctatgcatgcagcaattc

SEQ ID NO: 21793 - DNA, 1036 bp, Homo sapiens
acacagcccttccacagttggcactgcaggtgcaggccaaccctttaaagaataaacaaggaagtcagctctttcactttttacaagttggcaaaaacagacttccggggaatttcgatgttttcccgtgttgtagagcttccagggtttaataaaactggttaaaaattgagtctttccctgaagtaagtgctctttccagatgaaaactactcttttggttttgtttgaaagtaagaaagggaggggaaactttgctcttttaataattatgttcagcctatgatgaagtatttgattattagacagcaatgtcactaataagttttaagttgtccaaagttaattgtaaacatcatcagtacagtactcttagttacagtaaagcaattgttgcaagatgaatggctaatattttggtgcagtgtttgatgttcaaaacaaaatgttacaacaataaacgaacataacataaactgaatgcatttggctcttttcttcaggggacattgaaaccatctttctagattcttgccagaaattggtaatttccataaattagcatcttgatctttgctgacacttaaatttgtctacagcaggagctcctttttgttgcttattcttaaaacctggcttcagaagtgcagctacacccccaggaactaacctcttgctttgtaccttctgccaggaaatgacccatccatatgtgacttctgctgtggtctcacggctgtccaggaggctgtgtttacctcctctccctaagcacttgaattccctgggagtcctgtccagagcccctggacaccccacctttccttaaacccttccttagggtgggtatgatttagcagtcaatcctgatgttttcatcacagagtcagagtgacctttgatcaaaaccacatcgcatatattacttacatggtgatgttttgtcctctcagattgctgggcccttaccagatgcagcatatgctgaaccctgcatcccaaaggccctccacaggagcgtgtgttcaggatggaa

SEQ ID NO: 21794 - DNA, 1026 bp, Homo sapiens
cctctgggaaagtcttatctcgccctggaaggtgaggtcattttccatttcagggatacatgaaagaagttagtcctcaagaaattaagtctacaaaggcaggcctcaagtaggtcaggaaaggctctctctctctttctcttttctttccttttctttttctttctttccttctttgctttcttttttctttctttttctcttcttttcttctttctttctttctttccctctttcttcttttgttgaggttttcttccctcaattatggataccaatgagtgtagatgtctttgaagtgggcttgtttggtagataataagatggtctcagataatagacctgaaagggtcttaaatactaagccaccaacagaagatgcataagctatatttaccaggctttactaagacagatatttaagtgtcacgggtctctgtaccttcttcccatttgttttcccaaagctttggtaaacatctgccttgtccctgctgggtaaagccactgtgaaccatatgagaatgcctggatgtggtgatgagcatctgccctggtggccaaacgtggataatcttctattgttgaaaagaagtggcgatttcctcataatactttgcaataacaacctagagcctaatgctttatccctctgaaaaaatcccaataattgcctatatatctgtgatccattagtttatccagtccattggtaaagctatttataatttccatttctactgtctctgcctcctaggataacacatccataattttactatttcttaaagcaggactacatttatttgtcctcagtttgctttttcaagcttcaagggatactcccttaccctaggatgacaaaatttagtggataaatatttggtgagttctttttgatctatataaaacaagtgtgtgtacacatatatacataagtatatatgcacatatatatcctcaacataacattttcatattgaattgtacattgttgtggttgtagtttaagctttttaaatatag

SEQ ID NO: 21795 - DNA, 1065 bp, Homo sapiens
atcgaacagtttcttgattgctctctgaagtaatatggaggtacactttctgctgcaaggcgtgcccgctgtaacaatactctggaactgaatcatgtctaggtctctgtcttctcatttggagcacctggagatttgttgtttttaatagaagatcttatcctgtgcaaataaaaagaattaggagtttctggtatgcaagtatggtttaaataataaggaaaaacataaataaaaataaacaaaagttacaagtgcatggtaccatctcctttcctaccttttttgccactgttcccctgagagtctcagctctgccttccccatttcactagccgggtgattgatggggagaggtgctccttgaatctcccaactaaaaacaactgtctttttctaatggaatactttatgaacagtttatagaagaaatcaaaatggcattattagtgctatattatgtatgttactagcgaggtggaaactgtactcttgtggcatgggtaaatccagattgaagtccaggctctgctgccctctgtctctgcggtggttgacaaatgatttcagctctccaggtctgttttagtcatctgtataataggaataaggccgcctttgacggggctgttgtgaaaagcaagatatatgtgaaagcactcttgttacataggtaattatctcaataatcatattgataattactcttttttcacatttttttaaaatttcagtagcttttgagatacaagcagtcggtttttggccacatggctgaattgtatagtagtgaagtctgagattttagtgcacctgtcacctgagtagtgcacattgtacccaatatgtagttttttatccgtcaccaccacccccgccactgtctgccttctgagtctccagtgtccattatattactctgtgcctttgcatacccatagcttagctcccacttatacatgagaacgtatggtatttggcttttcattcctcagttacttcatgtagaataatgaccttcagctccatccaagtcacttcaaaatacatgatttcattcatttt

SEQ ID NO: 21796 - DNA, 1035 bp, Homo sapiens
cacactatgtctgtcttggctgagtcccttagacagtagtgatttttacaaacaccactgcacatgaacatccagagtgaataagaagttgggaaaggcaattgcggttgaagcatttgtgatgtgtttcccacttcccctaatcatcctcaacaaacaagaaatagaggtcaaacatgattgtatctcacatgccatgcatatgacccctcacctcggttctttgccatataaatgatttttgctattgattatagcagtagtacccattgtgtgctctttggggaagcctttactgtttaagatgattgccctctggtggtctgatgtgtaccttcttcagaatgtgaaaacctgtgcatctgcagtaataaagtatattatgcaggaaatgagatgagtatttcacctcgaaaaatcaaatggctgataaggcatcatctgaagtgtacatgctgaaaaatatgaaaatatgttcccccaatctctgatcttacgtatgatatagagagacgttagcatttaacacgataatccatagcggaacacacaaataaaatcagcaatctctgacaccaagttatcaactacctaagaaatacacatatttcctgcccaggtattaggagaaaagtctcatttctaagaatgctgtagactatatttgtaaacattttgttcatttctgtaccttgcagttgaagtcattgtgtcattgagaaaccatgaaaataaaagtttaaaagtgatatcagggcaaattgatttctggaagaaatcaaaaaaaccccttttcgtgtttggttttcagttgtatcataagatacacacttattcagaagacattttactgtatgcataaagtggctatttatacctgcagcattttaaagacacatttttgaaattaacaaatgaatctgtatagcatgaattatgcatatagcaattgatctagtaagtaaatttttaaaattctggtggcatcatgattctgtaatttatttacagggcttctgttatttataattttaa

SEQ ID NO: 21797 - DNA, 1084 bp, Homo sapiens
ggcaacataaaatcaagtagtattcacatattttaatttagtttaattctttaaatttccggaatagttctaactatgtgcgtgatatttatgtaacattgcttagcactttcattgttggggcagatgaagagatgtgagagcaagtgttgagtatgtttgaaacaccatgggcaggaaatgagctggagtggaaagccctgggacccatgggcaggaaatgagctggagtggaaagccctggagtggaaggatcggtttagtgtgctcacaaggttggatattgttctattggtatattggttttctcttgtggcaaaacatcgcgtaaacatagtggcctaaaacagcacccgatacacatagtagcctacaaccgcatgtgtttatcatctcacgttttgcataggccaggagtccagtgtatgtcagttggtccggtgttcagggtctcagaaagcagaaatcatgttgttcactgactgcatcctcatggagacactgggctaggaacagatcagcttcatactccttagggttgtcggcataattcatttccctgtggttgtgcaactgaagtccttactgtcttgctggctgttgtccaggaaccgctctcagctacagagtccactctcgaatccttcccatgaggctcctgtagcacagcaacatagaacctccctcaccatgatttgtcttctcaggaatctctgacctcaccatcggcaaccagctagagaaaagggctcacatgattaggtcaaacccgcatggataatgtcctggtcttaaggtcagctgtgccctccagcatcacctcatcacaggagtaggatctactttattcacagtttcagggatggtgcaggcatatacaccagggaggaaggaaagcttgagccatcttagaattctgcctgtcacaataggggatgagtgcttctgaggagctttatgtaggggagttatttggctcattcatgttttaaaatgttcttctgttggctaaatagcaattggaggctaagagaatagaacagggacactagtcagctctattgtaaagaaccaggcaggagat

SEQ ID NO: 21798 - DNA, 1053 bp, Homo sapiens
agaaaagtagagaggtagggccctactagagggagtaggagagtggaaagtgagaccaacagcaggttgttttggtttctttttgggattttctttttggatggatgatactagggcatttttttttcatgcaaatagaaaaaattcagtagaagggccaaagaatattactgtcttctagtttgctagcaactgatggtttttagcagactggtggatagtactctatagtcacaaatacttatgttaagtaagacccacttctcctataaatttacacttgaaatataaaagaaaaaaaggttgatgttaaaaagtttgtccatttgagtcctatatactcgttagacaggtaaatggtacgaagacgttttcttttatgaaatgctttgttattctgtaggaatcctgtcttacacataaatgacagaaatttatattaagcattttccttcactaaatctttagtttgtgtcttttcataaaatgccactgaatttttatgtcagcaagagaggtagataaatttgaatacagaaactaatttagcagtcatttagttaggagatggagattttagagctgccacttctaaaagtggaaaagatgaggattaactgacttttttttcttgcttctgtggaataaaaaattagagctgaaaaggaacaaagcccaaaatgcatggcaatgaccgtctttttataggtgaattagattggggattgtgaagatgatttcattcacacctgcacatgcatcctttgaagctcattaccatttcttttggtgttcatttaataaatatattcctgagagagggatattgaaatatgatttacgtttctttaaaaaaaaattaaggactcctcttgccatctgcctagcatacttatgaatgtccttaccccaacttttaggatttggagtttccaggaatccaaacctttaaagcctgagcaaaacacaattttaaggtaaatttagtataaggaaaggacagtttcagtcaaaactaagcataaatacattttgtctcactttctgtttggg

SEQ ID NO: 21799 - DNA, 1029 bp, Homo sapiens
gtggaggtgaaggtgtggaaggtaggggtggaggtgaaggtgtggagggaaggggtggaggtgaaggtgtagagggaaggggtggaggtgaaggtgtggagggaaggggtggaggtgaaggtgtggagggaaggggtggaggtgaaggtgtggatggtaggggtggaggtgaaggtgtggagggaaggggtggaggtgaaggagtggagagtaggggtggaggtgaaggtgtggatggtaggggtggaggtgaaggtgtggaccatagaggtggaggtgaaggtgtggagagtaggggtggaggtgaaggtatggtggggagggtaagagctgaaggtgtggagggtaggggtggaggtgaaagtgtggagggtaggggtggagatgaaggtgtggagggcagaggaggagatgtaggtgtggggaggcaggggtttaggtggaggtctggtgaagggggacagaggcgaaagcgtggaggtgatgagatgatcacattctggagatattctgaaggtagagccacaggatttgctgaaggaccatgtggtgcatgaggaaaagttacttcttgatgtttttgttggtttgtattttctttggcgtcagactctgggaggatggattgattgactgttctggaagactcagggatgccctggtttggggagaaacttcaagtgttcacttttggacatcataggtttgatgtagacttttagtcaacagaaaagaaaatcccgcacttgtccttaagactcttaggtctggtggcagaatgacagatgcatggtcatagggatacatatgcctgcactggatggaggagaccgtttcatggggcagagggaacttgggcaagactgctgagtgaaggtggtgttggagcgagctttgaagtatagggttaaggagtgcttggggaaatgggtggactgggggcttctaaacacagaagcagcacagcacgttcaagggcactggagacttagaagctcactcagcacctggagcactgcaggtcattgg

SEQ ID NO: 21800 - DNA, 1057 bp, Homo sapiens
ccacccaaacaaagacactctttcttcaccttgctgtattctttggatatcagatttcactttctcttggaaggaaaccctgatctccccagtcaaggttgagtgcccattctctatgtcttctagcatccagttctctatgtcctgtagcatccaggcctttttaatggcatttctcagctgtcttagaactgtttacttgggtgtgttttctctaaattataaggtttttgaggatgggaatttatatccatgtcttttttgttcatcattatgtccccagcattagcatactgtgctgtgttcattacaggaacaagcagctgggtggtctgatccagtctaattgtcctctgattcttcttccaaatccatacctgttttcttacattgctgaacttgaccagaaagaaaattctaatgctacctgatctccttgtcttattgaaagcgattttgaagtagttattctcaaatattactttactctggaagccttttgaaactgcgaatctgtaccagcttaatttttgtgcattcttaatctccatccaggtggttctctgaattttgttttcatccctgtctctggcacacatctctgtctgtatgcgtctggaaggttgcagtattgaggaactaagcactggggatcacctctctgtctgtatgcgtctggaaggttgcagtattgaggaactaagcactggggatcacctctctgtctgtatgcgtctggaaggttgcagtattgaggaactaagcactggggatcacctctctgaaaattactcttaaattaacattttatatggtaaatgtaaaaaataagagaccctaaaaagcttcagtttggtattgtgaaatatggattcaatatttgaccaaaaatcatgttgattttgttagacttattatgaaaaaaccaatctgggccaaagaagggagaacccaagttttgatcctttgcccttaagggaaaattgggtctacatacaaaaaaaaaaaaaaaaaaaaaaaaaaaaaaaccaaaatacctccacagctattaaagaaa

SEQ ID NO: 21801 - DNA, 1073 bp, Homo sapiens
gtagtgtgactgtaggagatagactcttaccctctaggttttactgtgtctctataataggcgaagaccaatggacagtgtgcacagtttcctggcctagtcacagaggagatgctccatgagtgtgtaaatgagagaaaagtctttccattttctgcactgtcaccttctctttaaccttgctatcctaccctttccttttttctaggtacttcaaatttggcacaaacataactggctttctcttttctctacatagtagatttgtggtcctctccagctcagttgattagcgtaggttaggttacgctgctgtagcaacgctcaaatctctgaggcttcaaagagcaaattcacttcttgcatgagctatgtgtgcactgttgtttggcaagaagcttttactcataggaataatggagggacccaggctgataaggaagtgtgatcctactatgtgcctggaaagaggagaatcagaaaaacttgggagagagaatgacaaacgactgcagctgcattccctaaccacagggatcgaacataccatccaccagatgcccaagcaccctcatgcatgctgttttcctcatcctgctatattctatggattctaatctctgcagaaactgcttactgatgcttctttagtggtggatccagcatttacatataggcagggcttagctaggtaggctgttgggaagtagggaactagaggatttatcctaagtctacgtttgcagagccagccacttgaaattttgacgatgataatgatgattttagggtaccttatggtaggagctggaactaatggagctactggggagggctaaagctccccatcctccctgccttccaaaactcctctccatttctaggatattataattattcaacccctcatcttctttctgctgggtcatcaaaacgcattcctcaatggtcctcctttatttacttttgacctcaggtctgttccctaatccattctccattctctagccagtgtggtgtgtctgaaacaccaatctacctttattgtgctcaccctgaaaatcttgaactcg

SEQ ID NO: 21802 - DNA, 1049 bp, Homo sapiens
ccagtgaactctggggactgagaggtgatttctgtcttggctcagagtgagtgtttaaaaaatgcatgttaattttggtatcaaactttaaaaactttagttggagtaacaaaattaatgtgagagggaataaatactaaattggagaagcgtgacttcaatttgttaatttgcaaggcattgatagctgaatgctgaatactgtctcatttgcattatggttttctggtggtttagaaaagcaaaatatcagatgcacaacttactgcatcaagtttatttagttaatacactttagccaaaataagtttttcaaaacagaacatgttttgtgaataattcatccataacaagaagagtagccactttaatttgtaaaccgcttttagctgaaggattcaggagctgtaggtcaaatgtcagtgtctcaatgaaatatttgcgtttaatttttaagacatttcttctgcatgaatgcgatttaggttaaaagcaattttttatcagttcatgtacactgcttggactttggacaactttgtgttgaaataaaagatcaggattttttttaacttgatcggatgcaattttatttataattgttttttaaaaactggttggtcaaatgtattaaagggccacctaggtagaagagaggcaactatccatgtactgagagatgtgatgctgttatcttgtgaatcttttctggacttatatagtatattagattaagtgtggcaggaacttgctgtaaaagtattttcttccgtgttgtatgatgtgcattcatcttttaagttagtgctttccctaaaattcacaaattagaattcatgtccactccagtaaaatagaactccaagagtagactgaagaataaatgtttcctttctgtgagaatttgagtatatataatgaagagagagactttttttttttttttttttttttttgagatggagtccttctgtgtcacccaggctggagtgcaatggcacggtctccgctcactgcaacctccgactcctgggttcaagcaattcttt

SEQ ID NO: 21803 - DNA, 1036 bp, Homo sapiens
ggatgtttctccttttatttccgattcaaattttaattttcactccaattcaaatgtggaaattgctccttttaatttaaattgctttctatcccgaaaaggacaaaacacaattttactccactgaacagtgatggaaggaaaaagttctagcaagaagaagttgaaataatcaaaggatctctgtgtgtttgtctagatcactgtgccaccagctatgaatctgattaatgtccttgaagcatcagaaagtcactctcctgccaggagtcctcatttaaaacagcagcagaccccaaaaaagtgtgcataaaattatgaggactggcgtaactttttctttttcaaaatattggaataaaaatattggcaaaatttagaatttagaaaattgataattaaagcataggtatgggaagactggggtatatataaacaatggaaaggtttctcttcttttcaaacattttctttttataacagatttggataagactacactgagataaagactcatctaaacacaattaagtgtgcctaatggagcaccatatcttcatatgttttatagccacatgatcaaaaaagatatattaaattacttgctttattgctatatttttccattgtcaggtcataatcaccttgagttaagagataaataactgcatattattataaaacaaataccatccttaatcatcttttacaagagattcaagtagtttagtaattttttaggggtgggggtggtggggagtgttacctggggagtgttgacagagaaagaagtctgatatggtttgctgaatattttcatggtttcctgtaatcattagcatttataagaatacactgtgtaatgagttgacaccataaaattagctttgaattctcctcaatggaaagaggaaattacggtaaactctttttatgtctttagttgtaataaatccccagtatcatgtgcctactcatttaattatttgtgggaacatagtgtgcctacatccctctaagtgcaatgtagtacaag

SEQ ID NO: 21804 - DNA, 1008 bp, Homo sapiens
acagagagagcactcaaacacgtggtggagatgcccatggtgatgagctgctgctgctactgctgtggtttccatggctggtgctactctcctggtcttgagtggtgtgaagagcagcttccagagttggaaaatgaagtcacaccccacttgggggtgtctaggagtaagactgtgtggaagacagtgataccataaattgacaagacagtatccatctttcctaggttatttgacttctgctgttcccttccagaatgaggctgatttgcaggatttgcaaaatcttcctaaattctgaattcactacacttagagaaccatttatagtggttattataacaaaatagaacaaaggtgggttttatattgtatattcatctcttacaaaattcattgtttaatgtataatgaataattgcaaattttcctaaaataaacagtagaatacagttaccatgggattgggagaaaataaaaacccagaaattctgagaaggttttacaaatacattgtaaaacctcagaattttcggatgaatacattgtaatgtaatgcactaatgggatgtagtcagatctcagcaggacactggaggctgctcctaagggagtgtcctgaagccaagtcatatcatagagagatgaatttggatattctgggttagaaaaatctgaggttatgagacagatccagaataagggtcactgatctgagaagcagaatgactaaggagcaaaaaccaaaaggcacttgaggagggtctggtggcatgagggggagattaggaacaaatggtagattgaagctagacccagattgaggtgaggcaagggtgtgaaacaatttggtccaagccagtcttatagactattccttttcttccttttccttcttttcagagatgggggtgtcgcaaagttgcccaggctggctttgaactcctagactcaaagcaatcctcctgcctcagcctcctgagtagctgggatagactatgcttttat

SEQ ID NO: 21805 - DNA, 1015 bp, Homo sapiens
gttcgagaccagcctggccaacatggtgaaaccccttctctactaaaaatacaaaaattatctgggaatagtggtgcacatctgtaatcccagctactcgggtggctgagacacaagaatcacttgaactcggaaggcggaggttgcagtgagccaagattgtgccactgcactccagcccaggtgacagagcaagactctgtcaaaaaaaagagaaagaaatggtttttaataaaatggatttctctctgaataaaaaggtatgacttttaaagacccctgaaattttagtgaaggcttccaactctaaaagcagcaaatggcaaatatttaaatttctgctacttattctgtaaacatttactgagtgcccaaaaaggggacagcaccactgttgctgctatgggatcattaaaaaaaaaagagtaagtcaaataccaaggagatttcaagccattggtgggtaaggacatttaaactattgatcataatacaaagcagaatgaaagaatgattctaatactattacaagcagagtatactagaaaagatgcattacatcaaacttggctgagtggaagttacatgtgtatttatgtgtatgtgtgggcatgtgtatgcatgtatgtatatgtgtatgtctgtgtgtgtgtgcacgtgtgtgtgtgtgtggacacttctggaaggagatatcaaatgagctaagctttgaacttccagagatttgagtttgacccttccaggaaatgttaacttttacttttcttacccaaataatatctcattcaactttttttttaaattttaattttgagacaaggcctcactttgttacccaggctggagtgcagtggcgtgattgatcatagttcactgcagcctcagcctcccacctcagtctcccaagtagctaggactataagcacgtaccaccatgccaggctattttttcctttttatagatatagggtcttactatgttgcccaggctggtctcaaactcctagggtctagt

SEQ ID NO: 21806 - DNA, 1045 bp, Homo sapiens
tcacttagaaaaaataaatactagagaactttatcccaggttagacaccagctgccattctaatggcctctaggcattctaatggcctctaggcttggaggtgctaagattgaaatgattaatttgtttccctgacagatcttctgaaacacctccactcacagctctgctagaagcgtcatcacagcagccaatgaggctttaagtgagaagaagattcttggaactgagtggaggggtctgggtgccctcttagtctcctttctaggatatcaggctttttttttagcttggtttttaatatattctgtattatccttcaaaaaaatccatttgcccttcttttcatacaaaattttttcttatcaaattccagaaatacatgaaaatgagaaagccagttttcttgctggaatacaagactttggtttaaggtttatggattatgatttatggatttttaagaattataaacattattgacaaaatattttgaaattgtaaatgtgaagaaaagttatactgcaagaataagaaagtctgagtaaaaataaacctgctttaatacgtagatacttatttttaggtacaaggcttgagggagtgacaactctgaacaccacattccacagcaacaagtctggtgcatgtgggcagccacgccagaggcttccttggagtattccagaaataaccctctcgaactggagtctgtctctgacacatcctcttctccatactgacactgtctctggttataatagaatgcagcttcacctttccacatcactccagactagatgcgtaatcagtccctctgacactgctgctggaatagtaatctgacacctgccgtcagctgagggtccttggctattgactgtgcagagctgtgggagagtggacagcccagagacaaccggagaagcagatcttattactggaataattgcacctttgtgttccaacactgcacagtatttttctcaggagccaaaactggcttctaagattcttggattccaggctcaccattccaggcaag

SEQ ID NO: 21807 - DNA, 1024 bp, Homo sapiens
aaaacaatttttttcttctcagagagaggttgtgatttatgatgttgttgtatctcccctgcagctatattttcacactaatgtaaattgttttaggttgtcttattctgtggtcgaaacatttactctagaaaaagaaaagcagactgaggccaacaatgtaaaaatattcagtccttcaaactaacgttttttactgatttagtatttacggtttcattacatccaggtatatatttatctcaaatagctttttggttttatttatttgttcttgtttttaacaagtctgggagcgtccagttggaagcttttcagttttaacagaaagtaactttttgctgtgttttttcattgttggacttgttttatagttaatggtccattgtcaaaagttcgcaccgtggctgactcttctttaaatctgataatatattgttcctgttttccccagctgtagaacataacaaatgtttaggaaaaggttgagatttggtttgtgtatgtagatactatgaactgctagttgtcgtgcaaattggattatttgagggctttttgaggtaatttatatttttaccatttttagtaggacaaaggaactaatttccaaattgcttactgtgctagcattataatggggatttttctctatgaaaatagtttagttttttattgaggatgcttataaaacaaaatagatttagtctcttacctcatgtcttagaaatagtaacaaaaaaaatactaaacaaaaaccccacacagaactgtgtatgtacacatagtatatttatatgtgaacagaaaattgtattgaaaaataggtcaggcgtggtggctcatgcccgtaatgctagcactttgggagaccaaggcgggtggatctcttgagcttgggagttcaagaccagccctggcaacatggtgaaaccccatctctaccacaaatacaaaaaaaatagccgggtctggtggtgtgcacctgtagtcccagctacttgtggggctgaggcaagaggat

SEQ ID NO: 21808 - DNA, 1054 bp, Homo sapiens
tttgttgagttaatttccagttttattctactgtggtcttggaagatacttaatatgattttgatatgttaaaatgtatcaagacttgttttgtggcctgttatatggtctatcttggagaatgctccatatgctgatgagaagaatgtatattctgcagttcttcggtagagtgttctataaatatatgttagcttcatttgttctatcatgtagtttaatttcattgcttccttgttgaccttctgtctcgatgagctgtctagtgctgtcagtgcggtgttgaagtcccccagtattattgtgttgctgttctatctcattttttaggtctaatagtaattgttttatgaatctgggagctccagagttaggggcatgtaaatttaggattgtaatatcctcttgttggattgatccttttattattatataatgaccttctttgtctttttttttttttttttttttttttttttttactattgttgtttgaaagtctgttttatctgatataaggatagtaactcctgctagcttttggtttccatttgtgtggaatatcttttttcaccactttaccttgaatttatatgaatctttacatattaagtgggtttctaaaatacagatatttggtttatgatttttctatccattctgccaatctgtatcttttaagtggagcatttacaccatttactttcaacattaatattgagatgtgaggtactgttccagtcatcatgttaattgttacctagatggtttgttttcttattgtgttattgttttataggccctgtgagttttatgctttcaagagattctattctagtgcatactgagcttctgtttgaagatttataactccttttaacctttctcgtagggctggtctggggtactgacaaattccctcggcatttgtttgtctgaaaatgactttatttctccttcattttgaaatttagttttgctggatacagaattcttggctctcagttattctgtttaaagaggctaaaaataaaatcccaattccttctggctt

SEQ ID NO: 21809 - DNA, 1037 bp, Homo sapiens
cattataaattataatggaaaaaattaagaatatttattagtttatttaaaaataacaatataatcattacttaacataaataatattttaatgaaaatagttatattctctgaaacaaaaatatttagtgactagagcggcgttgtttcacatttttgcaagtttttaatgtctggcttaatagaaggcagccaaattcttatatgtgtttctgcattgcagtctgttgcaatgtgttgtgttggttgaagtataagaagaaaatccaggcacgcgtagatacaaggaccaaaaagagaggatgtcgaggaccccttaaaaatatcatagagacccccaggagcccttggaccacagtttgagaatcagttttaagacaatgggtagaggtttagtgatagcctcttttttttttcccagctgttagatgtcgagggagcatggtaataatgagaagtcatctgaacttggagtaaggcttgctgctgttagtggttatgtgaattaagcatgtaataactttgaagctcggtgtctgtttttgcagtgtgattcggagcagcatagtggttaagtgggcatgggagctcctgggttcaaagctgggctccttcactgagtggcttaagttggggcaagtttcttaatctctgtaaacttcaattcgttcctctctaatatgggaatagaaagagtcgtttcttcttggaattactgtgaggcttaaggggttaactcatatgaagtatttgaaagtttggcaaggagtaagccctcagcaagttagctgttagtatttttgttacatctgggtttccaaaagtagcttaatgggtatggtaggtagtaaaaccattttctttatctttgtcacttctgacatcacgctttcagtttgctttttaatacacgtacttgagtggactttccctgtcaactctcataacattgcagtttggaggtggtgggaagtggttgaaaagacacggggcttcctggagggggactagggcacccggggggcctgggagtcggg

SEQ ID NO: 21810 - DNA, 1052 bp, Homo sapiens
gtctatattttatgcactcaatttctgagaatggttagaacaatgattttttttcccctttctcttctaaaactataggttgctgtgattttattcctagaagatatgtgactgtttttgggcaggttcacacatgcaattcagcttagaagaggaactgttaaggttaacagaccaagaactcgaaggagcgtccccacttcagcagttgctgtggtctttgtgttttgtgtgaatcggtgatgcccatctattttactgcagtcgatcattagtaatctttagggccactttattcttttactatgaggacaaggagaatataattgtccgtcttttcagaactggcttgcatctgtgtccaaaacaaacaatgcccatcactgtggagtaaagggcgagagaacaaagaaaggaagctgtgaagggtacagttacacattaatcaccgtgatgcgcaaagtgtgaggttagtaggcactgctttgaaagctttacattgcatttatttccaaacaaattgtctttcaagatcctagaactttcagcccagagtagctgtaggccagctatggcttatgaagaggtttctgatgtcccacatttagcaactttgtaaggcttttttttcgtagttacacatttggattcagcattttttgaattttagggagtttaaaaataatctcatccagggtttctcaatctcggtacagttaacaggaatttgttgtttcgcatgctgccccatgcctggtaggatggtaagcagcagtcagtgttccttgcctcacctcacgagatgtctgtagcacctccccctccttagctgtgacaacgaaaactatctccagacacttcttcctgtcctctggggaggggtggaggggtaaaatcacccgaagtcctgagctgctgatttaacccagcctgttttgcagatgacacatcagaggtccggttgtattatgcaatgtttccaggctcagaagtcactatgtcagaatatgaatcgaaaagcacattctctacaaggagggaactttttatca

SEQ ID NO: 21811 - DNA, 1033 bp, Homo sapiens
tggccttgaaaacatcagaaatgtgtccctgaatgccaccagtgcagcctatgtccattacaacatccagagcctgattgaagaatcggaggaactggccagagatgctcacaggactgtgactgagacgagcctggtaggaaacgacgtggcttctttttctgggctctgtgggagatttttctgtaccgggtttgagcagagattcagtggccccaatttctgcctattaacattcttttctggtggaatctgtttctggcttctgtcatcatatgatctgtgttttaattttttaaggtcataaatacttctttatacagactagaaaccagtgtggagatgagaacaatctcacatttccttgcgctaaaaatgatgatgctacttgatacctactggagacatttttctataaccatggtgaaaatctttattgaatggctggtttccttccttatctacttaaaaatgtctttgttttctcttgcctcagccattttaaattgtccctacctggtacctggctgactttcttgctgggaatgtgtctgggggctactctgatggagtcacttcctctgtccccagcaggactccaccctgccctgctctcaccacgcttaagtggttctgttttccagctctcagaatcccttgtttctaacgggaaagcggccgtgcagcgcagctccagatttctaaaagaaggcaacaacctcagcaggaagcttccaggtcagtatgtggctcggacggtgtagacaggcagagtgagcgtgagcgtctcgctgagcagcctctaagaatgttctccttgcatgcagcaacttgaagcttagcatttctgtgtcccatttatattccaatttcctatcatataaattttcctatcgtataaacttcctatcatataaacttcatataatttggcatttttattctagtgatatctgttcctttattgtgcagtcatctctatctttaacctgtccataatcctccactcattgccttagcttggagccttcac

SEQ ID NO: 21812 - DNA, 1048 bp, Homo sapiens
ggctgattccctgcattgcaaccctggattgtaaatgctggcacaaggcccagggccccatcgtctcattcctctgcagaggcccaaatactgtcctagggagctgcgtgcagcagtggtgtgatgagtaatgtttgtgtggctgtgttcacaacctctttgtccaagaacggtgtggtatggtgacaagacctgaggctttgacaccaggtaaatctgggttcaaatcctgcccaagtcatttgctgtctgtgtggccttgggtaaggtattgttatcaagtcatcatcatcatttaacaccagtgaaataatcttcagaatcatcatcattatttaacaccagtgaaataatcttcaaaactcttaaaatatgagcaaaccagatttttcactcagattccaaactctcactcagagagttagaaatctattctgtgtctatacagttatataaagagaaatgaattctttttttacttggtttgactcatagacaaaaaaaaaaatgtgacttactcaggactatacttcactctatactcccaggcagaattatatgcagaatttctatacctttaatacattgtccaaacccaggcatatgtgtatcttccagtttttccccttattttaacagaaaggcacatttaaaatatgaaagcattcctggttgaagtcatgagaaatcatgaaatcatactctttgaaaagaatggaaagaagagggaatttttcagagtgagtggctttttgggcactgcaagaaagttaaccttaaaaagagacaacctaataatgcctgatccccccgcctccccaccacccgccaaggttgaagctggagtctgcatccaacactggggtctgtggggacctcccagctctctttgcaagggtgattgccaaaatgccacatgggacctgaaaaaggcttcatgtccagattggcagctgtgcatggcattggtggtgacaatgacaataacttaagaggctcttaaaccttgaggtcattaaaatctcctggtgagactgttaaaaatgca

SEQ ID NO: 21813 - DNA, 1051 bp, Homo sapiens
gcctggtaagttgtccttttggtttgctgcaagcaagacagtgctcatttgggattattgtgtttgggagaagatgcaattctcattttcaaaaagaattagagaaaaataagcagtaataagatatgagatgtttaaatgtaactgtgacaagaatctttgtaattgccattgttttatgttggcagggtttgtgtgactgctcttctgctaaaatagcttagtaagtaagacttgccagtttgattcatgcactaccaaaacatagttaacgtttactgaaattgactccttttaataagccggaggcagctccagcaactagatagcatttctcttttcatactaacgcagaataatgtacagtagcagataaacatttttaatctcatgaaagcatattagttttctactttttctcttgaaggactaatgatttaccacagtagaaatttttttccagctttttgattgcagtgtcaaaaaagtatatatttcattgataacgtacagtgcaaatggagaacagccttgtaagaatattgcaattgtgtttctcactttgtccatttccttattttgcctgtagcacaagtggaagtgctgtccgctgcactacgtgcttccagcctggatgcacatgaagagaccatcagtatagaaaagagaagtgatttgcaagatgaactggatataaatgagctaccaaattgtaaaataaatcaagaagattctgtgcctttaatcagcgatgctgttgaggtaacaaactcagtaaagtgtttaccaaatgagagtagtttgaatcagaagtctttcattggggaatagttgtagctaatcacttttagtttgtatgttctgtttgttgctgattttttagctcttcgttttgcataaagtaattgttttcatcacatcctgtcctcgtgacattagtgtcatatgaaatgcctggaaaagtaaatcccacttctgtctatatgaccatttagtagactcaatgttaatgtagctcactgcagtgaaatagtcttactggaaacaaagc

SEQ ID NO: 21814 - DNA, 1038 bp, Homo sapiens
cttcatcatcagtagcgctgtaatgagagcactattttaatcctatccttttggctacatattggcatctatcatccagtagcctcccggccatgcagtgtggcgtccagctcctccctttgtctccgctgggcctggcccgttggtgcacatattaatcctgaatgaattattctagggaaatatggatttgacctcaaaaatctgaagtaactaaaccacttttgctggatttttccagtttagcttaatgctaactatatgaaaaaaaattattagcacaaatttggaaatatttcatgaatgctaaaacttcattgagttaattcacagtacttggaaggtatcctggagcgtgtttgcttttatctcaggatacaatacctctttagccagatgttctacaagtcattttctccttgaaatacctgtaattaattttctaggcccatagtctctactaaggaactctgaagatattaattataaacttatgtaggcacaaaaagacacttaagattcctccttaagtaggtagtttctggactgtcctctggtgctcttgatacctacgtctcttaggagacaggataattcccattatacagagtcacaaagggcctcaattttcaaaaaaaaatttgtcttgtacaatagcatttcaaagtctgacaattaggaatatcagaattttagcattgaacagcttgattttgtattgactattatactttaccaggaaaaattagaatttagagaatttatactttcgacatttttgaagccatgcatgctgtagttctgtccacaatttaatactgtactagggaaactttgtcttctagtttccttttaaaaaaatcattctaagagttttaagtttggacaaactaacaagtttacatttatcagacaaacagttatttgaccagtcattctccgttcatttttgcagctgagaatattaaaatttaattttaacaccaaggtgagctagtgatcaaggaacttcaaggccctgtaattccatcactttag

SEQ ID NO: 21815 - DNA, 1023 bp, Homo sapiens
aaagatgattgcaggttagaggagaaacaaagtttttttgtactataaaatggagctaatacatgcacagtgcttgaaatggggtcttctagctagtaaactccataaatgtgagctgttaaaatcagtgtcctcatggttgtgtaaaggcagtgtgacattgtggttaggacactggttcaggagccagactgtctgggttcagatcccagcctcttatttcatgtgtgaccatgagcaagttttgtcatctgtagaatggaaacaggagtcagggctcatattcagtcagtagacacgagtacaataggaaataattatgtgctgattggtagaatagccttgacctggcccctgaggtgtccctgtgctgggccctctgggtctctgcagctctagagaataaagagggagtgcctggcacagcaaggcgcatctgttccagttgcacagtggggtgcggtgctcggattttgaacatcacccccagtgatggcacctgcttcttaggatggtcctcaggattgaatgaactaatgcatctgaagggcccagaacaatgcctggtacttagtacatgcccagtaaactttagctcttatccctgtttcacagtagttttaaatttgggaatagggagctaaaatacctaggaaatagaggaagagggaaataatgcatatttattttaaaaaggattacgttttcaaataggtttttcattctgttttttgagtttataattttagagccactgagatattgctgctaaagaaatgcttatttgccaagaattgccaagtgttctcaatgagtgacatttaatcaccaccattattaaagccagtcttttattattgtttattctttaatttataaattttcagtatttctggaaaattcttaaaaagttgaaccgtttagtgaattgaaccttttagtttcactacattcttaggatatttgtttttttgtttttatagcaatacgtttggtttaatattggcagtgtggacacctttg

SEQ ID NO: 21816 - DNA, 1034 bp, Homo sapiens
atagcccttgggagcctccctgattggtaagctttgtatttgtattctttctcatagtgcttcacttagtaactgatcagttgccacagtgtattctgcaatgagtcttttattaaaccgtatacatgaagacattgctgagagagctaaaaccttgccgtgcttctgtgtgtgctctttgtttatgaacagaatcaaagccagctgctaccacacgctcttctggaggaggaggtggtggcggtggaaaacgaggtggcaagaaagatgattctcactggtggtccaggtttcagaaggtttgatgctatacattgtgtgaattttgaggttatgatggtggcccagagaaggttgggaggcattagtgtagtgttggagggatttgtgtctcacagagcatagatcgtattgtggaatttcattcttcacagaagctgtctccctctctgcccagggtgacattccatgggacgacaaggatttcaggatgttcttcctctggactgctctgttctggggtggagtcatgttttacttgctgctcaagagatccgggagagaaatcacttggaaggactttgtcaataactatctttcaaaaggagtagtaagtattttatgggattggtggctgttgtggttcaaaggtgaaattcatcagattagaccaaagaagtgacagtcagcaggttaacctggctcgtccattgtaaaattgttattttcactcagatttttctaatgctgagaagtactgcaactagagaacccgtgttttgacctggtgtcctcaaatttacccacaaattcttttatttcactacctcccagaactgggttttggaaccactgcttctgaccatggtcttggcagtcctctgcttgcgcccttttctcacgtgccctcagctgcccctgctctgtgctgtcgtgtgccagcctctgcccctgctctgtgctatcatgtgccagcgtctgcccctgctttgtgctgttgtgtgccagcctctttgggccctctgtgggtcttt

SEQ ID NO: 21817 - DNA, 1049 bp, Homo sapiens
tatctatctatatctacatatatttatgtagacatctatagacatctcatatggatggattttcgaaaaacaatagggctaggcgcagtggctcacgcctgtaaacccagcactttgggaggcccaggtgggctgataacttgaggtcagcagttggagaccagcctggccaacatggcgaaaccccgtctctactaaaaatacaaaaattagctgggcgtggtagcaggtgcttgtaatcccagctactcaggaggctgaggcaggagaactgcttgaacctgggaggcagaggttgcagtgaactgagatcccgccactgccctccagcctgggtaacagagtgagactccacctggaaaaaaaaaaaaaaaggccgggcgccgtggctcatgcctgtaatcccagcactttgggaggccaaggcgggcggatcacgaggtcaggagatggagaccatcctggctaaactaaaaatacaaaaaagtagtcaggcgtggtggcgggcgcctgtggttccagctactctggaggctgaggcaggagaatggcgtgaacccgggaggcggagcttgcagtgagccgagactgcgcccctgcactccagcctgggcgacagagcgagactccgtctcaaaaaaaaaaaaaaaagaaagaaaagaagacaatatgacacatgcgtatacacagatgcggtaaagtgaacctctggaatatagaccccctcagaaggatgcccaccaaactgatcctcacggctgcctgcagggagggagacacagtggaacaccagtggggaggggaagagcaggcttcaactcatctgtaatgttcaatttctcttccctgctcctagctgtaaggcaagcctgctttaggcatgactccccatgccccaaagcccgtcctgccctgagaagggcatggccagacattcctggcagctgtcagaatcaaaggtgtgtgcagccttgaaccctgcaggaaatctatttgtgatgggctttgttattgatgattttgtcataggtctgcctgaaacctcaatg

SEQ ID NO: 21818 - DNA, 1023 bp, Homo sapiens
tcttgacaccagacttacacagaagtacagtgtcaatcagctggaaatggagatggggactagagccttccccacccaccaccacccacccttcccatccttcagggcctcctgaaggcctcatagagcaatgtgaaatttcttttccattccaagagggagtggcccactgctgagtcagtactcagctggcactgaactcaccagtggagtccacctgcctctgctgccccttgcatgagcctctttgtccactctctgtaatgaagcccacagaacaattgaaggagacaccagaatttccccttgaagaggaagcagtgacacttccaactgtaaactgaacactttattcactcttgatataggaaatgctgtcacgtgtatgtaaatttcacctgttaacttatcaggactcattctagcaatgtttttggtttttgtggggtttttttggtttgtttgttttacattttaataaatgctttctagccaccataatacctactgtatggtaaactctgtatatatacgtgatcttatttaatctccttttccatagaaactctatattcttttaagagataccttccaccattccacaatatcagctgtgctcccctgcagagttttcatttgatgacatccaccagaaacttcttaccacacattgctgtgtttgggggttaacttaaatgtgggtccaaattatcacacagaacagtttactgcttaaataacccttatttagttctgaatttctttgtaatcagttaatatattattgtagatcaaatactcatgaaattagaatgatgttaattatttacattatcaattacaaactcaactgttttatataaaaagaaaaaactccttaattcttttaagaacaaagacactgacttgctttttaattaacaaaatatgagcaatttccatttgattaaatgtccttttccaacatgatgcctgatagctgtgtggtattccacagtaataacctactgtattttatttact

SEQ ID NO: 21819 - DNA, 1091 bp, Homo sapiens
tctgagagccaaattttcatcctgacataaattattgaaggataaatttactctgaaattttaaagatgttgtatgttccctaaaatcatgttttaaaacatggcttttttaaaaatctatatttaagtcaaacatcttattctgtgattctttaaaatgtttgtatttttatcatgctttcattttttacttgttttctaaaaagttactttttccttttattgttcctccatttgaagtcttagtgatataactgaaactaagactcttgcatggttttaatgtatttcagattttcattcactagcttctgcctgccttagagtctgacatgtagccactaagggtcttcattaatccgttcccttttttgtcctctctgtatattcctaacagctgaattattttctttttattgtttgttttctttttttcagcaatgcggccacttagcatgtcttacagttttgacttgtcaggtaaaaaaaacaaaaacacttttacacctgacgtgggttttgtggtttctgtgaaatacatttcattcatctgcttgttcaaacatgttaaaaaagaaaattgaaaggcttctgctaagccgtggtcagtaaaataaaacattctgcttgtttgaaaacaatatatgtaaaaaagatacaagactacagtaaatctgttttctcctaagcaattttggaagaaccatcacaccacactcatggttctagaagatggtgcccatcttaatggcggctgtcactgtccaggctcttctagagcaatgaggttaaagcctacagcagacctttgccctaagagaatagaaaaaaacttcatagaaacaaaattctgacacatctacttcctgttctctaaagcattcagttatttaagtaactaaacttaaaatggttatctacttcagatgacagcacctcagttgatgggcaagaactcttttgtatctttgtgctcagtggatagagcctagtcatgaatgactttgaatgctgattaagagtataaaaatacaggccgggcgcggtggctcacgcctgtaatcccagcactttgggaagctgaggtgggc

SEQ ID NO: 21820 - DNA, 1042 bp, Homo sapiens
tctgcagtgtgtccgtctccaaccacaaaggccctccccactgggcataatccccaccaggacctcaggcttccagaaatcaaaagccaggaaggcaaggttatctttggtgacaacagagtttcaccaaggggccaactttgtgaaatggggtgacaaaaaaattacaaggaaaaataattaacatctcaaattattctaccctctttatatgaagaggatttaaaagaacagaagaaaggatatggcaaacgatattcagtgaggcattgctttggcttcagcagttttggagaatatgggaagtcctggtagatttagtttttggaatggaaaacgaagactgtgctttgttggagaggaagggaagaatggccaatggatatctgaagtcctgtgcatcagtgtctgatgtgctggtttctgaacaatcctaggaaggctgagcctgtgtcacaggaaagatgttttctctttgatgcaaaggtactggtaagagctttggactgcagtgaaaatagataatcctcgctgtcatgaatacctaaaatcatcacatctctgcaataacctttttaacagctttattgagctttacgccatttatataccataaaattcactcatttaaagtatacaatttagtggttattatatgcataaattgtaaaagcagagtgcttcaacaggaaataaataataatttcatttttaagaaatgataggccaggcacagtagctcacgcctgtaatcctagcactttgggaggccgaggcgggcgggtcacaaggtcaggagttcaagaccatcctggccaacatggtgaaaccctgtctctctaaaaatacaaaaattagctgggcctggtggcaggcacctgtaatcccagctactcgggagattgcttgaacctgggaagcagaggttgtagtgagccgagattgcaccactgcagccactgcactccagcctggcaatagagtgagactccatctcaaaaaaaaaaaaaaaagaaagaaaataaatgataattacggtagt

SEQ ID NO: 21821 - DNA, 1031 bp, Homo sapiens
agttcctcttaacctacattatgagttttatgtaagaattaaataggattatggtaaaaaaatactttataaattgtattgcatatacaaagataacgtattatattttaaaaatatagatgatagatgtacagttttaccttatgtttgtttattatgggtttaaagatacccgtaatattatgtcatgaaagcatgttattaccggatattacttaacttatttctaaacttcctttacagttattattttttattttttagtgtatactacaagcacatattgattttgatttataggaaggccatattataagatgtctgtaaacatttttatttatacgactgtctttcagtttgtaagactaaaaatgcccaaagaatccagagaaactgcctttacgaaaacggtctatagtggtaccttaacaggaaaggatctggttttgtgacccccactctgctagttttctcctctgatctcttcttctgcctttttcagactcttggacttcaaagtttctatcctggcttctgttctccctaagcaaccataccctcttccatggtttttgtttctgactaccttccagctcacagtctacattgcagatctgtaaaaatgcagactcatacgtccagctgtctgctagatagagccttatcatatcctacaagcaagacaaacccaatatttccacaagtgaactcatcctgtctctccccaaaccattgcattttgttttcccaatgtagaaaccttaacataatctttgactcttacccgatggccaacccctgttgattttacttcctctggatctttttaatcttctactcttctcagcccagcagccactatcccagccgaggctgtcatctgtcgcagcagcactgattgtcctcctgcttccagtcttgaattcttccaccattccatattgattttccttgtttaatcctgacccttctgttgtgtgaccttcgtgatgacagggcccatgtctgtcttgttcgttgttgtgtcccta

SEQ ID NO: 21822 - DNA, 1017 bp, Homo sapiens
actgggacacctgtttgtgacatgacttcaacttattttctgcttgaatagccttgcaaagaaaaagccccaagacgtctgtctcattcacagattgaagggtattttaatcagctttctcatattccttgcctattcctcacctcatgccaacacctccaataataaaattctggcatttaagttggctggaagtttctttctagacctaaaataggtttatatccctccaagtggtgaacataccactttttgacagaaaatccaccaccagatgtctttttgtaagtgtgccatgtgttcgttttaatgagatcattcatcatttgtaatgtttagggtccttgctgctgtctgtcttttttctgtttgatttgttatttttgttttgagtgttggtaacatgccgagcactggtgtctcatcagggaggagtaaatctctctctgacctcctgtcattgctcttagcgctgctctccctgttaaaatgtttcacaagaatattttactgaaagctcgtggaagaactctgccacctttcagatcctgcagcttttaaaacttaatttatttttaacaaaaaatttcacgtggttcaaaacccaggagttgtaaaaatattacattaaattgtacccttctatttttgtctactactcacactctccctatatatgggcaacaaatattattaatttcttttttatctttgcagagagattttatgtataactaacaagcgcatatcagtattttcttccttttttcacttttaaactttccttttttatttaattatatgtcttagagatcatttcatatcagtaaatagctttcacatctgtaggcctttataatctattttgtgggtatggtgtaatgagtttaactagtcctatattgacagctactaagtaatttccattctttttctattacaaacagtggtgtcatggataatttttaacctatttttcttgagtgtgaacataagtgtaaggtagattcctagaag

SEQ ID NO: 21823 - DNA, 1065 bp, Homo sapiens
ggatgctgtaggccttttaaaaacacagatttaactttttaaaattggtaagctagctgtaacattcaatactgacattactactatattgatgtcagtataggctaaaaataaaattattttcacaatctactggtagaaaatccttgtacagaataaattcgtaatacagtaacattagtcatcagtgaatgaacagtgaaaataattgtgcattgtatagcatgtgttcatgatattgcagcaagaactttataaggcatgtaaaataggtttttaatgtcctaatctctgttctctagattatgtactcaaagtgatgaaaattttctcttcctcttgcactttcttgtgtcattcatacacataaacatcacccaaattaaggtagaatatttcaaacattttgatctttgagagataagatgtctaatacagttaactcatcttggatttcttcagcagtaggctctacaggtgtgggttgtcatttctgattatctgattataatgatctttgcactcttctcaagtgtggctgtacctgcggtgcttagtttcttgacatattaaacgcttcttataagtgttgtcttccttgaccctttcaagtatgattttttcactcacacccttcatacctcagctgaaaggacatctcctcaggccaccccagacacctttatatattcagcacatactgcccttttttttttttttgagacggagtcttgctctgtcgtctaagctggagtgcagtggcgcaatatcagctcactgcaagttccacctcccgggttcacaccattctcctgcttcagcctccagagtagctgggactacaggcgcccgccaccacgtccggctaattttttgtatttttagtagagacggggtttcaccatgttagccaggatggtcttgatctcctgacctcgtggtccgcccgcctcggcctcccaaagtgctgggattacaggcgtgagccactgtgcccagcctgctgttttcattttaatcgcgttgccctattatctcccttttagcagccatcatggtctgtag

SEQ ID NO: 21824 - DNA, 1060 bp, Homo sapiens
gttttggatttcttcatggtttgatcttggtaggttgtatgtgtctaagaatttatccatttcatctgagttttccaatttattgggatgtagttgttcatagtagacactaataatcctttgactttctggggtatcagttcttttttttttttttttttttgaacagagtcttgctctgttgcccaggctggagtgcagtggtgcaatctcagctcattgcaacctccgcctcccaggtttaagcaattctgtgcgtcagcctcccaagtagctaggattacagacacgtgccatcatgcccagctaatttttgtatttttagtagagacggggtttcaccatcttggctaggctggtcttgaactcctgacctcgtgatccacccaccttggcctcccaaagtgctgggattacaggcatgagccaccgcacccagctggtatcagttctaatgtctccttttacgtctttgattttgtttatttaggtcttttgtctttttttcatagtctggctaaaggtttgtcaattttatttgtcttttcaaaaaatcaacttgttgttttgttgattttttgtattgtgttgtttcacttttatttatttctgttctgatctttattctttgcctttactaatttggagttttctagttttctagaaactagttttctagttctttaggatgcatttttaggttgtttatttgaagtttttttagtttgttttgtttgtttgtttgttttaatgtaggtgccagccaggcccttgtccttcccttcagggcagcaagttcccccaggccccggggtaggtctagagatgctgtctggtcactagggactggagtcagaaaccttagaaatctgcctacttttctgcctggtattctgttctactgtggttgagctagcactcaaaccatgggacacagtccttcccactcttccctcgcctcttccacaggcagaggagcctcaccccatggccaccaccacaggcccatggggattactgccaggctactgctgatgttcattgagggcccaaggccttt

SEQ ID NO: 21825 - DNA, 1961 bp, Homo sapiens
tacaagcatgagctacctggcctggcctttttttatttttaattttttcttcttcttcttcttttttggagacggagtctcactctgtcaccaggctggagtgcagtggcacgatcttggctcactgcaaccttcacctcccaggttcaagcgattctcctgtgtcagcctcccgagtagctgggactacaggcatgtgccaccatgcccagctaatttttgtatttttagtagagatgaggtttcaccatgttggccaggatggtctcaatctcttgacctcatgatccgcctgccttggcctcccaaagtgctgggattacaggcttgcgccaccatacccggcctttttcttctttaaatataaagagatcatccgctgttgcccatgctggtctcgaactcctgggcttaagcaatcctcctgcatctgcctctcaaaagtggtgggattacaggtgtgagtcacctgagcctggcccctgtttacacttattatgatttctgatatctttggactaatttctgtcatctttctttgtgccatctgtcatgtttcatccaatatttttgccccctttttcccttgccttctttaaaaatcacatatgtcagtatcaagcatgcattccttcatggaaatattgaattgaattagtaaagcagatatccacctttaggagttgcactcttcagtttgccacagtccccactgggcggttcactgtatatgtctgatctttgtactaagttccatgatggtagagtccagactgtctatttccttccccagtacacccccagcatcaggcatagtacttgtaggtactcagtgaacatttgggtggtaagtgttcaatgaacatttattgaacgaatgaagggatggatgaatgaacagctgatcattggaatcatctagaaagctataaaaaatactgataacctggctcccatgctctggagattttgatttggtaggtctgatatggagcctggatatacatgtgttaagaaactaacaaaaaattcccccagatactctgattatcagagagatttggaataatttgacctcatgttttatggatttttctaccttgagacacacttgcgactcttgctttagttaataattgtggagcaattattaactgtataattatacagtaatctatttatctacttaatatagggccatggttcccctaaagtagggaaacataccacagtttagctttatttttacatattttttaaagttggagatagctggtcattgccatttgggtgacatcagagcagcaatattaaatttttccttttctcaaataataatttctactttttttcatctgctctacaagagacagttttctgagcatgcctctctgccttttcattaaccatataaataattggaaataaccaaaggggattgaagcatagaatgtgtggttgaactacagaccttgggcttttcctgttttctaagatactgattctcttagttgaaatttaccatggtttatagtttatgaaactgactggcatacaaaggactcaattttgattttggtctgctatgttgtacccatgatgttttgtttgaggtaagtcatctgtggagttaggaaattcatttgcctttaaggagcaaactttatgggaatgtgaaccttttagggttgcagacagttgttaatgaaacctatgattgaaaaagtagttcatcaagtttcttgttgtctgtgttctgaaactaagcattttagaacaacagtctctcataatgattttttttttttaaacagtctcattctgatgcccaggctggagtgcagtggtgtgatcttggctcactgcaacctctgcctcctgggttctagcgattctcatgcctcagcctctcgagtagctgggattacaggtgtgtgccaccatgcccggctaatttttgt

SEQ ID NO: 21826 - DNA, 1049 bp, Homo sapiens
atagaacataaaatgtttaaaaattgttgtttcatattggcaaggaaatgaattcttagtaaatttattctgcattatcaaatgaattggtctgctatttaaattccttaatatgttgccctttattgatagttaagtgataatgttagtaattctcacatctgtatggtcttaaatttttaagtagagacagttaataggttatagtttttaatttatattttaagcctctcttaagcaataattaggcatcaactctgatgagggttttgtaaccatagtttaaaccaatttaaaaccatagcatgaagctaaaagcttttatttttattttgtaacacgaagagtaatctacaacaaagacttagggaccagagaacctaacagtaacattagacagtaaaaccacttagctaggtgtggtggcttgcgcctgtagtcccagccactggggaggctgaggtggaagaattgtttgaggccaggagttggaggccatcctgggcaagatagtgagactctgtctctaaaaaagaaaggaaaacaacgactggattaggcttaggagatagaagttaattatctacagctctctatattgtcactaagtgacatggcacacctaggggtgaggatgggttggttgtcacagtcacctaaggagctttttcagatgctttgtcgtctacctaactctgcagttactgccattgtggcgatattgaatgataatcagttatattaagatagagacaggctttgcaagaatattattaactggaactccttaacctgaaaagccagtagtgacacagagaacagggagtctgcagaccagggctgtagtttaccacgggtgagctgtgtgaattcaagcaggtcacttagcctctcttcaccttcaccttccttcgcttcctttttataaaacaaaggaattggattagatgatctgtaaactcacatttataaatcttctcatttttctgatgcacatacaaaaagaatcttgctcttcaaagaagaaatgaaaaatgtgattataactt

SEQ ID NO: 21827 - DNA, 1070 bp, Homo sapiens
accttatggaacctcagtttctttgtaaacagagggtattagcacctgttccttgggttgttgttgtaaggattagagaataagtagaacaaaagttcctggaatggtggatactattgatattattattgccatcaccttaatgtaaagctttattacaaaggaactcagttaccagaggataatacctgtattttcatatgcaaaggctggagtagagattggagttaactttttagagagcaattgggtaacacatatcacacatctaagagcatgggtttgatctagtaattttacttctgggaccttttccaaagaaaataactaagaatatgtgggaaaatgaagcaagaagatacttgtttgcagtactgtttgtaagagaggaaaggtggaatctacctaaatgtctaactattgtgcaacaaaagactttaccttactagaaacaaacggatagaatgtaattgattatgtggaataatggttcattgtagtataaaataggttacaaaatagtaggtactgaatgatccaattgtattaaaagtgcaaagaatatgatctgaagaacaaaaataagtgattgtattaacaattaatagtgatagcctcagacaaaattaaaaaaaaatttttggggtacatagtaggtggatatatttatggagtaggtgagatttttttttttttttttgagatggagtctcgctctgtcacccaggctggagtgcagtggcgcgatctcggctcactgcaagctccgccacccgagttcacgtcattcccctgcctcagcctcctgagtagctgggactacaggcaccggccatgatgcctggctaattttttgtatttttttagtagagacggggtttcaccgtgttagccaggatggtctcgatctcctgaccttgtgatctgcccgcctcagcctcccaaagtgctgggattacaggcatgagccaccacgcccggccgtaggtgagatattttgatacaggcatgcaatgtgataatcacattagggtatgggggtagccgtcacctcaacacatttctttgtg

SEQ ID NO: 21828 - DNA, 1056 bp, Homo sapiens
acctacagaatgggagaaaatttttgcaatctacccatctgacaaagggctaatatccagaatctacaaagaactcaaacaaatttacaagaaaaaaacaaccccatcaaaaagtgggcaaaggatatgaacagacacttctcaaaagaagacatttatgcagccaacagacacattagaaaatgctcatcatcactggtcatcagagaaatgcaaatcaaaaccacaatgagataccatctcataccagttagaatggcagttgttaaaaattcaggaaacaacagatgctggagatgatgtggagaaataggaacgcttttacactgtttttggaagtgtaaattagttcaaccattatggaagacagtgtggcgattcaaggatcgagaactagaaataccatttgacctagtgatcccattactgggtatatacctaaaggattataaatcatgctactataaagacacatgcacacatatgtttactgtggcactattcacaatagcaggcttggaaccaacccaaatgtccatcgatgatagactggattaagaaaacgtggcacatacacaccatggaatactatgcagccataaaaaaggatgagttcatgtcctttgcagggacatagatgaagctggaaaccatcattttgagcaaactattgcaaggacggaaaaccaaacaccacatgttctcactcataggtgggaattgaacaatgagaacacttggacacagggtggggaacatcacacactggagcctgttgtggggtgggggagggaggagggatagcattaggagaaatacctaatgtaaatgggtgcaacaaaccaacatggcacatgtatacctctgtaataaacctgcacattgtgcgcatgtaccctagaacttaaagtataataacaaaaaaattttacaattagaagagtgtttctctgtccacctctgaagcaaaagaatatttagtttgaattaagaggcattaattactctcagtcaaaaaattttgttttgtttatgtaaataacaaaagagttcaga

SEQ ID NO: 21829 - DNA, 1082 bp, Homo sapiens
tttatgttcaaacattatgttgataatatttttagcagtattacacagtggaggtccaaattggattagacttttgcattgaattccaaagtattggtaagtctagcacatagtataaagtcttgctaaattcttgtgggtacattatttttaaaacctgtctgtctgtcggtatcacacagaggtcacttcttgagtaaaataagatgaccttaagaattcacataattcttgaagaagaatataagtcacgatgcttccacatgaggccgcgtcacaccaccatcgtttggaaatccagcaccccagccgttttaccctaagataacagtgcagcacttagtgtggttgaatgtgtcatgtgggaatgatttttggtcaccttttcagttcattgttagtccttttatgtttgtgtgcatctatgttcgtctgtgtgtttggtaaatatgaattgaatagatgacttcttattttatgttttaggccaagattgacagacacctaatattcatgacttgagaatattctgcagctataaattttgaaccattgatgtgcaaagcaagacctgaagcccactccggaaactaaagtgaggctcgctaaccctctagattgcctcacagttgtttgtttacaaagtaaactttacatccaggggatgaagagcacccaccagcagaagactttgcagaacctttaattggatgtgttaagtgtttttaatgagtgtatgaaatgtagaaagatgtacaagaaataaattaggggagattactttgtattgtactgccattcctactgtatttttatactttttggcagcattaaatatttttgttaaatagtcttttgttggtttgtgtgcattatcttaggacagctctgcttcaaataatgaatattttcctgtgagtttataatttctgtaacaagcaattgacatactgccgaggcgggtggatcacttgagatgaggagttcgagaccagcctggccaacatggtgaaactccatctctactaaaaatacaaaaaaattagccaggcctggtagtaggcacctgtaatcccagctac

SEQ ID NO: 21830 - DNA, 2080 bp, Homo sapiens
aatgtttcttttattttcaggagtttttaattcatatctagttcatttccactcatatctatttctgctaatagattgacagcaacctttggtttaatgctgtgttctctagctacaccaacaagttatatattcctttccaatattaaccaagtatttattttatgttagcctatgactgagttttatctatgcttgcacatatatagaatgtaaaaatataattctccatgtttaatgtatccatataaaaatgaaaatacccattttctgcattcttaaagggttaagaaaagtaacatgtaataagcacatggaggactttagaccatttcttgtgttagaggagactttatacatttgtgaggttttctgtcttttggtccttttatgttcttagtccatttcattattgttttaatatttctaccaaggaatgaccaagaaaagagaaaggaagaaaaaaaatgtgttaatcattttcttttaatggtatgtcagcagaaggggttctgactgtaagctaatgtgcacttgtgcctgtcctctttgtcttaaactaaagttggtggtatgaatcgaaaaatgtgtattggtttaaaaagcagtttatgatatgaaacagtcttccagtttttatatcaactcctttgctttcaacagtcagttcaaagcaccatttattgatggtttactgtatgccagacactgtattttttctttacgtattaccctacttaatcctcaacacaattttatgaagtagttattgttagcctgaaactggcatttctccatccttttatggtgctgtctttgaaaagtctcagatgtgtaacatgtcctagaagtagataattatcaaaggaagactgcaactgcaactcacttccctctgagaaaaaatatccctgactagattacatatctagttccagaccagaacctggtggtattaaaagtgttttggttgactattgtataccataatgagtacctacattcccaaattgcctgcctggttgttgtacagacttaaaaatctagcctgccttgatttttacttttcagatacacatgtttaaagagatctttgctggtcacagtagctcacacctgtattcccagaactttgggaggccaaggtgggaggattgcttgagcccaggagtttgttcaagatcagcctgggtctctacttaaaaaaaaaagaaaaatttagctgggtatgttggcacgtgcctgtagtcccagctactcaagaggctgaggcaggaggatcacataagcacagaagtttgaggctgcagtgaactatgatggagccattgcactccagcctgggcagtagaggagacttgtctctctctgtatatttgtctctctctccctctctctctctgtctctcataatacatatatacatacatatatatatacacacacacacacacacatacagagagatatataaaatagatataaaaataaagatattttaaagattatttataaatatatgttttttaaaaatgtagtctattataagccaaatgtcattaggcatgtagtccatttctttctgtgttcaggcaggagttccagttctataaacattggtttatctgtttttctagcaggtgcacacatgggttctcagtgatgtgtagccggggcatagattgctctcagtctgttgcaccctgcaggggagatgtctgaggtcctccctcgcctggctgtgctggacgcacagtgcatagcagaactaactgcacagcagaaatgcctgttctgcgttcccattgatacaccaacagctaatgaagtctcttttacttttaagaaacccttatttggctttggcatatttacatggtagaggcctagaattttataaataaaattttgaagaatagaaatgtattttttcacgatttaaaaaccacctgtatggtttactctggagttgacctgttccactcatccttctccccagttcatttgtttcgtttcaattccactttcccttatagctatcttcaaagcagtgtctatgggacagcattgccaagagccc

SEQ ID NO: 21831 - DNA, 1082 bp, Homo sapiens
ggagtcttgctctgtcacccagactggagtgcagtggaatgatcttggctcactgcaacctccacctcctgggttcaagcgattctcctgcctcactctcacaagtagctgggattacaggcgcccgccatcgcgcctagctagtttttgtatttttagtagagacagggtttcaccatattagccaggttggtctcgaactcctgatctcaggtgatcctcccgcctcagcctcccaaattgttgggattacaggcgtgagtcaccgcgcccggctataaaatttcaatcttactaaaatacattaagcgtagaatatagtagtgacttcttagttttgggtacttgaaaaaatatagcatgtatatatctggtttgttttcattttttaactttatggtttcatgatgtctataaactaaaaaaaaatcatatacatatttctaaatttaggttaaatgtgcacagtactggccaacagatgaccaagagatgctgtttaaagaaacaggattcagtgtgaagctcttgtcagaagatgtgaagtcgtattatacagtacatctactacaattagaaaatatcaatgtaagacctttcttgcccgaaattgtggactttatatgatggtttaaagaattattctttattattagatttgaagtttgataagcacatgcatttggataattcctatagtatctagccataatcacgtgtttttagattgtgtgtctgcatctagtagctttctgaggactctgaagaaacagtagaaactaagaatttcaaagttcagtttgatatttggggattaaaaattaattaatagaaatacatgaggattaatagagagggctttagaatcaggcaaacctggattcagatccagctctgctgcttagtagagctgtactttagacttgttccccaccctcactgatcccttcctcatctgtaaaatggaggttaccacgccttccctccggggctgtcctgaaggtcaaatgaggatgtgtatgcagagcacctgaccttagtaaatgcccagcaagcaatagctcccaggacctgtgactgcc

SEQ ID NO: 21832 - DNA, 1074 bp, Homo sapiens
cagacgggtgtcacaaatgaatcccctcttgcaagccccctcaaatcaaaatagcctttccttgccctgagaaagtgccctcatcccctccccgggggcacggtgttccgatgcctatcgccctaatcgtgcctgttcagctcacatagatgcaatatgtagtataaacacctgtgattcgctttttttatgtcaactagactaccttttaattcaaacaaaactttatctcttttaaaatgatgtaactgctttccccttcgtttaatccttgtcgtattattcccaagattgaatttggtgacggttaagttaatgctgcttctgatgtttggttctctctgtgtaaagtaaaagacgggctttcctgtaaatggatgatcctgggtttttcccctttccatttaattagatggcagtgaaaaatgtgttcagaaagtaacgttttcttcttgaacacattagtgggaagtataaatattctgattcccatgatacagagtatgttagaatagggatctaagttttaaagaatgctggtaaggactcttccaattatagacaatctgaaacgcaaattctggtaggaatcttcatgtgagagagcctgccagctgcatcttctccagttacatttgttttagcagaggctgctgtctctctaagggataggttatatatcgaaatagatttgaaaagagaaaagtgaatataacttaattcagcttaacattttggtttaagaaatttaattttctttggtatcattaatatccttgaaaattcaatgagaattgtgattcctctttccagaaaaatgaacttaactcgcatccactggagatttcacatgcattttcaaaaagataaggaaatccttctatagattcttaccgaggaatcctgtagtttccttggttggtcaatgctcatattattttttcctagttgaaaacaagaccattagtttggtcagtagaaaccatggcatgcacactggtgttacagtaaaagtaggtcacaaaccaagaaagttagtaatggaaagcaagtcaggaagtttgagctatgtgt

SEQ ID NO: 21833 - DNA, 1025 bp, Homo sapiens
cccagctactcaggaggctgaggcaggagaatcgcttgaacccaggaggcggaggttgcagtgagccgagattgcaccactgcactccaacctgagtgacagagtgagactgtctcaaaaaaaaaaaaaagaaaggaaagaaaaggggagcttaaggcttcaaattcccgattgaagctccacataagtgacctgaaaagtttctgtgtctgccctaaagaaacccgtatctcttgtagctacagagctgaggttggtgaaaaccaaatccagagtcttatcctgtaggtggctgaattacagtgctaactgaattcccttctcaccttggtctgctattaaaatgagggcattgattgggaaggaatgggatctgcacatttggaatagggccatatgggaacatcctgatgaagctggggatgttaaactcctaaatttgactcactcttttttgccagtagaagcagttcttccacctctgaggaggttaactctgctttgcctgaagaacctgtaatgacctcccttgaggtagttaccttgcaagacattgccggttttcctcaggaatccgtgaagagctctggggttgcttttctcttcaggtcagagattgcagtgggagctgttgccactgactgggggtccttagctgcagcagggatggttggatctaggatggcaggggctatgtgatcaccaaagagtaagtaggtgtgttgccatcatgggggacagcggagtcaaagcaacaatctgaacagcctgacttgggggtcctaattgggtaggtggtcatggtgtccctagaagagaactcgttgggcagtctactgaattctgacttgatctctataagcagaagagttctaggtcaagtgaatggaagctttactttaattaccaaagaaagagtcatggtccctcaatcagttcccagatttgagtcattttacagactcagaaccccctgactgaggggaggctggatccttttgaggaaggaccccattgcgctgcta

SEQ ID NO: 21834 - DNA, 1048 bp, Homo sapiens
tcatttctgcattccataaatttcatttggcatctgtggaattaaggcatcttcattgtatttggatctctgaatcataagtgatatttgcctataaattaagcaatgatatttaaataagagattaccacaatcatattttataaatatacaaccatttttaaaaacctgacaaaatctacaaaaaaaagaaaatgaaatatatgtggagttttagaaaagactgactaggtccaaggttgaggcacatagtggttaagcacattgtcagctccggactctgcctcttacaaggaaggagggggctttagatgttatttagctgttatttagcctttctacacctaagttcccctcacctgtaaaaaaaaaaataataataaattgcttactttgtagaatcattgtaaatgttctatgtaaaatatgaatatagtactcacagtaaatatgtgtgtgtgtggtgtgtggtgtgtggtgtgtagttcagcaatagaaaatggaatttaataagaacgttatgagttgaaaacaatggtctgtggacaatattgaatttcagttgccaaaataaaatagacctcatgtttcccttcaggatcctctaactctgaatatgaatagaagtatcagtcactggaaaagaacaaatgtcctctagggatgtggcaataggaataatcttatctcagaccataattgggttcctgatgaaaatattttttctttagcattgtatttctctttatttcaccaaatgcacattaaggtctacagatctgattctcaaacacctggctgtagccacctcctttgtgatactttataaaggagccccacagagaatgcctgcttttgggttgaaacattttctcaatcataattaggtacaaacttgttttctatgttcacaaagtgggcagggctgtgtgcattggcaccacttgccttttgaatatcttctaggccatcacagtcagccccatgtactcctgctgggcagacctgaaactacaagctcccaaatagaatgggtgctccaacatcc

SEQ ID NO: 21835 - DNA, 1043 bp, Homo sapiens
gagctcacaccttactcaacatcagagaattcatactggagagaaacctttcaaatgtaaagaatgtggcaaagcttttaacagacgctcaacccttactcaacatcaaataattcataccaggtagaaaccctgcaagtgtaaagaatgtgctaaaaccctaaactggtgctcacaccttactcaacattagaaaatcaatactggatagaaatcccatatgtgtaatgatttttgaaacatcaaaatgaagattaaataaaaattagaagtgtcactttagaaagaactaaggtgctagcacttccgtaaattactctgaatcagtgtgtttattataacaaataattcaaactcaattagataattaaattgtatgtttaaaaagagggacgacattgatggagaggcataattatattcaatgttcacttatttttgtaatcacagtattcatgattgagaaagtattattgatgtaattaaattcaaattaaccttttttttccccactgtggttgattattgctgtctctgacatgagagtcccttctacgttaggtaggcatcattcacatgtctcattcacatgtcatcattcacatgtctcatgacgtcattcacaagtttcccatggaagactaagagcattggcatataggatgtatgatgaaatctaaatggagttgctctttttgtttgacttacaacactgaatataagtcatatatgagttaggtgttcagaatattattgttctgcattaaagtgtgagacagaaacactctgagttttagatatgaatagttttaccaactacccattaaaaggtcttgctagtccattaatattctaatgtatcttcatagcagcaagttagaagtcctgaatgttactgtgataacaataaagaaatcacaaatatcagagagtggtgcaaataacttctctctggtagaacatagattattaattcaatcctctaaatacttaggctcagtttaagaaaagagagaacacatttttttaacataggtcatggt

SEQ ID NO: 21836 - DNA, 1146 bp, Homo sapiens
tgataaccagattatgtaaggcacacaaacaactctataggataaaatttaataatctgattaaaaatgagcaaaaaatgtgaatagacatttctctaaagagggcatacgaataacagtgcatgtgacaaggtgctcaacatgtggtcatcagagaaatgcaaatcaaaatgacagtgagatgttatctcatcccagttacaatggctgttctccaaaagtcaggcaataacaaatgctggtgagtatgtggagaaaagggaactctagtactctcttggtggggatgtaaattattacagctactatggagaacagtttagagttcctcaaaaaaaaaaaaaaatagagctactatactacctagcaaccccaatcctaggtatgtacacaagggaaatcaggacatcagagagagatttgcacctccatttttattgtagctgtgaacacaaaatatctgagacaggtctcatccaatttaagtagtttattttaccaaagtgaaggatgcacacctatgacacagcctcaagaggtcagggcacagcttggttttatacattttagggagacatgagacttcagtatgtgtaagttgtacgttggttcagtctggaaaggtgggacaactcaaagcagggagggagtttccaggtcatgggtaggtgggagacaaacggttgcattcttttgagtttctgactagcctttccaaaggaggcaatcaggtatgcatttatctcagtgagcagagggatgactgaatagaatgggaggcagatttgccctaagcggttcccagcttgacttgtccctttagcttagtgatttgggggttcaaagatttattttcctttcacacagcattgtttacattagccaagatttggaagtaaccaaagtgtctatcaaaaacagatgaatggataaagccaatgtacatatacacaaaggagtacttttcacttataaataataagatcctgttgttggcaacaacatggatggaactggaggtcatatgttaagaaaaataagccagccacataaaggcaaaattttttcttgcaagacctttggctcttctgagtcttttttggttctgtccactttataggattgtttttcctatttctgtgaaga

SEQ ID NO: 21837 - DNA, 1071 bp, Homo sapiens
cttttcctcttttagggccaccgttttcgcaaaagtgtgttttatattttttttctccaaaaatactctcgctcagcattcagtggagattggtgtagactttctgtcagccacatgccttttgagatactgagaatacaaagctattactgtctaatatgaaagtctagccgctagattttcaagcctagctgctaggctttcatattatacagtaaataattattgaaaatctgtgtctttgggttacattgggtttccatcttttggactctgctcctatgtgagttgtgtttatgtatgtattatatacatgcagttgtctatctgcgttcctccttgtttgtcagtttgttgttcttgctttcccttcttacctgatggttcatttccaccagcccctttcttgtgcttaattggccataatatctagtatgcagtactgaattattacttattaaatatagtactatgatatgtagcactgaattattattaaatttttcatgcccccctctttttttatttactgtacaagacattttcttccctatgactgcttttctctgtaaaaatttaccaaaaatatggtatcaattttattttttcattttggatagatccacaattaatattctccaaaaagtgatcatcagtagaaaagggttctcactacttttgcatagcgtcattttataaggagcaagatagaaccggtgtggcctgaccaagttaattagtaaaataatgaataatgaagtatgtttttaaaaaataaagattgttttagtaaacttttttatattagcaactttaacaaactaagaaaaaatgaagtctagtataagtaggagcgtttgttcacttgtttttcttttcatctgaagacagtatagaggaaatgaaggacagatgcgggagctacaagatcagcttgaagctgagcaatatttctcggtaagtgagaatcatttttaacatacacactgtttcaaaacctgacttaaaacaaggtatttagattcttttatgtgaactgtaattctttttcaaatgactcttcatcttcta

SEQ ID NO: 21838 - DNA, 1026 bp, Homo sapiens
atgcctgtaatactagccactccagaggctaaggctggaggatagcttgagcccaggagttcaaggctgcagtgagctgagaaggtgccactgcactccagcctgggtgacagagtgagacctcatctctttaaaaaaaaaagaaaagaaaaaaaaagatggtatcagaaatttttaaataaactgaaaatttgtcttattcatttccgatcttagcaatgaactgtcctgaacataaccaccagcacagccttgttctgccctccgccatgattaatgattcaaatgggaagggagggggtaaagaaaagattatcttttgcttttaattatatgtgtttattgtgatttttaaaataaggcatcatatctcttccagaatattaaatgtaagatttactaacatgcatgccttctgcacagtttattacatgactcctactcccattttacaggaaaagaataatttagagatagatttaaactacaaacttaaatcattacaacaacggttagaacaagaggtaaatgaacacaaagtaaccaaagctcgtttaactgacaaacatcaatctattgaagaggcaaagtctgtggcaatgtgtggtaagtgtcagttttaatatttttacaaaattgactttaaatagtgactagaaaaaatttggttttggtcaaaattttgtactctttaactcgtagaaagtataatataaattataggcctggcacagtggctcatgcctgtaatcccatcactttgggaggctgaagccaatgggtcacttgaggccgggagtttgagaccagcctggccaatgtggtgaaaccccgtctctactaaaaataaaaaaattagccaggtgtgtgtcgcacgcctgtaatcccagctactggggaggctgaggcaggagaatcgcttgaacccaggaggcagaggttgcagtgagccgagatggtgtcactgttctccagcctgggcaacagagtgagactgtgtctcagagaaagaaattataaattata

SEQ ID NO: 21839 - DNA, 1035 bp, Homo sapiens
tagttccttatagtattaagttaggttatttttattgattttaaaagctttttttctttttaaaatgtaagcatttatagctataaatttcctcctttgcactgatttttcagcatcctactaggtttggtacattgtattttcattttcatttgtctcaaagtattttctaatttcccaatgattttttctttgacccatagttttaagagttcattgtctaatttccacgtttgtaattttccagttttcccctattattgtttagtagtttcattccattgtgattggaaaagatactttgtgtcattttggtcttttaaaagttattaaaacttgttttgtggcataacataataagtctattcttgagaatgttccatgtgtacttgagaaaaatgtgtattttgttactggatagagtgctctctctctctttataatctgttaggtccagttggtttatagtgtcgttcatgtcctctgtttttttattaatcttctgtctggttctattcattactgaaaatggattattgaaatctccaactatttgtagaactatgtatttctttcttaaattctttcaatgtttgcttcacatatcatggggcttgtatatttatataccaaatgtacatatttgacgcatataaatttatgataatatatttttggtgaattaactcttttatcaatatgtaatgtcttttttgtctgttaaccatttttttaacttaaggtctgttttgtctgatattagcctacccacctcagtgctttttttatttactatttgcatggagtattttttcccatctttcacttttaaccatttgtctttggacttgaagtgagttccttatgggcagcatatagttggatcatggtgtttttgtttgttttttaaaatccattttgtcagtctctgtagtttgattggagagtttagtccatttatacttaaagtgttagtttttagctccagaatttgtttggtttcttaatatagtttctttctctttgttgacattc

SEQ ID NO: 21840 - DNA, 1125 bp, Homo sapiens
gataacgtgaatagagggtggagacatgactggctatgacatgtttggggaaacaaggaagataaggttggaaggaaatattagcgttagattgtggaggatttgattggtaggctaaggattttggattgcctttacactgttgtggctattaaatatttataaataagaccgtgctaggatgaatgaagaagatgaatctggtgtgtggaagatgggttagcatgggaaaagattggagagacagtgagattggacagttttttaaaattgttattattgtaatagtccagaaatgattgaagcccaaaattggggcatgagaatgagaaaagaagaattaatggaactttattggcagggaaaagatggggaaccaaagagagaggcaatagtcagatgactctaaagaggttgagcctggattatagggagaatggtaaaaatagcaaagtcaggtttggaaattgcttgtgaagaataggcctacagataaattcaattttagattcgttgtgtttgaggggatagtggagcaatcatgagaaaatgacctgtagactgttggagatacagaactgagctcataattacagataatgatttagaagtcatttgcacaaaggtgcaagttgatataatggtaaagggagaaacaatggagggaaaaatgagggtgaaagatgaaggttgaacaaagaggaagagtggaggaggtaagccatcaaggcctccagagttaggacagccaggtatcatggagcccaacacttctaaaacaacattttgttaaagagaatagtcaacagacagatttggttgttttttccccttcaaatcttataatcttgtcctctttttctgtttagttccacagctgtttattgatagctgttactgaaattttattaccccgtcaatctgaacttggtaaagactgaattttcctttttttttttctgagatggaatctcactctgttgcccaggctggagtgcagtggcgcgatcttggctcactgcaacctccgactcctgggttcgagtgattctcctgcctcagcccccacgagtagttgggattacacgcgtgcactaccacgcctggctaatttttgtagtttta

SEQ ID NO: 21841 - DNA, 1048 bp, Homo sapiens
caaaaaaaattagccaggcgtgatggtgtgcacctgtaatcccagctactcaggagacggaggcaggagaatcgcttgaaccctggaggtggaggttgcactgagccgaggttgcactgagccgagattgcaccattgcactccagccagggtgacaagagtgaaactccatctcaaaaaaaaaaaaaagacagtgcatgaatttaaatttttggttctatctggcttctgtgaacagatgataactgcaaaaattacggagaagtaagtaagatagttgggagttaaaacagtggaatggctaaatgcatgagccagtctgcttgggttcaaatactggttcctccatttagtagccatggaacaatgaacagtctccttcatttcactatacctcagtttcctcatctgtagagataacaatagtacttgtttcataggatgttttctgaattaaataacttagtattcagtaaatgttagctgttgttaagtattgagattgtgttaatacgtagagccctggactctaggataggggaattggaatatctgggtcagacatgtaaattacatacatcttttacagtacttacataaatactgtaaaagatgttattagatctcgtgggtgtgggtttgttttgttttttttgagatggggtctctgtcacttaggctgtaatgcagtggcacaaatcagatcactgcaaccttgaactcctggggtcacgtgatcttcccacctcagccttttgaatagctgggactacaggcgtgcgccatcacacctggctaattatttttattttttgtagtgacagggtgttaccatgttgtccaggctggtctcgaactcctggcctcaagtgatcctcccacctcagcctcccaaaatgctgggttataggcacgagcttctatgcctggcctttatatctgatggtttttaaggttccttctacttctaaaattctataattcattacccaatctacagtgtagattactgaaacataaaaatgggaatgtaaaatgtttacactgt

SEQ ID NO: 21842 - DNA, 1039 bp, Homo sapiens
tgggacaacaaagttgttattctcaaaagttggtaaaattttttaagaagatataattcatactacaataacagcatcttcatactacatagttctagcaactttgagacactctcaaaaagtttgagaagttttaactggagattaacaataacaaacaccttgtattagttttagcaacccaaagttgttctgtttccagaaggacatcaaagtgagtgtagttgcaatctgtcaaataaaagattggtatctactatgtatgttttcaacacctctttaatcttggttgtccaacctataatgtgactgacttccagcctttttaggacattgccagagtcagggagcttgttttcttaacaaacatgccagaaaactataaagaaaaaataactttttggagggggtgggagataactttaatacattaagcaaattaaatcaaaggacaaaaatataacagtagacacaagacaattttgaatcattaacaaaatgtgaggtagactagtgaaattcaccaaattttggttaagaacattttacagtaataacacgggtgccccattttctaaaaatcacaaaaagcaattgcataaattacagccaaaaaaaattataacaattgtcttctagtttttcgtttacattcagtattaacctgtgtgaactgtcatacatgctgaggttcagcaggtctacaggtgagttactgtgtgggcctagcgaatccattcatcccacatcagtgtcctaagggattgcaaagcttaaagctgaacacactaggatatatatatatatacacacaaatcatggtgtcctgtgcttgtgcaattttatccttaaagaaggacctaacatactcaagaattatactgatgataagatgattttaaaagatccaaacattagtaagataggctttgaaaagaataggcagatcaatttctccattataggggtgatggtcttttggctttattctggcatatctcttccagagttaaatagtatttaagagctcataataata

SEQ ID NO: 21843 - DNA, 1035 bp, Homo sapiens
tctttatttgtattaattacaaattttgcatgaggttatcagtgtattggatctgtaagtactttttatgagaatgtaatgtgaggaggaagaaagcactataggctaaacactattaatattaagctgtttcgacttacttatttgtaactatgatgttaggccaaaataacctgcctatttcaagttgtgcttcattttgaagaattttaaatataaccaaagaaatgtggaaagttccttgggagttcagcttttagagaaatttatcttaattcaagaatattatttgtaaactatcaaaatctcttattagtttttcttttatcacttgactgtcagagatatcaaagggacactcagaaaaattgttttgttttttgtcctataaagtacctctgataaagattaatgaaggaggttaaaattaattattcaaaagaggtttttaggtcagccaatttttttttttttttttttttttgagatggagtctcattctgttgttccgggctggagtgcagtggcgtgatctctgctcactgcaacctctgcctcccaggttcaaacgattctcccacctcagcctcccaagtagttgggattacaggcacccaccacctctcgaactcctggtctcaagtgatccactcgcctctgcctcccaaagtgctgggattacaggcgtgagccactgcatctggccaatttttctattttttgtagagatggggttttgccatgttccccaggctggtctcgaactcctgggctcaagcagttcaccaccctggcctcccaaagtgctgggattacaggtgtgagccatcgcgtctggccctaggtctttaatgtcttactgcagtgtttaatagttttcagtgtacaagtcttaatgcttcttttgttacatttattcccaagtattttttttcttttttggagacagcatctcactttgtcacccaggctggagtgcagtggtgcaaacacagctcacttcatcctcaacatcctgggctcaggaaatcctcc

SEQ ID NO: 21844 - DNA, 1048 bp, Homo sapiens
ctttgcttatattattttgccttttcttgtaggttcctgcttcagtttgatagctgtttttttgagaattaagaaatatattaaatatacatattggtagactgattttggattcagaaacattgaagtataataaataaagcttattttagaatcaaggaaaatttcctttcaagcatatactttattgcaccttgtattaaagacatttgtatactatatgtttctcctattagatttataagattcttgaggtcagtgtggcatagtagaaaagaaagtgagcttaactatagagatgtggtttcctaatgagccactttctagttgtatgaccctagcaaattaactctttttctctttagtttttttttttttttcaaatctgtaagcaatgacagtaatctcttatgtgataattttttcgtaggcttatttatttcttaaacatttattaactgtcgaccttgtttttaaaaattattataaagatcttttatgtaagttcacagatcagtgcgagggacgatggataaacatttaaatagtgtggaaaatgctacagtagtattttaggatatacagggtattatatagagcatagagcaaggacatatgacaaagattggaaaagtcgggttagcacttaataaattcagaaaggataagtaggagtcccttgagctcagaagggtatagagcaaaggcatatcaggccaagagagcagtatgtgaaaggccaggcaaataaaagtattccattatgacttgtgactgtgttgtattggaaaagctgcaagagataaggctgaaagaggtaaatgggggaccggatcatgaatgaccttgtaaggcaggaaggcattgaaggtttaaaaacctaaaccagccaggcacggtggctcacacctttaatcccagcactttgggaggccagggcgggaggatcacttgagctcaggagtttgagaccagcctggggaacatggcaaaaccctgtctctacaaaaaatagaaaaatcacctgggtgttgggctgcatgcctgt

SEQ ID NO: 21845 - DNA, 1049 bp, Homo sapiens
ttctatacattttcagtgtcttttaaaaaaacatgctttttgttttctttttttttttttttttgagacagagttttgctcttgcagcccaggctggagtgcagtggcgtgatctcggctcactgcaagctctacctcccgggttcatgccattctcctgcctcagcctcccaagtagctgggactacaggctcctgccaccatgcccggctaattttttgtatttttagtagaggcggggtttcaccatgttagccaggatggtcttgatttcctgacctcgtgatccgcccatctcggcctccgaaagtactgggattacaggcgtgagccaccacgcccggccaacacgtgctttttcatttattgggtgttttcttattacaacagttacagtgatcttttgtgacctcctttatcctaaatgggagcagaactcccagagatgtacattgtgataacatttttcagtaatagacttgttggctttgtttaattttggctgtagaggtggagtggaatttggaccatgagtcttttaaagtcataagcaataccgatgaactcaatgtgtttgctaagtccaaatgacctttgagatgagatttacatcaaataaagtatttcttacatactgggatattgttgctacctattgaaaagtgcttaaaatgtgaatcctaataaagagatttttaggattctttaatatttgaagacagaagagaaaaaagtatcataattcttcccatttgactttttattgggtctgacccaggcatatcttatgagaaatattcatatagtcgtaaggtttagatgttatagtagaagttcacttaatcaacgtaattgggaaaattggatcagttaactaaataataactgaatatctaaaaagttgatgactgttggttattaactgacccagttctcccaattacgttaagttgatgagactcttcttgttctctgttgcaggcttgcttgttcactcatgcttccagacataatcaacatcttagggttaaaaatggctactggtctct

SEQ ID NO: 21846 - DNA, 1029 bp, Homo sapiens
tccgcctcccgggttcaagtgatttctcctgccttagcctcgtgagtaactgggaccgccaccacacccagctaagtgcaatggcatgatctcgatcactgcaacctctgcctcttgggttcaagtgattctcttgcctctgcctcccaagtagctgggattacaggtgcctgccaccacacccagctaatttttgttttttagtagagacggggtttcaccatcttggtgaggctggcctggaactcctgacctcaggtgatcggcctgcttgggcctcccaaagtgctgggattacaggcgtgagccaccatgcccggcctcacgcccagctaatttttttgtatttttggtagagacagggtttcactgtgttggccaggatggtcttgatcccttgacctcatgatccacccgcctcagcctcccaaaagttctgggattacaggcgtgagccaccacgccccgcctgaagtattttcttttgttatttactaattgagtatctgctttggcaaggttctgaattagaggctattaggaataaaaaggtaaatataatatggttgttgcttttaagctttataggtaagtcagacacaaataactgattgaaaataaaaagtgataagcacacgaaagagatttagacaaagtagatgaagaacagctagagaagattgggaaaggctttatggaagaggagcaatgagtggaatttatatagggggaaaggtattctggatcagcactatccagtaggaatataagtgagccacatatgtgatttaaaattacctggtagccacattaatggagtaaagagaaatagataaaattaattttaatatcttttatttaacctgtctttttttttttttttgagatggagtctagctttgtcacctaggctggagtgcagtggcactatcctggctcactgcaacctccgcctcccaggtttaagtgattctcctgcctcagcctcccgagtagctgggattacaggtgcttgccatcacgcccagc

SEQ ID NO: 21847 - DNA, 1122 bp, Homo sapiens
tttgaaatttactgttgtgttttgttcaactagtgtttgaaagtttgttgttatcacaagacactggattaaatttttcttcaaaaatagataattttcagaagataaatttagtctttttttttttgagatggagtctcgctcagttgcacaggctggagttcagtggtgcgatctcagctcactgcaagctccgcctcctgggttcacaccattctcctgcctcagcctcccgagtagctgggactacaggcgcccaccaccacgcctggctaatttttgtatttttagtagagatggggtttcgccatgttggccaggctggtctcgaactcctgacctcaagtgatctattaggcattttagaatgtgagaaatacttgggttaccttaaataatagtagttcattgggaggatatgtagaaataagagaagactgtttacagagctacatcttgtagaagaaaacaggaatcaccaaacactaggctttgctgaagaacaattcaccagctcttacagaaacctgaatatatttcaggactcagaaggtggctgagaatagtacagctctagcagtaggcttgccttgttttaattcctcaagcagcaggtatcctgtaattcctaatttagttctttgctgttatagtagtaggtctcaacccagggtgattttgcctctgaggagacattttgtagtgtctagagatattttgattgtgaggactaggggaagggttgctactggcatctagtggatggaggtcggggctgctgctgctcttgctaaacaggctgctgctcctccatgcacgggacagcccacccataacaaagactctatgtggttcaaaatgttaatagtggtgagttggaaaaccctgctttatagtgactagatattggcacctcttgggtcacaaacccacacttgatctagttagctatgggaagcgtagcagggtcaggactttcaggatataactgaattgtctaaggttttttttttttttttaaaggaggtgcctgtggccatggcaggtttttcagaaaggagttatgaatttgacaagccactagactcagatttgtagtcagtacttctctcttgttccttt

SEQ ID NO: 21848 - DNA, 1037 bp, Homo sapiens
ttagaacatcttgaacatgaatcacttgaaaatgaatagcatttttctatagccagtggctgtgaaaaagaaaaaaaattttaatttttttaaaaagataatgaacagcatttacaaatgatagactctaaaaaacaggcctttaaccacagctttttagattctgataaacataaaactaagaagaaaagaatacatttcttccattagcatggaaggtctgacttgacctactaaaggaagaaatctcaatcaatggagaaaacccacgcagactctctgaattgtgcttaatggacggagtttagcgtcactttcctttcccccataatgtgaaccttaaaggactgggtgagagctgaacttttcccttaatcatataaacgcatggcttttctaaaggccggagcttacatacacaggttcagattctctattcaatgctcctgggaaatgtctattcgtgccgcattgaagcctcagtgcctgaaggcagaacttgaccattagcctttacagctggttgaacattaatgtcttgtgaactgttagacggaagcaccccttctagttgcctagcactgtgacacgatcccaagtgggcttaccacttggggatgtgttttatatcttgacacattttttcttatggagatgcaacacgcaaaaacagtccatggacgatccttatgcccagtgccccatggactggggtaatccctgtgatagagcctatgatgcccctggggccaagtgccagcaactcatggatcatctcgtttcatcagtgtcaccccctcccctctctctcccaactctgattattgtgtaccaaatctcagacatcacttataaatagttggtatctctaaaaggtgggccaggtgtggtgacttacgcctgtaatcccagcactttgagaggctgaggcaggcagacaacctgaggtcaggagtccgagaccagcctggctaacatggtgaaaccccccatctctattaaaaatgcagaaattagccgggcatgatggtgcatgc

SEQ ID NO: 21849 - DNA, 1025 bp, Homo sapiens
agataaagctttttagggccaggcacagtggctcatgcctgtaatcccagcactttgggaggctgaggcaggcacataacttgagcccaggagttcaagaccagcctggccaacatggcgaaaccccatctctattaaattaaaaaataataaaaaataaaaataggccaggcgcggtggctcaagcctgtaattccagcactttgggaggctgaggtgcgtggatcatgaggtcaggagtttgagaccagtctggccaacttggcgaaattctgtctctactaaaaatacaaaatagccgggcatggtggcacatgcctataatcccagctactcgggaggctgaggcaggaaaatcatttgaatccaggaggcaaaggttgcagtgagcccagatcgtgccactgcactccagcctgggcgacagagcgagactccgtctcaaaaaaatttaattaaaattaaaattaaaaaaagttttttataacccaaggcataactactactgtattaactcgttagatcattagggtataagaagtatacatttaattaattagtttacttccttgaatttcttttttaaagtacttgttctaaatggacataattacctttggttattctacatccttattactcttttttgagttggatcaaaaaatgagatgctaatatcgattattagagctaacgttgatatttagatcccttgataatcctgcttctttctgtcttcaagctaagaacaattactgtttcatactagaggaactctgatgtttatttatacctcaccttgttccagaaataatttaatgtagcttagacccagagtaagcgagactttagggtaggcataaaaaagaacaaaagatgaatcagcagagatcaaacaggaaggaactgtctctaacagaaattagctcacaagaactagcaaagctgaaatgaaatttagggtaagcagttctcctaggagtggcaatgttagagatatacttagaatttatagagattactat

SEQ ID NO: 21850 - DNA, 1106 bp, Homo sapiens
tgccgagggagactttaggacaagaggcgttgtttttgtgagaatgaatttttatactttaccccgaccccaccccctaccccccgcccaggtaaatccaagtaaatgattttctgaaggtcggtctcctagaaagcgtttaggctctggttttttgttttgtttctattttcgtgttttcccagttagggaaggaagaggagcctgtgcagagttgaactggggtggagaggtgccttgtaaagtatggtttccagagatggtgagacctcgtagctaagcgttgtttcctctgcacgtaactgtgagttgtgaacttgtggctcctgggggagcgggacagggcctggcagtgcgggggagggggcaaggaattcaggaagttggcgagaattcttcgtttttcattcttcgttgtaaattgcttctaaacacttctgaattttaaattgctaccgagaaggtccagaaaccgttctcatccaatttagtcacttttattacgttccactttgcctcccccaatcactgcggcggctcccagtttcagcgtggccgcatttggaaaaggctgaaggtagaaaactctggaatggagaggctggcgactggagcaggatccaggggctttaaattttaacctgaatgcgatcgaatgcgcgactcccagaagagatagccaggcgtccgcccggccgctcaacccccgccaggactcggaatgccttgcttttggttcttttcgtgagttccgaccaaatgtttaagtggactgggttttgcagaagctcatttgtaagcactgacggaaatgggttgtgggcatttgatttcctttgattccaacgttttgaaataatgtttctcggatttgctattcgaagcaattttctaaaaactcatatcttatttgctaaaaataaactctttggctcagtttgtgtccaggctgtgtacggcctccaaccctgagccccgaggagatcgagccctggcgcgagcctgatctctgtcctgtgtgtttctttgtatttgcaagtacaaggatgtctgcgtggatatccctggacactcgataccccccggggacctgcttttcccgcagc

SEQ ID NO: 21851 - DNA, 1043 bp, Homo sapiens
cttcttgtatttttatagctttgggtcttatgtttaagtcttaaatccatttcgagttgatttttatatatagtatgtataaatttttgaatagattttgtatggtgaaagatggggtccagtttcattcttctgcatgtgggtttgtggcagcacttactgaagagggtatcctttccccagtgtaaattcttgttggctttgtcaaagatcagttggctgtaaatatgtagttttacttctgggttctctattctgttccattggcctatgcatctacttttataaccagaccatgctgttttggttactctagtcttatatttgaagtcaggtagtgtgatgcctccagatttgttctgtttgctcaggattgatttggataatcagttcttttggctaatcagttcttttctagttccacatacatttaggattttttttttctaattccatgaagaaggacattggtattttgatagggactgcattgaatctttagattgctttgggcaatatggtctttttaacactgttaattctttcgatctatgagcatgggaggttttttcatttgtttgtgtcttcttcgacttccttcatttatgttttgtagttttccttgtagatatctttcacctcttggttaaatttattcctaggtattttattcatttgtagctattgtaaataggatttccttcttgatttcttttttggctagatcattattggtgtatagaaatgctactgatgtgtgtgtgtgtgtgtgtgtgtgtgtgtgtgtgtttgagacggagtctcactctgtcacccaggctggagtgcagtggtgcgatcttggctcactgcaacttctgcctctggggttcaagtgattctcttgcctcagcctcccaagtagctggaactacagacgcccgccaccacacctagctaattttttatttttagtagagacagggtttaaccttgttggccaggctggtcttgaactcctgacctcaggtgatccgcccaccttggcctcccaaagtgctggg

SEQ ID NO: 21852 - DNA, 1077 bp, Homo sapiens
gtcatgggaggaacccagtgggaggtgattgaattatgggtgtgggtcttttgtgcactgttctcatgatagtgaatgagtctcgagatctgatgattttaaaaaaagagtttccctgcacaagctctctctttgcctgttgccatccatgtaagatgtgacttgctcctccttgcttttcaccttctgccatgattgtgaggcctccccaacctcgtggaactgtaagtccaataaacctccttcttgggtatgtctttatcagcagcatgaaaatggactaattcatatagtaactcatttaattctcacaaagcattgaggtaagtattatttagagatgaagaaatagttacagaggttggcagcctagttctagaagtcatgtgttttaaccattacattatactgccttagagatgaactagattttgtccttacattgatattatattattttagctacttttgtaacaagtataaacttgttattgttgaagtaattaccttttaagttccctccaataatgtaccttctcttctctgccactcagtgggaagaaagggtcttatagtcaactccccttaaaaaaaagtctcccccaactgctcagaagtcatttattctgtattagtattttccaaatgtatttgacctcaaaacattcttttttatagcatacttattaacccctacctaatagtgagtgaagtattctatgtgacactagtttggaaaaatgaggcagtacttttattcactgtattgttgtggtataaatgtcccccctggaatagcagcccagattaaaacttctaataactgtctggttttgctatttatttatgatgtcctttgatatgtatattatataaatcctagttaaaattattttaatcacaaatgaaactaacatgagctactttaaccaacaacaagaaagggagatttattttgaggctataaagttatcccaagaggaatatagggatgtgggtatttcaaaagcagggagtcagtctggccaaatgaggaattagaaccagaaaatagccttataactctcattctctctc

SEQ ID NO: 21853 - DNA, 1114 bp, Homo sapiens
tttaaatgttctgtagtttaaatgaaatgaaaactgagattgtcaccttaattttaagagtgtggatacctgtgtgatttcctatccatcagcccaatttgccaacagcaccagaggcctctatgggatctctcctgccagaagtctgtgtttctgccagagagcactaacccagtgcatcatcctcacctggtcaggatgtgtgggacgcttcaccttcttccccaagggaaggtatcgagcccgcctccctgccttctcacctcccatgtgtacctgaggtctgccctgagggataggagcgattcctgggcttgacctggaagcatggcagttcgggctggtgatgagtctcagttgcaggatgaggggaagcaccccttgccctgcgtatgtgggcgccaggcagctcaggggtcccgggggagtggagagctgaccttctgctgttgtttgcagcctcctgctcggtgcgcttggagaggccttgctggttttctcagagcggaagagctcctgaacaagacggtcaagagaaagactcacaggctgctgcgggagaacagcttgtacacctgtgtacgagcccctggtctcatagctccctgttggatgtgtcagaaagaggaatgcaaggacagtgaggccaggtgggcagtgccatcaccctcacccaagtgaatgtggtggtggctgatgaggccgaggccctggtgcttcaaggagcaccctttctgggggtctgcaggtcactgcagaggagcggtctgttacatcttcccatttggagaacctctctcaaccgtgctgtagctggttctgcagaaacaggaagtacaggatttcatgggctggctctgctcgcctcgactgagcttcacacctctggatgccacatgctctctcccaaacactgctttcagtgcaaggtagtgggcctaaggggtttggttgtcttttttttttttcatttttaaaattttaaatttttatttattattattttttagagacaaggcctcactctatcgcctaggctgaagcacagtggtgcgatcacagctcgctacagccttgacctcctaggatcaagccatcctcctgcctcagcatc

SEQ ID NO: 21854 - DNA, 1040 bp, Homo sapiens
agagaactctcacatgttaacgtgtatgcatatcacctgggcatttgtgccagtgcagatgctgtttagtaggtcaggggtggaacctgagattctgcatttcgcgcaagctcccaggtgttgctgatgctgcttgtctgtgaccacactttgcatggcagatagaagaaagtacctgttgttctgcctgccagcacttcccataccttcctccaataaaatgttccttccttcttccaaccatgaagttcctgagtgagcttccttattcttatatgactctgcctcccaggccccagtcagttggtccaggagccaattagaatcgtccctggcattttgggactagaatccagagagatctaggcttagatccgctctgtgaggctctttctaactctgtggagggaactggtcaaggataaggggtagagagaatgtcccagtggttctcaagtccttggttccagttttcccaaatatatgaaaaaggattaaacaacaaaacaaaacagcattgtgaccttaaaggttatattaccagctctgattatctggtgcagaaactgttatcaggcccttatcacatgcaagtctctattgctagcccctgaacgttcaaagatgaatagcacatgccctgattgggagaagaccacatattgcaaatagggtttggcatgtgcgatggcaaggggttgtgggagccttgagaggaagtgcttgatccagttgggtgtgcggacgggggccaagttcagtaaaagttttctcaagatggatttttgaatggtgagtaggaattatgtcggctatatcggcagacctatgaaatgtttccaggcagagagaacttgctgagcaaaagcaagatgatggtaggaaactgtgtttgaaaaattgcaacccctttaaaagggaggtacatggctgtaactgggctgaagaagcaggcaagggagagtcttgtatgcatcacttttttcttaagagtcatatgcatttaaaaaccaatagaacaataaacctaagtctctgat

SEQ ID NO: 21855 - DNA, 1079 bp, Homo sapiens
ggaactttatatctcttataagcttgaaccttttatggccattgtttcatcttctcaagcaggatggtgatgctcccttctggtaaccaaggctgggtgggtcggcttggactaagtagaggccaactgggaagaaatctgcagtggacaccccatgagcatattcattctactatgagcatatcctactatgagcatattctattatgagcatattgtactctaatgtggcagagagcatgtaatttctctgccacattaattttcttttgaattagtgaagttttttttttgtctaaagtagaggatgctctcttctagttttttgaagcctccatttcagtttatttccattttttttagtgtaattttctccttcagcagttctcctatttattcgtagaaagaaaattcttttgaaaaagatcttatatagctcattctgacccccttctattgtttgaaagaatggtcgatatttgttagaagtttgaagcagcaagtgtgctgtcaaaggaagctgccctaggtagggagggaggagaaagcaccacacccttgagctctggcttggtggcctgggctggccctggctgatgacgtgttcctccatcctttgggaggttccagctgtaatcaggccctaggcagccagctgtccttcttcccctcatagcaattgagccttcagctcagaggcaaagttcatttctgttctggacaagtggttggcatctgtaaaatacaaagaatttattaaattaataaatactaaaacctcagtgaaaataaatgggtaaacagcagaagtagacaattcactgaaaaaagagatacaaggccaggcacagtggctcatgcctgtaatcccagcactttgagagaccaagacaggtggatcatctgaggtcaggagttcgagagtagccaaaaattagctgggcatggtggtgcgtgcctgtagtcatggctacttgggaggctgaggcaggaacaccacttgaactgggaggcaaaggttgcagtgagccaagattgcatcattacattccagcctgggtgacagagcaagactccat

SEQ ID NO: 21856 - DNA, 1044 bp, Homo sapiens
taacctctgcattcaggggcacatcaaaggtgtagctcctagtccttcattccaaacggggacttccctagacctagcccctcttttaacgtttaaaatagaaaaagatgtcaacacgtggcatcaacttcagtcctgtgctttggtttctcctacaacagctcattagtttaaaaggtaactccagaggctctcaatggaacatcataactcatccattcatcgacccataaatgtactgatcacccacactgccagcatctggtgtggcctttcccaattgggatgccacaggagaatgaagtgccacataaaaaatcatctgggtgacccccttttcagttggcccaaggcaggtacagagcagctgtacaggaaaacaccagcgagatgcacaggagagaaatgacttcattacatacatacagtggatgtcacatgaggctatgggttacagacaaggcacaacaatgcattacatacagtggatgcctacagcatcagggctaattctctcctcaagagttcttaggaattccagaggaaaggcaggaaaatacacagaggattaaagagtaacataggagattctctaataaccagcctggcgaggtattagagacacaggggcaacatggcaagaccctgtctctacaaaaaaaaaattataggccggctgtggtggctcacacctgtaatcccagcactttgggaggctgaggtgggcagatcacgaggtcaggagatcgagaccatcctggccaacatggtgaaaccccgtatctactaaaaatacaaaaattagctgggtgtggtggcgcatgcctgtaatcccagctactggggaggctgaggcaggagaatcgcttaaacccaggagttggaggttgcagtgagccgagatggcaccactgcactccagcctggtgacaaagcgagattccgtctcaaaataattattattattattataataaattaactgggcgtggtgatgtgcgcctgtaggcccagctacttgggaggctgaagcaggaggatcgc

SEQ ID NO: 21857 - DNA, 1248 bp, Homo sapiens
ggctaaacaggaaccatctgattcatgggctgccagtttgcagtttccaagtcttaccctcatgcctttgatcctcactcgattgtagattacctcttaactaaactgggaggctagtagtgttgatgtaataaatggaaaatactgtccatttcttacagtgaagcacagaaagtactataagaaatggcctgtattagtggttctcaaattttaatgtgtgtgaatttgctgtgaacctgagtatagtagaattggggttgaattcctgtcataactaggatggggcttcccaaatggtctggtgctgagtgtgctttgaaaagcactggcttatcacctcctgtcccacttctggtgtaatgtccagccgcagcatgccttctcatgcgtttggcctgtgctggctccttgtatctgtacatgcacatgaacataagacctgcagagagcccccggctgtaaacagaagtgacgcagagcccttctctccccgacaggagcattgtccgtgatgccagccgtgcacaccttctctctctttgcgggattggcagtcttcattgactttcttctgcagattacctgtttcgtgagtctcttggggttagacattaaacgtcaagaggtaagttggtgccaggattatagtctatttaatttgagtctagaatctagaggaagcagctagcgggtataacctttgtttccctctgtcccctcagaaaaatcggctagacatcttttgctgtgtcagaggtgctgaagatggaacaagcgtccaggcctcagagagctgtttgtttcgcttcttcaaaaactcctattctccacttctgctaaaggactggatgagaccaattgtggtatgcgcttatctgtggtttttctctttcctctcactgaaacagattatcacatgccttctaagaagccagacagcctgggaaggagattcttaaagctgttaaaatgtatctaaaaaaaaagcaaaagcaaatgtggaacagtagataaaatgtttttcctgtgagcttttatcagtccatataaacaagagttttaagttttttattttgaaatagtttcagattcacagaaagttgcaaagaaacttttatttttcctcttaataatgaggaaatagaagccaagagaggtgaagtggtttgccccaagtcactcagcccgtaagtggcagagtcaggatttgcacccaggaatttggactcctggtgctgtggtctc

SEQ ID NO: 21858 - DNA, 1031 bp, Homo sapiens
tagaatgttagattcattttgcccaaaggtgccactaaaaaggcaaaaggtcaacacgtgtcccgctgctgtagaaggtggtctcagtcgtcctgtagacccgacgtgggcggagactcagtgcacgtgagagtgatgttcactggtccagtcccctgccgcctgtgttccgagtgttttcctgataatgtggctggctcagctttccctttagtttctcacttggtacctagctctgtagtgcagaaatactctgagaacattggagtcccccaccgaagtttatatgcttagaagacactgctaatcgtctactaatcatttatttttacccttgagttaacacaaggcagcaagaaatggcgttgttattgagaaattttaatgtcgcataattttttttttttttttttaagagagatgaacgtcttcaaggggaaaccctggatcagcagctgggcagggtcctaggagaagtggctcccagtatgttcctgtcatccttttctgagactgtagcatttttcttaggtaattatgctttcaatcctaccagtcctgtagtctgctgagcctggagaaagaaggagctggctacctgaacatgtccctttgtgttgcttcctttttttttttttcttttttttttttttctctgagacggagtctcactctgccacccaggctggagtgcagtggtgcaatctcggctcactgcagcctccgcctcccgggttcaagcgattttcctgcctcagcctcccaaatagctgggattaaaggcacgtaccaccatgcccagttaattttttgcatttttaatagagatggggtttcaccatgttggccaggctggtctcgaactcctgacctcaggtgatgtacctgcctcggcctcccaaagtgctgagattacaggcgtgagcccccgtgcccagcccgtgttgtctcctttttttaagctttgttctgcactgggaaagtatcactggaccacagaaaaattggcagcagtaacttaggtgtgattt

SEQ ID NO: 21859 - DNA, 1051 bp, Homo sapiens
caaatgacctcagaaattaactgtgtttgtgacctctagagaatgggaagagaggacttaggaggccaggttgcactttatgccctccagtacttttaaaaaattgttttactgagatatggtatatgtatcatgcagttcacccacttaaagtatacagttcaggctgggaatggtggttcacacttgtagtcccagcactttgggaggcccagacgagaggctcacttgaggccgggagttcaagaccagcctaggcaatgtttgcatgtctctaaaaaaaagaaaaaagagaatttaaaaagaaaaaaaagcgtacaattcagtagctttactatattcacgtgtatgtgcagccatcaccacagtcaattttaggaacattttcattactccacaataaaactctgtaccctttaactaacaccctccatcttttcatcctcctatccacagccctaggcaaccactaaaatactgtctctggagattttcctattctggacttttatgtgcatagaataatatgtggacttttttgtctggctatcattgaacataatattctcaaggttcattcatgttgtggcatgtatcagtactccattccttttcattccattgtatggatataccacattgtgtgcatttatcaactgacaaacacttgggctgtttccattttggctattatgaataatgctgctatgaacacttgagtacaagttcttgtggatgtgagttttcatttcttttgggtacatacctagtagtagaattgctgagtcatagggtaagtccaccttgaatagtttgaagaactgccagactgttttccaaagtggctatagcgctttacgtcaccaccagcagtccatgaaacttccaattcgttcgcatcctcgtcagcactttttattatctgactttgtgattctagctatcttcatgggtgtgaagtggtatctcattgtggttttgatttagtagactgaatgcatttctttttttttttttttttttttttttttttgagacagagtcttgctgt

SEQ ID NO: 21860 - DNA, 1031 bp, Homo sapiens
gtgtgtgtgtgtgtgtgtgtgtgtgtgtgtgtgttttgatgggcagggccctcaaacgcaggtcttagggactgtactgctcattgaggcccacatgaggccattggcatggagggctcccctggccacacactgcccgaggtcaccctgacaacatgcacttacaggctgctggaactttggatctgtggaaccatttgcccagatccctgaagcagtctagtcaataagggagagaagccaagagcaaaatatcagacataggagatagcctgcagtcccccaactgagaaagacagccaagcacagtcctgtatgtccctattactgggaagaaaaaacaagaatttcaaggaattgatgacactatgtttatgagttatacttgaggccctgcagctgaggatgtggggaggggtgagcaaagtcagagcactctttgtggggctagttctgtctcaagaacctcacacagtccgttgtgcagacagggaaatttaattgttgaacaattaaggcaaggaccactgcaaccgcccagcaccccacaataggcaggggaggggtggcgtggatagagggataactctaccatgtaatacacaccagatatgtgcaaaattggatttaaccaggtaccaaaacagttacattagcatcatcatcatgaagggacattttaaaatatttgcccgtggtgagggatacaaaaagagcctccaaatcctgaaggaagagaacacgtggactagtaatacttgtggcagctgtagttggcattgacacctgccccggattcacattgcaagggagagttaaggctgtgttttctccactcgataaaaatgtcaggttataaaggcagatagtgatatctaagaagtcatggtgcaaattacctacaaaaggaaggaaaatctagattcctaacactccaggacaccatatacttgacactgtgagattctcagcaccttcctgcaaaactaatgcagtcttcagtgcacttgacttcagccaaataggattta

SEQ ID NO: 21861 - DNA, 1045 bp, Homo sapiens
gttcattagtttcatgtatcgggcatcaaatccttggcatgagtcattgtggtacagtgcacctgctgtgcatttattagtaactggtgtttaggaagttggagacagtaaccccaggaagttagagtataccccaacttattatctcaaattgtttttaaatatctaaatctccaggtcaagaaatcaaaatgcttaaaacgcgcgtgtgttaaggcctaaatattatggtaggaaagtgtacctaccagttttcagtttctgctttgcgacgtttgtgagcagtagtcacggttacctccccagcaataccgtaacttccaaagggagcacatttgtcaccagatcctgaactttttttagctacatcttctactgggaaagcaacagaaaggaaaacagggctttttggcctggggacatcttgtccacttggaggattagcattctggggacttagggtatgtttctggtatttctcatctgcaggaacagcaatgggcacttgcattgcaacatatctcaagacatctgactgtgaaacgacagcatgtccaggaagaggtttccatccctgtgcttcctgaacatttgagcctactaagataaaaggtggggcactggtcttcttggtgtcgcccatcacataagttggaaaagtgacttttggtggatgctgctgaaactgtggatccttaggattaggtaaatagagggttgcttggggaaaaggcccaggtgcaggtggcggtgatgggtgaccttgttgattcttatcagttagacaataaagggtccacatgttagaacatggtggtggttgtcctcgttcacttgttgccattgctataaaaaaaaattttgcaggaattaaagttttggtctctgtatcaggcactatgcatagtaatgtctttgtaagtctcttttacatataaaacagctgtagtgatatgtaccgtagagcatgctatagagagggctgcataatcgtgtttgacaggtgaaagagattctctacagttgaaaaaggagaacagtgttg

SEQ ID NO: 21862 - DNA, 1094 bp, Homo sapiens
ttattattatcattttgagacagtcctactctatcatccagcctggagggcagtggtgtaatcttggctcactgcaacctctgcctcctgggttcaagcagtagaacttctgagtagctgggattgctgggattacaggcctgcgccaccacacctggctaattttttatatttttagtagagacaggatttcactatgttgcccaggctggtctcgaactcctgagctcaagtgatccgcctgcctcggcctcccaaagtgctaggattacaggcgtgagccactgtgcctggccacatcaaattattaaacttaaaataggaaaccaagtcattggattttttttaaagattcataactaaaaaaggtatatgactagccttagagctcttgtctgagacttgtactgacctgcttctaagacgctacgctaattttagttggagaggtctaacagcaggttaaatacccagctgttgagtcaccctcgtctctgactaagttgtaagatatggtgctcatttatactaggcttcagaatggcattctggatatacagagagaactttgtgatgactgtatttgtctgaattcgaacctgaaactaggtacagggtacattataataacagtcatgcaggaagagttttaagtgattggcttctttaagaccagcctaaattctgcttctgttgaaatggggatgggcaaatttcaggaatttaattgtatcggtaaattttagacactttgtgttgatttctgtatattaaacttgccaagtatttcatatataactttgaagatcttgaatcttcatgtacattacaactaaagttttaattaatagtacacaactgagaaaaatagtatttttatgaccgtggaatacatcttatcacctttggagggcaaacattttcccttgtttgagggcatcattttcattgtgataaaatcaaattatatcaacttaaggtgagattctgtgagttgtgtgactaaaaaccagtatttactctcagatttaaatgttaagagaatatgaaaaatcatatcgaacttttaggcagtcaggtgaactactaaagat

SEQ ID NO: 21863 - DNA, 1049 bp, Homo sapiens
accccactgctctccagcctgggtgacggagcgagactccatctcaaaaaaaacaaaacaaaaaccatgttgtacagtagattacttgaactgatttctacaaaaaatatgggacacttcatgaatttgcatgtcatccttgttcaggggtcatgctaatcttcgtatcatttcaatgtttagtatatgtgttgccaaagcaggcactcatttcatcttttaaataactcagtatgtatctctaaaacagtgggagtcttttttgcttctaaaccacagtactattatcatgtataataataatttcttaattatcatcaagtatttagttagtattcacattttcttgattgtcttgtaaatgtcatttagtaattggatccaaaatggtatttagtaataggatcccaaagttctacatactgcctttggtttctatgtctcttaagtcattttactccaggtttcctcttccctcccccattttttcttgccatttatttttcaagaaacctggtcgtttgttctgtagagtattctaccatctggatattgctggttgtattcctggggtatcattccacatgttcttttactcctgaatttcctgtggactgatggttatttacaaaggtgtggccagatttatgtttcagttttttagcacaaaattcataggtacacaaaccataggtacttcctatgacatcaatcagagagcatttgctctctgattctcttctttctgtaatggtgagattgattcttgggtttagtcattgacaatctgacacatccatgataaagttgcctgacagtctttcacctaatgatttagtggttgatcattgtcttcatctttatttctttaggtgctgcaaaacagtagtctttcaattctgtcactccttctacatttattagctgaaaatctataaagaagagcttctgacagggtgcagaggttcacacctgtaatcccagcactttgggaggcagaggcaagtgtatcacttgaggccaggagttcaagaccagttggccaacat

SEQ ID NO: 21864 - DNA, 1050 bp, Homo sapiens
ctggctgttatttttttgttttgaaactttttgtagagatgaggtcttgctgtcttgcccaggctggtcttgaactcctgtcctcaatcagtcctcccatcccagcctcccatagtactgggattacaggtgtgagccactgacccgacctttttaaagtatttttaaattactttacttttatgtctacagtattggatgtaatttaaacttctcataaggacagctagctactacagctttttcattatacatgagttttaaaaattaaaatttttttggaagttatacttaagatgctttgtgagggaagaaagaggtggaaattttgggggcaaccactgaatatgatttcgtaaagaactgagtaatctttggagatgtcttttactatgtgagatctgtttacttgtaagcttatgtaagtgtacctctgtttgataaatccacttcagccttatattaggtgcaggttctgtgaaatccctgaggaggtagttaacagatggattgttgagggacaaagtaggctgcttaggtttcaaagcctgaggcatgaagggagggatccattgttacggaagcctcacacccaagttcaattcattaactatgaacctgctctgccacagattccgagtccgaaaggtccctgagtagattggaagcagtgacagcacgctcctttgaagaggaaggagagcatttgggcagtagaaaacacagaatgtccgaagaaaaagactgtggtggcggagatgctctctccaatggcatcaagaaacacaggtaggatcgcctctgacagttgtcactgctgcgtttttacgataaagtacatttggattcataaagaaatatatgtcttgtcttcatttttccccgtgtaggggatttatattgctatatcacctcaaagaaagcatttaacttaagcactttttcctctgtccatttaagagaatcatctataattgtaggaacagagcacatgggcttagcaatcatgttcttagaggggcacataaatcctttagttggtgatttaga

SEQ ID NO: 21865 - DNA, 1056 bp, Homo sapiens
agagtgagaccctgtctcaaaaataaaaaataaacaacaaaaaaaggaagcttgacataagaggaagccagattgcagcatgcaaaggagtgagtgtgagggaggtgaggaaacaaatgatgaagatagactttgtagacattcataatctgtggatgattgtaattttattcctttttttcaattcttacacatttcatttctttttgtaattcttcatttactggctagggccttcaggacaatgttgcatagaagctgagatggtaggattcatgttcatccctgatttaaaaaaaaaaaaaaaggcatacctctaacttctaatgattcactgttaagaatggtatttaacaaataccatttaccagatttaaagagtttcctttcatatattgttgaaaattttttttatcattaaagggtgttgagttttatcagatgttctttggtgtctattaaaagggttgtatggtttttttaaatctgctaagctggtaaatgatatatttggactgtttccagtgccaagccagccatctttgtgtacttggaataaacctaatttggttatgatgtattatctttaacattgttctcaatttggtttcctttggattttagtatctattttagtatgtatgtttataagtaagattgacttgtaattttctttttttgttctgtcctcatcagggtttaatatcaaggttatactgacctcataaagtgagtttaggagtattccctcctttgctgttttgtataaaattgaaatggtctgttccttgaaaatttagaactttcttataaaaccaccttatctttgtaaagttttttttttaactagtaactacatatatttaatgtttctaggattattttagttttctatttctttttgggtcagttttgacaagttatatatttttaggaattcttttaagttttgaaatgtattataaaggtattcataattttctttcttttttttttttaacttaggttggatctgtaattatatatctttcctaaactttttccattttctttttt

SEQ ID NO: 21866 - DNA, 1033 bp, Homo sapiens
cctcagcctcctgagtagctgggattacaggtgcacctgccaccatgcctggctaattttttaaattttattttaatttattttaattttttattttttagtagagacagggtttcaccacattggccaggctggtctcgaactcctgacctcaggtgatccacctgcctcagtctcccaaagtgctggaattacaggcaatctctcgtttttttttttccctgtcccccaagtccccttttgttactgcaaagatttttcactttgtttttggtattctgcagttttattctgtctctgggtttggattttgttgttctatagcttgcttgaaactctgttctttaattcaaggactcatttattatctttctttaagttagaaaagttcttagctattatctcttccaattttacttcatcattctttatattctctcctgccagaactcttaatagacatatgttgagccttctcgttctatcctcctacctcatttcttattccatttctttctgttgcattctgagtacttttcttagttctattttctagctttagtttctttctcaatttagtcagtttttctgcttaatcttttgactttctactttctaatcttagtgactgtattttataattctagaaattttagttggtggttttaaaaatttgttatttttccccatagtgacatgttcttttatattacatgcatttctaattttatctctaataacttcagacatatgaatttaaagcatttttttcagaatgtttttatacctcaagttgttgcacagctaagtcttttgtttcttctgctgaatgtccatcacaatggattgtaactttatggacagctcatcttcagtagagcttgtgggtttttttgtttgttgtgttttattttgtttttgtttttcctgcttcttgggtttggaggtgtccatatagagtagttttgtgtgtgtcgctgttgaggctgtaaaggtttctctgcttctgggctactagttttaaatttggatt

SEQ ID NO: 21867 - DNA, 1128 bp, Homo sapiens
tcatttttttttactgttcagtgctactgtctaaagactcaaatatgactgtcctcacttaattactttttatcagtcaagcatttgaatctagatgtgtcagcttgggaaatctttgttatttttcccttagagttcaagattttttggctggagattattctgggtagtgttagagcatggagtcctttcatggtataggaaacagtaagtattatgatctttacacttatcaaatttcactgtataaattttgaaatacgaatttttttcacttgtctcttttccttttgtcttgataatttcatttttattttgaaggcctgatgcagttcataatatttatcgccagggatgcaaacacctgactcaagcagtatgcacggtaggatgaaacatggatcatttgctcctctaactgtgaaatcagttcttcaagtgattgacccaaatcatttatacagccttgtaaaatcttggggttctgtggaatgctgtagaaaacacttgtatatattttaatttgataacaagtaaagtcgtggcatctccattttgaacaaaattttaaaatatagttaacttttatttatctccatgtattattatggaatgagagatggattgtccaaaaatatttgtcaaatttacccaggcttatttgatgatgaaatatcctagtacatgcaattgaaaagaatgtgtattttgctattattgttggttgttttgctattgttgttggttgtagggacctatcaatattaattcagtcatggtggttgatagcattcagatcttttgtgtcttggttttggctagtggttgtatcagttgctgaaagaggaatgtgaaagtgtcctactgtgcttgtggaatgttgcatttccttctctgttattgataacatacttatgattgttgtcttcttgattaattgatccttttattgttttgtggccctctttatctcttgtaatacattttgttttaaaatttattttgtctgatatgaacataaccactttggccttcttatgtttactgttcgcatggtgtctttttcctatccatttgcttttagcctatatgtatctttatatttattttctgtctcttggagatagc

SEQ ID NO: 21868 - DNA, 1060 bp, Homo sapiens
tgtcaaagactaatttgcatttaagaaaacatgagtctacaataactcaggactttctctaaagcaatttaaaacaaaaaccattttgatgcttgcatttgggcaccctcatacaataggatctttctttgaatggccagggctttcctataattattttttagtagtatttctaatgttgagaagagaagatctttaattttctacttaatgagtaaaggtactgaattagagttgcaatttcacacatagcctttctttcctttggaattcagagaaaggcaatataattttgtacttaaaggatgttgatttcttaatttaaattttcaatatttttatttatgtaaaaaccaagatcctgctgtttattaccccgattagtcttgagagctaaaatcttctcactcattctatagtttaaaaaacaacacaaagtctacttgtcagacttcttaaggtcagtgtcttgtttctgcactcaaaatgaaccctctgcttatcaatgaacaagcaaattaacacataacatcttctatcagacactgtgttatatgaatttagtaacgtggagaacatattagctgtggttcctgccctttaataatttgtgactgaatagggaggatgaggtactgtctttaattatgtcctgtcattttaattataacaagaagagaacccagaactgaggttttcctgacagactggaatgttaggttagtctgacaagttgacatttaataagggcaattgtaaagacatgctctaagacatttccaaactcaaactgcacaagaaaaagggcttagttgactttacaggtaatatgatttgtcagctgatgtggtcttagcttgggaaacagaagtagagactgaattgagtgattctgctctaatgagagcaccttacccacatataataacatttgtggatagagtgttaaatggatcattggcaaattactggaagtaccttgagtaacccactataagtagaccataagaccataaatagatcagaaaccatgtcataggggctgggcgcagtggctcat

SEQ ID NO: 21869 - DNA, 1081 bp, Homo sapiens
tcaaatactcagatttcttctgtcttaatgttctacaatgtgtggctttgaccatatcatcccaattgggagcatcccaatcccaggaagcaggctaggggaagcaaaaaagggacaaagaatatatacagactgccccttctagaagattcccagaggctgttatatgagacttctgcttaatcccattgactcgaatattcatggccacactagctaaaggggccacactagctaaaggggagcgaggaaatgtagtctttattcttggtggccatatgccgagctaaaaaatgttcggggtcagatgggatcttcccttcacccttggtgtcctagaattttactgtttacctttagacttttaaacctgcgaattaggtttctattgctgcataacaaattaccataaatttagaggcttaaatcaacacccatttattatttcacaattctgaaggtcagaattccaagcacacagcctagctgaattctctgctcagggaccgtgaagactgaaattaaggtgtcagctgaactgtgttctcatctgtggttgggggctttttgcaagtacacgcaggttgttggcagagttcactgttgttgtttttttttttttcttttttcttttgcaagggatcactctcagctcttacaggccaccctcaaatcatggccacacagccatatctggacttactcacacttctcatcttctttgccaggaagaggctagccccttttgagggctcacttcaataggtcgtgtctgcctgggatatttttcttaaggttgactgtgccatgtaacaaaacctaaccagggagatgtcttcaagtccgtcttctagtctttctattgcatattttatttctgctgttatttttaatggttaagaattttaactttttgaccggatgttcattttttaatagcatccaatcttggttaatgaagaaatttctcacttctctgaggatattatagttcttttaaaggttttcttccacattttcatgtctttcaaactttttttttcttgtctgtctagatctttctcctttgtgctagtcatat

SEQ ID NO: 21870 - DNA, 1046 bp, Homo sapiens
gtgaacaaatagtaagttaaggagatgaaatacaaaatataagaaagaatgcttgagcccatttagttgtcataacgtgtcagtggatccaaattaaagttactatcttaccttgtatcgcttctaaaaatgctattctgtcacatgtgttcatgaattgaatatagaagatgggccaagttagactattgtttaaaaatacatcttattaaaataatctaaatttctgtttgaaaaaaatactacatttttattgcataggtatcaaagcataagtcattttgattttgtgaatctataaaggatatggccaaaacacctagtgatactgttaattagtatgtaaactgtgaggcagaattaagtaatcgtttaaaatcaaagctgtagagtttctttagagactgattcctacctagtgttcttgaaaacaaaaatgtttgcaacaaacttccacttttgtactgtattagtagattcttacctggtggtaccatcaatgtctttcattaaaagaactcagcactgtggcagcggtggcctctgacccattgtagagcagacaaaattaagcaattaatcacatccttcaagattccaggtttcctttatgatgatgtattttcaggttttattctatgtggaacatatagtattcactcttttctacgattagtatagaccaatcacagactccttgatctcaggatgcctttacattcttagaaattattgaggaccacaaaaggctttggtttatgtgagttactatcattttccatcttaaaaatcaaaactgagaaatctattaaatacaagaatacaagcacatattctattagctgtcagagagatgatgtcatcacatatcaggtagcgtctagaaaacttcactgtaccctcttgagataatgagagtataaagggcaaataatgtctaatattattgtgaaaatagtttgaccttacagacctctcataagtgtttaggagaccacagaagtccctgggccaccctttgagaaccacaggcatagaaattttag

SEQ ID NO: 21871 - DNA, 1072 bp, Homo sapiens
ctaaaatacaagcattttctaaattgcttttgagaaaaacaagagagacagagaggtctatggcactaacaagggatactgaaacaaagcaaaggattcagttagcatcattcttgtaattataaaccaaccaaaaggttgtttcatgtaccagtgaaaatatttactagcttattggtataactgattgtatcacttagtaagaggacaaattgaacaattgcctcataaaatatttctgttgcttctagtcttgtgaaatttgatggctgaatttattatggatagttatcgcaactttctgtctctacaggcccttctaattggggaaaacacgttgtttcttttttaaatttttaaataatagaaatgtataaaataatagaaatttgtatttttgttacttagcatctttgctacaaggtatctgaagaaagcttcatgaagatagttacaaatactatatatgtcatatcacttttaattttaaaatgatggtgaactttaaactgaaggctagcagtttattctaaacaaaaccatccttgcccagaacaagaccttttgatggtcctcagagccagtttacaagatacacaagaaaatctatctcatttacttacacacttcatatttccttaatttttcatctctttactcctgaaagcaaacatctacatgaaaaacaggactctaactattggtagttatatccccgtctcttaccagcttgacatgataataaatttctgtttaggcattcacagttattagggaaactcctgtgatgtcacaaagcatagataagatatttgctataaaactagctttagagaaaatccactctttgatactatgttcaaaatgctaaaaaaaagagtataaatgtagaaaatatgataaaaagtacatgctgacactagatgtgttatttcaaagttttgcggagcatcagatgcttattaagtcctctagttatggtagtctgtgtcaagggaaggtcaatgccaagtatatctgcatatctgttgataacaacatgaacatctctagcaggtgtgattttgtttat

SEQ ID NO: 21872 - DNA, 1049 bp, Homo sapiens
tttatttctgtaggttttagggaaacaggtggtgtttggttacgtgagtaagttctttaggggtgatatgtgggatttgggtgcacccatcaccgaagcagtatacactgtactcaatttgtagtcttttatccctcacccacttcccagccttaccccctgagtccccaaagtccattgtatcattcttatgcctttgcatccttatagcttagttcccacttatgagtgagaacatacaatgtttggttttccattcctgagttactgcactgagaataactggatggtctccagttccatccaagttgctgtgaatgccattaacttgtttctttttattaacctgtactcatttagttattatctaatataagccagggactttcattaattgtgggtacaaagatatactgagcatatctcagggagctcatgatccataggcagaaagaccaaaaacaagaatagttattgctctctgttataaaaaagttttgatggaggtgtctgtagaggggtggttctcagaattttttctgctcagagcatatctgatatctgtgactgacatcatcagctatcattgctcacccaggtggcagagtctcatgagcaccattgtctcatctttcattatggactctatgagcacccattatgaactactacaagatatgaacacccagaagtgaggcatagcttcactttagctgtggcccccagcttcttaagaatcagtgaagtaaaggttgcaacagaaatgtcatacaaaatttatagcattctcaatgagagtgctgcctgtgggaatgcagttaaccatctatagatagaacatcggggtgcaacaagagatgagaccagctcttccatgtaactcagccttgagtctggtttaaacatgagccaatataaaggtctctattagccataaaatatgggcttcctttaataaaatcattgcctgcacagatatctatgatagttatgacatcatagataattataagaatatcaaccttatatattggccccacatcttctgg

SEQ ID NO: 21873 - DNA, 1033 bp, Homo sapiens
cacggttttgtgacataaaactgaattacccatgtgttgcctctgtgatttaccttgcaatgtctctctatccctgcagcacagcagataggcagcaaatgcccctctgagacccagctctggtacagtagcctgggatgccctagtagaaccaatggcgaaactactagaaagggagaaatgagcacatagaaaaaaaaaaaatcactacaaatgggctttcaaccaagattccaaagtatgtgaatgaatcaaacactagtaaagcagaaaaaaaagaagaaaataattattttgaacagtctgacaaagactttgaaataagcatgtttagaagctcagaaagataaatgaagatatgatttccactgaaaagagtgacaaattatgaagcaaatccaagcagaagtaaaacaaaagcacttgaacgtttaaaactagaaatgttggaaatgaaaaatagtcattttaaataaaagctttgctagataggataaactctagactggtcagctgtgaagagagaatcagtgttttgtaagagtacagagaagatgatctagattagaacataagaagacaaatagattcttaaaatatgaatgaaagggcagttaaaatacatggaggatagactgagaggctccaatctgtgtctaataaggattctgatagaagtgaatggagagtgtcttagatagacttaataactgagtgattttaatcactgaaaattttaagaattgagtacataagtgagatctcaaattgaaattattatttttgtattgagcaagacaaatacacgtaaaggtacagtttgaaacatggccaaaaaaaaaaagaaaactgcagaacactgaggacaaagggaaaatcttgaaatagactaaaggaattaagagccaattctatcctatgaatcttagtcaagagtctgggactgggagcctaaggctaacgtggctaccgacagttccttcgctctcgtaagttacttttcctaccattcctggcattgtcaaagaccaaa

SEQ ID NO: 21874 - DNA, 1042 bp, Homo sapiens
tggatggctgaaactgtgtcttattcattctcgcattatctaagcctagcacaatacctggcctatagtaggtactcattaaggctggcaagttattctgctatgcagttccttggaagagtcagatttaaagtaacatgttgcatagcatgtttgatgtaatggctaaataaaactgggactcagtttaccaaatatctaccccacttaaaatatatcctacaagaatgcatctctgagcctgggtagggcattttagatagaactctgtaagatacacatcattctgctctttctgtttgaagctgatgccactcctatgtgtgtgtatgtgtgtgtctctctttctctgcctcttattttcccaacacaaatctttcttccattaagcgagtatgggaaatgtgtttactggacaagtggttctctgactgttttccacagcatattcatatttttataagattttaaagtgtgttctattttaacaaggttttctgaatggattattgtggaatgttggattaaatccattaaataggcttctttattaaaagtgccttgtggctcttctcttcaaagagggattacagtgaacaagtttattaggccccagaatcatcttcctttcagaaaacccataaacattttctggaactgaagtttgagaattgatgttgcttatataaatattggccatacatatatattttacagtttatatatgcttctagggagcaacttttattttgatacaattccaaacatacagaaaacttgaaaaaataatataaggaacttccatatcatttacctgattcatcagttgcttacatttttctccatttactttattattctcttcttccctctcctatagcatctctttcttaatcatttgagagaaagttggagacatcatcacacctctatacatatatcctttgtatttctgaagaacaaatctattctcttacatatctatagtatacttactgaaactgagaaagttagcctttaggccaggcgcggtggctcacac

SEQ ID NO: 21875 - DNA, 1041 bp, Homo sapiens
ggtgatgggaggaaaagtgacttttccaaccctctcagactttttctgaaagcaaaaattacaggctcactgctctgagagcatcaccttccttattctagtctgagcagtggaatgtctcagtgctttggtcctgtgtgcacaatcggcatgtcacaatgagtagacacaagggacccgctgcctggtggacctgtgtttgaatcctgcacactattaacaagctacatgttattgaaccttactaaacctcagttttcttaccagtaaaatgttaggaatagaccttgcaggactgtcatattaacaaacaaacataaggtgcttaatggatgtctggctcttagcaaatcactaactggtaatagctttctattctggatgaagttctctgggaagctggggaggcctgcatgttttatcctctttatgtttacctcgtttgcaaagtctctaggggtggcactcagtattgcggctgctttgcctttttgtgtagagaagaaaatatttccccttctggagaaagcctaagaggaattgtgtgaacttttatattcaactcttagtaaccattatctacaataaaaggtgggtaatggagctggaggagagttgagttcactatttttgacaaataccttatgtgtgggcacctgtttaacgtttcaaaagacactgtgtcttcctttggctttaaatgtatcctttgtcagttatcattgctctcattttataggtgagaaaactgagtcacatacactgggcccatccagttagtatggctgaagcagaaaaagaacttgaaagtgggcatctttcatcccatacttttcaaatgaagaagccaagactcgtcataaaccaaatcaagatgtagaaataattaatccactggccaccagatctctcctctgatgttccttttgacttcaggcatttagatctgagttccctctccttttctactcttctgcctctaagagaaagttacttctccaagaaaaatatggtagcattaaaagcagtggaatcctgaca

SEQ ID NO: 21876 - DNA, 1368 bp, Homo sapiens
acctttttataaagatcatttataatactgttttaaaatgtgaggcaataagaattactttgtgttggatctgaggaggctttggtaaaacagtttcatctaaatgaaagtggtaatcctcttctaaaatagcaataactgaaaatgaaagtgttaattttaccttgtttgagttatcagggaacttagtaagtaatatcaaagcattttataaatgatatcaaagaagagtcaacattgatccagtcattttattttgtaatattgagggataattggttattaaactgaatagttcaggagactttacaaacctttgtttcaactttcttatctggaaataatatcatttataaagggacacttttatgtttttcccttttttatgttggttgatataacacaaagagatatttaggaaaatgcttattgatgaggtttattctatctgtttttaaagcaccgaggttgcattctagataaccttgtttattagcatggcatattttaatcattatttgagactgtcctgtgcctgattattttagctaaattcagggagattgcgtggggcaggaaagcatgcattgaaaaatttctaaccacggttatttaagcataatctgaaaacatctagcccaaaggtaagttgctattttcatcacagttgcctatgcccagggaataagatgtattctttataattgaattggtttttcccacgtctaactggaaacaaaacagaaggggcgtcataaatttgaataagcagaacatactgttctcaacatactgtaatcaaaaggaggaatttcagtgggtctctgtgtgtgtatgagagagagagtgtgtgtttgtgtgtttcaaggtcagaacaggtttttttgtttttgttttttgttctttgtttttttttttgagatggagtcttgctcttgtcgcccaggctggagtgcagtggcgcaatctcagctcactgcaacctccgcctcccaggttcaagcagttctcctgcctcagcctcctgagtagctgggatgacaggcacccgccaccacacccagctaatttttgtacttttagtagagacgaggtttcgccatgttggccaggctggtctcgaactcctgacctcaggtgatccacccgcctcggccttccaaagtgctgggattacaggcgtgagccaccgtgcctggccagaataggttttttctttcaacttgatcagtagaaaatggacatcaagtttgaacagataaatcatggacagccttattgtgattgaaatgcttgtaggttctgtgccaattttccaccactgtgtactttgttgctatttaaaactgtatcaactctaacggaaga

SEQ ID NO: 21877 - DNA, 1249 bp, Homo sapiens
tatcagatgtatttgtcatgcctagccctgtgtgtgctgggaaaactgatgattgggtaattattgaccatatgtatataatctgcttagcaaatttattttgaaaaactagtggccaatacagttttttttaagacatactgattttttttttttttgagtacaaatgagatctattcagaatgcataaagaaaatgtttttgtcattccctaaatagcaatatacgtatccatcgggatgaattattgcagctgtgtatcatacagaatttgggggaagtgtagcaatattttcctattatatactcacttataatacctgctacctggatatctgactttaacttcttagatagggagtggggaatgacgaggacctgatatttcagtcttaactctcaggctactataaccactttagatacaactctgttgaaagaaaagtagctgcttatgaatactgactccttctcttcctaacagggtctctttcacgtcggtaatatcttattatttttattcattgacttaagctctgccattgctgtggacatctttgtctacctgtgatagcaaatcttagaactcaggtcagactgaaattctcttgccccctcagcatacgtgttgaaactcagtcagatattgggagtcaggtatttttctaaaaatgtcaagttctgatttccagattctagatgtgactttagaaatattccatggattttttttctttcataaaggaactttcttgcccttcccaaatggccttttcattttgtgactacttagtatttatactttgaataaatacaatattctggttttattgcctttggatgaaaacagatgtaatgcagctaaatcaggtaaattcattgacttaagataaataccttcaatggtaagagagggtgaaagaaagcttaatttttgttgaagtattatagttaaatgctgttttgttagacatcaggaatcctaagagaaatttctattttgtttatccataggcttgtgttgtccaaaaaaaactttatttccactagaaataaagttttaataattgaatatataataaataataggctgatataatttatttaagcttgaaaacttgttctcttttgacacttttctctgaaatcagtgtttttatggcaggttttgaatggctacgatagaaaacatttaagtgtcaaagcttttcagcttatgctttttttttttttttggacggagtttcac

SEQ ID NO: 21878 - DNA, 1035 bp, Homo sapiens
ttataatacagtgtagaagaaaaaataattcagaaatacattacaaaatgatgtgggttgttagggtttgccaaaagccttattcatgtatatgatcctttgatgtaaatataaattactgaacagagaaactaagaaacttaaagctaaagtattagcagccattgactagcagcccatgtaagctagcaagaagatacaatttaggatatttgaaaaaacatctcacctgtcattttttgttaatacataaaacataaaggtacatttgtacttaaggacattggtttttgttttgttttttcttttcatatgtaaacatggtattaagatttttttaaattaaaaactttagtaagattgttgtagactctacgtattttaaagacgtgaaatctactttgttaaattatatgtattaagaagtctgctgaaaataaatgattgtttctattttttaatttttaattacattttaaagaattaaatttgacattgttgttttgatcctgggtatctcttgaaatgtgacatgtgtattgttataacctttctgttcaaaatatattggtttgttattttgtaaatatcaaaacattaaggttactttaattcattttattagtggattttaatttgaagggtatcatttttgcataggtgtatattactttatatctgacatttacatagagtattctatttatgtcgacaattaatatttgtaaacaacattggctcttttctctcatgtccggatatttatgttagtaaatatatagattaggaattggcaaactttttctgtaaagggccagataataaatactttagtctttgtgggccatatggttttggtctcagctactgaactcttattgtagcatgaaagcagctatggacaatactgaaatgaataggcatgactgtattccaataaaattttatttacaaaaacttgccactggccatattaagactgcaggccatagtttgccaacccttcatgtaggtatttatgaggtggcttgggaa

SEQ ID NO: 21879 - DNA, 1016 bp, Homo sapiens
tagtagctatgctactttagagcctttcgtagcagtacagctttgggtaaggtccttgatgtttgtgagccttaaaatgttgttgtctgtgaagaagtcgataataatactacccgtttcatagggctttggggaagagaaataatacaggtaaagctattagcttagtgcctggctaataataagtgttcattaaatgttagctgtcattttaaacaatattatttaaaataatttgtagattaatgatacaatttttataaaattttagtgtattggtttgtatctgaggatgtgaaatacatgtgtatatgtatgaatgttctatatatatagaatatttgtaaaattacattattcagaattgacagattaaaacaatgttttccttatagttaagtatttaaaaattatttttttcagtctacctaattgtgtgtcactatagacagtgacagtgctcatcacatctctatattaccatggctcctagcctggggtgttgtacctaataagtactcaataaatttgatccttgacttactcttcaaaagaaaattctttttttttttttttgaccactgacttaagataaaattaagtattaaccatctcattggagaaaagaatgccaataatataaaatatggtaatttgggaggtttttacatgtgtttaaaataaaggatgttattttcatagaatatctattagaatataaaactcaaaatgggaagaaataatgtgctaatgataagtgtttgttatatgcccttgcaaaacacttgcaaaaatatattctaggtaattaagacatcagtagggtctttgcatatgtattatcacgctttgtagtgcgtcttaacatcaaaattgtttatgtaaaagatgaagaataaccttaaagtctgtagtaatgtatgataccattgtttgcagaaaatggttgtagaagatgcattttataatgctatttcactctgcagtacaaatttttagaacatattttggggtaa

SEQ ID NO: 21880 - DNA, 1030 bp, Homo sapiens
atagtgttatttttcaactttccttcttgtaaatatgcattttaaagctataaatggtcctgtaagcatagcttaaactgcatctcacaaattttgatattacattttcattaccaattaaaaatattttaaaatttccattgtgatttcttcttttatgaataattttgttactgatttcttattattattatttttttctttttggagatggagtctcgctctgtcgcccaggctgaagtgcagtggcatggtcggctcactgccagctccacctcccgggttcacaccattgtcctgcctcagcctcctgagtagctgggactacaggcgcccgccaccacgcctggctaattttttgtatttttagtagaggcagggtttcaccttgttagccaggatggtctcgatctcctgacctcgtgatccacccgccttggcctcccaaagtgctgggattacaggcatgaaccaccgcacccggcctactgatttctaatttaattccactgtgcccggcctactgatttctaatttaattccactgtgctcagaaaatatattttatatgatttcaatcttttgatatttattgacttgctttatggcccagtatgtgattcagttcagtcaacattccttgagtacttgagaacaatgtgtattgaacagttattggattctgtaaatacaaattaggtcaaacaaattggttactagtaatgtcaaaatttttttatattcatagggttttttttcttctatacattactgagagaagtatcttaaaatctccaactgttattttggattattctgtttttccttttagttctgtcaacttttactttataaatttttgaagcagtgttgtgagatgtatacacatttatgattgttaaacattcctgttgaacttttatcgtaataaagcatctctgtttatccctaataatttaagccagctattcagtattaacgtagcaacatcatcatacttttaattagtatttgcatgatatctttttcc

SEQ ID NO: 21881 - DNA, 1027 bp, Homo sapiens
aaaaaacatgaaagttggcagaatgatactgcctcctgatttaattctcaaagtgttcatactgcacaatcatttttcattcaacaaatatttatcgagtacctctatttgctactagatgattgggggctccagtaataagcaaatataatcatgggcgcagtccttaaagaacttaaacctgtaatggggaagacataccttaaatcattacacaaacacatttgaaattacagccgtagtaagtgttatgaaggaagaatatctgaaaatgttggagcagacagtggggaccttataattctggtgctcagggaaaaagtgacatgaggtgtaattcacatgcaatagaattcattcattttaagtatatagatagattagttttgacaaatccacgtaatcaccactataatcaagataacaatgtttatccccaagaggttttccaaatatcccttttctgcccatttttaaattaagttctgtgtatgtagactgaaaaaaagggcttaaaattttaaaatgatcatatatatatatatatatatatatggatttgtaggcattctttatatattctggaacaagtcttttgttggctatatatattgcagatatcttctcccagtttgaaaattgtctttttattctctgtggtgtctgatgaacagtttctaatttaaatgaagtccaacttgccaatattttgaagggataattctgtatcctgttaaagaaatattttcctgtgtcatagtcatgataatatgaagatacatgtatattttcttgtataagttagtttattcatgatccattgcaaattaaatttgtatataatctgagataggactcaagtttcttcttttcgccatgtgatagttagttgatccagcaccatttattggaaagatcattctttaacgattagatgtaagttgtttcgttgtgacagtatatgtgggttgtttcttaattctctgttctgttggtctgtttgtctgtcgttgtattaattatgtct

SEQ ID NO: 21882 - DNA, 1035 bp, Homo sapiens
cctagctgacagtgagattctgtctcaaaagaaaaaagaatatacttatttgatgaatgctataaaataatgcaattttacagaaaataaacatactgaagttagaaaaggccaattaaaattttttttttttttttttttttttttgagacggagtctcgctctgtcgcccaggccggactgcggactgaaaatttttcatttttacctacctccttatacgagggaaaatgatttggaggtattagggcaattggagaaatttgaatgagttctgtggattaaatagtaatgatatatcaatgttaatttccccatgatggttgtcctgttatatgagggaatagccttgttttggaaagccagtactgaagtattaggagtaatgtattactgactcacaaatggttttggaaaaaagtgagtgcatatgtatgtctgtgtgtgttggtgtgtgtatttagagatgataggaaaaatgtggtaaaatactaatcattagagaatctgggagaaaaaatatacaagactttgctattgaaacttttctgtaagtttaaaattatttcacaattaaaaattgaaaagatttgacagttgagagaaggttgggcaaatgtcttaaaatgaaactacttcataaaagatcctgggtttatagattttaaaactgcaggcaacttcagtgtcctgctttaactccattattttacatatgagaccttaagagtgtggcagattagatgtaatagtagtttcacactggctttgtcaagtactaatcaacatgatactaaaattttttcttaaagggtcatgaataaaccacatctgttagtatggtttggtcagtggtcctcagaaaatctcatgtcgtgcaaccatactaatactcaagcaaaggaaaacttgaaggcctagactgaaacaggttatgtgttctaattaaaaatggctggttggttttttaaaaaatggcaagatatggaacactatattttaagttccttcctagatctctacagaataatgaaa

SEQ ID NO: 21883 - DNA, 1105 bp, Homo sapiens
gtatagagtttgaggagcgggcaaggaaggtccccatggactctggggttgtccccagagcctcttcttcccttctgcatcgccgcctattcatttattctgcagcaaatatttattgagcgcctattttaggcgctgaggctactgtggtgagtcatggtccttgccttcctggagcttacagtctaatggtggagactgtcgtgaccagttaatgtaagtcgtgataaatacacagggagctgcctcctttttaaaggatagagctgctgcagtcgctgctgtgttactgccagtcggaacacaaaggttctttattgtcctctaccccttgttgcctgcaagcaaggcagcattctaaattttactgacctagactttcagaagttgctgctgtatttagcagtttactttaaatatttttgttttgttttatgctgtgtagcaaagatcaaaatagaaaaaaaggtcaagttttagtaccactcagaccacgtagattatgctaatcggtttctgtttactgtcaggttcttcgtagtgtggcttttgacatttgcccaactgttgctttattttatgaacaaacgggcttggcagtgcctggaaatgcagtgctttcatatagtgctctgagttaagtctgcagcctggcaaacagctccaagtacgcactcacgcaaaactgcgtttctggagggctcaccttttttatttttgtacacaggaaaagtccagagtttttcttttttttttatagtttctgttacataagtctgaagatatttatcatggataatgattaattcggaggatgctgatcaattattttccattctcagctgaacagaaaaatgggctctaaattaattgccttattctacaatgggagagattgatattagatgtgagacagatattttaatggtgaagttcaatagtttgaggaatatactggagataataagttgtgaaatcattaggttgaggactggattcgtgctttttaaggactttttttggtcatccaatggttctatttaagaaataactgcatttattagcagatcatgttagtggttttttttttcccccagtaagtgaa

SEQ ID NO: 21884 - DNA, 1028 bp, Homo sapiens
ttcctaattcactgggcattgacgagggttacaggatttaaatcatgtaaagcacttagaagaggcctgaccagccctaatctactcagctccttttatcttcactgaatgaatgaatgaatgaatgaatgcaaattgagcctctacaaacatgtcgtaagtgaaaaacgcacatgcagatttgattagtgacataacaagaagtggaaaaaaatcacctcttagatgtggacatgtttagtactttatgtttgcagtttgcactgtgaaataccttttttttttccaggactacactttgttatatgaagaggcaaaatattttcagcttcagcccatgttgttggagatggaaagatggaagcaggacagagaaactggtcgattttcaaggccctgtgagtgcctcgtcgtgcgtgtggccccagacctcggagaaaggatcacgctaagcggtgacaaatccttgatagaagaagtatttccagagatcggcgacgtgatgtgtaactctgtcaatgcaggctggaatcacgactcgacgcacgtcatcaggtttccactaaatggctactgtcacctcaactcagtccaggtatagcattgttacgcactgtgtggcatcaaatgccactcttactgttgtcacttaaccttgccctcacatggtgcctttcctccaaagagcttagaaactcactcagtgacacttctgttgggtaggtgaattatcaccctctatagcagtcattccgtaagtcttgtgattgtgccaggtgctgggatgagcactggagatacagaagagacagatatagaacacgacagctgggcacggtggcacacgcctatagtcccagccactccagaggctaaggcaggaggatcacttgagcccaggagttcaggttcagcctgggcaacatagtgagacagacagacacagaacacgatggacagctctgtgttcatggaactgcattatgggagtggagtgggaggcaaacagtcaacataaatatattgcc

SEQ ID NO: 21885 - DNA, 1017 bp, Homo sapiens
tatatagcctggacttcatcaggagaaggtttggttagtacaatatgaaaatcacctcatgtttaggtgattgcatttccaaatgccgacccagaatccctgcctggatagttcattcgctctttaaactttagatgcccaaaaatgagctcactctgtctgcctccccctctgccaccaccaccaccaagaacaaaatctgctcctcttcctttgtatcctatctcagtaaaagatgccagaatccacctacttgctcaaggcaggaacctgcagtccttctggactttttcctcttcttcgcctcccacgtgtgatctgtcagcgcatccgtcatcttaacctcctggacgcatcgcgaatcaatccactaccctcatcccacctccctagcccaaggcccagcagctctctggactccttggagtggcttcacaattggtctaccccctcccactcttacccctttttgacttgttctctgcattgaaactatgagacacttttaaaaaattcaacttttaattttgacatcattatagatttgcatacagttgtaagacataatagagatgctgtgttacccagttccccccagtaataacatcttgcaaaatactgggatcacaaccaggatattgacactgatacagtcaaggttctgaacagttccatcaccacaaggatccctcctgtagtcatttgacagttatgcccacccctctctctccctgccaccatcctaccccatccctgaccatgtgacactttttaaaaactgtatcatgagttgctcctgcttgaaattctgcagggactttctcttgttcctgaaactgtcaaatgaagaagataaaccaagcttttcaagaattaaagttagttttactcggaagtcttactgaggtcccacacaggatttcagcccacagcttgttatataggcggtggaggttcagtacatggaaaatcacatcacacttgctcagacgctacaagcagaatacatcgagcttt

SEQ ID NO: 21886 - DNA, 1083 bp, Homo sapiens
tgtttgaagtgtttgattgtcattttatttggaatgaatagacttttcatatcatactagttgccatgtgtcaattgttaaatgcaagaatttcttagtataataagccttcatagtcctcagagttatttgaagtgaacattagttcagctccttatttctgagcatgtgaagatttccttttctttgctacagaattggtttttctgatattcattataacaaaagcaagagcttgccggtttttcaggttttattactgaatgagtatcgttaatcactcgtttattctttatgctatatgtatttcctatctttctactgtaaagagaaaaagtatctaaacttgcttatctctctgtaggacagtcggcccaatatgtcaagacctctgatcactagatcccctgcatctccactgaacaaccaaggcatccctactccagcacaactcacaaaatccaatgcgcctgtccacattgatgtgggcggccacatgtacaccagcagcctggccaccctcaccaaataccctgaatccaggtaatctgaaaaactgaaaaatcagactccgacgtgcatgtatttggtaacctgtttttcctttgaccagcatagcagtgtagcctcgtggaggcagggggcaggatgtgaaagtgctgtgtgagccaccctgctgcctaggctggatgtcttggacaatggctggacatcttcgaatcaggattggacccgcagcttagttgagtccatgtaaaaatgtcacaggagaatggaatactgtgatattttgctctacaatgatattcataattctcaatgtagtacaaaaaaagatggtgatttctccccaacacctttgttccttccttctttaaaaacatgctttcttataggttctgataattttataggagatcagttggttcatcaacttgtgaactagaaaaaaaagagattctcagcagtgaggcattatatttagatctgtatgcaaaagtccaagaagccaaaatagtatagtttacaaaaaatgaagggccatggaacttacgaacttaaggtagataaataaatatacaa

SEQ ID NO: 21887 - DNA, 1044 bp, Homo sapiens
taatgcattttggaatttttttccaagggatcctaaattagatcccttggggaaaaaaaaagggatcattttggatgggaaacatttggatgggaaacctactttaattggtcgacttttaccccgagttaagaaaatcacaagtctttcaaaccctgcttaaatgcttttcctgaacatcttcctcttcctaagctatcatttttttcttatcagtaaatattcagtaatggctttcaaagaacagtaggtattaatagttgaatgttaatagaccaagatagttgcagtcatacttatttcattttgattttctatttcatggctgagtattcatgaattgcttcgctccttacacacacctgccgtgtcccatctgtgtctcctaaggagtaagtaaactgcaatgggctgagagatcaaaagtattaaaccttctaatccaaccttttactacttttccatgccattaactcttgcctctagaccatacacttaagctgtgctctcagtttttaagacgttttactctggagtaatctaaattacataatttaaaattttgctgcaccatgtagagtagattcctagtaatttagggaaattgaaattatctttttatggagagagaaaataaaaaatattccagaagcctgaaattttattcctaagaaacacaaaacttgctttatatgaaatccactataaagaataaaggcaatttcctcaaaagtattcctaaaactatataaggaacagacaaagaactttcaatagctttagaaggaaaaaaatggaaacaacagtcctacctctcttattggcatttgtaatgcattgggcagggtggaatgcatacctatataaatgtttggctttgatggtggagaggagggatgagtggaagaaaatgatacccagtgttctctacggaaagctgtattgtaccttttgctgtatatgttcctttcctgaccctttccaacgagcccgtgtcaccatgggtcattcttttcctaaatgggctctatgatgccaagtgac

SEQ ID NO: 21888 - DNA, 1034 bp, Homo sapiens
ggaaaaaggggaagatgagagactatttatactaattcattgtgaagatgtctataattgatgcagtcttggaatcatgaaaatagggatcccccccaaggccctttgttattatattaatgcctgctcattatttgtatgtcctctagcaataatgtcacttttatatgaataatgcacagttcattttgtcctggcagctaatttctcaacaatgtatttatgaggataatacagatattttagtgatttctccaaaagaaacaacaaagtttttgaattgagaaaaaaagtctaatatttaccacttagaggaatgcaacaatatatttattgagcaccttctttgagtgaaatattttcttaggataaatctcacattataagtgtgattgctcatttatgctagagtgtgtccctgtgctcaaggacagcagatatatttacataagtcattatctaatgagttagaacattttaaatatcacaagagaactataagcaaactgttagggaatttcaaatattaagtctagatcatttccagttttatagttcagggctggggaagaagccaaggaaacctttataacaaggtggattaaacttgtgccctgaagagtgaatgaaatactgatgtgtatcaatgatggaaggctagataaagaggaagactatttcagaagatcaggatccagttagagaaagagaaactactctggttacaaaggtgctagagagctgaggagcctaacagtggatggcgaggtaccccaagaagaacaagaccaagaggccaccagggtggaaggatagtggaaggaaatcattctcagagcccagaaactagcgccagttggcagaggctggccacagggaggtggagccatgaaaggagagggagactcatgggaactaggcccacggagaggccacaggaccctgtggggtactggggggtcagcaacagaggagagtctggctagtcccctccttttatcctccaaaggttcatcaatacccagcactgacca

SEQ ID NO: 21889 - DNA, 1048 bp, Homo sapiens
gggtggcctgacactggtggcactactaagtgtgtgtttttttaaaaaaaaaatggaaaaaaaaaagcttttaaactggagagacttctgacaacagctttgcctctgtattgtgtaccagaatataaatgatacacctctgaccccagcgttctgaataaaatgctaattttggatctggtgactggtttgaactttttcttttctacttgagctgctttgaatgttgcaaaaatcccaagtactgggaacaacagtacaaaaagtatgtatttgttcttgcactattcaccattgaaacgcgtagcatggcaaccatgtacggtgtgcagcagagagaatcattttggaccttcccatcatcatagaagaaaaacatcaagtgattcaggaatagaccctactggtggtgatagaaaaatcacatcctttaccttcagtgaacttcggtgttaattcttaatataactcatgttttaatttgtttctgctcaagttaattgttctgttgactgacaggcctttcccattagagccaccaccataagggaaacttcagtaaagtgggttataggactgaacctggaaactgcagtggacacctggaattcttgtgcaattcattgaagccatcgttttatgtacttagtgaaacacacttagatttgactggcctttatccattgacttgatcatttgcttcagtttgatatagtaatggttgcagagggcaacaaaaggaaacagtcttgctaaattttgtaaaattgtttatgtatcttactatgattcattctgaattttaagaggcaaaggaattctccacttgtatttatctgtttgtttcttaatcatcacaccatatagtcttatactgtacacattgaaaacacttatataatatacctcctctaactatattttttgcttaacataaaggttattttatattagaccgtgaaatttacttttctattgattcactttgtaggcaatactttcttgttacttttctaatcattaaatgccagagcttgcctctgggaat

SEQ ID NO: 21890 - DNA, 1031 bp, Homo sapiens
aattattaaaacataaggcaatgtgccgtgctctagcatagcacagtggtctctctctaatggattttatggccttaacctctttaaaaaaaaaaaaaaaaaaacagaaataaagaaaacagagatttgtaaactaccaggatgatcagaaagccagggcaggagctaaaaaataaagaaaataatattttttagactctcaatagtggatatgggagttgattatcacaagcattatatttattttaaggaattgaattaggtggcttagtcatttgatgaagagtcctggggtccgtgaacacaccagggaagaccagaccccttcttgtgtttattccctggacatagtaaacacaggccatcccttttttctcctccaaattcagacacacttgaggccttgccattgaccctttcgggctaatttgagtctttttttttttttttaacttgtcattctctttttctttctttttcttttttttttttttttactattatactttaaattctgagatacatgtgcggaatgtgcaggtttattacataggtatacacgtgccatggtggtttgctgcatccatcaacccatcatctacattaggtatttctcctaatgctatccctaatttgagtcttgacctctccatatttccagtttggtgttgacatcataaggattgggccagggctctgtgtgtattttcgcttaataattaaattgtggtaaagcagatgacctgaacaaagtgatcttagccattgtctctgttgtctgtattataaagcaattgtcataatgaaaatttaatatttgttttcagggacccattctccttatcaggaatttccctgatttttcttgttttttcttcagatccttcttgggcctacttgtatgaccccaagtcagacaatgctgaactaaggcaatccgctgttggttaaatttgcagttgctagatcttgtagggaagaggagtgtaggctaatatgtgaatattaactccacgagggcagccattgga

SEQ ID NO: 21891 - DNA, 1052 bp, Homo sapiens
tgtcagtatttctttctcccactcagtatgtgagttatctccaggacaagcgctatttcttgttcatgtttttataacttaaacatctagtatgttacctagctcttagatttttgtcattttcaggcattcaagtatgcaccctggcaaatgtgtagggcatgatgctattgggcaccacccactttacatctgattgagattcaatggatactgagtctagagcctttcatcctacttgtcagattacattcaaattctgagtttatgtttgagtgtgtgtttgtttgtgtgtgtgtgtctatgtctatggtcattgattttttttttgttctttttttaacaatgactatctcttcttcagtagacatctagtcaataagtttcacttacccaacccttctcggccacagtaggagttacagtaggaatttccatttggaattttctttctcctaaacagtgctcaggtatacagtttattatggctggagaccattaacaaacaggtatgattacttatatgaaaaaccgtcttccaaacaactgactgcaaattgacttccagaatacaatctcttcctaatttgaagattatctgcatatgtgaaaaatgtctcattgtgaaaccatcttgagctcaatgtaagatcatccattcagcaaatcactattgaacatccatgtgtgtaacataactgtgcaagtaatatatagataaaagcataaattagacatcgattctctttgtgtgtataccctactttgttgctagcacgatatttgtgcaatgcaaatgtgccagtatccgaagccttatttgccaggcataggaggccatttgtgtctggttcttatttggctttccaacttcatctcaaggccctcaccacccagcatcttgcaggctatctacagagaactctacttgtcatttacaatctcagcttacaatttcatgctggtgcccatctacaagatgttcttcctgtctagaattcctttcccatttttctagcgttgggtgaaattcattaagtatttaccaaccc

SEQ ID NO: 21892 - DNA, 1023 bp, Homo sapiens
aggtcacactgggcccagagatcatagttttctgacctctgctctagagtttagaagggagagagagaaggaagaagggtggcttgaaaccttcatgaactaatgccttcctttagggaaaaggaagaataaccaccctcgttttaaaaaaatattaaagacatgaagttagcacctttgcttgtatggtacaactatattgtctagtcggttttttagttgttttatagtgagacctcatcacactgctgtttttcattggaaactgatgaggaacattgtaaagcagatggagcacagactgtagaaatgaaaagcacagaagaaagagctgtgtgaaagaaatatttaatcataacatgaaaaactcatagtggcaacttttccattatgttaaattttcctcatttctatgtgttctgagtatgtgcttaaaaagcgaggttgtaattttctatctttgtgcccatctcccatcggtttttgattttgtctttttgcaggactatgacttgagccagctgcagcagcctgacactgtggagcctgatgccatcaagcctgtgggaatccgacgaatggatgaaagacccatccacgccgagccccagtatccggtccgatctgcagccccacaccctggagacattggggacttcattaatgaggtacagagagacactcgttttctctataagagttttcatttcatgctaatggttagatctctgtaggccacaaattgcttggaatacagctatatagttcactaaaacatacttgtgtttctgaagttcatcttgtgtgaaagcaaatgtggcttcattaacaacaaatgtaattgctttgatcaaccaaaaagagatctatcaattaagattctgcatttgtaaaatgacatacatcatatattatcagaattagtcacactgtctccgagaaggattttttttcctagattacaagtaataaatagactaacaatattatagtgcattctaatttcatttattagcattaata

SEQ ID NO: 21893 - DNA, 1028 bp, Homo sapiens
ctatattcttatatttgtcaccctgagctattatgtaatatatccaggagtatcaaagaatatgtcaccaggtaaaagacagtgcttaaacataagattcaattacctttttgtgtgtaatttagacttctaataaaacatttttcacccttagggtaaaaacatttattcactgtcatcaatatacttgccatctattttcccccattttaaggacagctttggtaattgaataagaatgcatacttattcatagttcaccccactctgttgtgcttggtagttatacaattaaacatggcctggaaaaaacatattttattttttagtgtgaaagcattaaaatttctctgaataaatcttttttttttttttttttttttttttccttttagacagagtctttctgtcgcccgggctggagtacagtgatgcgatcttgtctcactgcaactttcacctcccgagttcaagcgattctcctgcctcagcctcccaaataaatatctgggactacaggcgcccaccaccacatccggctgatttttgtattttttagtagagatggggtttcaccatattggccaggctggtcttgaactcctgaccttatgatctacccgccttggcctcccaaagtgcaggggactaaatccctctttttgtcgtgtatagcattttaacagttcaaggactttcacatctgttgcatcattgagggccttttctgagatattccgtaaataactcaaattctataaaattgaaaatggagcacatttgtgcaagatcaaggtgttttttctcaagttttgtatggatgatttgaaatactccatcttgacaagagaaagcagcattctgatgcctttgctcctgctgtggactctcccaaaatggcgctttgtcgccagcccatagatggttcagagctaaagctgatttccccctgaacattttatagtttgtgatacaccaaatgtacatcccactctggcgggttcgaagtctctatacctacctcgctt

SEQ ID NO: 21894 - DNA, 1031 bp, Homo sapiens
gcagttctcattctagacagttgtgacaaaattatataatggggtttttatgcatctaatttttaacctcataacagaataaaatatgtgatgtaggagtgccacaccaaggctctttctcctctatctctaaactggttcatgaaatccattcacttatcctcatttccaaggcctctaccttcacttacctccatcctacaacagattcctaaacggtgtcttgtctgtgctttaacatcccaatccaccttttggaacttcttccttagcatgacagctcttcagcgctgcacccaacctttggtttaccccctcatacactaggtaaaggcccatgagaaagcgtcagtggtgggtgcagactccctgaggatgtgaattcatccagcctgttgactcacggtgacttaagtttccttcaaagtttgggtgatttatccttacggtttttaaaggcagagttctgtcttcctcctctcactcttccttcagggataaaagcagctgtggatcttctcctagaaagggcttgtctgattctatattttcattcagttaggctttattttgttctctgctatcttatggtttcaaaaagctttgattgggaacttagctggtttgttcttggcattagagtttgaataatggtctcatgactttatcccaaccagaagcagatgctttctgtagggttaagagtgtaactacaactcacaccaacaaagaacatttccagcaccctagaagcttcccttatacccacaaacaggtggtttgccctctgtccaaagtaaccactcttttttatttctgtcaccatagattagcaccccctgtttttgacttttatgtaaatggatatcaaacagtcggcactctgtgcatctggcttctattactcaacattgtacctgtgagattcatgtgtagaagtcgttcatttttgtcactgctgaatagtattctgttggaagaattaactacattttatgtatccatcctacttcacttgggcacttgaggtt

SEQ ID NO: 21895 - DNA, 1084 bp, Homo sapiens
aagcactttgagtgctactgagtatgcaaagcatatatattattgacttttcacccaagttccttctttagagaaagctgggacagctatagatgtttttactgaacagattgctaaatgacaagtgatggattgttactagctgaaaacactagatagaaaatgcatctaagacaaccaaaagggaaagatttttccaaacagaagtgctgttttacccccttaaagtttattcttacgttgtattttgttttgcaaacagacaaaaggaccagtagagctcaggaaggttttgtgttgtgcccaaggttgggggcaagaatttgaaagggatcagtgaatcagatgtaataagggctctgtttgagccacccaatctctgttttgctgacggtcagtattccagttataaaaagctgcatcggcatttccgtcagctcaaaagaactttatccctgctttcattctgacatacctattatgactttgttcactaagcagaaggaattatgggaaatggaaacttgatggcatgtttttattaaggcgttatgtgtgtatcttcactgagaaattaaagaaccaagcagaattgtatgttttcctttcaggtaacaaaaattgccttattcattccataacatggtgatttagttaacttggaaaacaaagtaacataaaatgagaagacttatgtacaaagtacattttatattttaaacaaggaatttaatgcttatgtgaatttctgttaacctaaaatcaaactaaaacataatcacagaaaactgcaaatgtattttatgggggtgggatggtgatgatttaaaaaaatgaatgttacaaaagctgtatttcactcttgtcttctctagagttgtaggcttagagagttgtacatctgtatttcaaaacaagagatacattttcaaatctagctgataatacttaacaacaaactgtatttgcaccttttattatagcagacattcttctgcaaactgcaggcaaattaacatttacaagccaaatattttttgtggtaaagtttatactttctgtgatactctatttaattatgtta

SEQ ID NO: 21896 - DNA, 1061 bp, Homo sapiens
tctttatgaaatatttgcattttgaagtttatatgtaattaattttgaaggtacaattattttatatttagtaagtgtctgctttggctagtttttttcttcttcctgtgtgcaattgaaatattgtttattattgtttagttcagtccattgtaatttcagatgcatgttttgtacttaccaacaacttttcaaatggttattatcagagagcattgtgacacaaatgaacacgcaagtcgtagaatgtggccagctcttgaatatttgatgcacaaatagggagaatgacagaatgcagccagaaacctgtcatccccctagctccacctccactagaaagctccaggatgctttctttgtcagaattggtacatatctgggtggataatcctcaaagcccagggagagtgcaatttaatgttgtggtcttcttagaacccctagcatttaagtttggtgttgccaataagaaataaagggtgctgtatcacctcatacctaagggactactgagatcttcgtatacttctcagatatcattggttatgttctcctgcagaatttaatattggagaattagacaggatgataatgatgataaagatgacaatgagagaggaaaaaagggatgatgtaacatttcttacaaagtcaggactctgggcaaacaagaaaccaattctacggctagttaccatggatttccttgaaggttgacaatgactggattatcagtgtagcattcctggcacttgagttagtgtctgggaatgtagaggagtaatccctcttccatattaggagatggaagcatatattgttgaaaaagcagtccttttgaaaaatctttttattacagttgctatagaagggattcttgttaacatgtagtgaaccaagtgccgtttttgttaattacttctttggtaattaaaattctgttttggatactcgtccatcaccctaccacttgtatcctgatatacgagtgttatgttgtataggttatcagctgtgatgcctgatagagttgggaccctagcttagatcttggctta

SEQ ID NO: 21897 - DNA, 1034 bp, Homo sapiens
gagttggtactttgtcctgaagtcagaaatagcgtcattgccctccatcgcctcagtatcctaatgagtcaccaactatggtctctgctgtcttaatctatctttagttaagttcctccccaacactctacctttcccattgctgaagttcagataccctattatttttatcaagacattgaggttaatgaatctccattttcgtttatatgtgtacatcactactttgcttatatatattaaatcatatagtgtttgcacagttccaggaggtcaacagctgattggggttctctcagcgctggaggatcctgtcagttaacctagagagttctgaggcacagaatgtatcttgagaagcatactctaaaattttaactttgaacttcattttcatgacaagcagaaatgcaaaaggaatgtaatctgtcctgcatgaaggacattttacaaatagtcagaatatattctgtgggagggatatcttttgatacaaagtttatgtccaactttgatgttgataaagctgtggtaaaaacacgtccttgcaatagccacagattcgatttggtatccagattttgcaaagcttaaatgttaatgatgttcacttttccttttctttcctttttttttttttttttttttttttttgagacagggtctcactctgttgcccaggctggagtgcagtgacgcaatctcagctcagtgcaacctccaactcccgggttcaagcaattctcctgcctcagcctcctgagtagctgggaatgtaggcacacgctgccacacccgcctaatttttgtatttttggcagagacggggtttcaccatgttggccaggctggtctcaaaatcctgacctcaagtgttccgcctgcctcagcctcccaaactggtgggattacaggcgtgagccactgtgcctggccctcactatttctttttctttgggaataggatacgtgttttgcagtttgttttcattttttctgcttagtcctctattttggaggacttttagagttaa

SEQ ID NO: 21898 - DNA, 1025 bp, Homo sapiens
gcacaccaccatgccctgctaatttttgtatttttaggaaagacaggtttttgccatgttggccaggctggtcttgaactcctgacctcagatgatccaccagccttgggctccccaagtgctgggattataggtgtaagccactgcacccggccagatataacactttcttatcccacatttgctaatggtgactgactactggcaggatattaaaattttcaagaatctcacattaactgcctgagcagagaacttgtgaataagcactgtgagttaagtaacatcttgaggatattaaagagaatgaattctactcaattcgtatctattacaacttctggttattgcttttacaataaatcctcaattaactaatctgcatagtagagaggtttttgtctggtaaattaagtcatgtagtttaccagaaacccattttaatgtgaagctttaatttcaaacatctttgtaagacgtattaggatactttggttattaagattctattaatgaatgtaattatattttaaattaagaactatacattgatgtgggtggatatttttctgaatttgaatttttatttttgagtttaaggtccatgacccagaaattagaggtgtgtgagaaaggtttactgaatgactgatataaatttgttgtcagtttgaactttccttctaggtttggagaaaaaataataataattttttaatttatgtataattgatatgttctgtttaattgagactgtattttttttctcatgaaaagcttattttgaaaatgatagcaggaatttggaagtattccagaactctgtaaaattcatagttaataatttgtttcattcagatttattttgattggcatgtgatccctatgttgtgttctgaattatctgaaatcacaacatcttgatagagtttgctctatttctgaattgttttaaatagtaactttaaaatttgcattaattgaaaggtaccttgtcacaacatttgctttgtgtcatggaaggt

SEQ ID NO: 21899 - DNA, 1053 bp, Homo sapiens
tgcctttttgtgtgccatggcatcccctttttgtggcagcaattttaatttaaagagaatattaaatagcagcataaaaatcagtaagataaagcaagccacttctcaaacttcaaaaattagaagatttatctcaaatacattgtaatttgtgagggaggaagagtacaaaaatcagatcgtgggcacatctgtaggagatgaggctgcttagtgaaccctactccgcctacaaaatttgagtaatctagttttttaaaagataaaatactgattcttctcccttcattactgagacaggtacttattatataaaacaagcagctattcctttagagtatgccagtgttaattctttcaggtagcaccggtatctttagtaaagctgggtcagttctctaagtcaggagttcacactttgaggcactcagaccttgagcattcattgtattacactgattctgtgctcaagatcaaagacaaacagggaaatgacaatcattagctggttttgtataaaaaccttgaatgtcagtgacctttggtatcatctggcttagtctacccttttgggagttgtttctaaaataggcacatccatggtcattcactctccactgaaaatcttgcagtgataactgacttcctattgaaatagtgatttcctcaagaaactttgctttgttctaagctaaaattcatgtggcttgactcaacatagtttataaaaggacactcaaaataatacctagagtctgaggagaaaatgtgctaaaacagtaaaatttaaaacatgattcaaaaatgtcacattattattttcgttgttacagatgcttgggcttcaaagcccagaaactgtttgattattaaactatcttgcctagtggcctctccctaacaagttgccttttttatatgccaggccatatggattgaaaagtaaaatttcaaaaaaaatacacctaccgaagacattaagccagggtttttcaacctcagcactgttggcattttgaaccagataattctttgatgtatagggtcgtcgtt

SEQ ID NO: 21900 - DNA, 1048 bp, Homo sapiens
tagtagatcagagtacttaagtccttgaatgtgaaagactaggtggaaagccttttgggagatgttccagtggccaatatttagaaaaaacaactaggctttctttttgtttgttttaaaattgagaacgctttgaatgtgtaaaaatgggtgctaacagaaattgggaaacacatgcttggcctgtgttctgaaaaccaggataaaggggtgtggttttcctttttctgagataaaagcctgctgtaaattttggcagcaatattttattataataagatcaattcgcagcacattcaggcttattttgaatgagaattgagtttgactaaagaaaataatgtccttccaaatgaaaatgaaaatgagcagatgtacaaaatgaaccttaaaattaatcttggatttacccctccctgtatgcatcatttagcagtcagtgaaagtgatgagggtggggaagaaactgctgtgtagccttaaaaaaaaaatcactacaggcatattttcggggtttgaaggaaacaactgtgttagagactgagttgcttttctgcttagaaacatgcaaataaaatattcctcttttaaagatagttttacctttcacttgttactacatcattcttaaaattgagaaatctttgaatttaacataagttttatctcccccacctcccgccatcctgtaactgaatgctgtctattattttaatcatgttcatctactacttagtgtaaattgctgctctgtggctgcctgagaacaaaagtgctttcagttcttccttcttcagtgaaccagggcttcacatcatgcatggtcttgcaaacagttaggggtttagtctgagctgatcaataaattcagaaccctttatttagtgagatcgatacagtggaatgaagcctgtgcttcaattcccttccaagcatcactgccagggtaggaaggtgtctgtttttctttctaaagcacgatcaaaattatgtttgaggttttttcttatgagccaggatggagcaatgcatttgaaccccctccaaa

SEQ ID NO: 21901 - DNA, 1928 bp, Homo sapiens
agtacaggaaaaaaatcaagggctttttctaggtcagatcttaatataaaatcaccactgcagtgattgatgttctgtgtgaagattctgtcaaatgttctgtaacttgcccagatgtgagggaaggtggtgtcaattaaaacccatgatgagcttgcactgagatctcgctacctctttactcctgtggcctctttttcccacaaagttggggtataacaattactcagagtgttagattattgaaaactgacagaatatttactatctgataatttttttttagttcctagcagttgtatgttttagtatttttgaaaaaaaatcaagatgatataattctaaatttgtgaatagaccagatgaaacttctaagggaattataactttcaaatactgaagaacttaaaatatcttttttgtcctttttggtgtaagttattttacgaacaaattatgtggtatttattggtcctacatggcatttgctctcttggatttttggaactgtttattggttatgtctggttagccgaggaaatggtgtaaggagctgtttttattaataaaaataaagattccattgaatggattagcgtgcgtgtccatgcatgtggtgtctgattctaaatttttaattaacttttgctttttcaagggtacctcatcaaaacttgggattgccaaaacttaataagtctcaccctcctatggaaatttagtcattttactactctagaccactttgaaagaggggttattgctctgacagtctaattccacttcagaaagtcttggcagcattacagccctctgtgcccctaaggaggtaacagaattttcaacttcagtcactggggacagagcccaaatcctctcccgcagggctccctggaagaggcctgctcagcagccatgcgcacatctggatgcgctccattttctcaggacttgtgccagtgaattctgtcttctgcatctcagctaggcttggtgccatggtttcacaggtgtctctgatttggagtggatatatacctatgtctttcagagcagtagttgtcagaatgttatgtcggaaatacattttacatcacgatactgcacttacatgtgtatttcacaagatgtgagacttacttttgactgtgatatactccattttccattccattcctttctaaattatagcaataatgcgttgctgtctgcactttgaaaagcatttcctcctccttgctttcttgggtggagggagtacttagcccctgagtctctcagaagtgtttctgtctttcctgcagcagtgtggacctctgatgaccagccaggacttgctcatgcccacagtccttcagttagtcctgagccaactacaaaatgatcacgatgcttctgactaatatttattgaaacctgtatcctagacatgaaaatgttttacgtgaattagtttctttatgctctacaatcatctgtgaggtacaggcatggtgattgtgtatctgttttacaaatggaaacggaagacaagagaggttcattattctgctaaggaagcagcagagcagggacactgtgcttaatgtcacattattgcaacagttctgctttggtggcctaataacgcttttcttatgtagttctagatgtcctaaaaatgaataataagaaagatctataaattatgtttactgggacatagacagtagagtcatttagttttttaaaatttaattaattaattaattgatttttggagataaatgtacgatcccagctcactgcagctgcagcctcctgagctcaagtgatcttcctgcctcagcctcctgagtagctgagactacagacatgcaaccaccacacccaactaattttttaattttttgtagagacagaagctcactatgttgtccaggctgttc

SEQ ID NO: 21902 - DNA, 1026 bp, Homo sapiens
tgacctaatcacctcccacaaattccacctcctaatactatcacattgttgatgaggatttcaacatgtgaaatttagggggatacaaccattcagaccatagtacttgtctcttcactttcttggtaatttcctttgatgcacaaatgtttttaattttaatgaagttcaacctacctgttttttgtctggttactcttgcttttgatattgtatctaaaaatccattgcaaaatccaaggtcatgaagatttacccctatatttttttctaagagttgtatggttttaaaacactcatatttaggtaattgatctatttttaaaattgttgtgtatagtgttaggaagaggcctaatttcattctctgaatatgtttgaagatagagttgacaggatatgatggactgaatgtgtatgtgggagagaggaagggttcagggatgactacatgtggtgtttgagcactgtgaaggatgtgactgactgtgatagagaagatcgggagcttggtttgaatctgttgagatgaagatcagagatgtcaagaagacatttggatatgagtctggggttctgtggaaagggcttggctacagagttgggagtactcagtatacaaacagtaagtaaaaccttgacacagggtaataaaatcactgtggagctgaatgtgaggacgagaagcctaagaaagaaaaaacagtttaaatatcaagcctttgagaactgtagtgttaggaagttagagttaaggggagaaatggagactgagtaagagtgatcagtgaggtaggagaggaatcagtaggctgtgatgtcttagaaggtaagtgagggagtgtttcaaaggaaaggagtgatcatctgtgccaaatgctatggaagagtccactcagatgaggactgagaagtcaccattggatttagcaacatggaggcaactggtgttttagataaaaactcttcaggacaaggatcagaagcttgatttgagtgtgttcaacagtcaggtggagtctggaa

SEQ ID NO: 21903 - DNA, 1066 bp, Homo sapiens
tattttcctgcctcagcctcccaagtagctgggactacaggtgtgtgccaacatgcccagctaatttttgtattttttggtagagatggggtttcactgtgttggccaggctggtctcgaactcctgaccttaggtgatatgcccgccttggcctaccaaagtgctgggattacaggcgtgaccactgtgcccggccagctttactttttaaagagttcccaaaccaaatgatgaccacagcaacagtcttaacagttttcaaagttagaaagcaaaccaggctctgctctggaagagtcatccaggtgaaattgtttctcagtgttccaaagaacacagtagagagcttgtggtatgtgagggatggactgatagtgggcagagaaaacattcttcattttaacctttcctggatgctggtcagtctaagcctcttgtctataatctgcaagctttgaactaaacaaagttgaaagggggaagtggaaacataaagatactgaatatgctagatgagaaaaaaggcacctcaagaaggacaaggatcattggacatttctgaaccttgtgctaggtgacagtatctcagatgccagctttctgaaagaaaacccggtatgcatgaggtaccccaaatggtaaataggaagtgctaaacaacctcccactgggagcctctccccagttgggttttggtttgcagccagcctgttcaaacctgctttccctttgagactttcccttcgtctcccttggatctgacagcccagtgttatcaccatgttgggtttggtctggtggttgactggtggaacaggtgttttcagtctcgggccccactggctctttctctgccatttactatggagttgctttggccaaagacggctgcctcaagggaagatttcttgttcacttgtaaaggccatccagaccacttggtggaggctgacccttgagccagtggtcgagctgtcagaatccatgctgtccccaccttgcccaagtgagacccttgctagtgttcttgaactcagtgttattaaaaaataacaaacattgctc

SEQ ID NO: 21904 - DNA, 1035 bp, Homo sapiens
gtcagagggcaacaggaagatgcaggccttcaagggcaaggagaggccacaaggaatatgggtgggagtaaaagcaacatcgtctgcttcatactttttcctaggcttggcactgccttttcctttctcaggccaatggcaactgccatttgagtccggtgagggatcagccaacctcttctctatggctcaccttatttggagtgagaaatcaaggagacagagctgactgcatgatgagtctgaaggcatttgcaggatgagcctgaactggttgtgcagaacaaacaaggcattcatgggaattgttgtattccttctgcagccctccttctgggcactaagaaggtctatgaattaaatgcctatctaaaattctgatttattcctacattttctgttttctaatttgaccctaaaatctatgtgttttagacttagactttttattgccccccccccccccttttttttttgagacggagtctcgctctgacgcacaggctggagtgcagtggctccgatctctgctcactgaaagctccgcctcccgggttcacgccattctcctgcctcagcctcctgagtagctgggactacaggcgcccaccaccacgcccggctaattttttgtatttttaatagagacggggtttcactgtgttagccaggatggtctcgatctcctgacctcgtgatccgcctgcctcggcctcccaaagtgctgggattacaggcatgacccaccgctcccggccttgttttccgtttaaagtcgtcttcttttaatgtaatcattttgaacatgtgtgaaagttgatcatacgaattggatcaatcttgaaatactcaaccaaaagacagtcgagaagccagggggagaaagaactcagggcacaaaatattggtctgagaatggaattctctgtaagcctagttgctgaaatttcctgctgtatccagaagccagttttatctaacggctactgaaacacccactgtgttttgctcactccctcactcaccgatcaaaac

SEQ ID NO: 21905 - DNA, 1030 bp, Homo sapiens
ttcacattataaactcttattcttctgaattttttcaaccattttaaaatacaaagtcttagctcataggccatacaaaaatatgtagtgctctgggtttggggattttgccaatgcactatagggtcttttagactggaagaattgttgttgttcttcttagtttaattatcatgtattttcaatctcccacaattatgatttagaataagaattcttaataggcaagatacaaagtagtttcaataaagataaatcttttctaggaaagcagtctgtttttctcatgtttttatgtacacaattctttttttacatttcatgtaggaaaattatttttaggggaatcagtaaattttttcaaagtctttgtcttaaatgtcagtgattttttttctttatgtactgcttaactcataattctaagtactttattttgatgggcagaattcaattagtgagatataatgaaaaaatacagatgattgcttctgattctaaaacctaagctatctggtgacatgttaacttagaacagccaagataattcatgggaaaccatgcttagtggatttattttccactttgatccttaggtcgtaagaaataaatgatgattattttattctatgtatgctaaagtaagttattttatttttatttttaaattcagctgtattgctaactttagtatgtggagtttttggtgcaactaaagggaaacgttttcctgaagatttagcacagcaaaacttaattatatcaaacacagaagcacctggagacgatagagtggtaagtaatttttaaataaatatgtatttgtatctccgataatttaattcatcctcataaactcatttcaaaatttaggagttaatttatatttttaattgaatcagatttcataggcatagatattgtctgtcaatattcatatgtttatatagtggtaatttattaaacttcttaatccagatgtattattttagttatcttttttccactctagtgtcatagtttaaacttg

SEQ ID NO: 21906 - DNA, 1050 bp, Homo sapiens
tgtgtatccactgtgaatgtttcattggataaattatagacaatgccaaagtataattctcaagttttcaaaaatgtaattttcataaaaacaggtagtgggcatggatggataaaggttttaactcattcatgaaggaaccagcaaaaagacaagttgattcctaagaagaaatgagactctggatggattttgataaaagaaaagcagcaattagatggctcagttagatgccttagagggcaattaaaacacacatttggggccgggcatggtggttcacgcctgtaatcccagcatttagggatgccaagggaggtggatcacctgagttcaggagttcgagaccagcctaagatggcagaaccccatctttactaaagaaaaaaatacaaaaattagctgattatggtggcacgtgcctgtagtcccagctacatgggaggctgaggcaggagaatcgcttgaaccaaagaggcagaggttgcagtaagccaagattgcgccactgctctccagcctgggtgacagaatgaggcaagactctgtctcaaaaataaaataaaagaaaataaaatactggagatatcttttctatgagacagaaaatgaaatcattgcaccttttggttttgtgaaagtcaacatcaaactttacaagagttataaaatgcctgggccatagtcagtagtaactgataagccaaataaaggcaacttcccatactcagatgaccgttagcccagcctgttagacagtgctccaagcaggaccataagaatactgtcatctgtttgcattactttttgaatcagagtaattttccttagtaagagtgaaatatgaaaatatttccggaatttcgtttgtccaactctatgaaactacctgcagaagttgttggaccattcttggtagaggcttagcacgggatccactctctgtttagcaagggataaaagtcagtattaacaacatgtgaacatagaatttatgcagcactggtcaggatgacaaatgttcacttgccatttgaaatgccagatgta

SEQ ID NO: 21907 - DNA, 1066 bp, Homo sapiens
aagcactatagagttcagtttttaaagatagcacaattaaccagattcaataggtaaggcatgtgctctcaattgtgtgtgtggactcaaagggaaacaaatgttcaagacaaccagcagtcccaattttcagagagagcaaggtaacaccacatagcatgagaacaggagaagttgagggacagaaattattctgctctaatgaatagaaacatatgccagatacatgaaatatatattatccacctgcttcctttttctaatgtaaatactctttttcaaagttgtccaaaaatggaaggtagttgcgttgtttcctgcttctcattgttttctctcctagctcttttttcttcttgctgaagtacatcctttactatatttttttcaattgtggaatgtgaattttaaactctctcagttttgttgttctgaaaaatattttaatattggcctcatacttaagtgacactttgacttggtttaaaattctgagtcaacagcttctttcccatggcactgtgcagctattaacccattatcttctggtatctcttcttgctgatgcttcttgttctgtcgattaacgattgtccttttgtagttaatatatttaggtagcttttatagtaccctaaattgagttctacagtgttagtacaatgtgtatgccgtggatttttttatatttgtctagttctgcagtcagaaaatactttcaatctgaaaagccatgtttttctttaattctggagtattctcagctattaatctctttaactattgcttctctgccattctgtctattctcttttttagaatccctggtaggtaaatgttgctgtttattttctactggaatttgagctgtaatttcattcttgtttaattggttacccctctttatgtctttgaagattctaaacatacctgtttcagagacgtcttggatagaatgaattaatcttttgactggtgcttttgttggttttccttcttagtgttaatcttgattatttgggaattttagtttgcaggcttatattaaatgagaggtgtttgcttt

SEQ ID NO: 21908 - DNA, 1020 bp, Homo sapiens
tcattaaggaaattattgtccacatttttgccctgcagacagtacactttaaactcggttcttaaatgttatgttacatataataaaaactcagttttttaaaacattgacgacagaataattttccatgctcagaatactttgttttctaagacaggaagagtcttaagtgttttttccatgtatagacaccatctagcctgtcaaatattcctttagttattctggagaactaagatgcactacattattttactcatgccttgctcttgaaatttctcaattggactttcttattctattgctgttttaatttatatataataataaattaagggcaattatttaaactaataaaatggcaatgagatttcataaatatatagatgaaagctctgctgaaataaagatttgtctcatgtatataatatctactttctaggttcaatctgacacggcccaaaactataccatatactattccataagaggtcctggagttgaccaagaacctcggaatttattttatgtggagagagacactggaaacttgtattgtactcgtcctgtagatcgtgagcagtatgaatcttttgaggtaaagtctaaaatgtgtgtactgtattagcaatgatgatgcttggccattttgtctctcatttgcaattcacgtaaccttttctgctttctgagtttgtcaccaatgctctggctactccctaatagcacataattgacttgaaacaaaaaatattttcatagaataaataatattggattccattagattgttcctggtattatggttttactatttttttttcccccacaacagtaccactttgaagaacagtttttttttttttttttttgagacagcatctcactttgccacccaggctgaagtgcagtggcgtaatctcggctcactgcaatctctggctccggggttcaagtgatcctcccaccttagcctcctgagtagctgggatcacaggcacgcaccatgatacccagcta

SEQ ID NO: 21909 - DNA, 1040 bp, Homo sapiens
gctgaggtggagtatcgcttgaaccttggaggcggaggttgcagtgagccgagatcgcaccactgcactccagcccaggcaacagagcgagactttgtctcaaaaaaaaaaaaaaaaaaaaaaaaagaaaaaaggttatgaatgtgacaaaagggagacagcagtttattttggaagggaaaggacgatgtcagagagaggtgtcatcagaactgggtcttacaagatagctgagagagaacagcatcaccacaagggaggctctgtgtattcccggactggagagtggtcggctctgcccagagagggtgtgttaagtggcgtgtatgggaaatgaagctggctagaagggtcttgtgtaaaggactgaggaatctgagggccttgtgggttccatcattcctaggcatccatgaggtgagcttcagagggagaagagcctgtgagcttacatgcagacagttgatttatgagcctgtatgcatttctctcaggtgacagtgcatgattttcaaagggtctaggggcaaaaaaaaaaaaagcaaaaataaacaaaaaacaccactgctttagggaaatggagaaccatcgaaggctttaggcaggtgaatgatggactaggattgtattttaggaagattattcacatgagaagctgaacaatgggtgagaatggagaaatactgggatcagcaggagaccaatgaggagcttgctgcaggaagccgacgggcaacaacaagggcaagtgccaaggctgtggcgttggagagaggagaaggcacaaaaaagaacctacagggtgccattggccagatgtggcgaccagttgaggggtgagggttaatttccaggtttctgacttggtgaccatgaactgaagtgtgatacagagtaaccgtcgcatttggaggatggggaagttagtgggttccgtttgggccgttttgtttgaagttcaagagggttaacttggggtctgcctttagtaagagatccggactgaacatcagaggaagtgagaggggaagaaggctgag

SEQ ID NO: 21910 - DNA, 1035 bp, Homo sapiens
ctgatgccctgtgaaatttgtaactggggtttccaagcacttctttggaattggaccttctcttgtggcttctgtttcctccttgatacccagcctggaacctttgcccgtcccaacaccctctgcttagcagccgtggcagggcctctttcattcagcagtcttgcaggtggcgtgagtctctgccctgaagtactgtcctgactcctaggcagcatccccaccaactccattgtgacaatgactgaatattgatgttaggtaaaggtgtgcaatggaggtgcttagttttctttggctcctctcacatacttcctatctaattcgcaggattctctcatttccctatggtcagagggtttagcttctacattgtctctcattggagcagattactcaacattcaaagaatatcttcacattttcctaaagtgtctgctagagtttcactttctgtagtacattgtttgtgatccaggagacagacggtagtttaatgagctgtttccgtctctcatttcactcattgcatgttgatgtcattctcttaggccagcttccctacatagcaggaaacctgtgtgtcatggtttctagatttgcgtctcagaactttgctccagaaagggactgaaatgtgatctctctggttccacattcaaaaatcctgagcctgtgactgtctcgtgggtcaggtgctcatctctaatcgctcatagctacagttattagctatttctatgggccagggattgttctcagcaccttacacattttgtcttattgaagtttaaaaatgacagtatgaagtaggcatagatggcaagctacatcgtgtcctgccctgtatcacacagctacagtgtgttggagcaaggatttgaactcaggcatttgactttggtgccctgtatgcagtttaatttgctgactctaaagataatggacctaatgtaataatagctccagggctcccccggggctgcagcccacaggctgggaatgactaacttaaaggtttagaatgagctgtat

SEQ ID NO: 21911 - DNA, 1050 bp, Homo sapiens
taagagaatgtagataatggtttgttttcctgagtctagttgtgattgttcgttttgtagatctgtttatttttgttgatgttacttgttaactctttttccccccaatttgcagagccgtcttaatctatcgctgattttcccttaggcacatgagttgaccacgctaagggggggtttccaaaattcccatgccattgtcttctctcttccagtgctgcttttgagaagtctgttgaccatcctgatggcagttactgttcatggaccagttttttctggagacttttgggatctttttgtatttttaaattttacaaagagcatcttggagctttgtttttcttctcttgctgggagcagtcctatcagtatggaatatcttacccttcatttctccaaaatatttttatattatttctttgataatttgtcttcctattattttcctttctttttggaactcctattatgtattatttctctctcgtttttcaattctttttctttcctttctatctttctgggagattgctctgactttactacaatgctttgatttgattttttaaattttggcaaacttatttttaagaattcttttttttttcttttcttactgttactgtctccctcaaataagaatgccttatcttcctttccaggaatattgaagataaataagtaactctaaggtgtaaatcaatgaacttgactagacactgtcacaaaactcataacaatagtaatcttaagcagttttggtgggagtgacagaaacccaattcatgcttattgcacttgctgctaccactagcaaggtaggagtccccatagagagagaagccctttttttaaaaacaaaaacaaaaagaaaaaaacaagaattttggtatatatgtagatatatatatttaaagaatcaggccaggcatggtggctcacgcctgtaatcccagcactttgggaggttgaggtgggaggattgcttgagccgaggagttggagaccagcctggcaagaccctgtctctacaaaaaatacaaaatt

SEQ ID NO: 21912 - DNA, 1051 bp, Homo sapiens
tgttcagttagtttcattctatttgataggtgggtatttcaactttttttttgtttttattcttaaaaaatcagtttgtttttgtcagtttttatagtaggcaatattttatatttctgttttgcgtttggacgtgctgattgagtcagtttatgtttattgggcacttccccaattctgaatattattttattaaataaaaaaaagcttactgtgttatgacattctttctctatttttcttttatagccaacacatatctctttatggtacaagctcgaggtataatgttgagagaaaatgtgaaaacaataggtcatatgatcaggctgtacacaaataaaaacagtacgctcaacggtacaggtaagactacttcctgcttaaccccttgtagttacaaagcagtaaaccaaatcttttacagtctgttttgccttcaggtaacttcctgttaaagatgaagaaggtatcttcccctaagcgtcctggtagattattttactgtgcaaatcaagactgttacctattttaggatgtatgaacgtgtggtcacaaaagtgatgaggttttgtacagacacttaagttaattcttgtaaacaaaatatagaaagcagcttctactttttcaattcgtatgttgtatttaagagaaattaaccagagaataatttattcatcttagtaagccatactaccatctctctttatgttcattctagttcctaagttgttcttccaactaggtctagaaaatagttgtttttaattatagaagattgttaatagtgttatggcctttttaaggagctaaaggagaaattttataaaattggaaattggtagctactcctttttattttacttatttatttttttagacagagtctcgctctgttgcccaggctggagtgcagtggcgcaatcttggctcactgcaagctccatctaccaggttcacgccattctcacgcctcagtctcccaagtagctgggattacaggcgcccatcaccacgcccggctaatttttttttaaatttttgatag

SEQ ID NO: 21913 - DNA, 1031 bp, Homo sapiens
aaacattcactaggattctgatcttcgaagtgcacttcttttggaacaggcagcacattgctttataaacatgaaaagtcccatggttagaaaatatgcatttcatatgatattggcaggccatcgatttagtaaagcagggcaggtgagtgcatttgctttacaatgaaaagttgctatttattttataaatgtgtgtcatttgtccatttttattatttaaaaaggatcttaaaaactaaattttgttctgaggtaatgtattggtaagggcgtgagatttggatttagacaaatctggctataaattttgatcttctactcacaactttggtcaagctacttctctgagcctcggggtttttttatttataaaatttgtaattttatccaaattttggttaggttaaactaaatcacatttgtgaaaggccagatagattgtatgcattcaagcaggaatgcattctccctatttcagctgtgatcttctgttctctttcaaagtactttttaaaaaaatcctgctctttctgtttcagagtgctttataatgctattgactaaatacttaatgtatagacatcttctgtctgttgtctcttgaagcagctgagttgctgggatctttactgatgtagagagatttatccggccccagttgtcctagaaccattagtcggagagagctagctttcttggaggctgagagtagcagtagggagatgatgatttactataaatataaatggaaacttggattaaacaaccatctctatatttcagagagtatactaggagctgaacattcacccataaagtcaacatggtcttacgtcttaaggagcttttgatctattaggggcatatgaggatcttttaaagatttagttaatatgaatttactaagtatgaaatgtaactatgaacatccttaatttttctaagtctgtgctaaccaaagcatcccagtgttttacacaatgtacattatttcaaaggtacaaagaagtaaagatgttcagaaatta

SEQ ID NO: 21914 - DNA, 1048 bp, Homo sapiens
aagtgatccatccgcctaagcctcccaaagtgctgggattacaggcatgcgtcaccacacccggccagttcagcatatttttggtgggaaaagataactgtcaaatactacagtgacaaagaggaaggggaaacatgagtagctctagaaaacagaagattaaaaaatctggacaaaataaaagtgatggacaacacacctaaccactaggcctgaccaaacattcacccataagcacattgtatatacgtgcacccactcacactgccacacaacattcacgtagacgcccaaaggaggacaaatccaaatgtctgctctggaatttccatggcaaatctgagtttaggcaaaagtgaagacctccctggggtctaaacaaatcttaggaggcagtctttgctccccatgtagccagtggtgcccttatatttgcctgagcctttcgtaattgtctggacaccagaattcattcttcattttcctggagtttaactgctaaatcttatctgatctaactttacctgtaatggaagcctctcccttttgatctctgtattccccatgttctttcaggaaaaacacatcccaaaacagtggtcattagagggtgttcagaaattggaaagtagaaagagaataatataaatacaataaagaaatgcctgttactctcatgatttctctgagaccagttggccaaggatccactagtctttaaggatatgttttaaaggccttaattgaaggtactgcagtctttgctcacaagagccaagtaagacagtgctacttggaggtttctgtaagactcttactcattacttaacttgaattctaggtgctcttttgacctctctgacttcagtccttccagagtcagatcacccatcttctctgaagagtgactgggctacaaatgtgtttttcaagtctgcattaggctatgaagtttatacatgtgtatccagttaaaaaaaaaacagcaaatttcattccaacttttagtttcccatctaaactgtaagactgtttcttcttttgaaat

SEQ ID NO: 21915 - DNA, 1064 bp, Homo sapiens
tttttcccaattgacatgtctaatttttctaaaatgaggaaggtctaatgtatctatttttttcaacttttgttatctattttatcatccattatcctgtttactcttacagcattatgtgttaaatccaagcatagtctttgaatggtatattttgggctgcatcttattttaaaaggaaggaagaccatattacccttccttaccaggtaaaacagtacattctgcatgtttttgttttgttttgttttgaggcagggtctcattatgtcacccatgctggagttcagtggctctctcttggcttactgcaacctctgcctcctgggctcaagcgatcctcctacctcagcctcccgagtagcggggactacaggtgtgggctaccatgcccggttaattttgcattttttgtagagatgaggttttctcatgttgcccaggctggtctcgaactcctgggctcaagtgatcagcctgcctcggcctcccaaagtgctgggattacaggcgtgagccactgaacatggccagaaaactttagtaggaaaacatggttgctatttcaattccaaagaaagaacatgtagagatggaaagggatatgaggaaaatagtgatttttatcccaagataagtccaagaaaattttttgttttttgtttgttcgttttgagacagggtcttgctctgtcgctgcccaggctggagtgcagtggcaccatcttggctcactgcagctttgacctcctgggttcaagcgatcttcccacctcagcctctcgagtagccagcgctacagcctcatgtcccactcccgactaatttttgtactttttgtagagacagggtttgctatgtttcccaggctggtctccaactcctgggctcaagtgatccctccacctcagcctcccaaagtgctgggattacaggcatgagccaccacgcccagccacaagctaccagttactactagtatttagaaagttattgcaatttaagagtatgtctgtgtatgtctgtatgtgtatgtattttgctttttaatttatttttaatta

SEQ ID NO: 21916 - DNA, 1035 bp, Homo sapiens
caatgatcagacctcacaatttgttaaaagagcagtgccacgttccttggatgcgaggtgaaattttgagttctgcacatcattagtgagtctgatagttttcctctaggcaggtttcatggactcatatctaagtcttagggaaacagtgaaatgtaaagggaaaagcaaagaaattactcttatataagctttccatgcaacactggtaatactgctttgaagaaacgagttctcttccgtttgtcacaaaacttagcatcgtttcagggaacatgggacagctccagcataccagctgcatccagcagcacccagcttcacctaggctgcagccctggccaccaacagcggcagcacaagcagtagtgaccctccactgaaaaacaccctcatgacagccacgtccccggcacaatcacagattatccaccacgacacagctgcactgccagatctgtgggcactggccccgggtgaggattaggctattgttagctatcaaggctgactgagcacggtatgccagactctgggctaaactctggcaacatagtgacaaataagacacacttggtctctgcccttgtggcacttgcattttggaaaggtcttggcaggtgtcttagtttcctagggctgctgtaacaaaatgccacaaactgggtggctcacacaacaggaatttactgtctctcagttctgggggccagaagaccaagattaaggtgtcaagattaagtgttgtttccttctgagggggctgtgagagagaatctgtttcatgcctctcacctatggtgtttgctgcagtctttggtgtcccttggcatgtagaagcatcaccctgatctctccctcatcttcacatgatgttccccttgtatgcatgtctgtgtcccaatgcccccttctataagacgtcactcatattaggggcccaccctactctagtatgacctcatcttaattaattacatctacaaggactctatttccaagtaagatcacattctgaggtactagaggctaaga

SEQ ID NO: 21917 - DNA, 1010 bp, Homo sapiens
gcagccttgaactcccaggctcaagtgatcctgccacctcagcttcccgagtaactgggactacaggcacttgccaccacacctgcctaatttttgtattttttatggaaatggggttttgctgtgtgcccagactggtcttgaactcctgagatagagccatttgcctgctttggcctcccaaagtgctggaattacaggtatgagccaccacccctggcaggatgaattatttcagacctttccacatgaaaagcctcccctaccaccctgctgtacccctactcccagtttcataagaattgcttacttgaatttcaggttagaggtatctaaaagtatttttaccatttttcagctcttagcacaatgcctggcatgtagaaagcacccaataagcatttaataaatgaatgagcaaatctcagtattaaaaattataaggtccaagatatctatattactacagcagtgtatgagctctgcaagtctgaaatagaatgtcacttttgtttcatttgaggcagacattatatttttaaatatgtaaattggaactaagatggcaggtcttaatattagcagaaggaaaaacagagactatcatgatttataaaataatgattcttagggtcattagttacccatattctaaataaagtatttctggaaagtacaactcatttttcgatttttcacctttttgctagttcttttcattctgaagttaagatgtctcctttacatattatgtgtttccatgtcactggatttttaatctttggtattatcatgctcttcatatgactcctgagtatatggactagaatgccatgaatcttagaaactagtcaactcttagcaaagacctgatggcatagtcagcttaccatttatccatcctctcatctctgggcaccacggattttacttctaagcaaacaagccacttggtccaaataatgttacaaaactacgactgctaatttggtacagttgtcatcttccta

SEQ ID NO: 21918 - DNA, 1026 bp, Homo sapiens
ttttttttactaaagatttctcttgaaatgttctgaccatttttaagttaaactccctcattttcagtaggggtagcccctgataacattcattttgtatatacaattaagtatgaatcaccaactttttcagtcatttaaccaccatgaaatacccccagtaatgtaggactttatgtttctgtatcatttccatgtctgggtctgctagtatgtgttcctggccctaatgcaaacatgagctatgtcctgtctccttctctacttttcttccacaatacagatcatcctctctttaagctcttataagaaaagtcaaccatcaagtaggtccgaagaagtgtttgacaaaaaaattgcctgagatgcctaatattcaagataattaattttaaaaactagatatttgcaactgatctttttctttttttctcattttaaattagaccaccagaaagtaatgcacctgagattttcatgattactctctgtttttaatttgattgatttctactctgattttcctaattctacttactttcagttaagtttctttgtctagcttcttaaagtaaaaatttagataactgattttaaaccttgtttctcctaataaaagcaaatatgttataaggtattatctaagcatagctttaggtatatcacacatattttaatatttttatctttttattttcattctaccgtaaatgttcaaatttcccattcagtttctttttttaacccatgagatatttagaaatgtgttctttaattcacaaatatttaaggattttctcgatatcttagtgtcattggtttacaatgaagtctatgttggtcagagaacatacgttgtacaaattcatttttgtaatttactggagcttatattataatttattgtctatttaggtgaagttcttttgcatttgaaaaggatgtatattctgcaattgttagacacaaaatctataatctcaattatgttaagataattgttcttttctacaacttctataaact

SEQ ID NO: 21919 - DNA, 1050 bp, Homo sapiens
agaacatcagtgcagcaagagcttggagaatgggggggctactggaaaaaaatgagtctgaaaaagtaaagagggccacatttcaaaagtccttataaattatacttataaatttgactattgtcactactatgagtagtgaggataagattttagttttaaaactgttgagaactggatgagccaaggtggagtcaaggagacaatttaaaatgcctttgaaataatctaagcaaggtattttgttgactttgtttctggcatggggacctgggtgagtggtactacaagtcactaaggtaggtttctgtgtggatggcactggcctcaagctgctgtgacacccagtttgaagataattgcctctcctagtccatgctttcacagcaccctctattcttcccacttcagtacctaaatgtagtattatgattaatttcagtattagcacttaacgctctctatggtgaaacctgagttccagtctttatgaaatattgtctttgtctggtctgagtgcagtggtgtttacaattaattgatcacacacagttacagatttctttattccttgtccattcccattgcttcacttgacaggcctaaaaataaaaataataataaaaaaagaaatgtcatcatcgaacaggtttttcttctatgtagaaagttcattgtgtctgctttccttatcctgccccacccctctaccctgcccttgccatcacacaaacacagacacacacgcacctgcacatgtcatgttgacgtggtgtgcttctatccattacttagactgtgtcagggctatgaagtctttaagacattaatatttagcacaatttctagcagatgtttactaaatcagactagctgaaaggtaacaaagggaatattgttcttagctaatgctataggtatgggaagaataaaaggtaaggacaattatgtagtttggaattgcgtagtagaacaaacctacagtccgtgattaggaaatgtagttcgcattatttgcagcgctaaaaaattagtgctttggaatgcatg

SEQ ID NO: 21920 - DNA, 1155 bp, Homo sapiens
acattattttatttggtcctaacaaaaattctttaagatcaacagagggttggttatgttcacttaacagataggaaagctcagatttgaagtgctgacttgtgtccaataacacattttaagtgcaagagcgaaaacctcacgtacttcattttaatactgaatatttattcttctacattgcaatttctgttgtcagagattgtaaaatttttattaaataattttgattaattatagtccctaaaacatatattttaggggtaagatggagtgcaaatggaaggggaaaataagataattagtggatattaagtaatgggatgataaggactgaaaattccacttaatttattttggaaaagcaaaatatttgcccaacacatattcctataagggagtacttgtgttgagacctttggctcagtggttctacattgctgctgctgatttcagggctgctgtccatttggctttatttcccatagtctgatcactcctgttggatcaagtcaagagatagctgtggtttctcttctccatttacttcatttgggttcagtttttcatctttcatccatacctcacccagcaatgagtgattgaggaatgagtgagatgtaaaaaatatcaaaggtaaatcactcttctctaccttttcagaagcaagggttcaatgctaatagaaaagacaatatagcatccataagtaaattctcccgtaattctatgatataaagttgattgaatgattaatggcattatatttgacaaatttgaaaatgtccaaccagttctgtatattagcaacgtttttggtttgggattttcatttacttcaaatattcaagacattttattctggatatagatagtttcttatatgaatatgcactatggctttctatctgctagtataaaagtccaagtggctttcttctatgacaatagctatagacatattttccatctacctgcctatttttattttgatatacaaaaaagttggacatttgagtaaaattgaatatgttattctatttttaaaagtcatataaccccttctttaacacattctgcattcaaaccagattaaatttatttcttagaaattttgaaaatttcaaatggggaatggaatggaaatggcaggca

SEQ ID NO: 21921 - DNA, 1026 bp, Homo sapiens
tagtgctattaaggccatagactgttgggccagactttaattcttaatactaatgctgaatttggctagtcataggtaggattagctagataactattgcaattataatggttcccattaagtttaagatttcttctaattcttaaacattagcttatagagcatgcatgatgattatgtttattgaccttctttttctcctttttcctacatggccaagaaaccatacttatataactaatcattaaagtgtatcatactgtcttaacaatattatcaatagatctagtggtcattttatttactttgcctttttgcaaatctttctatgttttcactctgcaggaaatggtggtcctttaatgttggattaacttttgaatgcatttgttttttctatctgcagtatatcattccttgaaatatctaggcatttataaagcttaaactttattgtaatctgatttgactttagataaaattggagggtatatatattatttcttatgagctcttgaaaatcccacacaaaatgacacattttaggaatatgtaaaggcaatcataatttttttttcaatcattattgaattatagtgactcttaggtctctttattgcatttgtatctgtgtatatattaactgttactggtacattgaatgtgtttcagtatatttgtctgtagtctactcttggttatctacatgaacaaaacggagaagaggtgtagacatctcaatatcactcatgtttgaacttaaaatatatccttttactaaaaaatataatctgaatgcagatgtggttagcaatttggaaagtcacttcaaaattaatgatgtggcattataaaaataacttgggaccctgttttgtcttccagtgtttaacttttctcaaattctgccaaaacttcactttctgtgaatacatcactgttttctggttttcttttatcaattgtattatatcacagggtaagcgagttcagacacatttcttaaattagggactaatcaaaggg

SEQ ID NO: 21922 - DNA, 1032 bp, Homo sapiens
tacaagtagttcattcattcactgcatgtggacatttttttaagagtcctatttttacatgaacatttctgtttcaagtcttgtggcccattgctcacatgaccctagaaatttacctgactttatcaactctgcattttaaactatgcttattagtcattctttctagttgttttataatggaagatttctttctttttaaaaataacattaaaataagttaatgtttcatttcctatccttggcagatttttatttttcaatatgaattgttttgaaaaaaaagttaatgatacatgcactaaaaagggatacaaagatttcgttattatattttaatttaatgtgaatttttcattttttcaaattgatcaagcatagtttacaaaaaattccttgagctggttgtcggtccactagaataactttcctctgttgccgcacaggacagcaaggctttcactcctccaaagagtatatccttttccccctctcattttaaatagacttcaggtttacagcaatactgagcaaaagtacagagtttccaggtatcccctgccctcacaagctcataagcacccctgctatcaacatcctgcaccaaagtggtacattggttacaatcaatgaaactacattggcatatcattaaaatccaaagtttacattagggttaatcttggttttgtacattccatgagtttggaaaaagatgtataatgacatgtatctacccatatagtgtcatacagaatagtttcactgccctaaatatatgttgtgctttgtctattaatcccccccttcccataagccctggcaaccactgatctttttactgtctccttagttttgccttcttccagaaggtcagatatttggaaccatatagtatttagacctttcagattggcttctatcactcgataatatgcatttaagattctttcatgtattttcatggcttgatagttcattttttagtgctaagaaatatttcattgtctgggtgcaccagtttattcactc

SEQ ID NO: 21923 - DNA, 1043 bp, Homo sapiens
ttgtacaaaagctctcattcttttgtacaggcaaggcttcattgctgggtattgtattggagttttgcaccaaatggttcaccagttagtaatgtttaagaacttgattaccatttgggatagagagtataattctgattaaggctagaatgtagttctaagagtcttaatttaatgctgcttgataaaaatagtgacttagaatactacttgataaaagtcatggtcagaatatgtggctcagactcaaagtttctgactttcctgagtgactacattcaaatatctatccaattatcatctctttatttgtagaagaggaagaaatgaagtaagagcaagcattactagaagaatgttgactttcccttcacactaggcccaattttcctctgctttggttttctctgttaacctaattggacttttaacaagtaagactatggtcattcaggtatttgactatttcttcttgaaggagggtacaaagtgaatattctggaaactctacaatatcttcgattgctactttaaattttagggagatgaatgacataggtgatatggtggctcataagagcaaattaattacaaatttattctctattctatgatgaaacttttccttttgtattatttcttgaactagccaagcctatcaaatggttatacaaagtgtactaccttctttacttaatggtagcctttgatgaaaacaacaaaacaaaaaacaacaacaaaagggggattgagatcttagagtggtagaaggctgagaaaacctaaatctacatcacatttcataacataaaccaagaaaatgtgttgtatgattacctgaagaaccaataaacctgaattgaactaataacagtaaatgtaacatctggtaaactacagttataatgcagtttttcttatgtggacaagaaaatgagaggctaactaaccatttattctatgaattaaaagaaagcctcaaatatttattccctcaaagtcatgttctatctgctaaaaatgctgatcaatgttagcttaat

SEQ ID NO: 21924 - DNA, 1030 bp, Homo sapiens
ttctctatacaagatcatgtcatctgcaaatatagttatatacttcctcttttttcatcatggatgcttttatttttcttgcctaattgtcttagctagaatctccactatagtgttgaatagaagtgacagaagcatacactcttgtctccttcctgatcttggggggatattatgcttaatgttacttgttggttttttgtagatccccttaatcaggtggaggatgtttctttaagtccccagtttgttgagcttttttgtcatggaagcatgttggatttttctcaaatacttttcctgcatctctttagataatcatgtgtttttactttattttatgagatattacattgctaatttttatctattccatcagctttgcatttatccatatgagataaattccatatggtgatagcatatgcttttgtatatgttgccgaatttggtatgctaatattttttgaagatgtttgtgtctatattaataaaggatattgttctgtaattttgttttcctgtgaaatcattgcatgattttgggataaggctaatacttgccttatagaatgcattggtaagtgtttcctctccctcttctaatttttggaagactatgtaaagagaagatgttaattctttttaaaatatttgataaaatcaccagtgaagccatgtggtctttggctttctttgtagaaagtattttttttttcaatctgtttaatcatcacaggtttatccttttttctactttttctagactgattgtcttactccatttggggtgctaaaacaaaataccataaactgagtagtttataaacaaaagaaatttatatcttacagttctgaagtctgggaaatcctagatcaaatcactggaagatttaatttctgataggggcctgctttctggtgcacagagagtatcttcttgctgtgtgctcacatggcaaaagatatcccccatcctaataccttcacaatggtgattcggtttcaatatatgaattttggggaacac

SEQ ID NO: 21925 - DNA, 1079 bp, Homo sapiens
gttcttacttggattcttttgattattgacatagggtttgtcgtcttagtaggtcatgattggcaaactttttctgtaagcggccatatagtaaataaggtcatgcataactcaacgatagtgctatggtctgagaaatatgttaggctatttcatccttgtgtgaacgtcatagaatgtacttgcacaaacctaaatggcgtagcctactacacacttaggctatctggtatagcctattgcgcctaggctacaaaccggtacggcatgttgctgtactgaatactgtagagaattgtaacacaatgctaactatttgtgtatcaaaacatagaaaagataagagtaaaatatgatataaaatgtttgaaaaaaaaaaaagatatgcctgtacagggcacttaccatgaatggacctcgctggattggaagttgctctaagaagtcagtgagtgagtggtgaatttggaggcctgggacattattgtacattcctatagaccatataaacactgaacacttaggctacactaaatttattaagaaaacatttttcttcaataattaaccttagcttactggaactttttcacttacaaacttttacatttttttttaacttttttactcttttgtgataacacttcacttaaaatacaaacacattgtacagctgtacaaatatatttatatccttattctgtaagctttttgcttttttttttttatagacagagtctcgctctgtcgccaggctagagtgcagtggcgcgatcttggctcactgcagcctccacctcgcgggttcaagagattctcctgcctcaatctccccagtagctgggactacaggcgcaatccaccacgcccagctaatttttgtatttttagtagagacagggtttcaccatgttggccaggatggtcttgatctcttgacctcgtgatctgcctgcctcagcctcccaaagtgctgggattacaggcctgagccaccgtgcccggcacagctttttgctatttttaaattcattttttagagacagggtcatactctgttgcccaggctggaatgcagt

SEQ ID NO: 21926 - DNA, 1082 bp, Homo sapiens
ccaaattccaaatgccagggaatggggaggtgaccttttctcttttatggacctttgggaaggagacccataaagttaaggaaattctcaattcgttgcacaactgtcattctcctcttctttaggacatatgaaaccattgtgccaatgtagatcagaacctagatgtttagtatttgctttccttatgcactttgaatattgcatcaggaactactctacttccaagtaggggagccaagtccttgaaagtggctcctggtggacacctgttttccagagggattgttgttctttcctgtgtgctgattgtcagttaggacacatgtgtcgggttctatagtcggtaaacttgtttcaggtccagaaatctgcctggaagagcaatttcaaacttactacagtcagagtgtcagcaaaagcttagaagtttcctccaaggtggtggcatacatccacagctccacctgccaggaattaagctgggaatgtgggaatgttgatctctgtaccctgagtgggcttggcattctgtagcattgctttcacctaattgcaatctcaaggctagaccatcaggctgagttgatgaggacattcactttgtgacacagtctttgctttcctgggaccctcaggaggagaaatgtggcctacttgaagaacaggacactggcacttctcagcatgccacttatttttatcttaacaacactgtgaaccaggtaagcttctcctttcagtgttagaagcttctgaaagccaaatgtaaggatttaaacgtgtctacagggctttacagtatgcatttttatatctgctaattcctggctccattttatacccctacccttgtttcattccttctttctcacctactttttatgtgtcttgatgtagtttatgtatattttcagatttggcttccaaaggtgtgctagaacctttgcacttgttaaatatttaggaattttgtgtgccccttctttaacagttgatagtttgaaatcagccatgctgggaatacctacactatggatattggcaaatgctacaaaacagaccttaccctaacccaaggg

SEQ ID NO: 21927 - DNA, 1058 bp, Homo sapiens
ctttgcatgctatttcttcttaaacggtgaggagtttagaaaaagtactcaagcttagttttggcggaaaggcattaatagtattttctcaagcagtgtttgtacagaattattaaggagccccctaacattttctcataagcccccaggaacggattccttgtacctcagaggcaaggtacttgccaataagcctttagcttgaggcttgctgtaatatattttataagactgtaatggaacttagcaatttaatcagagtatgtgcttctcgttatattcttaaaaaatacaacgcatcagcaaatgttgcattatgggctatgaaattccttctgttagttgttcacattttagcctgtgcccactgtgttttgtatgatggacaaaccaaataatcattatgtaagtaaggtagagctttatattttttccaatgtgtaaacactctgtaaataggcagtccttggtgggtgtggcagctcccctagctcatcaggaacctggactcctctctttcttctctgctatcctcagtgtgtagttctcatctttcaggctgcctggtggttgcaagatgactgctgaagttctagtcatgacactcatgttctaggcaggaagtaggaagaaagggagaaggtagctgaatacaatttaacaacttccatttaaattttgtggtagaatgtctgcaaagatggctgccaataatttttgtaggcttaagtcattttttcctgtcaagaggtatagtctgtttctcttctcctttagtcagggctggccctatgacttgctttgaccaatagaatgtattggaaggccttgctaggctttgctgcttctgtttaccctcttgggatccagctgccatgtaaagaagcttagactagaatatatatatatatatatctggaatacaatggtgtgaacacagcttactgcagcctcaacctcccaggctcaggtgatcctcccacctcagcttcgatagtagctgggactacaggtgcactttaccatactcagctaattttttgtagagacagggtttc

SEQ ID NO: 21928 - DNA, 1028 bp, Homo sapiens
tttcaataagaaattacaaggcctgctaaaagtcaagaaacagcctgaagagagaaagcaagtgtcagaaccagacttacatatggcacaaattttgaagtgatgagactaagaatttaaaataattgaaatgttaaggggtctaacagaaaaagtaggtacaatgcaagaacagatgggtaatataagtagagaggtggaaatgcccagaaaaaatccaaagcaaatgctaggggaaaaaaaattaccgacactgggaggcttaggtgggaggatcacttgagcccaagaggttaaggctgcaatgtgctgtgattgtgccactgcactccagcctgggtgacagagtgagactgtaaaaaaaataataagaatgtgtttgatgggcagttcagcagactgggcactgccaaggaaggaagtggtgaacttgaagactaggtctatagaaacttcccaaactgaaatgcaaagtgaaaacagaatggaaaagaagtccccacaaatagaacagccaagaattttggtaccatttggaaaggtataatgtacatgggcttggaatactggaaagcaagagaatgaagccaaataaatatttgaggtaaaaatagccaagaattttaaaaattagtgacagacacccaaccactgatccaggaaactcaagagaacaccaagcaggataccaaaatgcctacaatctctacttaggcatgccatattcaaagtacagaaaatcaaagtaaaaccttgaaagaagccagagggggaatcaccttaccttacctgtagcgtaacaaagataaattatggacttctcagcagaaccatgcaagcaagaagataagtgttgaaagaaaaaacccaccaacttagaattatatatccaatgaaattattcttcaaaagtgaaagacaaactagtgagtttgctagtgctggaggtggtcaaaaagaggtcgaataacaaggacgagaaatgttgggttcaatgtttgcctaactatattcggtacataagctgt

SEQ ID NO: 21929 - DNA, 1030 bp, Homo sapiens
agacttagccctgtttatgggctctgcattttctgtcctttctttttcatgtaatacattatatgcatcttacatgtcattgttttccttttaatatatggatgtatgataatttatttaactgctctgttctctgttacttttttttttttaaatagacaggatctcactttgtcatccacactggagtacagtggcaagatcatagctcactgtaacctcacacacctcctgcctcagcctcccaagtagctaggactacaagtgtacctcacaatgcctggccaattttttatttttttgcagagatgaggttttgctgtgttgctcagactatttatttttattgcttttctattcttaacagaatttcagagaacatctcttcagttaacttttcactcacatattgatccgttaataattctgataaatttctaaagatgaaattgctgattcatgttaaagacttgatcctgttaaccagtcttattgccttctttgatgatttctgaatattatctataagccttctgtccaaggccattcattttctccagaggaaaacacaccagatttgctggttagataacataggacatctgttttttgaacagtgcttttacctcttagcactgtgatttgggtccctagatgcgcacactcttttgctgagcttcttatcttccatcttttagttatatgggataagggttttaccagattcgtgtagagttttagttgatccttcttgtcaaccttaagacttatcattacatattaaggagactggtactgcaaagtccggaacatatccagaattcctcaggatgaattacattactttcggtcattatttcctgttgcagctgtcctcatcttccaacaggttcgtcctttccattcctttccttccccttccattctttcagatggagtctcactctctcacccaggctggactgcagtggcgtgatctcagctcgctgcaacctctgcctcctgggttcaagcagttctcctgcctcag

SEQ ID NO: 21930 - DNA, 1825 bp, Homo sapiens
gttcttctgcataactggattttatattataaagaagaaatcacctcaattatgttcagctgttttttaacaagtaaatactctttacaagtacagaaataaacttgaaagttattccacagaactctttgtaaattatcacttagaactatgttattcctttgtagaagatgtggaaatgatttgagatatttagacttttttgtaccaagtaggtggcatcactttgaagttgagactgagaggtgaagatttatgttttctgaatcagctgtgatactatcaagtaattttcatctattgtgtatctttgaacattaacagtggttgaccagatactgatgtgtcatttgttgctgcatttttgataatggaacataaatttaaagtatcagttcgggaattggccatttcatatttcttaaggaagccattattaaagcatgtgtaatgaatgaaaacatgaagtggtttaaaatttgtgttttaagacaatcattatttttgaaacttctgactatagttggttactaagcagaagcagataactgttgggccgggtgtggtggttcacgcctgtaatctcagcactttgggaagctgagctgggtgaatcacttgaggtcaggagttcaagaccagcctggctgacatggtgaaaccccatctctacttaaaaaaaaaaaaaaaaaaaaattaaccaggtgtggtggtgggtgcctgtagtcccagctacttgggaggctgaggcagcaggatcacttgaacctgggaggtggaggttgcagtgagctgagatcacaccactgccctccagactgggcgacagaccgagactccatcacgcgcgtgcgcgtgcacacacacacacgagataactgttaaaatagactattaataactttagtttacatttataatatttagggattgctataggaatcattttaccattatgaagttgaaagtattgcataaactgtttttcagttagcttattatcttggaaggcatacatgaataggagaattaaaatgacattttgactttgacattgtttcctagtacatacaaaagttatgtttacaactttactgttgtctaagtattacaattacactttactgttgtctaagcattaggattacatataaaattacatataaaaaatgtacgtatcttagttaaaaatgcttcattgctaaaaaagactaatcatctgagccttctgttagtcatagtctttgctggtggagggtcttgccttgatattgatggctgttgactgattagggtggtgattgctgaaggatgtggctatggcagtttattaacacagtgataaagtttgctgcatcagttgacttctttcttgaaagatttctctgtaggatgcagtacatttgatagcattttgcctacagcagaactgctttcaaaattagaagcaattttctcaagccctgctactgctttatcaagtaaatcctttgttgtcatttcatctccactgggagtagattccatctcaggaaaccactttatttgcccatccataagaagcaactcctcaccaacaagttttatgagattggagcagttcagtcacatcttcaggctccacttctgtgtctcgttctcttgctatttgcagcagatctacagttattttcaccactgaagtcttgaaccccacaaagtcagccatgagaattggagtaaacttcttccaaactcctgttaatgttgatattttatctcctcccatgaatcatgaatgtttttaatgccatctagaattgtgaatcattttctgaaagttttc

SEQ ID NO: 21931 - DNA, 1034 bp, Homo sapiens
gaaatttttagggatgattagatgtgggtaaggaggtactgcatagaaaaatgaaaggcaaaattcctgtgatcacaactctagttttgaattctttcttctttccttgcctattgcagtattcttagtgttcagtgttacctacttctagatttcatgacgtacctcagggtatcccattcacccctgctcccaaattaaaacttcagtacttctctttttgtttataaaatgaagctgaaacacttgttagcttggtgtttagtttaagtcttcccttctttgcaactttacacttcattattccctcatatataatgtacagtgcattcattaggtcatgaggggagcttctttctgccaagaatattcttttcactaatgtttcataacacatttacacatatggcttaagtagacttttatcaacttgaccgttgagtcgtcttttattcctagtagctaatgcggtgtctgtgaatggtagataccaagtaattatttgttgactgtatgagtggcatgagatcttaatcatttataattatcctttagttaaatgcatttatagttccacctaactcaaactttaggaagataattaaattacacttaaaatttgaggatttaatatgtgtatactatataagcaggatatatagaatctttttctagtctatagtcattcattttaccagggaaataaatgaggatgtctagtaattgttaataaatctttaatagatttttgtttcaaaatgacttttctcctgattttcttgtacaagacctgtagtaatgctcattcctcccattgatatgtatgtgtatgtatatgtacatgtgcatatatttctgtttgtgtgtgtgtatatgtgcatgtgtgcatgcgtgtgtgtgtgtttccttattcaatttcctgctgctgctttccatgtagaaggtttccctcggaatgatggttcttatgtttatagataacaggattttagctgtttattgtatttatcagcattgccatctactgtagtttt

SEQ ID NO: 21932 - DNA, 1050 bp, Homo sapiens
tgtgctaaatgtatcttacttgattctcgtacaggctaatagaaggaagtattgaaggattaagttgcattatgaaaaaagacttaaaactgaaaacatcaattagtttttctctaagttgggaaatgatttgtattgattgatttttgtgatggcacactttggtccagttaaaggaacatcattttgcttcagagtatagtttaaaaataccttagacatttaatctagcaaatcatttttgtcaaggacagtatttttgccaaactatcaaaaaatttcacttttcttagttgaatatcatgaggtattatcttgaacagcatttgtgatggttaattttctgtgtcaacttgactgggcaacaggatgtccagacattcagccagccatttctggatatgtgtgtggaggtgttttctggatgagatgaacatttaaatcagactgagaaaaacagatgccctccctagtgtaagtatgccttatccagccagttgaagacataaatagaacgaaaaggttgattcttcagtgaataagagagaacttctgctgactgcctttgagctgggactttttttttttctttctttttttctcctgcctttggactcaaactgaagtattggctgctcttccaggtctccagtttgccagccttcagacttgaactacaccattggtagtcctggttctaaggcctttggacttggactggaactactccattggctcccctgggtctctaggctctcctgcagtctgaactgcagatcgtgggacttgtcagcctccagatttcccatggccaattccttattatcagtcaatatttctctctctccctctctctctgtcctattggttctatttctttggagatccccaagtaaaagtaatctgagcacttcatctagatttactaacattttatttatttacttacttacttattttgagatggagtctcgctctgttgcccaggctggagtgcagtggcatcacctctgctcactgcaacctctgcctccctggttcgtgattctc

SEQ ID NO: 21933 - DNA, 1032 bp, Homo sapiens
agccagcactttgggaggctgaggcgggtggattgtttgaggccaggagtttgagaccagcctgggtaacgtggcaaaaccctgtctctactaaaaatacaaaaattaacagggtgtggtggtgcatgactgtagtcccagctacccaggaggctgaggtaggaggattgcttgagtctggaggcagaggttgcaatgagccatgatctgaccagtgcagtctggcctgggcaacagagtgagaccctgtcacaaaaaatacaagaagtttcttctattaggtttctttattcaagaaatacttgttgacctccttactgtcttagtgaacaaggatgattgagcagataaagggacatacagctgtgttcatggagcttacatatcagccaggcaaatggactttgccaaactagtaactgcacagtaatacaaaggagaaatgtaattgggaacctatcctagtttatggaatcagggaagggtcctttggtttaagatttgaagtatatgtagaatttactaggagctgtaccaagaatatagacataggttttagctgttgtaatcatttgaatgtggtgttatgtagaacagcattatttgacttttcaaattgaacatttctgttcataagtcctttctggaggtagacaggataatacacatttagataaacttttatttatttatttatttttttgagacagggtcttactctctcacccaggctagagtgcagtggcatgatctcaactcacagcaacctctgcctcctgggcttaagcgatcctcccacttcagccccctgagtactgggactataggtgcacaccaccatgcctggctaataattttttttgtattttttgtagagaccgtgtttgccatattgcccaggctggtctcaaactcctgggctcaagtgatcctcccgttttggcctcccaaagtgctgggattacaggcatgagccatggagcctgggctagataaacgtttagtgttttatgtctgaaaataagtgactta

SEQ ID NO: 21934 - DNA, 1027 bp, Homo sapiens
ggaagtggacgcaagcgggttgttgctgctggtttgggtggcctgcttttattctcttatctggccccagccacgtcctgctgattggtccattttacagagagctgattggtccgttttgacagagtgctgattggtgcgttttatgatcctttagcgagacacacagcactgattgttgcatttacaaacttttagctagacacagagtgctgattggtgtgtttacaaacctctagctaggcacagagcactgattggtgcgtttacaaaccttgagctagacacagagtggtgattggtgcgtttacaatcctttagctagacagaaaagttttccaagtccccacctgacccagaagcccagctggcttcacctctcaatggcactcgccgcgggactttgcggcacctagcttgggcactctagcagcccagagggagctcgtcccccatcaagcccagcaggcacccacccggaaccgcgcgtagcccaggctcctgccggcgcctctctctctacacctccctgagagcagatggagccggctccggcctctgccagccgcagagaggggctcccacagtgcagcagcgggctgaagggctccttgagcacggccagagcagacgccgaggccgaggaggcgccgagagcgagcaagggctgctaggacgttgtcacctctcaataggagaaagctatctaatatttaatgtatttaagaaaatggtgcaaatgtggtaaaattgtaagatgtgcttttagcaaggtttgtgatgtttccatatgtttaagtgtttcataagtggaaaacgttaaagcatataaaaagatgctttaggaggagggtggtagtgatgatagtgttgatagtaacggtgatgctgatgaacataccgctgccgctttaatcctcatattagcctgggctactctgccaagggtttccttttcttgacagatgactgcttttgcagggtgtagcctttgtgtccttcccctttcctgcagttttgctcatca

SEQ ID NO: 21935 - DNA, 1045 bp, Homo sapiens
gatgtcagccttctctgaggcggcgctggagaagaagctgtcggagttgagcaactcgcagcagagcgtgcagaccttgtccctgtggctcattcaccaccgtaaacactcgcgtcccatcgtcaccgtgtgggagcgggagctgcggaaaggtgagtcaaccgcttatgtcggccgcttcccaccacccggccggcctccaggcgcccccgggaaccccgtttctccagcgcccccggcttcccggcgtcgggatgccagcgcgcggtggtctgcgggcttggaggagctgcgtgcaccacgcttctgcaaagtctgggcttagatatttattgaataaaggaatgaataattaaaaaagaaaactccggttagcttaacacggaaacagtagcagggggttgggactccacacccaattagggccagaaattcaggtggtcaggtatttttttcattctgtgaatgataatggaggataagggagggagaaggtaggggagtggaaagaaaaagattggtgtgggtttgggagttacttccgtcatttctgtaacgcagcaacttattcttgtgaaattaatagaggaatagttttagaagtctaatataagaagatgggtaatgcagtggaaaagactctgaatttgtagattttagagggtctcaattgggcaagtttcttataacttctgcgttgcagatgccttacctgaaaaggagagatttagagtaagtcacctaaagtcctttcctattctatgattatatgccctaatgcagtgtctttgttttgcaaaacatttgatagtgttcctgtaaatgaagtaaacttttttgagatgtctgtcactaaaatattcagaatcagttcatgtatgcagagcaactttgtaaaaaattatcctagtgcgactgaaaataaaaaatttcatttgcttagtctgagcttgtactttaattcttaattcattgggtagagtggacactcttcattattgttgcaaacatcctgatggatatgatggttttttatcaagtgtta

SEQ ID NO: 21936 - DNA, 1500 bp, Homo sapiens
gagccaccacacccagcctagatttaattatgaatcattggcctcaatgattcaaataatcgttcaaataaattctcaacttcagtaagcagttgatggctgtggccacatggatctcccttgtctctgaattactattgcttttacagtgctaatggcagtctcttagcactcagctcttctccagttgtttcatgtgttttaggaatgcaagggtagagcctaggactctagttctttccatcttcacagtacctagcgtcacactggtcacaccacatgatgctctggcaactttgattatttgattacacattaattttcagtatgaggtttcttaattcaatttgttttagaagtgagtcaagaatttttttttcctgtcttttctaggaaggcgcaatggcgaggaagttatctgtaatcttgatcctgacctttgccctctctgtcacaaatccccttcatgaactaaaagcagctgctttcccccagaccactgagaaaattagtccgaattgggaatctggcattaatgttgacttggcaatttccacacggcaatatcatctacaacagcttttctaccgctatggagaaaataattctttgtcagttgaagggttcagaaaattacttcaaaatataggcatagataagattaaaagaatccatatacaccatgaccacgaccatcactcagaccacgagcatcactcagaccatgagcgtcactcagaccatgagcatcactcagagcacgagcatcactctgaccatgatcatcactctcaccataatcatgctgcttctggtaaaaataagcgaaaagctctttgcccagaccatgactcagatagttcaggtaaagatcctagaaacagccaggggaaaggagctcaccgaccagaacatgccagtggtagaaggaatgtcaaggacagtgttagtgctagtgaagtgacctcaactgtgtacaacactgtctctgaaggaactcactttctagagacaatagagactccaagacctggaaaactcttccccaaagatgtaagcagctccactccacccagtgtcacatcaaagagccgggtgagccggctggctggtaggaaaacaaatgaatctgtgagtgagccccgaaaaggctttatgtattccagaaacacaaatgaaaatcctcaggaggtaagatgagtgctgttcattattttaatatacctgtgtgtctgtcctgtctctgctactctatctctagttatgaggagtttaaagtaaaagtaaaatgttgaagttattgaaaagggaatttccaccttctcagcaaggcacttgccacaaagcatgcctgctatgttgtaaacattcccaattcagaacttagggaacagttcttttggtgagcgtagtgctgcctcctacaattttttctaatacagaatataaaatatgtagagaaagatatcaaggctatctttagagaaagtctataaaggt

SEQ ID NO: 21937 - DNA, 1028 bp, Homo sapiens
attactagaagttatttgataattcttactacatgcagaaatttgggggacataccagagacaaatacctatccagatatgaatgtttatgagaagtcagaaacttaatgagctccatgtcctctatttttaagacactcactcagttgctcaattccttctttggagttggttaagcagggagcctggtaatatttacaaagcatctagtattgctaggttctttgtatatatcactttacctcaccacaatctgttacaataaatatcatttgttgatgctgaagctgaagcagagattttaagtaacttgctcatgggagttcattaagtgtggggagagagtttgaatcccagtctgtgagtctaatgtcctttctcattcaggtatgccacaacacatcttggaatttctcttcctcttcagacatgaatctacagggaacgctgtacttgtttatactgatacttatttgacaagtgtcattcacatattagaaaatcatagaattctaggattgcaaagctctttaaatgccatttggttctgcattcttttaatgtttgtgtgctttataaaatagtgctatataaaatgaacttataagtctaaataagactattctttatcaacaaagaatgtcatctttgccaaactacctgaccagcatgaaataaagaacatgtggctaccatgctccctgaaactcatatacaactttttgcaaggtccgttatttttttctttctaaaaacagagaattggctgggtgcagtggctcacgcctgtaatctcagcacttctgggaggccgaggcatgcagatcacccgaggtcaggagttcaagaccagcctggccaatatggtgaaaccccgtctctactaaaaatacaaaaattagccaggtgtagtggcagcaggcgcctgtaatcccagctactcgggaggctgaggcaggaaaatcgcttgaacccaggaggcagaggttgcagtgagctgaaatcgtggcatttcccttcagcctggg

SEQ ID NO: 21938 - DNA, 1050 bp, Homo sapiens
ttatccattcatccagtccacatcttttaagtagaaagtttaatctgtttacatataaagttattatttgtatgtgagggcttattcgtggcattttattatttgatttctggctgttttgtatattctttctttctctcttactgtttttatcatgtggtttggtggttttctatagtagtaactttttagtccttcctctccttatttgtgtgtttgctctatcagtggatttcatactttcatgtgtttttataatggtcaatattgtcttttagcttttaaatgtgcagctgccttaagtatttcttgtaagtctggtctaatggcaatgttttccctcagcatttgcttgtttgagaaagactttatttctccttcatttatcaagtgtaagttgttggctatagtatccttggcaagtaggttctttttgtttttccttttagcactttgaatatattcttcaattatctcctagcttgtaaagtttatgttgagaaatccactgttattctgatggaggttcccttataagggactagaagcttttccttgctttttaaataattctttgtcctagacttttaaagtttgactataatgtgccatggaaaacatctttttgaattgcatctacttggagatttttgagcttcctgtatctggctatctaaatctcttgctagacttgaaaacgttttagctattattttgttcaataaagtgtcaatctttttgttttctctttaccatttagaacactgaagattccaatatttggttgctttatggagtctcatgtgtcacatatgctttatccattcttttttgttctattatctttatttttttctgaattgtttcaaaatacctgtcttaaagttctgaaaatctttcttctgtttgttctagtttactgctgaagcttttgaatgtatttgtttttaaagtaattaatttttcagttacaggacttctgtttggctcttcttaatgatgtgtatctaataaatttcttattcatatcctgaattgtttttctgatgt

SEQ ID NO: 21939 - DNA, 1030 bp, Homo sapiens
aaaactggggacaaatcagtgtgattagtcaagcctagtcttataagggacacagtataaaattagggccagggacttttcagagcttattgaaagagggcagagtgagctctcctaccactatccctctcagcaagcctctgcctcctgttaacatcagaaggttgtagagggaagacaactgacagaataggagtgtatggaagtgcagggtgtgctgagaggttactccttccttgctccatcaaggggatgccaaatgaaggggagcctcatgaggattacttgcagatactggcatcttactgagaggtagagttgctgagctgtggaaactgtagaccaaacacatagtagcgaggggtgtggtaagggattgcctaacttttaaagtgattcccagagtttggtggtctatatgaatatggacagactaatgctgaatttttgccagcaagtttctgaaagcaatagattacaaaagcaatttcaagaatactgtgactagggactgtagcatagttttatctgaacacactgaagataaagaagacaacctcctagtctccagggcttcatgtaaagggacacagaagataaaggataggaccaagtgatgggggaagggctgctagtgacagcaaagggaggcagggctgcggctctctgaagggtgtccttgatgataaagtcgaccagaataaagctgaacacaactccaaaaaacaagcacaccacacacatttacatgaagactacagtcatttttgctggagcataataaaggatgtttcccctccactctgaaatgattgaaaaccaagttacataagaaaagctctacatgcctgattatgccttctatcatccaactctcgaaagggaaaaaaggcattgtcccaggctaagagcaggctccaactccccagaggagacctggagcgggaggaagagtaaaaggacaggcaccgatcctccacctctgctccagtttccttgagtcacaacctgactgcctctaggggaaggg

SEQ ID NO: 21940 - DNA, 1070 bp, Homo sapiens
caccacacctggctaatctttgtatttttagtagagactggcaattttttaacagtatctccacattaagtgtcagccaaagagtttcatctagctattttgtataatggccttaagctcaggctaaggcacaggatcaagaattagattttctacattgttatgctcacattgattcaggccattgatacaaacaatattcaaaggaaaaacaagctgcagtatgcctctggaataagccagcacacaaattgaacacacacatatacatattctgtgaatgttcgtttcagattactttgtgcttttatttgtctctgggagtaaatgggacatttctaatgagtgctcatcattttggcagccagactactcacagatgatatgagccgctaaccaccagggacaatgtttgcccagatgtgactctatcttatgctacaaagcattgtaaatgtcaaacccctggttggtatgcaattctccatttaccatacacaaagcctgctggagaacaaaaggtgccagatatggatgtgtaaatcattataatgggaccaacagatcaacaacatcaccccttagaaataggatggcctgaggtcacacttcttagatcactagccccttttcaaaatgtccttttttgtttgtcctctttttcaagaggcaccacaggctttttgtaattaaagttgtattgattttgtatttttaaaaaaggattataaaaagactagcatgaaccagaacaaaggcagataatggatggtaaacatgaggaaagataatagtccagcaatgcgctcataataattcccacatacctgcttcccaaagttgattcagatgctactttgttttaaaagctatcctatgtaccagcaattttcaatagtgatcctaggcagttacttaggttgattatagcaattttgctacatcatgatatagcaaattgctatatttttgctatatcatgctatattatgattgcggtctttttattttccaaatctttaattcattttaaaagaaaggtttgttccaggatggcaaatacagtggtt

SEQ ID NO: 21941 - DNA, 1061 bp, Homo sapiens
taaaattaagctgataaagttgtgtcaactggaatcccaagatgtgtagggtccgattatcatccctgctcctgttttgtgatcacttgagtctcccatataggtgagagcccctgtaaagataagagcccctgtgaagatgagaggagaactttgcacaggatgccactttgatgtgtagacgtttaacctggtttgtccttgcccgcatgtttctatagctttgtcttttgctcttccccttgtcatttgatcgtttttacttattcaaaggcttcattcctataccgccaatttacttcttgctactggatcatttccatcagtctcaagacatgttataatcttaaaaggaaacaaacaaacaacagtaacaagaagcaatcttccattaacccacatttcaatccagctactgtctcatttctcttctccctttgtggcaaaacatttcaaaacattgtgtatatttatgtgtttgtgtcttttatacacatactctttcatgctattctgagcctatagtcatccccattacacccaaaactgtttttgtcaaggtcaccaccaagttgttaaatccaatggccaattcttatacctttgtttatctgtagaagtgtactcagtatggacaactggagactaacagtataaagaaaataaacttttcttagaaaagaaggcttgattaaaaaataatgagtcggtactggaagaacgaggtgagttgatgtcttaaattctagttctggtttggtgcccatcagttgagaattgagacaatgaatgcaggattataaaattggaaaagccagaagccaaaactaccattttaatgatgttaccatgggacactgggggtacaaactgtggaacagtggcattggaaaaatttttgtaataatgataataacattaaggagggcatctccatattggtgatgcttgaacattgttttgcagaagtacttgtggaatcagaattaggggtattggtcatttgcttagagcaatttactaattattttatctatgttcttcaatatactatatatggc

SEQ ID NO: 21942 - DNA, 1048 bp, Homo sapiens
tctttggaaagtatctttttagattttctttcacattttcaattatgttgtttgtttttctattgtttaatgtaaatgtttagtctattctcatgctcctataaaggaccacctgagactgggtaatttataaaggaaaaaggttgaattgactcacagatcagcatggctggggaggcctcagaaaacttacaatcacggcagaagggacaacaaacaagtctttcttcgcataatggcagaaaggagaagtgcaaagcacaagggagaaaatcccctataaaactgttagatctagtcagcatgaggataaccacccccatgattaaattacctcgcactgtgtccctctcatgacatgtagggattatgggaactataattcaaagtgagatttgggtggggacagagagccaaaccatattattatgagtaacatttctttcttagatatgcgttttgccatgttttctcccatctttagcttgtctttttattctttcaatagtgtctctaacagatcaggggattttaaagttaatagacattgtcttgtcgtttgttttttctttcattggtcatgctttctgtgtttgtctgaaacttcattgccaaacccaaaatcacctatatttctatgttttcttctataatttttatagtttttaattttatattcattttatttgacatttgatttaatttttgcaaaaagtggatctatgttccttatttaaatatatgaacccacaatggttcagtacaatttttttaaaagactgccctgtttctattgaatcttatttgctcctttattattgtaacatataaacaaatgttgactatatttgtttagttctatttctgagctctttctttcgttcattgttctttgtctgttctttcaccaacatcacagtgctttggttattagctttacaataagacttcaagttgggtagcgtgaatcctccaactttgttttttattttcagtcttatgttggctattttattatgtcttctgcctttccgtggaaatgtataaa

SEQ ID NO: 21943 - DNA, 1047 bp, Homo sapiens
ggttccaagccttggccattgtgaatagtgacacaataaacatacatgtgcatgtgtctttatagtaaaatgatttataatcctttgggtatatacccagtaatgggattcctgggtcaaatggtatttctgattctagatccttgaggaattgccacactgtcttccacaatggttgaactaattttcactcccaccaacagtgtaaaagtagcaggatgcctccagctttgttctttttgcttaggattgtcttggctttgtgggctcttttttggttccatatgaacttcagttttttttctaattctgtgaagtaagtcaatggtagcttgacggggatagcattgaatctataaattactttgggcagtattgccattttcacaatatttattcttcctatccatgaccatggagtgtttttacatttatttctgtcctctcttatttccttcagcagtggtttgtagttctccttgaagaagtccttcacatcccttgtaagttatattcctaggtattttattctcgttgtagcaattgtgactgggagttcattcatgatttggctctctgtttgtctgttattggtctataggaatgcttgtgatttttgcacattgattttgtatcctgagactttgctgaagttgcttattagcttaagtaggttttgggctgagatgatggaattttctaaatatacaatcatgtcatctgcaaacagagacaatttgacttcctgtcttcctatttgaatatcctttatttctttctcttgcctgattgcccttgccaaaacttccaataccatgttgaataggagtgatgaaagagggcatccttatcttgttctggttttcaaagggaatgtttccagtttttgcccattcagtatgatattggctgcaggtttgtcataaatagctcttattattttgagatacattccatcaatacctagtttattgagagtttttagcatgaaggggtgttgaattttttcgaaggcctcttccgcattcatggagataatcatgtgat

SEQ ID NO: 21944 - DNA, 1025 bp, Homo sapiens
actgtatgtatgtatgtttatgtgcctgtgctttcatattacaacttacaagcctatgaaggcttaatgtgtcactattcctgaagactataactggggattcatataaagtatgaatactaagacaaaacatgtcaaacatttttttttcttaataaactttttttttcacacaagttgatatttactgaaaaatggtagagatgatactgggatgccatatgcctctcactcatcttcctttattattaacatcaatattcctttattatgatgaatttgtcacaatgaataaattaatattgatgtattactattattaactaaaatcaatatggtatgcatatttccttagttttaatataatgtctttttttttctattcaggctatgacattagagttagtcatcatgcctccatagactcctgatagttgtgacaatatctcagacttttcctgtttttcatgatcttggcagtgtgacaaatactggtcgactgttttgtagaatattgcttgatttggatctgtctggtgattttctcatgattagactggagttacagttttgggaggataactacagaggtaaagtgatattctcatcacatcagaccaagattacatactagcaacatgacttatcattgttgatgttgactttgtccacctggctcagtagtgttcgtcaggtttctcaatgggaaagttgttctttattgtctccttttgcatattgttctctttggaaggaaatcactatgcatagcccacgcttcagaagtgggattttatgctgcagctctttgataagagaggatctgcatggattatttgtaattcttctacatgggagatttctcttcctctcaatttgtttattatttaaataattataaattcatgggtatttactttatactttagggtatttcccaacaatatttattttgtttctcaagttgttccaaaaatagttatgagagctctttcagttgactcctatattctttggttatacac

SEQ ID NO: 21945 - DNA, 1024 bp, Homo sapiens
tacacgtaaactgaagaaacttcaagcgtgcagctcaattaatttgtgcaaatctagtcacctgtgtaagcagaatccatatcaagctgttgaagatttccagcacactagatatctccttcagtatttcttcttcactactatttttctcttcatttgtactggattagtttttgttatactcattcttgagctttatgtaaataaaatcagatgtatgtatacatcttgcttttattaactatctgtgagatataaccattttgttgttatatataccatgctagtcatttttaatcactgtatattatttcactgtattaatatatcacactatatttgttcttccactgatgtttctttaacacaccacccctcttcccccacctccagtttttttccttttctgaatgaaactgctatgaattttattgtacctgtcttatgcaatacatttatactctgttccatgataagcaggtttgtgcaaacctacctccaaagactgagggagttgagaagctgaagaaagaggccaagaaatccactttcactggaaaggttagctaagcatctttgtgaggggtagtctatactgcaggcatggtttaaagaccttattcctgatcaccttggtatgtgggggtcaaacatcagtcatcattgtggttttgcttcaagatggcatcactcatgccatgcaacagactgttttcccacaccctcatttctgttgggggcatagctagaagttgttcataagagtatgcagatgttcaatactattcataaataccagtagttttcaaaaatgctttaccaatttgtattcctgccagtattgtaggtgttcaaggtgctccaaatccatttcaaaaaaataatattgttagatttttaaattatttttaaatgttagccattgtagtgggtgtgtagtagcatttctccttggttttgatttgcatttccctggtgggtaatgatgtctagcacttttttataaacttattacattttaaaa

SEQ ID NO: 21946 - DNA, 1022 bp, Homo sapiens
aagtaaaagatgaaatagcatgagttaaaaatcaagagaagcaaaactttagaaactcatttgatatttacaatagacttaatggtcataaattgtaaaaatgtaggtttaaatattgacaaaaaaacaaaaaaatggcagaaaaccaaaatactataaatgtgaaccataaagaaattctatacctgaaaaataaataatttcaccaaagaattggactatacacacatacatatataactgtaaatataaattttagaaattaaaaaacacaaagtcaggaattcaatagatacgattaatagcatgttagatataggagaaaaaaggattacagaactggtcattggaaattaaactaattaaagctcgagaagactcttgaatagaataataaaaaggatgataagaggtataggaaacctggtaaaacactctcacatataaataattgaattccagaaaaaagtaggaaataaaatggataagaaagaatattttgagaaattttggctgacacttttctgaaattttttcaagatatgaaattcctgtttctggaaactctgtcaatatcaaacagaataaatacaagaaaaaaagaaaaactacctatagcatattgtaatgtcaaaaaaccaaagacaaagagaaaaatcatagaagtaaccagaagtgaaacaaagccattattctcaaaatactaataataatagatacagttgattgaaagaagaaatgatgacaagaactaaaagaatataactgacaagctagaattttatatgaagcaaaagtatccaccacgaatgagagtagatattgccaacagatctgcctaaaagttgtgctaaagggacttgtttaggcaaaaagaacattacctgaggtggaatctagaagtgcaaaaggtacagaagaactctgacaaggtaaacccattggtaaatctaaatttttattgatagttaaagcagggaatcaacatttttggtaatgggtcaacagatcttttaggatct

SEQ ID NO: 21947 - DNA, 1027 bp, Homo sapiens
cccaacataaccagattatttccactttcattattttacacattgggctacatatttgaaaactagaaattatataaccattagtcaagaacaagaattttagttcttttattacataatgtgtgtttatttatttcatacatagagattgattgtttttttcaaggttccatttatatgcaagtaaagaatataaactaaataagcaaaccattttgagttcttccctggcccactccaaggcatagcctggagagtattcctttttcagtgtccaacagcatgttttttcctatcctccacatagtaacatgaattctttgggggcaaagactttgacatttttctttgtatacataatatgcatcacagaggcagaaactaataggggtgtaaatcaagaagccaattgaatttgatctaatctgagcagaaaacctcaagaaatggtgtaaattttacttaaaataggtaatcaagtgggagaaagactttcctaatcacacagattgtatattctctccacaaaagattgtgtgaaagacaattattatatctttgaaatagtagcccattgctactcagctaaagacctgattatctgagtgatgaattgattctttccttcattctttcaacaaatactcatcacaagctgctatatacataagcctgagctaggcactgcgggtggaggcggggggtgctatagagataaactgtagtgtatatttctgaatttcacataacgtaaacgaagaaataagacctgcatggaaacagcatcaaattgtagctcaaggcatactgtagatgaccaattagtcctaagaagagaatgtactccagcagggttcaaaggaagacagatgcccgggagtagggggttcccgtgtggagtggagtctaagggaggtttttagaaatggttaaggttaagagaggcaaagacatgtgtgtgtgtacgcctatatggagttaggggatgcagaggaagcctggataagatggggagatgcagattgct

SEQ ID NO: 21948 - DNA, 1023 bp, Homo sapiens
aacactgaaaaacagtagagtctatatatatatatatatatatatatatatataaaatatgtataatatatacacattatatattatatataatacttatataatatataatatatatcatattgtgtatataatgtattttatatatacattatatattatatataatacttatataatatatcattgtgtatatataaaatatgtgtatatataatgtccataaaaataatgtatgtatatataaaatacattttcaagagcatatggaacttaccaacatacactgtattctgagccataaaacaattctcaataaatctacaaaacttcaagttatagaaagtatgttatttgactcagtagaagtaaactagaaaacagtaaaaaaaaattctctgaaaagctcccaaatatttagaaacaaaatggcaaacttctaaataacacaaatgtcaaagaaagagtcaaaaggccaatttaaaaatattttaactgaattaaggctaaaacatgacatatcaaaattgattaacagtagctaaaacaacacttagaaaaaaatatcaaactaaaaggaagatctaaaacagaaacccaaagtaagtagaggaaaaaaatagaaatatcacagtgaaagtctaaatacagaatggaaaaaataaaacagcaaatgaataaaaccaaaagtgggttcttgaagaagattaataaagtgggtatatcttaaccagacaggttgggagagaaaaagaggaggcgaaagagaaggagaaggaggaggaagcagaggaggaggaagaagaggagaaattaccaatatctgaaaagagatcagtacagattatagagatattaaaaagacaataaggaaatattatgaaccactgtttggcaataaattcaccaacttagatgaattgaacaaattcctttgtagaagcaatctatcaaagtatttgtgtaaaaatttatgtttatttgaaaagctaaaatagtcaaagcaatttggtaaaagaacaa

SEQ ID NO: 21949 - DNA, 1032 bp, Homo sapiens
tactccttatagtctccgttatgttgagatcaaagatgatttatcatggatattgttgcacatggttttgcagttttttctctccgtgacatttaaaggtagcaaagttgagattctgcttttaattcatcctcacgagatatgaagacttctctaataagactttttttcttgaaagactctggcctaagctgaattaaataacaaaaaattaaatatagctcttaatgcttctaaagattagcattgtgatataatctaatttctattattctcctgttttattagcatttaaaattttataaacatttgctggctgaaaacggatattatgttcttgttagtgttatctatctaatgcactctctcttattcctaataactgctaacattgtttaactgtttgaaagttcttaataatttttgtacagcaaattaacagctttcaaaatcagcatatttcaacattttattattgaaacacataaatatgcttatattttaacagcctgtagaagcccatggaggtttttattccaagttacatctagactgctctcctaagtttgaaaatgaatacttagtatgtattcagatgttaatagccaattcgagggctacaccttgttcgtaatttgagtggtcctacctccattgaacaagcagatgatgaaggggccagaaaagaagtagctatttgttactctgtctttcaaagcctgaagccaaggctgaaaccaagtatatcttttcctgagtactgaggccaaagttaaactttgtggcatctctgtgtaaagaattcctagatacaattaagaaaaacagaaaaatgacaaaagcctatcaacaacccccagaggagaaaactggaatcaccaataaacctatgaaaaactgcttaaccctgtcagtaatcagataatgaaaactgaaacagcaatgagatgtcatttcatacccatcaagttgggaaaaaaattagcaaaaaatatcacacattggtaagaatacatgtaaatggaacgctgc

SEQ ID NO: 21950 - DNA, 1024 bp, Homo sapiens
ataatccgtttcctaggtacttctgtgtaattctaaatttcactttaaacctcccagtaaagtgtttacccctgtgaatggagagacaatctgtgttgagacagtcccgctgcctcaggcaggatctcatcagctctcatatcacagcagatagagaaagggatgatccattagggcaataaggccaacttgttcctaccaccgaaattgttccttagagtgcatttgctactgccatgtccagtctggtttttactgtcacctacgaaattacatctcacttaaaaaattctccaattggatggttctgctcttttagttttgactctaccagctttttttttttttttgagtcaatctcttagaaataccactcagttcatttttactctagtttctagacttaccttacaggagttctccataatgttgcccttttgattattgtctttaagattcaccatttagtctatccatgggttatgcaaaaagtggatatttaatctgattgtaaacaaccaaccagcaattgaaaaacaaaaaaactttttttttctcttcttttggtttaggggccttgatcttaaggtaattgtctcaatgttccaggtagtccctgtgtgaccatagcattgctcagtgtcagaaaccacttctgattattgctcctgtggaactggcaggtgctctcaattgtagccaaggtttttaggtaaacccatctaaagcattgcaaagcaagtgaatttgggagtaaatgtacatttgtaaagcaggttcgtgtcagctaaacttcatgcaaaataataagaaacagtgatctacatgcaattgtaggaaatttcattaatatcatgaaggtaatgtgagtatggctcatgaaagatatcttgaaacccaaaccaataagcattataaaaggaggtgatgggtggacatgggtgggctttaggacttagaatgctgtcacaatgtccaaaaaaaaagcaacataaaaatacaggagaagaagcaagacagagtc

SEQ ID NO: 21951 - DNA, 1085 bp, Homo sapiens
ttctttgctttccatgcttgagacagcttttttacccttcttctttaattttataatttctgattttgttatttgctcacataccatatggctcttcttttctgaaaatatgtgtttctcccttttacccactgtaaagccaactacacctccacaattcttcctcaacaatcaaaaagactcacatgaaaaggccaccccttcgtacacacacacacacacacacacacacacacacacacacacacatcttcctctcttgtcctctggaaaacacatctctaactcgcgttgtggtgccttcacacttcaggctgaggtcctgacactcaatctgcatagctcttatctgtcctacacaggaggaggcaatggggtctggggggcaatggagagaatatttgttgcagttcaaagcaagccatcttttttttccttctctctttttttgccctttcaagataaatagaagtagaaagtacaagcagttttgattagcatttaaaatgttgtcaatttttaatgaaagcgtaacctccagccatcaacttcacacaaactggagacaaggttgcaaaacgaatgctaatatatttggcacactttctcacacttgtccttctgtgaacttttcttgttgctaatttgttatgtcagcccatgttagtaggtttcaaaagtccaaactggcaagtgtggtgacccaaagagaaccagcctttggaagatctttaaattgaaacataggagatgggcagtttattagctgtacctatagtcctataaatgtgactatgttaacttggaggaggtgccaagtttcaggagtaatcttcagagtctttcaaaatccacttcgtaatgtgacatttttatttaggaaataaatggttgccggtcagttaacaacattcattgcctgcaaataatatatttacctatcttgtgttgataaagcccaaaattccaacatgattgcatgatacagtgatttccctcaatgaacttacatttttaatagcaaaacaaggaaacatacatgaaaaggatacaaaaacacttggaaaatacatacataattagga

SEQ ID NO: 21952 - DNA, 1084 bp, Homo sapiens
atataccttcaatgcgttttggcgtaacataggcaatgacaaaatttccattttataattattgaaacttggtcccagggcaagttatttactcaaggtcactgcaatatgttggggacttcacccactgacagagtcagaaggttccaggaaaagcagaatggttagctctgtatatttcagcatgttagattaatatttttaatttatcttcgatattcagggatgtgtttattaagtggtgaccctgggacagacgttggggaaatggaaatattataaaaaagttatactcctcaatatagattgtcaaaacaggcatacagaaaaaaatgaaaacaaccaaccaaacaaatacaaagcaatatgaccacaaccataagaaaagcatgtgtaagaaaattatcccacaatggatgtaccctaggagatcagagagtactttattaaggatgtgatatttgtgtttagtgctttagggggtatggggttgctaagtaaggattgaaggagagtgaacagagagcatagcatgcctgaaggcaaaagaataaatgaggaatccatgggactatggaagggccttggtaaggtctgaaaattgggcagggaacaaatcattaaaggacctactttactgtactaagaatataaagtttattttaaaggcaatggtgagaactcattgcaaggagaggatccgtggtgaggtattgggaaattattaaactggtataagacataaagtggttctaggttagaacagagtgtgtgagaatagacaggaagaggcagattcaagagatgattaagggagattaaaggatcgaaaggagagtttgggtgacatataatctgctctctaaaccaagacacttttgagaaacatgaaggatgcaccactaataattatgccagaataaaaggcacaaataaggattatcctggaccaccaaacacaaatggtcaccctgatcttagtacaggtcatacttgcagagcctcgcctgatgcaggatcaaggagaccagagaaaagcactcattttcttttttggttgtttatttttaatattttttcgaga

SEQ ID NO: 21953 - DNA, 1154 bp, Homo sapiens
aaaaatgaaaaaaaatattgtctatcacggtggcttgaagaaaattagacttgggtttctaccttgaaggaaccttgccatatatttatgaggctttctctcatttcacgataatttgatttttgcattgagtgctggtctgcagaagggattacagagagagagagtagttccagcactgttgcaaattatctattctgttcattatcaaaagtataatgttgcttgttgggcattgtttaaatttttgtcccttggtatatatatgccatttgataggttttgatgtaggagtatgttttgcatagtgtaattatgtcttgcataattctggctggattctgggtattttcttttttcctgaaggttctaaatctttatgtatgatcttctctaaaaagcacaaaatatatgtgaatgtgagtccctgtgtgtccacatatatgacatttattgaatgcctactgtgcaccactcaccctctgcaggatttactgggattgctttcactttgtagattaggaaaatgaaccctgaaggagttaaataacttcttccaaggtcacacaaataatagggggtgaagctgagatctgaggttcacatcctttctgtcttatttgacttttattcactctgctacattattgggacagtgctaagggagagagagaaagttagaaaattagtttattattagtaaaaataattgaattttaagtgtgtatttttagacccgggttctaatttctagaaaccctgaggagtcaaaggtgataccaacacagtccttgtaccttataggcactagatgttagttgagtgttttagtcatgggggctctctaagcatgggtttacagactacttcatgggaatatttatgaccaggtaatgaaattcttccttacattactggttatgatactggcaaacctcaaatgcatttgaatggattcagaaattgtaggatttagaatcccatgtggtattccagttaggaagggaggcggtagaattttcagcacacatttctcgtaccttttcctgtgcctcatcgacctttctttcaaactaggcaagagcatgcattaacccaagctggactttaaaacctcctgagaaacagccacacactggcactggattggccag

SEQ ID NO: 21954 - DNA, 1034 bp, Homo sapiens
acacaaacacacccccatactgattctgcactttggaaaagcacaacgtaatcacccaaagtacctaaagcagaaaaggaggtagcgtggctgtctgtgacccaaggcacagggattctgctgtcagcatgagctttcatggaagaaaaaggggttgaaagctactttctccgtaagtagtatgtttatgtattattcacagtagcaaataattgcaaaatgtcaacatttcatcttcttcttaagagcttctttagtgacctaattaaccattaagaagaaaagattttttaagtgtaaatatgaaaagtgagagtgtttcttagcagcaatttgtgatcttaaaatgtcacaagcaggcacatcacggaggtgctaccaaccagcacttttcaaaatatgactctgtgtcaaaagcgtgtgctgtggatttgtattttttgtctttattctgaaacaagcaatgcaaatatagatacggttgcctgagagatttccttctctttttgaaaacccttcaacattttctctgacagcctaggaaaggttgtttttaatctatttaatttgaggctgtattctccacagataatgccatattttctctttcacttcctgagcatgtacaggaaaaaaggcagaaatgtctctcctcacacacactacatttacatatatatacacacacccctaaacataacgtatatatgttcaatgcacacatgcaacacacattcacagacacacagcatacgctaatatacaacccaaacatgcatatataacacaaattatgcacataacacacatgtacacatttatatgctgtcacgtacataccacatgcatacttatataaccataacatctacatgcactcaatcaaatggcatatttacatataaatttaaaggcatctccttaagtcctgacacacatgtcaaggtgtgacatctcctgcgagatctcagctggaagcatttctgaaacagtctttctcacagttgacagtaacctgaccttttattcagact

SEQ ID NO: 21955 - DNA, 1053 bp, Homo sapiens
tatttattcgagtttgcatggtgtgatagtgtgtagtaagaaatatatgtttggcttttgatcctggttcctgacgcagagctcataaattccttggaatttcctgggtgataggagcatcttttattctaatgaggtgtctcttaaggagttcctagatagcctgaggattgggattgattgccaggggaactaaccatatgattagaagattaaaactttcaaccccatccctcaacctctggggaggggagaggtactaaaggttgatttggtcactaatggcctatgatgtaatcagtcacacctatgtaatgaagcctccataaaatctccaaagggcagagttcagagaacttcaggattactgaacacatggaggtgcctagatgtttttgcactgggagatggcatggaagatttaccctcctttccacatgccttgccctgtgcatctctatcatctggctgttcatcagaatcttttgtaatatcctttataatcaatcatttcatgtgtttctctgattactgtgaattgtcttagcaaattaatcaaacctaaggagggagtcatgggaaccctgatttacagccactcagtcataagtgtaggtgacaacctactacttgtgattggcatttgaagtaggggacagtcttgtgggactgagctctcaacctgtgggatcttatgccatctccaggaaaatagtatcagaatttaactgaattataggacaccattgtcttctggagtgatagttgttggtggggtgaaatctccacacatttaggtgaccagaggtgacctaaattctgtactgagagtaggaatagaaacaaaacagttttttttaattcctattgcaaacacatggtgtaatttaatttctatctttttacttttaacttaattatatcattttatttgaagtcagtttaacataggcagcatatacttgagtgttacaaaaatctattttggtaatctctgttttttaatttaaatagtaagtcatttgcattcatattattgatttgtttggattt

SEQ ID NO: 21956 - DNA, 1069 bp, Homo sapiens
gtgcttgagtacaatgatgaacagacttcataagcctgcgacttaggtgtttacacaggtccccgaagtttagaaggccatgcacttggcttaatgttctgctgtcattgtcttgacatttttagtattttttcaacaaaggaccccataatttcattttttgctagactctagaaattatgtagctggtcctgatagtaaataagataaatatgacccctgctgttatgaggagactgaatatgaataagcagatgaaaaagtaagaaagggaaatatcaggcagttgtaagtgttatgaatagctaggtgaaaactttaaatttggtggttagcaaaagcatctcaaggttacatttaaagctgagatttgaatgatgaaatgtactctgtaaaatgctgcagaagaatattccaagtagaggaaataagtgtgaagatgctaaggcagggatgaaattgaagagtttaggaaacagtctttttgggaaagaaagagcaaggtagagaatgatcaagcctaaagattggtcgtggccagatcattaaggccaggatacaagggtttgcattttattctaaatgtgataggaagccattatagggtttatagtgaggacattaagtttgatttattttttaaaagatcactgttttcaattatagtgagacagaaatagaagcaggcatgccagtaagaagactactgcacatgtctagacaagcaatggtggtggattgaaccaggacaatacacaagcagctggagggaagtgcaagtgtttaggatatatttaggagacagagttgataggactgctgacagatgggatgtggaggatgagagaaagagagagatccaggataataactgtatttttggtgatcatgtcatttattaaaataaagaaaatggacaaaattaatttatggaaagatattatgtgttctctcttaggtatcaatgtggataagtaaagagggaaaatgagtatcatcactatcaaaaaacagggataacagcacctacctcatgtgattaatatgcctattaaatcagatcacgcat

SEQ ID NO: 21957 - DNA, 1034 bp, Homo sapiens
agttgcttaagtagtgaaattggttccttagtgacaagaaaagttattagggacattaagaagatatcagtgaatcagaattaagaatgagttggatgatataggcaggaatacagggaagaattagatcaggaatgtatagacaggtcataatgagaaaagttgatggagaactggggttggcaaccaaggaaacaaagggtcaaaggctacatttggagctggaggagctgagaaaattgtgtgactgaagtttgcttgaagatggaagcaaacaacaatatcaaactttacctgagtctatactccctatttttttatgttcaactaactacaaagaacaattatcttctcacatattttgagatatggcccatctcccttcttccacataactccaataagactcatgaaccacttcctcacctatctgcctctgtaacggtgcaggccctctttctcttccttgaactgtttttcattaatgacccctctccatattcaagaacctgaataaaataatctccttgattgtctggtgcattttgtctttcacaaagcaagacacattttttttgaaaagttatcaggttatcagttaaacgtacatagatttattgctcagtgttactcccatccaggaaataataattacacctgagtcctaaaaggggaaggagaaaggaggaagagtaattcaggattattaaaatcttcatcttttctgaaagaagtttcttctgagtctaactcaagagacagagcagtgtcccaaagccaggtggattgcttagtttggatcctgattcacccccaatttctacagcatagatggatgtgagtaagtaatatgggatgaaagatgattctcaacaaggatgattgtacattccaatttgaatgccctttctcctataataaggataaaaactgtgccagataaagctacagagttaatggccagactttagattacgaagccccaaagagtctgagggtggaggtgagagaattgatcagctgtaggatgaaga

SEQ ID NO: 21958 - DNA, 1035 bp, Homo sapiens
taccttactatacccaagaggctagataactaaaaattagatttcttagcattccttgcagccagtgttttttttttttgtttttgttttgtttttttttttttaattagactttgtcagttataggcatttaggtaaaatttagaaggtgagagtgaaacaaaagattttttcctgctctttttggctattttctgatgaaagtaaggtcatgggcatatgttttcttgccattcagtgctcagccaccagctttacggggtttgagaagcagtaactacagtggcatcgtgattgtggctgactgattcctagaatacagtggtgggttcttgaatgcaatagtttcagtggtggccttggaggtagtggctcttatggtagatcagttttgcggagttccaggagtaatttccgacccacctctagagctccctcccgcaaccctgccccaaattttgtaagcccttatatctctctattaaatctttttctgcttaaaatacctgtagtgatttctgtttcctatgctgaactctcattgatggatgccataagaaaggaaccagatagtgttacatgagattggggcaggggagaggaggggagggatggaataattagaaaggaatttttggaggaggtaactttttagcataaaggagtaaggatttcaaatagcccaggagagatgagggttccctggtgggagtgattaaaaggggctgtttctccttcccccaacttgatacttcctcatcacctccccgcctccagctggatgggttatggtttttattaaagtctggacttgaatagttacttggagtttctgtttgttgtcagtgggaaatgtgttatttcagtatggaactcaataccccgaaaacagattttcatgtagtggtctcatggatcctgcaaagataaatgtacctggaaaaggcagtgcatttcctctcctgtagccttccttcatcacccttctggagactgcaggctgctgttccatgctaggctcctgataacctatct

SEQ ID NO: 21959 - DNA, 1050 bp, Homo sapiens
agaagtgagtttaaagagataagcaacagctggggcatgaagtgccgtgtctgtcaagctcaggagtttgggctttatccttcagacaggtagaacctctgagggatgctaagtaggaaaatctatcacctccaccactaccactaccaccaccaccaccaccaccactaccaatgccaccaccagcttcaccaccaccaatgccaccaccagctccaccatcaccatcaattccaccaccagctccacctccaccatcaccaccagagtacctattacaataattgtcttcacagaataaattttcatagtgctaattatagcacaattaattagggaacaaaattatttatttatttatttatttatttatttatttattgagacagagtctcactctcttgcctaggctggagtacagtggtgcgatctcagctcactgcaaccccctccttccgggttcaagccattcttgtgcctcagccccccgagtagctgagattacaggcacccgccaccacacccagctcctttttttttttgagacagagtctcactctgtcacccaggctggagtgcagtggtgcaatcttggcttgctgcaagctctgcctccctggttcacaccattctcctgcctcagcctcctgagtagctgggactacaggcacccactaccatgcccagctaattttttgtatttttagtagagacagggtttcaccatgttagccaggatggtctcgatctcatgacctcgtgatctgcccacctcagccttccaaagtgctgggattacaggcatgagccactgtgcctggcccccacccacctgcttttttgcgtttttagtagagacggggtttaccctgttggccaggctggtcttgaactcctgacctcaggtgatcacctgcctcggactcccaaagtgctgggattacaggcatgagcctctgtgcctggccagggaacaaaattttaactacatatttttaaaaattgatgagcataatgtagagaaagaaagctgagtgagtggagtgtaaa

SEQ ID NO: 21960 - DNA, 1026 bp, Homo sapiens
agtttacagtgagctgagattgcgccactgcactccagcctgggtgacagagtgggactctgtctccaaagagaaacaaacaaacaaacagagttcctttctcatagggttttcagccttatgtgagttactaaagtgcccagcatgtggtgacagctgtgcagaggtttgctgttactgcccaaaccagccccgagctggactccagtctgagtacacgccagatgggagggcaaaggggtctaaggtgtgggagtttatcatccagttatggagccaggaccccatacagggaatgttgactaacagctcaggacaccatgatgtcagtgtgtggcctgtgatggccgagcatacagtggcatggatgctgagtcctaggatggggatggggtaaggactgggatctggagagaggtgctctgaggattgcctttgccattaatcccaggtgccctcaaatgcatcgagtgtcagaatcacccaagaaggtggtgaaaatgcagattcctaggacttgctgcctgatactctgattctgcaggtctggggtggagccaaagaacctgcattttagcaaatgccctctcctaaccccagggattctgatgcagatggtccctgtgccttttgaaacactgttcccaggataccaagtcaccgagctaagtgactgatgacattgttgcttaaacctgccacagtgttcccactcacccactgggattcctgctgggagggcctctatccctcactatatcccccacatgaaatcaccccctcccatgcatcagcactgtccccaaacgcccatgcactccccgcccttcttcctcaggctgtgcccatcaaaacacacggcacttgggtgacagcagcacaagaagcttgttcagagcctgtgatgtcctctctgtacctggcctattgtcctctggatgctcgcagcaatgggtggggcaagtagcctttatataggcagccaccctgaagccagagacatggagtgcctgtctcaagtcacct

SEQ ID NO: 21961 - DNA, 1030 bp, Homo sapiens
gccacagaggcttgggctgctggcctccttctggttgtggttaagttaatcaatgcctgccttccggactcctggcctcagttctgtaggcctccttcccacaaggctcacagttgaagtacacagtgataatgggtgtgctgtacctctggcagtcacattatgtgcctctatggagttaaccctctcatcttccgtgtcttttaggctctgaatgctcttgaatccatggcatcaagtaagcagtatgttgaataccaggatcaaatattgcaagccacccaatttataaggcatcctggccattgccttcaagatgggaaaagcttcttggctcttctcgttaactgtctgtatccagaagtgcattatttggaccacatacgatagttaacactgaggctcttgaaaaacccattgctgtttatgtttacatttaactttgctgttgcacaagtaactttgctcaattgcactgtagagctcagtttggccaatgtgtagttgactgagatgcaagttgggaggcgttagatattagataattttggggtgtgtgtgtgtgtgtgtgtgtgttttcttagctcttaagaccttctggggactctttaagtttttatatttatccacaagagaaacttactaagttccacttgggtgcagagccactcacagttgccgaatgtcccagtcatctcacaagacctccagatggagttctttgtatgtttccacttctgtctctgttttatgtaaatgttccagatctgacaaccttggaagtcactcagtacccttacttttaaaccccatttgtgttcctccaaagtaaagaagtcaattttgaaaaatttctgcatttctcaaatgtggacaaatacaatagttttaaagtattgtttttctcagaagggagataaaaatgccgagttagttaaagtgggtcatgtgtaaaatacgaccacttgatcgtgattatagtgggcagtagagatgatgacaagtcaatttccatccagccgtgtatcct

SEQ ID NO: 21962 - DNA, 1016 bp, Homo sapiens
attagggggaggtggtaaagcccagggcctgcctaagatgggagcctaaaaggaaatccgatgcataatccacagggtgacatttttactgtaaagataagctagaagtaaacctcctcttgtgagaggaaggcaaagacagttacctgttttggcctcgttgttaggttaaatgtttatgcaggaaaagagatatctgttttgagaattgataacaagctgaccctcatgtggttttgaagcaagaattcagactacctagattggtagaaacagcagtaataacaacaacctcaatctaagaatttagagtagttctgggttggcggtgccaccagcatctggcaaaaagcaaccatagctcctgtttggagaaacgcatctttaactcatgcctcaaagttccaagaaactcacagtaaaaaaagtcacaaaacacaggaaacaaggtaccatgagcaaagtaatagaaaacaacagcagcgtcagaaatgaaaagattgaagatagtggaataattagtacagtaagcaaaaaagttatttttattatatgctgaaataagagaggattgaagatatcagtaagaagcaagggattgtagaaatatgcagatttgagagatttatataatttagaaatgaaaaatataaagattataataaagttaatggataagttcaacagattaaacccatccgaagagaaaattggtaaactggaaaacaaaactgaagaaaatactcagattgcagcacagaggaacagagaaggaacgtaaaagtgagctgggcatggaggcggaggcaggaggattgctgatggccaggagttcgaggccacagtgtgcaatgattgtgtctgaatagccactgcactccagtctgggcaaaatagtgagaccccatctctaaaataaaaagaatacgaaagtgaggttaaaaggcatagaggataggctgagaaggtttaatatacatcctattatccaagtagaattccagaaggagaggaga

SEQ ID NO: 21963 - DNA, 1048 bp, Homo sapiens
actccaggcttccacggcacttttatctttatctcccttagggcctgtatcacctgacacaggagttagtggcacagtagagaagtttcatctgcctactatgttctagctttgagagtggagtctttgcaaaatttgatcctcctgctctaatttgctgttttttcatcttctcctttgcttaatcttttatatatcaattttgttaggaggcttgatttttattgtttgtggaagaataaggctttctaacatcttttcccttcctcactttttatatttagtaaatgccagaagtgcttattctttataaccagttcttatttatctgtggtaataggagtagggtgagcttgaaatcagtttccagggaacaaattttaactagttttaacattttctaactagcagatttcttagcaatgattgttaaaaaccagtctgttttaatttggcttctttttgtttatttctagtctaatcaacattctgactactagtaaagtgtagccataagcaaatctgatgataaataactgtagaaatgtgtttgtccttatagttaatattttaaaagctaattagaaagttatttcactttcccattgttttttctatagagttatttaaaatataaggccttttccttgatttgtaccttaaacattgtaagtttgaatgataattcttttttttctttttaaatatcctttcacaatatacgttagaatgatcatgccaattttcattattctgggaatactttgtgtaataatttccactataaatccaatttggagatggaaaatgaaaattggtttggtaaatgtcccagagttattttgaaaatgcaggaaatttggtgagctatctaccttggtttctcaaatgtgtaaatatgaaaagaattattggcttgttgccttcttactgtgaaaagttccatcaaggatatatatatatatgtatatatttaatttaattttattattattatttttttgaaatggagtcttgctctgttgcccaggtgggagtacagtggtgt

SEQ ID NO: 21964 - DNA, 1047 bp, Homo sapiens
accagtcgcagtattacaacttgaaggagaaactgaaggaagttccaggtggctgcaggatttgttgagagagtaaaataagtccacatgccacaactcttggtttctaatctaactctagcatttattcagtttttgtttgcttgttttttttttttttttttttttttgagatggtgtctcgctcagtcgcccaggctggattgcaatggcgtgatctccgcccactgcaaccaccgcctcccaggatcaagtgattctcccacctcagcctcccgagtagctgggattacaggcacccgccgtcatgccctgctactttttgtagtttttcgtagagacggggtttcaccatgttggctaggctggtcttgaactcctgacgtcaggtgatccgctcgcctcggccttctgaagtgctgggattacaagcatgagccgtcgtgcccggccgcttgttgtcgttgttgttgttgttgtttttaagtaaaattggaactactttgagttttgccccttgtaggaagctgtttatcttagaattcctgcaactccattaaaatacatctaaagtcaaaataataaaaattgggtacctttaaagggaaagacacttacattttgttaacagttgctttttttttttttttttgagacggagttttgcttttgtcgcccaggctggagtgcagtggcgcgatcttggctcaccacaacctctgcctcccaggttcaagcgattctcctgcctcagcttcccgagtagctgggattacaggcatgtgccaccacgcccagctaattttgtatttctagtagagacggggtttctccatgttggtcaggctggtctccaactcccgaccttaggtaatccgcccgccttggcctcccaaagtgctgggattacaggcatgagccaccgtgccctgccaatagttgctttttaaaatactgactgccaggccgggtgcagtggctgacgtctgtaattccagcactttgggaggccaaggtgggtgcatcacctgaagtcaggagttcgag

SEQ ID NO: 21965 - DNA, 1044 bp, Homo sapiens
atatatctaatcattcattttgaggtttaaacttaaaaatgttacataaaaaaataagtaacctgccaaaaaatgcagagtggcggcgggggcggggggagaggtggtgaacgcgaggggcagtacttccgggtcaggtgggccggctgtcttgaccttctttgcggctcggccattttgtcccagtcagtccggaggctgcggctgcagaagtaccgcctgcggagtaactgcaaagatgctgtccgtgcgcgttgctgcggccgtggtccgcgcccttcctcggcgggccggactggtgagcaccgaaggccggcatgatgcaggcggccgggtggggctgcagggtggtggtgcgccggctcgggcgctctctgcaggagggcgaggggctgtggcgaatgccgccatcttgcacccgtggcttctccggctggacagagcaggcgacacaggtgcccttttgctcgtcacctgcgcagaggcagaatggtacagggcagacagttaactcgatggtgtccagagacagggcctcaagattcctgtcttcggctgacagcggccctagaagggggatcttgggtgaaggtcagggcttgggcgctagctctccgaggcctgttctgaatcggtgaggttcctctctttcgattcttagggtcgcgtcccgctgaaggtcagaaaactgctgtcagctcttgttgaagctagtcagtggagtctgacattgtgtgaaggtcagcaggcccagcatttcacctctgcctggagctcagtttagaggaaaggaataaatgaaggtggtttttggaatacttacgtaggctttctcttagtgctgaatacgaaacgaccgtgaaaacgtcctgcaggtgcaaagaaccatttcatgtggccagcactgtgacaacagtgaagctggtttctaaattgtctctccggcagagtgtgtgctttgtggcacttggacgtgtttaaagaatttgtccttgagttttccacctggttttgagtaatttttagtgatggagaattcaagta

SEQ ID NO: 21966 - DNA, 1094 bp, Homo sapiens
aaatgttattgccctcttttcaggccacttccttctcagaagatgactttgctgcttaattcaaacagaagggacagtccgaaagcatgatttcttccccacctatgaccacctccatccttttttgtttccagtttcagagaatgaggtaggcctttaaggccaactgactctggtctcctcctgtcatcttcaggaccttcctctgtcagacttcccctctcttatctccatgtctctcacctctctactgctgcttttcttggcttacaaatggtctcagtcatccagtatttgagattatattaggtgccaggcattgtatcaggcacttggaacacaaggcaggatcctgcccccaccaaagttgtgctccaatagcgtcaacagaggtgtgaaatagggagattacaatgttaatggtaaaagacaaagtatagggtgctacaagagcatgtaaatgaggcacctcaatgatttaatagaagtaatgtggagaaatgtgaggattgatgaaaagcttgtccaaaaagggccagaaatgtttagaattgctggaagtttgctaaggaatattgagaaatatgcatagatagatcgtgaagggccttgtaaaacagtgatgagacattgaagagttttcatgatcattagtagtaatgagaatttgttgagtttggcatgattatctccatattacaaatgtggaaacagattctgacaggataagcgacttacttgcccagggtcatgcagcttgtaattgaggagtcaggtttcaaatccagttttaactactttctcagaggcctttcttgatcattctatctaaaaagcaagtgttccctaactattatcccagtaccctggtttatatactcttaatacataaaataatccctgcatattgtgtgtttcccctactagattgtaagctccatgagggcagaggtgataacttttttcacttgcatcccagagcctaacatgatatgggctacatagaaggtgcccagtaaatattggtggatgaagaaatggtggataaccatttgcatttgacttatgctgactggaaattcaatacctttgga

SEQ ID NO: 21967 - DNA, 1052 bp, Homo sapiens
attacttgaatatgtcaaaagtatattactggacaaccttttacacattcctctttctaaaatcgaattggacaattacagttctctggttcagaaaattacattagctcagaacccagtaacccttgataaccctgttagcgcagcaattcccgagtgtgtgctttgtgcagagcgttggactatgtactgctcttgatgtggggacagcggggacagagagctgtcattgaaatagacatctgtttaagaagcgatacttagatgaacctctgtatttctgaaaaataaatgtgaaatatcttaagagcttaagtatgtttttttttttagatggttcaaatccagatcattagctcatcatttttattgcttctcattctgttaagcggcaaagggggaaatatttgttttgactagtccttcactggaaagttttggacttctgcatttgagtctctgggagctagtttttccagttgttttatcagagaatatattcatctttgggttttaaacacttcaaatatcactgatcatggtatagaacttctctgtgacagagtggtaagcacttaccacaaatgttttgtgatttgtgataaagatgatttagggaaataattctggtctcccaaaatatgagacaactattaacaaagcatttttgttttaggtttggattttctttcccttattccagttgatccccaggtatgtatcctgaatttaagcaactaatttgtatttgattgttggttatgtcatactaactaaaaatgaccagttgcataaaatcaggacagtcatctctgaattacttacattgatggaaaggaagtactgtgcaaatatttcacaattttatttgaaggaataaagttgttttcagtttatgatttttgtctttaatatctaaattttaaattctgttttatttagcttaatcagttggcatctcctacaagcatttgaatgattagaatgaatagaagcagtgctgggtggctagaagttaaaattttacaaatacagttttattttttagctaa

SEQ ID NO: 21968 - DNA, 1874 bp, Homo sapiens
gagagttctcctggctgtctacgaacacattctttcaaacttgggtttgctagtgtcatctttttggcctcttggtccacttggttttctaatggctttactgagttataatttacatagcataaaatgtacccatcttaagtatataatggcacaattcagtgattttagtaaatacatagagctgtgcaatcatcaccatgattcagtagtagaatattttcaacacccaaaaaactttcttcatgttcttttgtagtttattcctatttacaccccaaatctaggcaatcgtttttttgtgtctataatgcctgtttagacattttatataaaatgtcttgttttgcaacattgtttatttttataattttaagaattaaaccttttcagctgccttctttgctgttaaaatacttacatttccaaatataatttacacatatattaaaggcatatatttacttctacccatttaattagaatgaggtggggtttttgtgtgtgtggaacaaaatgaggaagtatttcaagtggattttttcctggtgtgccaatcatttattgctcctttgagacaaattggttggtacatctgtaatttaaatgataaacagaaaatgaagttataattttgaaatggttacgttcaaaatgtattttgaaggggaatgaatgcttagatgtgatgtttctggattttactctgtaatgatacgctttagaatatagtggaaaaacatgagttgcaagtactgcagttggctgaattcatgccaggttgagaggtcatgcctagtgatgctgactcatgagttgttgtgatcttggagcatgtctctggtggcatgccacaagggtctaccctctgtcctttactacatttttatctgtgtttgataagtccatgaaacaggagggatggcacatacacagtgggcgacaaaatctgaaatgacctcagtatgcagaggaataaggatagtttacatctgtgatcagctactatagagataaatgttaaggttcctcatttaggctgaaaagaaaacaaaaactaacattggtaagtataagatagaaatttgtgactaaaccagcaacacatgaaagtttattttaaaagtctgtataaagcgcagctacctagttcgttccatgaagctgatgtagcccttaacacccaacctagacatacatacacattaatacacggaagaactcttaagaaacagactcacatagaaagataaatgaaaattctgaattcagtcttaggaaatcatttaattatatattaaaatgacatctgtgaccaactagagtttatcccaggagtgctttaatattaggaaatacattgataagatggatctcgtcataaggacaactttgtagtcatcttcatggatgttggaaaggccttcagtaaattaattgccatttctgatagaaactctttcaaatgtcaggtttcagttaatggtttgaagagttcaccactgaaatcagtttgttcttagcattaataaaataagcatagtgtccaggatccataccatgccagttttgttccattttaggctatatgactctcagagcatttcagtcagtgctgatcatcaagaatggtattaacaaatgagtatggccagagcaggggaacgggaaggtgaatagtggaatctggagcaagatggatgagtggatcttaaggactgaagctgttaaaccaggagaagagattatttgatacccaccttgtagttcttaaaagggagacaatgactagctggattaagtttgttctttattaccagatttaggtccagtggactaaagatacatggataaactttctattggagctttct

SEQ ID NO: 21969 - DNA, 1026 bp, Homo sapiens
tcaccacatccggccagttaatctttttaattttagatcatactagtggtatatagtggtactccattgtgggtttatttgcattttccttattactaattgttttgagcatctttttgcgtatttattctccatctgtacgtttctttggtgaagtgaccaaacttttgcccacttttttttgtttgtttgtttgtttgtttgttttgagatggagtttcgctctgtcgcccaggctggagtgcagtggcatgatctcagctcagcgcaaccttccacctcctgggttcaagcaattctcctgcctcagcctcccaagtagctgggactacaggtgtgcgccaccacgcctggctaatttttgtatttttagtagagacagggtttcaccatgttggtcaggctggtctcgaactcccgacctcgtgatccacccgcctcagcatcccaaagtgctgggattacaggcatgagccaccgtgcctggccttttgcccactttttagttgggttttgttttcatgtcattgaatgttggtggttcttatgtattctggatacaaacgtcttaccaggtatatgatttttaaatgttttctatcattttatcttttcagtcttttaacagtgtatgtcaaaaagcagaagtgtctactttgaatgaaggctggtttaccaagtttttcttttatgaaagattgtgcttttggtattattttaagacattttccctaactcaaggtcacaaatattttttctgagcttcctgtagaagttttataatttacttttacacttaggtttattatttctatcaagttaatttttatgtatggtgtaagataaagaacaagggttttgtttttgtttggtatatggccatgtgattgctgcaccatcatttgttaagatttgtttttcctcattgaattgcttttgcaccttttacaaaaattaattgactatatgtgtgatctctgaactgttctattgatttatttgtctgtagttatgtcaatactgcat

SEQ ID NO: 21970 - DNA, 1025 bp, Homo sapiens
tacaaaacaccttcatgcattcattttccaggttcccttggtgcaaggaagacagcagctcatagtagggcttgtgggatggtgacatgcagtgtggacagacaagaacctgctgcagagaccatctcccatctttgactccaagggctgccagtgtacagactgacagccagatgagaacattccatgtttttaatgggcagaagaaagaaaaaggccctctttgtttagggagttattttaagaagctggattatttttcttctaaacaatttgtgagaaatatctataaatcttgtgtagctctaaggttgaagaaaggaagaagggttgacaagaatatttcttttaaagatcccaaagagtagagaggatatgtgctgtaattcagctggcagcaatctccaagtagttcctttggtgcagccagaagacttagcagtactggcccccttctccttataaattgtatttctgagttcatggatttatgttccctgatgttgtgtgttagttaccctgatggcctgtctcatagtaaatcaggactgacataaactcaacatttcttcttttaaaacacataattgtgtgcacactcaccccaatttgaagaggcacctccttacctgagaagggataattttgacatctgaaagaataatgattatagtagactcaaaactatcaaatatgtaagtgtgcttataataattatactaaagccactggaggttgcactaactcactgctgctccgaagattgatgaaggaagagaatcatttatttcaaggtgaccagctgttgatgtggtcaagctctttatggaaacatttcggctaatacaatcaaaagggtaatagaattagaaaatcattattccacaattcataatcatataatgggtctaggtagctatcatcaatggatgccgaagcttgacggggaacttcatggtagaggaatcaggctgacatcccctgaactcctgatcaatcttgacaccactgaaaacagggcaaac

SEQ ID NO: 21971 - DNA, 1024 bp, Homo sapiens
tccttaatggcattggaatctgccttgacagaggcctctttgtgataggccactcttcatttaccacatcctgtctgtttgctgcacttcattgattctttttttttttttttttttttttttgagacggagtctcgctctgtcacccaggctggagtgcagtggcgtgatcttggctcactgcaagctctgactcccgagttcacgccattctcctgccgcagcctcctgagtagctgggactacaggcacccaccaccacgcctggctaattttttgtatttttagtagatacagggtttcaccatgttagccaggatggtctcgatctcctgacctcatgatccacccgcttcggcctcccaaagtgctgggattatgggcgtgagctaccgcgtctggcccttcattgattcttttatgtcattctgaatatttaaaactcagcaaggcaactctacctttgagggagctagtatggtctttagagtaatactaagtataaagtgaattctgaaccaaccacttaggtccgtatgcccctagacaggtgactaaacctcactttctcagcatgcaaaattggaataatgatcaccacctcactgggtggtttgggagattgatgctataacttgctctgcctcttcttgtcctggtgagtagcatggccatctcttcagttgcagcattccaaaacctggataccctcctagaaactccccttcccttatcctgccttctcacatctagtcattcatcaagtcttaccattttttatgtgtgaatatcactcagtggtatttatgtttaatagctttcaggccctcatttgaaattactattattttttgagccagggtcttgctctgtcacccaggctgaaagtacagtgccgcaatcaaggctcactgcagcctttaatgtccgggctcaattgatcctcccaccttagccttctgactagctgggactataggcatgtgccaccatgcctggctgatttttctattttttgcataga

SEQ ID NO: 21972 - DNA, 1037 bp, Homo sapiens
taatatttgtatttttaatagagacggggtttcaccatgttggtcaagctggtctcgaactcctgacctcaggtgatctgcccaccttggtctcccaaagtgctgggattataggcatgagcaactgcatccagccttatgcgttttttgatgagtagaagttcttaatttttatgtgattgcatttatcaggcttttctttatggatagtgcttttgaatcttgttgaagaaatttttcaacagagttctcgaagatattttccattattgtaaaagtataagacgtagtttttttgttttttgtttttgttttttttttaccttttctcatttaaggttttaatccacctggagttgattttgtatacagtgtgaagtggtgaccaagatgcatggtttttcctcaaagaataataaattgttccatcacctttcatgcaaatttttttcttcactggtttggatgccatcactcatctgtgctttggttctggactctgggccgttagtctgtttttacagaaattgttaaaaagttacagtaactaaaacaagatgatgctgctgctagcataaacaaacttcttgcctggtgaggtggctcaaggctgtaatcccatcactttgggaggccatggtgggagcatcacttgagccaggagttcaagaccagcctgggcaacatggtgagaccccatctctgtgtaagataatattttttataataaaaaaccaaacttcttttgatatatagcatacacataggaagtacacagataatgaaattatagctggatgaattttctcaaaataataatcgtgcaggtcaagaaagagaacattaccagcactctaaatattcccctccccagtggctaacctcacctcattcttccaaaagcgacctactatcctaactttaacagattagtattgcctgtttttgaactttatataaatggaacctgtgtagtatatatacagttgccccttggtgtacctgggggattggttctaggatccaccctcccaaca

SEQ ID NO: 21973 - DNA, 1033 bp, Homo sapiens
tatacttttaacatatatacatatgtaaaatttatttatttatttatttattttttgagacggagttttgctcttcttgcccaggctggagtgcagtggcgcgatcttgactcaccgcaacctcctcctcccaggttcaagcaattttactgcctcagcctcccgagtagccgggattacaggtgtgcaccatgcccggctaatttttttgtattattagttttcaccatgttggccaggctggtcttgaactcctgacttcaggtgatccacccgccttggcctcccaaagtgctgggatcacaggtgtgagctactgtgtctggccatccatatttcttaaatccaaatgtttgaaaatgaagagaaaaaaactgtaaagtttcaccaaacttgtcttgcagaaaaaccctgacctgcactgatattgtaatctttgttgatctcacttagtgtgaatatttgtatgtttcactgtagagattctaggaatagaattgctggtatttaagaagaatgtgtgcatattcaccaatattggataatgtcagattatcttccaaaaaaggtggtgtcagtcttcgttctctccagcaatgcagaagttttcattactcagctttcttgctaacatctacttttgtcacacttcaaaaggttttatcggttgggcatggtagctcacgcctgtaatcctagcactttgggaggccatggtgggtggatggcttgagaccaggagtttgagaccagcctgggtaaaatggtgaaaccccatctctaccaaaacaaaacaaaattagctgggcatagtggcccacacctgtagtcccagctacttggcaggctgagatgggaggatcacctgaagctaggaagtgagctgtgatcatgccattgcacgccagcttgggcaacagagtgagaccctgtttcaaaaaaaaaagtttttacccacgagtataaaataccaccttttagttttcatttgctttgctaatgagtttgagcatcttttactatactgattagc

SEQ ID NO: 21974 - DNA, 1120 bp, Homo sapiens
aaaataaaggggactaaataggtaatgattttcctagtgcatttgcatactgtgataatcctgggccttgcaatagttctacagggctcttgggcattgaattattaggatgtaattgtacatcattgtagtgttcaccttattgaagctcactctgatgttaatgagcttcgggttttgatgcttgtttagagatcagcagtcttggatgggagggaacaaagctaaataaatgttagtttggtgagcactgtgtttttgtttttgcaaatgcctcatcttagtacttctatatcccagagtgcaaaagacagatgtgatatgactaccaccccaaatcagaaggatgagcggagtggctaagagtatactctggatcctggtaacacaaaattagctctctggccttgggcaagtcacctcacctctcatgccttctttccttatctataaaatggggataatgatagtgcccaccacatacggttggtgtgagcattacgtgcatgaactatatattaagtacttagaatatcattgggcaaatgatgagtgctgtgcgtttgtgatgatgatgatgatgaagcaggactctccacatttaacagtctgaaaaaggttggtagaatttatctttacatttatctcagtggagaaagtcttcctaaggattaaaaaaaaggatattctttactacatttagacttcctcagagcaaagctgcacagagagagagctcagcctgtgggtagagagctctgcgtggtgcctggtgggtgggctgccttcaattttgccctgttgcttgggcacctgggtcagtgatgccttggcccaagcattatcaagtgtttgctagttgctgtgcactgagtgccctgattatggtgggaaataagcatattaagaaaaagattttgcctcaaggatccttttcagttgaagagctaaggaaaagaatacacacagaggcgttcctgtcctctgatgtcgtccctgacttcaggatggggcaaggtgtcccctccttcatgtccgtgtggcacttgaagagtgtacttatgtcttcacatgctcttctccccactagacagggctgcatctcatttttttaaatttt

SEQ ID NO: 21975 - DNA, 1035 bp, Homo sapiens
taattcagtgttgggattttgtccaaatattccatcagggagcagtcacagaagggccaggatcaaagtattctgtagccaagtagttctgaggaaagtgaagcactgaactgaacatcaaaatatgtcatatctggaggccacttcataattccagtttgtggctgaagaggggtctgtaagctttcactggtcagccctggtttccccagagcagttgtgattcagtaaacagagtgtgttattttagtagacagtaacttaagtgcctgttggcctgcccatgtcctcccctttatctattaccaggattaacaatttgtgatgattctggactccaaataccgatgatgtttatagtccttatgtattctggccctgtgtttgcatgtctctgaactgtgcgaaggttcttggctctagtctgtagatattaaccaaattcatcgctaatcaagtacagtggttttcaaacttttatagttaacagcagaaccagattttcaaaggaattctgacacagaactgtaacattcccgtatctaaaccagatgagagtaggtccatttatttgtttttagttgaagtagagctgggattcaaaggctcactattcagcctccactgcactcttgtcaggcttcccaaggcatttccataaaaccctaaattttcaaaaatatagctaaaaagtatcttataaaaatccctgctttagccataaaaaagaattagataataccttctgtgggaacatggatggagctggaagccatcatccttaacaaactaatgtaggaacagaaaaccaaataccacatgttattacttataagtgggagctaaatgataagacctcatggacataaggagggggacaacagacactgggggctatttgagggtggagggtgagaaagagtgccagaaaaattactgggtactaggcttagcacctggataacgaaataatctgtgccaaacccccgtgacacaagtttacctatttaacaaatgtactgtacccctaaaagt

SEQ ID NO: 21976 - DNA, 1081 bp, Homo sapiens
ttctgaaattaaggcagcaagtactgctgactggtcttatcatttattctctgccaggccctctagctgtggaagtgacaagaaagccagagaattaaatctctctctctctctcttgttttttttttttggaaagagggtctctggcacccaggctggagtgcagtagcatgatcacagctcactgcagctttggccttccaggctcaagcagtgctcccacctcagcctcctgagtagctgggactacaggagcataacaccacacctggctaactttttaactttttgtcaggctggtctcgaactcctgggctcaagcaatcttcccacctcaacttcccaaagtgctggaattgtaggtgtgaaccaccacacccggccaaatctttctcttaaaaagaaaaaaaaaaaacgaaaaacagcaatgcttcttaaagctttggctaggttcctgagaaaaacaactgagactccctatatagcagttggagggtaaactatttgttttagtaaaagataatccctggcccctgatcttttacttgtcacatttttatttgtatgtggaatatctagactaattatttactctctccatccaaaaattctccatccatttttttttttcattctggtggcataagaatagagactgggctgcaattaactaacttactatatgtttaaattacttcagtggtgatgcttaaattatgttaattccggtattgtagagttttatcttgttttgttgaagagcaattttttttttctgggagtcactcatctcacatgtgaaaaaatatgtttaagcaattttttggaacagatctaaaagaaaaaaagattgctgggaagtatggtttccaataaaaattgagtgcataatccatatagtacttaagacaaatcctttttaccatatgcgaaattgtggctgtggatggaaaggattgataattttaccaatgatacattttaaaacaagtaaagaaaatgaaactatcaataccatgtaaaggtggttttaaaacataattttaaataacatgatgccacagaactcatcctagccctc

SEQ ID NO: 21977 - DNA, 1050 bp, Homo sapiens
ttagtgcaaaggtccaataatcaaaacaggatgatgctggcataaggggagacatagatcaatgaaatagaatttaaagtccattaaaaaatccttacatttatatcaattgattttcaataagggtgccaaatagccttttcaacaaattgtgctataataactgaatagccatataaaaaaaagtaaaattggactcctacctcacaccatcttcaaaaattaactcataatcatagacttacaaactgtaagataaaaagctatacaacccttagaagaacatacagacaaaaagctctgtgagttttggttgggtaaaaccatctcagatacgataccagaagcacaagtgccaaagaaaaaatagataaattggatttcatcaaaattttaaaaagttcatgctttaaaagacaaccacagactgtgataaaatatttacaactcaggtatctaatgagtgatttctatccaaaatatataaagaactatttgaactaaataataaaagataaataactcaattaaaacatttacaaaggaactgaatagaattttttccaaagaacataagcaaatgatcaataagcacatgaatagatggtcaacattattaatcattagagaagtgcaaaccgaaaccataatgagataccacttcacaccaaccaggatggctataataaaaaagttaataaataataaatataataaataaaaaagttaaaaacactaaataataacaagtataggtgaggtggtgaagaaattggaattgtcgtatattgttaaagagaatgtaaaatggttcagccacttcggaaaacagtctggctgttcctcaaaatgttaaacatggttactatatgacacagtgattctactcctaggtataccaagagtattgaaaacaaacatggaatgttcaaaatagcattattcataaaagccaaaaaatggaaacaacccagatgtccatcagctgatgactaaactgtagatatctatactgtagaatactatttggcaaaaaagtaatgaagtatt

SEQ ID NO: 21978 - DNA, 1046 bp, Homo sapiens
aggggaaagaagaaactagagaaactggaatgcttcctatctgacccccaagtacagggactgcctctttccgtaacggcacagaacgtctccatccctttgacctccacctccccagagatgcccgaggaggacagccttgtttctgtgatctgttgttgagaactgctgctgagaattcttccttcagcaccgccttaggcaccattggtttttcactaggtccgctgtagaaaacagccaggaattacttagttgactaccacctgaggtgctgtttggtgttggtaataaagaataaaggtggaaatgaagcaacgagactgcttttctttgtggttcataaattaattctgataacagtttttaaaagagaagtcaaatattttgagcagagccaagctcactgacatacctaggtggtcttagatgtagccaatgcgccaggtaccacaggacgcctaaatttgtatcagtgtataccatcactagttatgaataagaatgccttcttgccacatatcctcattaactcagtgtattatcaaacttatttaactctttcaggccaggcattgtggcccatgcctgtaatcctagcactttgggaggccaaggctggtggatttcttgggcccaggtgtttgagacctgccagggcaacacaggagtttgagatcagtctgagcaacatggtgaaaccccacctctacaaaaaatacaaaaattagctaggcatggtggcgtgtacctgtggtcccagctactcaggaggctagatggaaggatcacttgagcctgaaagacagaggttgcagtgagctgagatcacaccactgcactccagcctggggggaaaaatatttcagtctgagaggtgaaaaatggtaagagaatttgatcttttcaaaaggtaatcatgtttctcccatgctcaagaccttcactgctttcttattgtgcttacaatgaagccaaagtcctttagcatggtccagaaggtgctcatggtctggactcactatctctctgactttatctcatga

SEQ ID NO: 21979 - DNA, 1082 bp, Homo sapiens
tatttcatgctctgtagtgagaggagatttccgaaactctgttgctagttcattctgcagcaaataattattatgtctgatgttgactcattgcagtttaaacatttcttcttgtttgcatcttagtagaaatggaaaataaccactcctggtcgtcttttcataaattttcatatttttgaagctgtctttggtacttgttctttgaaatcatatccacctgtctctataggtatcattttcaatactttcaacatttggtggttttctattgggtactccccattttcctatatttgtgtgtatatgtatgtgttcatgtaaatttggtatagtaattttttattcattcaacaaatatttattgttcacctgtttgtaccaggaacttttcttagtctttgggtaaaggtgaacaagacaactacagttcctgcctttgctgagacagcagttacactaacccttaattatcttacttgtctatgaaggagataaacagggtactgtactggagaataacagatgggatgcttcaggtaggacatcaaggaaagcctctaaggaaaggatgcatgagctaacacctgacattaaagaagcaagccaagtgaggagccaggggagataagcattcctggcaaagagaatagcatcaaatgcaaaaaggttcacactaaaggaaactcctgattaggtattaatgctttatacagaaacctctatacaaatccaaacttgaagatcagaatggttctacagttcataacattttgaaggtggccttattttgtgatagtctgcttcatgtgattctcactaacatatctccttcctcaacctttgctgtaaaaatttcatttgcaccacatcagtactacttaatttaacaagcttttgttgtgtaagctctcactgttttagtgccctgctgcttgcttccagactttgtgctgtccagtaattatgtcttccactacccatcttgtgagcagagtaaatgtcctaggtaataccactatcaggcctgtaggagatactcagtggagcctctgcccttctttttcttacttgagaacttg

SEQ ID NO: 21980 - DNA, 1034 bp, Homo sapiens
taaatatcataaaaggggtgtatatgaagggttatgtcagtttatggaaggagagatgtttgcacacggtgctcaaggaaaacttgatggcacatgatctagttgtaaaaggtgcattggatttcaatagtcataaatggggtgggcagagttgggaagtgataatcttgacaatagcatagcaattcagtttggagaatagaaaaataaggctggacaattaaattgagacaaactagatgtaggttaagaggaggaacttcattcagaagtagaaggaatacttgctaatgtgccaggcactgtgctgttttaagtgtagtatctaaaaattattatttctgttgtcaattcattctttgtaaggttgaaatatatgaaattgccatcgttgcaggtaacacatggttcaaactaatacatatttggaaatagacatagaaagctgataatttgcccaaggttacattataagtggttgagatgggactggaagatagttctcctggactctttacctcttttataaggatagtagtaacaattatgtttaagttttacaaaaactaatttgtcatcagtggataagatagtctagattattgatgaattaaacaatagattggatttcacatcaaagagagagaagacttcttgaccatatttaagagtaggaattaagtaaaatacttagtctttcttcaattcgtattgcttactccatatgcctgcttaagaaatattcatgtaatatagtgattgtattcctgcttcttccagcaatttagtcccttccaaatttatttgttttggacttgcttgtctatcttaagttttgtcagaaatctgatttgagattgtgcaatgtgaggtctacttgttgaatacatttaaaaatatatggtatatatttgtatcagagaatgaagacttgtcactatttttttctgagttatattggtagaataattcattttgtgattttgctgtagttctgttttgattattacccttttgagatgttgttacctgtt

SEQ ID NO: 21981 - DNA, 1048 bp, Homo sapiens
tgaaggaaagttagcctaattgaggctgctctgccattactggaattagaacctccattctgttttgtgtattcttttactaattgcatactgttttaattattgagaatttattatgtgcttcagaatctggtaggacaggtctttactatttgttagaattttctggtcatacttatttgttttggcttattacagtatttggactaatacctggatttttaaaacatttatttttattgagattgcatcaaatatataaatttggtagagttaatacctctatgatggtatcttcctgtgtagggacgtatgtttttcttttttgctcagtgcacttttgtgttctttagttatgtttaaaatgtttctttgtatagtttgacacagttttaattacatttatctagatgctgcttatacaactctcactatctaagggggattggttctaggatttcccactcataccagaattagtggatgctcaagttctgataaaaaatggcattgtaagcctgggcacgttgacttacttctgtaatcccagcattttgggaggctgaggtgagaggatcacttgagtccaggactcaagagactttgtctctacaaaaagtgttaaaattagccaatcgtggtgacacacgcctatagtcccagctactcaggaggctgaggctggagaactacttgaggctgggaggtcaaggccgcagtaagccttattttaaaaataaaatggcattgtatttgcatataacctatgcacattttctcatactttaaatcggctgttcccaaccgttttggcaccaggagacagagtcatgaaaggcaagttttccactgaccgtggtggtgcggcaatggttttgggataaagacgttccacctcagtcatcaggcattagttagattctcttaaggagtgcccagcctaaagccctcgcatgtgcagttcacaatagggttcttgctcctatgagaatctaatgccactgctgatcttccaggaggcagagctcaggtggtaatggtctctccc

SEQ ID NO: 21982 - DNA, 1049 bp, Homo sapiens
cactaaaagaaaagaatgtaacaaatgaatacagaaaaaaattggatatagaatatgtgataaattcagaagaagacaagaaagaaaatataaaacaagcaggcaactaaattagtaattatgttacatggaaatgggctaaatatttcaagtaaatggcaaaaatcatcagactggacaaataataattacctaaatataagtacctagaaagattgagagaaaatgatgcgaaaaggtataccatccaaatgctaactgaaggaaataagtgtggctataccaatcaggcaaaggagactttaatacaataaacagtagtagaaaaagagaactacattttatagtgtaaggggattgatccaccagagttaccacaatcctttatgtgtacccagtaaaatagcccaaacatctataaaccaaaaattttattttgaactaaaagaaacagacaaatatgccatcacaatggatgcacatatataggacatacatacatcacaattagcaggcttgatctaattgtcatatgtagaacattgaaactattaatggtggtattaaccatcttttcccttgcacatggaaattgtactagaattgaccataagctagggccatgaacaaagcctcagcaaatatcattgattttaataattgaatatgttgtttgtattatagtaaataaaaataactagaaaattcctagctgcctagaaataaaacactatgcttttgaataacatatgacttaaaataagaatttatgatggctattagaaaatattttaaactgattgaaaatgaaggtgaactacaatgatctagattgctgctgctgaaatgctaagatgaaatttatagccttaagtctatgcattggaaaagaaagcttttttaaggaggtagaaaaggaataggaaatcaaacctaaagacagtagaagtaaagaaataatgaagacaagagcagaaattagtgaatagaaagtaatcttacatagagaaaattgacaaagctaagaaaaagttggttctttgaaaaga

SEQ ID NO: 21983 - DNA, 1004 bp, Homo sapiens
tgagcttacctttttgtgtgatttttaaattttgttggtttatgttacatacacagatttgagtatcccttatccaaaatgcttgggacccgaagtggttcagattttttccaatttttagaatatttgcattatagctgtatagtacaatgaccgtttttttgggggtgtcatgttggtactcaagaagtttcagattttggagcattttagatttcagttttcggatttgtgatgctcagcctgtattttttttttctttttctatttctttttttttctttttgagacatggtcttgttctgccactcagcctggagtgcaatggagtgatcttggctcactgcagcctccgcacccctgtgctcaaatgatcctcccacctcagcctcctaactgggagcacaggaggcaccacgcccagctattttttttgtattttttgttttttagtagagatggggtcttgccatgctgtccaggctggtcttgaacactagagctcaagcagtcctcctattttggcctcccaaagtgctgggattacaggtgtgagccaccatgcgtggctcaactgtatttctcttgtggttaatgctttttatgttttaaggtcatgaatgtattctgtgttttcctctaagagcttaagattctgctttcccattgaagatggtatgcacttgtggttgaggcttgttattttccatgttgttgaaaagttgttgaaaactagattgaccttgggccttactggaaaatgagttgactgtatatgtgtgggtctatttctagacttgttctgttccactgatctttttttcttatgcctactctatactcttgattactaagtctttttagtaagccttgaaataaggtggtgtaaggcctccagttttctttttcaagaatggtttggttattctagtttttttttttgtttccatatgaattttatatcatatgaattgcttaactctgctggaagtttggtagggatt

SEQ ID NO: 21984 - DNA, 1047 bp, Homo sapiens
cctcccaaagtgctgggattataggtgtgagccactgggctcggccagttctgtgagttttggtaacttgtactcatgtgtgattacctctcaagatagaaaacattcaggaattcaacagtggatttacaggagcgagggaataaaacaaagatagagaacacttttgtcaccgtagaaaggtactttgtgcttctgtccaaacatttccacttctcttccttagtgcctctgagatggtcatcttgacttgtcattagattagttttgcctgttgtgggaagccatgaatgaaatcagtctatatttctttgtcttttgcccagcatgtttttgagactgatccgtgttgtggagtgtataagctcattcatatttgttcctgagcagtattcctttttatgagcacactataattatttgttttcttttgatattttggctgtttttagtttttggcgattattaacatggctactatgaacattcttatacaggtttctttttgtggacatacgtatttatttttcctgaatgtgtgatacagggtagatctatgtttaactttttggaacttgccggttttccaattgtgctatataccattttatactttcatttcagcagtttatgaatgttctagttgcttgatgtggtagactgaatcatggtctccaaagatattcaggttctaatcccaagaacctgtgaatgttgttttatatggcaagagagactttacagatgtgattaaattaaggatcttgagatggagagatgatcctggattatctgggtgggctttaaatgtaatgccaagagctcttactagaaggccatagagggagatttgaatacagaagagaaggcagtgtgacgatggaagcagagattggaatgatgtgctctgaaggtgggggagagagcacaagctaagggaagggagcacaagctaaagactacaggtaaccactagaagctgaaaaaggcaaggacgaacttcccctcagacactccaggaggaatcagtcctgccaacactgtgac

SEQ ID NO: 21985 - DNA, 1049 bp, Homo sapiens
gtgcgggcggccggtagggctgcgggcgcgcgcctgaggggaggaggggcagcgcgggcgcgcgcgtcctcaccccctccttccccgcgggcggcggccaggctccctcccctccccttccctctcctcccctcccctcccctctcttcccctaccctcccgcgcgcccgggccgccggccgggcccgggcctgggggcggggcgggaagacggcggccgggagtgttttcagttccgcctccaatcgcccattcccctcttcccctcccagccccctccatcccatcggaagaggaaggaacaaaaggtcccggaccccccggatctgacggggcgggacctggcgccaccttgcaggtaaagcctgggcgcccgcgggcctccagctagggaagtgtttgcgtgcgtccgcggccggggcgatgggccgtgtcacatggccgctgcgggtgggggctggggtgtggtgagttcgggggctgtgggtgcgccggcccgggcgtgcgggttcggggccggagagccgggaagggacggggctcggttgcactgcgctgccgcccaggctgacgggggcgggggctgcctgcgtcccttcccctcgctgctctcacactccatagtttgtggttctgatttttaaagccgaagggccagagctcttgtttcaggagttgtggggaagccttgttagggacgcgtaatactttgcctccactttttttttttggtctcgtaacctttgttaacagtggtagtctcgggttttccatggcttgtgtgtactcacaaacacgcacacagctgataactctgtgatcatccttcactcacttgtgaaagttgttctgcgggtggagcctattagtttttatcacacgcctttggaaagccctcgaagtgatttctcgtatttcaaacttggtttttaaaattgcaacttactttgttctcttggagggggatattgtctttgggtcaggtacttttgtcttttacttatccttaaaatgtccttttgatcctaaacagaaaaagaatgcctggg

SEQ ID NO: 21986 - DNA, 1021 bp, Homo sapiens
atgtggcctgagttcagatcctggctctgagctgccattctatgaaaagagaataataatatactgacttcatagaactgttggtaaggattaaaagaaattatgcttgcaggccaggcaccgtggctcatgcctgtaatcccagcactttgggaggctgaggcgggtggatcacttgaggtcaggagttcaaaaccagcctgaccaacatggtgaaaccccgtctctactaaagatataaaaattagtcgtgtgtggtggcgcgtgcctgtaatcctagctactcaggaggctgaggcaagagaatcactggaacccggaaggtggaggttgcagtgagccgagattacaccattgcattccagcctaggcaacagagtgagactccatctcaaaaaaaaaaaaaaaagaagaagaagaagaaagaaatgatgcatgcaaagttcttagcacaatgcttgccaccattatgattattttcctattcttgggggtaaacagtgggtcttttctttgatgtggtctttgcaggaggccaagctcgttgttttgatctatgtaggggccgtttggttctgccctgttcccccatccatcctacaagcctaaccttggcctactggcaagacagatggtccttgtcttactggccttgcagtggggtgaaggtcattgttctgacccactaccctggcgatttgtcttggcccacattgctagatggggaagggctgtgggttggctcagccttacgcactgtctcctggcagtggcatgctgactagcattaggggtgaggccaacctctgcctcagtatgctggagccagctagagaagatgctttcccggagggtgtcagagccctgtttggtgttgaaacaacacagaaactgctgtgctcaccccttccccatctagcagtcagccacccagcccagcttctggtccttctactcactgtgactcctcacacattacaaccacatgagcatgcatgcatacacacacgcgtgcacacac

SEQ ID NO: 21987 - DNA, 1030 bp, Homo sapiens
gttatactgtatcatttagggataatggcaagaaaaaacagtctgtaatgttcagtgcagatgcaactatccttgttttttcctcagaatattttaaatccatggttggttgaatccagggatgcgaaacctatggatacagagagccaactgtgtaaatttagttttgctttttatttataagctgtggaggccaaaagaacctagctgttaaagtggtcatctttttcaattcatatgactgatcagaatcacaactcggatagttttaaaataagctgggagactccctttcccttccatcttaacgttttgataccaaattattttaccttaataaagcgagtgtaacactgcctccctatagtgaatgcacagacttctctacttatcctgggcctggacacaacccaactcagtgtcaccaagaatccaaaattgaagtcaaaaaaagaatgtgtcttgtggttccaaaaccatggaagaagaaaaaatggattaaatggttaaagaggaagcttagggctcattggcattcccccattccttgttttagacgtggttattatcggtgggtgaaattagcctcagcctctctgtagacctccagcatgtccttgttgctgctgtgacgtgggtttgcagggtgaatttaatcaactccaggcttccttactgccaggccaaggctgccagcctcttgaaagctcactcgtttcagattttgtttttttgggttttctaattttttctaattgagggcctgaagccattatttaagacttttccaaacttctcttgccttcaagtgttcatttgactattttatgggggtggggggaggtggtattgtttgtgttttctaagcaaaccaaaattacatattttttaatctgtcaagttaacctttgacaaaagtttaccttaattcagtaaacatatttgtactttggccaattctgaattaacttgaaaagtgttaagatatttttaaatttttaggcataaatatagcacatatagagttatg

SEQ ID NO: 21988 - DNA, 1026 bp, Homo sapiens
aaggtgggggaagtgctgtatttgaagaaggcatttacatctgtttgatagatgtattcctgaagcagtctcacaatataaaactcatacttcaagactaattatcccataagaaaaagatgtaaagaagatcctttggggaatgcatgaatgtacagcattgcagcttacttttactttactgttctttttagttttttcttcattagctctaattttttagagtgctttcacctaaattaccaacacaggaggtcatagtggatatttggccttcatagtgttttgtcacagttcacgtctgttccagtgttgttactgtttttgggggctatgtttttcagcactatcactagaaccactgcttaatgaatgcttgagagatattgttgtaggatataaaaatattttcaattataataacagagtttgtaaaataacagcacattagtcatcataatcatttactgaagttccactgtacataaacaacagggagattcacacggtactgtgcaaagatggcaaatgttctgtttatcagccaaagtggcaccaccatgtggtaatagcataaaaacaggttagagttcactgggccctccagcttggatgtgttcctattccagataatttttttaaatatagagaattcatattgtttccatttttacataaagtaagaccttggtttgttggttggtttgggggtatttttgtgggatttttttgaactatttcaaatttatgtaaactataccatgtgaaccagtacaaaaaaatctatgaagattaaagtggctactcccaggaagtgatggatcttggtgtgtaagctcagtcaagaacaaagtagaaatatcgaggctgccaaaaaaggacactgcaatggagtctggggaaggttaatcttgtagttcactgtaatacttaccttaaagcaaaatgaattacagtgtgcaggctaagtgctggaatgttaatatttgttcatttattatactatattcaaaaataaaatgtcat

SEQ ID NO: 21989 - DNA, 1029 bp, Homo sapiens
acaacttaaatcactgctttttacgtattggggaatgtatatccttatttgagtagtgctttttaacttcaagaatgaaaaagaatcaataagttgtttttttcagaggatgaggtggccttattgatttataacgtgtggaagtttgatatctctctccataatcaaaaccacagaactcactttctcaatacctattgtgttttttagcataaagaagccatatgtattatcatgttatttttcctaacatggttctgtaggtgatagtctctgattttgtacatttagaaaagtgaatttttccctcttacataaccaaatgacatttcttctggtggtctatatttatataaatacaatagttattttctggcctattaatatttgttactcaaatatttggggagagtttcattctcattctgttatttttagatatattatcatcccattaaaaatatctttctgatgtcctatttcagctttgaattttaattccttgtatttgtcttaaactgtgatgttcaaaaatcagtgttacctagaattaattgtcttgtttaatgtacaattctgctgaaaaatatgttaatgggatttctaatgccttagctcattatactagctcactaaatgtatagtgtttggcccaaaagtgacagctttccatgtgtgctattttgtttatttattactgtccttactgtcaatgtgaacaaatgagcacagagttgatactcagaattgggcaagttgtaggtgttaggagcaggacaagaccagatcttcacttcacccattttccccatgagattgcaagagtaacttttcttagactgtgtaccagcagcggccgggcgcagtggctcacacctgtaatgccagcactttgggaggccgaggcgggcgatcatgaggtcaggagattgagactatcctggctaacacagtgaaaccccgcctctactaaacatacaaaaaattagctgggtgtggtggcaggcgcctatagtcccagctactcgg

SEQ ID NO: 21990 - DNA, 1039 bp, Homo sapiens
tttttttcttttctttttaactgaatggatttataattctaagtacgtgtaatatgaaatcatttttatatctcaactgtagcactttcaaatttaggaatacttttacccatttgtcatgtcttttatactgtgctttaaaaaaaatcacatctggtgccattttattactttcaaaggattgcatcttcagtctaaatctaagacaaagctctaatgagtttcctcaaaacaagttttaaaaattgctggaatggtcttgtcatataatatgctattcacttaatctgtaatgaataaatacttgaagctatagtaataatttttcatgcatatgatactgtcgtaataattctgttgtggctgtgctttattgatttctgtgccacttctgtggcatgaaatgaaatgtattatcccacttaaaccattatggtttccttttgaattacatattcattacttgatcctgtcatcaagcctattctattttccataatgtggtattcagtcttaaagatttacagcgttagtcagtgcagtataagtcaaaataggacaagtaaattcagatcagaaaagttggtaagaaaatgtaatagataaatttttttatttaattatactttaagttttagggtacatgggcacaacgtgcaggtttgttacatatgtatacatgtgccatgttggtgtgctgcacccattaacttgtcatttacattaggtatatctcctaatgctatccctcctttctccccccaccccacaacaggccctggtgtgtgatgttccccttcctgtgtccaagtgttctcattgttcatttcccacctatgagtgagaacatgtggtgtttggttttttgtccttgtgatagtttgctgagagtgatggtttccagcttcatccatgtccctacaaaggacattaactcatccttttttatggccacatagtattccatggtgtatatgtgccacattttcttaatccagtctatcattgttggacatttggcttggttccaagtctttgc

SEQ ID NO: 21991 - DNA, 1128 bp, Homo sapiens
cagtttctgagtcagtgtagaatttattctgcattttctgtttcctctttcaacacctttcctggaaccccctccttccttacccacttgggtttctcagtactctcagctggggtttacagtatgaagcctccagggggtattttttcaatatcaagccctcctgaggccctgcccatttttttctgaacaacagagaagaaatacagtgttaatatagtgtagtggctaggggcatgggctctggagttaaggcttcctccccatacccccaaccaactttcactccttgccttaccacttgcagtctgggacaggacagaggacactgttctattcaggacagacctgaatagatttgcataaaaggaattacctcgccatcttctcttgccgtgttcctttgcaggtgacaaacattttgcatacacagtgacacatggccaggtggagtgtagtccctgcaggtgagagattttcttcaacagaactacattatatagagagacaaaccaagccaaatatctgaatggagcaatcatggacttacttaacaaaatcaaatagctttctgttatgcggaatttaaaaatgtaactcagtttctagagagaaatataagcttatttcttaaaaaagaactttaccagctgggcgcggtggctaatgcctgtaataccagcactttgggaggccaagatgggcagatcataaggtcaggagatcgagaccatcctggctaacacagtgaaaccctgtctctactaaaaatacaaaaaattagccaggagtggtggcacacgcttgtagtcccagctactcaggagtctgaggcaggagaatcgcttgagcctgggagacggaggttgcagtgagccgagattgtgccactgcactccagcctgggtgacacagagcaagactccgcaaaaaacaaaaaaacaaaaaaaaaactctaccttagtcaaacatgacttactgctatagatagaagtcttactccactgcaaacttcttccaaatgtaagaattcgtttcacagcaaccctgaaagagagcacttctgtgtgctgcttacctcagaaggcagtaaagctcttgctgtttcatttttagaaagattagaat

SEQ ID NO: 21992 - DNA, 1067 bp, Homo sapiens
cagctcactgcaagctccgcctcctgggttcacaccgttctcctgcctcagcctctcgagtagctaggactacaggcgcctgccaccacaccctgctaattttttgtatttttaatagagacagggtttcaccgtgttagccaggatggtctcaatctcctgatctggtgatccgcccatctcagcctctcaaggtgctgggattacaggtgtgagccactgtgcctggcctatttacatattttttaaaaatttgtaaatgggcatttcgcaggccattctcatataagagggagaattggaagtcctttgaaatatgttttttaaaaaggttttaatttttaagttatccaaagtgacacctgtaatgtgaataggacattccagaacaaaaaagttgaaacaaaattatcagtgttttatacaaattttgtactccttgtgtagctagaaatcaaacgtttcatattaaaatgagaattgaattagtttaaacaagttttgtttgcagaagtctctgattccttatgaagaggaaaagaatatgaaaattttatagtattatgtttttatattgcacttacaaaattgagtgaatattgtgtgatgatcgaaagattttaggcattttttcaagccacagtttttttttttctttcacagtgatatatggtacttactggaaattttacttttatttcctaccatatcatttgcacctgttttgctggtgtgtgttgattggtcttattctatctcgtaagtaattactgaccctgactggtctagacactgactggtagcagtgtaatgtcaggccacttaaaaaaggactttcttaaaattgggccacagactaaatgttattaagtttgaagtatcacaccatatctttgttgcaactaagaaagtgaaaataggccttattaaagtctgtttaacttatatcattacatctatttttaaatttttttcacaacttgaatagtatttcactttagcttctgttattctttagcttttgatcatgatattgctatgtgttgaaaggatttcatcaggtgtat

SEQ ID NO: 21993 - DNA, 1033 bp, Homo sapiens
gccatagttttggtccttagtcatttagaatctgattgagttcggggcttactctatcactcatattgctagtcagtgttatatggatgctgtcttatttaattataagtctagccatctataaggtacagaatttctgtttaataggtgaggaaactgagactcagactgaaacttagccaaggtcatgtagctaatagtgtggagctgaaattgaaatccaagtttgaccctagcgtagaaatgttctttttggcagacctgacattgataaagctgaaaaggataggcagacatcatctaccttatacctgcactcagattctcagttgtgagtgagtagaatgtccactatataaagtttctgtgcagtcttggatcacttctgtgcattgattctcgaagtgtgttctgtgggccacagagagtccatggagtctaagccttttataataagacatcatttgccatttccactgtgctgacatttgcatcaagggtacaatagcaaagttggggtaaaactgctgagaccttagcataaatcaagtggtgcctaactgtactagtactcactatattttccacaaccacacacacatttgtggtaaaataaaaaccatcttcactgaaaaatgtccttggcgaaatagtaaaaatgattagttgttataaatcttgacccttgagtacatctttttgatattttctgttgtaaaactagaagctcacataatgcacttctactccatactgggttccaatgattgtcttgaggaaaagcaggtgtgtgatagagttgtgagctgaactagccacttttctgatggaatagcatttttacacgaaagaacatgagacagtcttggcagagaggaaactgccagtgttggttgccaataaaaaaaattttcaagtcaaaattaaaatttcgaaaaacttatatttggcatcatgagtttgacaacttcctaataatttagacttttgttataacatcaatgatgttagtaaatatggattttaaaaacta

SEQ ID NO: 21994 - DNA, 1025 bp, Homo sapiens
aaatgtccatgaaatcttcacaatttatgttcagagactgcagtaaagacaggcataagaaattataaaagtattaatttggggaagtaataaatgtccatgaaatcttcacaatttatgttcttctgctatggcttcagccagtccctctgttccgggtccctgatttcccgcaacagttacccagtaattatcaaaggaaaaagatcttccttgttagagggctcacagcaccatgtcttgttcttgatggtgcagtaggtatttgaatgaatgatgaaattctgatacttgaattgagctaaaacaaatggttaaaatctactggctctataggtaaggaggaaccagtgtgcctatagactaccttgtttttgggtttttttcttcttcttcttctgtgaagctggtatccgtcacacacatactggatcctatgcaatcggttatttgtgttatccaataatatgagtattatttatattttataatgaagaaactaaatgtcagagaagtagcttgtctatggacagtgacaacattggtatttaaacctacacctgtgctctgtctacaacaccttcctttgccagtgcttcttataagtgaagttttaaattaaaaacaagtaatttgtgtacttggtcgtttaatataacactttacttaggggcagttgttgccagtctttctaaacatgtgatccccctgttgacatgtttttaaaaactcattgactatctttcagtagttactgactgaaaagatttgagggtgaatagtgggggtcccagacaccctgtgacagatggtctaagcagcttttcccaatcggagttcatgagaaaatcaagtccagcggagaaccagttaagtgaggatttcctcagttctcccaaggagatagtcatacgtagcaaataccctctaaatgagtaggagagaagttagttgatgacaaaacttttgccttcttaggaatcctggtttaaaagatctgtgaggacttcggggtttgaggtcca

SEQ ID NO: 21995 - DNA, 1053 bp, Homo sapiens
accagagcatcgtgtcatgcaggagggagcttgttggaagtgcggagtgtaggtgtggcttttgacctactggatcagagtcttctttctaacaagatccccagatgatttgtatccacattaaagtttagaaaacacttttgagttttggcctggaaatcattatgtatttcctgagaaaatatttgtcttgagctggaaatgggggccagcttttttgtactttgaggaaactcatttcctactaaatatttgtgtttagggtatagaaatgtaaagtatgataagggatgcatgacaaaaactgtttagatacccagaagggttattacagcagtacaactcagaattcaccagatgctctagtaaccacttcaagtgagaagtaagcagttttcatatacatgattcctaaatcctcttttagaaagagactacacaattttatatttgtcagttgcaaaacttagaagagtcagtatttcacatgatcttcaacaaaatgcaaaacagataacatgttacattgctatgaaaggatgtggataaatctttgaaaagcctccttagctggacataaatgtaaggaatgattccttacagtacctaggctgttgctcatacttaatgaccatgtgccttctacagactcttggtgttctaggagaatcacagatctaatttgagttttgcttaactttgtaagtcttttggatatgccataagtgtgcatatttgctgcgttctttatttgggattatgaggttattgaatttcaagacatttataaagagtagattatatgcaaggcattgctttagattagaaagataccatttacttccagcccttaagactgtcccttattgtctctcatgtccctccactggctgtttcctctggcttctccttcaccctttgattaacaggtagttttctctagtatctcattctgtcttgttttcttctgtctttacacattttctctgggagatcacatatatgtctatgactttatctactgtcatttgtatactgaaaatcacctgataa

SEQ ID NO: 21996 - DNA, 1032 bp, Homo sapiens
caggcaacctacagaatgggagaaaatttttgcaatctatccactgacagaaggctaatatccagaatctacaagaacttaaatttacaagaaaaaaagcaaacaaccccatcaaaaagtgggaggatatgaacagacacttctcaaaagaagatatttatgcagccaacaaacatatgaaagctcatcatcactggtcattagagaaatgcaaatcaaaaccacaatgagataccatctcatgccacttagaatggtgatcattaaaaagtcaggaaacaacagatgctggagaggatgtggagaaataggaatgcttttatactgttggtgggagtgtaaattagttcagccattgtggaagacagtgtggtgattcctcaaggatctagaaccagaaataccatttgacgcagcaatcccattactgggtatacacacccaaaggattataaattattctactataaagacacatgcacacatatgtttactgcagcactattcacatagaaaagacttggaaccaacccaaatgcccatcagtgatagactggataaacaaattgtggcacatatataccatggaatactatgcagccataaaaaagatgaattcatgtcctttgcagggacatggatgaagctggaaaccatcattctcagcaaattaacacaggaacagaaaaccaaacacttcatgatctcactaataagtgggagctgagcaatgagaacacatggacacagggcagggaacatcacacattagggcctgtcggtgggtaaggggctagaggaggggatagcattaggagaaatacctaatgtagatggcaggttgatgggtgcagcaaaccaccatggcacgtgtatacctatgtaacaaacctgtaccttctgtacatgtatcccataacttaaagtataataataataagacaaaaaacttgtcaacaccagatttgttcttttagttaattttagtttttagtttttagttagatggattttaggagttagtttggaaga

SEQ ID NO: 21997 - DNA, 1096 bp, Homo sapiens
acacaaaaattagctggacgtggtggtgcgcgcctgcagaccccgctacttaggagtctgaagtgggtagttcgcttgagcctggaaggtcgaggctgcagtgtgctgtgatcacgccaccgcactccagcctgagtgacagactttgtctcaacaacaaaaaaacaaaaacaaaacaaaaccctaaagatatacacagtagagagaatggtagaatgaactcccatctacccacaacccctgctcaagaatgatcaacaatctttttttcccatttatctgcattctcctacttaaaaaaaaattttattttgaaataagttcacacatatagaaaagtccccaaaataaaaatatcacaaaaaactatatgtaactttatccagattgatttattgttaacattttatcccatttgttgtgttttttctcctcttctgtctcattctgtactttcttctctctctctccccctttctctttctctccccccaccacacacacacacacacacacacacacacacacacacacacacacggttttttaaaatcatttgaggataagttacatgcatcgtaatatccctttactcctaaatactttaatgtgtatttcctgaaagaggatatcgcttatgctaccacagtatacttaccagcttcagtaaatttagcatccaactgtccttaaaagccatttgcttctacgtcaataaaaataagaaaatggatattttcctctgtattttaaagtctcctttattgagtatagcgttatttgtatttcacttaagttgaatttttacaattaggtattcttgtaaccactctgctatcaatttatctatcttacactaaaagccccatgaggcaggatccacctctcttccttctgtttattattggcactgcagtactcagtgagtgcttggttggcattcaatcagaatgtaataaataactggaagaattactaataccttttaattaccactagtaagtttttaaaattagtgtaatagaaattaacttatagattttaggttttttttttttaagcttttcaaatgtgtcaagtgtggtttacttcagtc

SEQ ID NO: 21998 - DNA, 1036 bp, Homo sapiens
tgttcatctcatttgttgcttttaaaaatttaaagtagagacagggcctcactatgttggccaggttggtctcgaactcccagcttcaagtgatcctcccacctcagcctcctaaagtgcctggattacaggtgtgagccaccgtgcctggcctcatttgttacttttaaagcagtgattctccacctttaaaaaaaagtattggccaggtgcagtgtctcacgcctgtaatcccagcactttgggagcctgaggcaggtgtattgtttggatgcaggagttggagaccagcctgggcaatatagtgagaccctgtctctacttaaaaaaaaaaaaaaaaaattaggccggatgcagtggcttatgcctgtaatctcagcattttggaaggccaaggtgggcagttcatgaggtcaggagttcacgaccagcctggccaacatggtgaaaccccgtttctactaaaaatacaaaaactagctgggcgtggtggcgcatgcctgtaatcccagctactcaggaggctgatgcaggagaatcgtttggaccaaggtcgggaggcagaggttgcagtgagccgagatcacgccactgcactccagcctgggctacagagcgagactacgtcacaaaaaaaataaaaaattaaaaaattaaaaaaatatattgtccccctgagaagccttgtttgacatttctttgataattgcctctcccacttaatgaaatttgaatccccagacacactgaatatctgtttatgtcctgcagccctttggaggaccgcaaaccattattattgtatctatgaagatttttacttacctctgtggaaccaatttacatctcctgttgaaaatgcatatgtacaaggaattatttttgaaataaaaaagtagattttaatgtttctcatcacagaatctcagtctacatggagatataattggaaatgtgctatttgtctatggccccaaaaggaaagacaggtatttgtgagaaaataggctccaggctgctgtcgtacatgaatgca

SEQ ID NO: 21999 - DNA, 1051 bp, Homo sapiens
gcctgaggtttgtagagattcttaaatctgtgagttggtgtcttttatcagtattggaaaattcttagccattatgtgtttatatataaaatttttgttctattctgtctctcctctcctcctgggacgcttgttacacttctgttcaatgttttgtttccattgtgtcccatatacttgttaggccttttttcttttgtagtttacattctttttctctctgaccttcaatgagatattttctgttaattcatctttagtttctaatgttttccttttttttatttttatttttattttgagacagggtctcactctgtttcccagctagagtgcagtggcactatcaccgctcactgcaacctcagcttcctgggctcaagaggtcctaccacttcagcctcctgagtagctgggattacaggcatatgtcaccatgcctggataatttttaagttttctgtagaggtgggatcttgccatgttatgttgaacttctgggctcaagtgatcctcccaccttggcccccacaaagtgctgggattacaagtgtgagctactgtgcctggtactaatctttccttttgatatgtcccatttgctgttaaaactatctactgagatttttaaaacaagcttttaattttagaatagctgtagatttatggaactgtttcaaagctagtatagagcattcttgtatactcttcagctatttcccctattttattatcttattttagtatggtacatttatttcaactaaggaatcaacattggtacaggtataccccagagatattgtgggtcagttccagaccactgagataaagccagtattgcaataaagtgagttgcatgaattttttggtttccccatgcttataaatgttatgtttacattatactatggtctatcaaatgtgcaataacgtgttaaatgtatgtatcttaattttataactgtgttgcaaaaaaatgctaacacatcatctgagactttaatgagtcataatcttcttgctggtgacaacatgacatcaaagatca

SEQ ID NO: 22000 - DNA, 1011 bp, Homo sapiens
actagccaagcttctgttagttgcttgtgggcctttttctggcctttctgcttttgtgccggagttcctgttcacactctttgggatggtgcccttgaaggcccttgagcctgctctgggatgctatttccctttttagcccatctccagctgttttctactttatggggattcttcacagcttctggccgcctgttatttttttagcatggctgtgtaatcactggctatttaaaaaaatatgatttatattatttctagggtttggtgagaaaaaacggggaaggaggcactgtactctttactcaattggctgtctcgattttttttgttaacattctgttcagtgtctctcctgatatgcttgtaggctttattcatactgttttagaaagatttcatagtgttcttggactgagcagttattttgatttattaattttatttttgatacaaagtcttgctctgttgcacagtgcagtggtgtagacgtggctcactgcagcgtcgaactcctgggctcaagcgatccttctgagtagctgggaccacaggcttgtgccaccacgcccagctagtttttaaattttttgtatagatggggtcttgcccaggctggcctcgtactcctgggctcaagcaatcctcctgctctgtctcccaaagtgctgggattacaggtgtacaggtgtttgatttaagacttaattttgtggtctatcctagcctctttgaaaataaagtttatttcctataaaccaatagaaaacagtcataggatatgagcaggtaatggtcttattcacggcaagagagatgcaaaataaaattgtattgaaaaactgctttttaaaaaaaatctaagttggcaaggatcagaaagtttgattaaacaatggtggctgtggagtagagaaataggcgttgctggtgagaatccaagttggtacaacctctgtagaaggcagccaggcagtatctatcaaaattacagatgcatataccctttga

SEQ ID NO: 22001 - DNA, 1064 bp, Homo sapiens
aaggatctttgggaaggccactcatagacaaaatgtatagcacactgagtttggtggcaatttagacatgtaaaggtgaaggcagacaactggttaaaaaaatgctatttgcagaataaaaggattgccttttaaaaatgatttcattgaggcaggactctggagcaagcctgggaattcatatttagcaatgatagtttgtggtgttttactaattaaggatgttcctggtttcattctccttcctttcttccccagggtttagatgtagattctctggtcattgagcatatccaagtgaacaaagcacctaagatgcgccgccggacctacagagctcatggtcggattaacccatacatgagctctccctgccacattgagatgatccttacggaaaaggaacagattgttcctaaaccagaagaggaggttgcccagaagaaaaaggtaaataagtagttgctcggttttgtttgtgatagtagaaagatttgtggttgctgtgatgactatcttaggacacctttggaataactatgaaagaaaactattctgagcaaccctttcacctgtcttattttggcttttgtaagtttgtttcttgactaataataaatggtaagttttctgtaatcccagcactttgggaggctgaggtgggtggatcacaaggtcaggagatcgagaccatcctggctaacacagtgaaaccccgtctctactaaaaatgcaaaaaaaaattagctgggcgtggtggcgggtatctgtagtcccagctactcaggaggctgaggcaggagaatggcatgaacccgggaggaggaactaggagtgagccgagatcgcgccactgcactccagcctgggtgacagagcgagacgctgtctcaaaaaaaaaaaaactggtagttttatattcagtacctcaggcccgtatgattatctgctgatggccccacttagatgtacatagccacttcaaaatgggccctctccccaaatctaagaagcttgttttcagtaattgatcacatttagttcttttaagtcaagaacctgag

SEQ ID NO: 22002 - DNA, 1413 bp, Homo sapiens
ccggcccgccgtggggtgcgggccgcctggggtccgtgcggactccggaggtccggtgtctagtggtgagtggtggccgcaacgaggaaaaagttttgggggaaagaaaagtcgggtggaggcgtaacacgttactacaagagtgttgcgtacaggagggctcttaaagtgggtcatagcccgaaggtgttgagagagacggcactcactacctgcagccctgacagcaaaggggtttctgtagagcgggagggaggaggtgtagagggttacggttgagttgtgccctgcggatgcgtcgagtcattttacgcctggaagatccagcattggattgaaacaggctgtattttcttccaaagggttgactggattggtgaggcccgtgtggctacttctgtggaagcagtgctgtagttactggaagataaaagggaaagcaagcccttggtgggggaaagtatggctgcgatgatggcatttcttaggacacctttggattaataatgaaaacaactactctctgagcagctgttcgaatcatctgatatttatactgaatgagttactgtaagtacgtattgacagaattacactgtactttcctctaggtgatctgtgaaaatggttcgctattcacttgacccggagaaccccacgaaatgtaagtggacaggaggtagatacccatttcctacttggggcttggcataagataccaaaaattaaccaaaacgttttattttctagcatgcaaatcaagaggttccaatcttcgtgttcactttaaggtatgcgattcatagttgtgatccaacagttcctcatgttccactcaaaaaaggtagctgcagtgatgactttcttaggacacctttggatttaccgtgaaaattaataaattctgagcagccaccttatatttaggcattgatgatcagggtgtaaggatgtagcgtttgtgaaattgagaagtagtaccagaaaaccatttgaaaacctagtgtgcagatcaagatggggcattttaattgtaattacatgatgatggaatttaaacgttttatagtgaataaatggagttttggagttttctctagcttcaacgaagtttacctggcttttagtcacaagtttttttaattgccttgcccccaaagaatagaaataactcgacattttgaaaagctgaaaattgaaaatttaacgtttactttaaaaattaaagctttgatctagttaaccaacactttattcttcatacttagaacactcgtgaaactgctcaggccatcaagggtatgcatatacgaaaagccacgaagtatctgaaagatgtcactttacagaaacagtgtgtaccattccgacgttacaatggtggagttggcaggtgtgcgcaggtgagaattc

SEQ ID NO: 22003 - DNA, 1031 bp, Homo sapiens
taaggggctgtgagctgcggccggcgctggaggatcgcacagtacctgctcggaatgctcgctccgccactagctgcaaaactccaagcgagccagccagcttctccgaggcggttctctcgtccgcaatacgtgggtgataatgtatcggcggcttagggatgttgggaaaactaagagttcacgtagcaaagcacttagcgaggcgcggagctcgtggcaggcgctctcctacggtggggtggagggctacgggaacaccaggcgacctcctcaaagggaccagtgagccgagatttggagtctaagacgcgtggccagagcccagtgtctgccgatgagcactcactccttggcgagtgaaatcaagcatctcctttctctctgttctccatcatttcctcccggctctccttccctttattgatccgggtcctgcggcagaaagcagcgagcggagggagaacttggcccggagtctgcgtctggcgctggggagcggggactgagcccggaacaccgacggggcggctgcgccaacaaccactgcggacgcagggcgggtacgagaggctgagaggctgcgtcccgccatccagcctcgctccagccgggaggatccggctctttaagacgatacccttaaccctgcagtcgcccggaacaggtcctgcccctgcctggggagggaaaacccccacagcagtcccgcgccccttcctccctagcgtcgaggatccagctggagagacctgtgcgaggaaaccgagccggagccagcagatcctgttccgacctcgcctcattacttttgttactccagctgccagcagagcacgctttgtccctcccgtgtgctatcattcattaacaagactcaggcgggctttagttttttagtatagaactcaatggtctgtgtgcgatggtaaatatcacccccggatatgttgttcccactctgtctctctcttcatgaggaaactatacagacataggtctaatgttatctccattttacagatgggaaa

SEQ ID NO: 22004 - DNA, 1031 bp, Homo sapiens; identical to SEQ ID NO: 22003

SEQ ID NO: 22005 - DNA, 1031 bp, Homo sapiens; identical to SEQ ID NO: 22003

SEQ ID NO: 22006 - DNA, 1123 bp, Homo sapiens
ttatttgataatgtatctgtgtagttaaattcaaagagctgaaaagcaatatggtgatgttttccttctgcctttgtccccagtcaggcagttcctttttccgggagcaaccagtgtaacaggtttcttgtggatctttttagagatactctatatctatatatcttgtatctgtctcactcccatctttaaaaaacctttattttcattgccccatcttttcttatacataaggcagcatgctaaacacactgttctgcacttgtgtctttctcttaaagatatctcaaagattgctcccttttgtgtttaaataactccccccacctccctccttttttttgtggccatatggttctcaaactttgcatctagaatcacctggagagctgatgaagaatgcggagtcccaggctcctggaggtgggaggggcctgggcctttgtgttttgaccaagtgccccaggtgattctgttaaagatcagagtctgacagccactgctgtataagccccaccttgcaaagtgaggaataagctggagtgtaatataccaggacagtcatggggttgcagtggggggacagacagacagacggacggacggagggatggagggatttctgggctcatcacatgacttctcttggttcttgagtcaacttccttcactgggcagcttcagcagttgtgtctgcacctaccttttccttctgggtcatgtttctgacgtctgcaccatatgagctttcactctttctattgaaggttcttttaatactttggaatagcattaaggcccaaacattagcctcgtttaaggcagcaagcactctcatgaactcctctctgatcttgggatgtagtatcttctttgtggttattttgtttgtgcttatttttaccttttccaatttgaggagagcactagagaagacagagaacaaaaatagtgtttctgtatggcttgaatctctttttgcctgggatatgtagtctgtgttgaagtactttgaagggggccatggataaggaacttgagactcactcctcctcattgatatttttgcttttccaggaaggaaacagtcatattctggattaattctgccctcagcagcata

SEQ ID NO: 22007 - DNA, 1086 bp, Homo sapiens
gctggggcaggatacgggcaaccagccaggacagatggacctcccttccctccctctactgccctctctactccaaatccccagggccacacgactcttctgtgatgtgtataatcctcagagcaaaacatactgtaagcggctccaggtgctgtgccccgagcactcacgggaccccaaagtaaggttttccctcagctcctcccattttgcccctcctccctgcctcgctgtcccacattcatcccttccttcctcacctcacttttccttcactttttcctctcagcttccctgctgcttcaccctccattcctccttttccatgcctcctcaccgttccctgaaccctccattcttttccttctccctccttgagcccccattcctattctcccttatcaccgctattcatccccccaacctggcctccttgcaggtgccagctgacgaggtatgcgggtgcccccttgtacgtgatgtctttgagctcacgggtgacttctgccgcctgcccaagcgccagtgcaatcgccattactgctgggagaagctgcggcgtgcggaagtggacttggagcgcgtgcgtgtggtaggtttctgtgcggttttggtgctgcatgtggtaggtttccatgtcggacgtggccggggcaggcggggctgcaggtgttcctgcttaggactcctgccgctcccttggcagtggtacaagctggacgagctgtttgagcaggagcgcaatgtgcgcacagccatgacaaaccgcgcgggattgctggccctgatgctgcaccagacgatccagcacgatcccctcactaccgacctgcgctccagtgccgaccgctgagcctcctggcccggaccccttacaccctgcattccagatgggggagccgcccggtgcccgtgtgtccgttcctccactcatctgtttctccggttctccctgtgcccatccaccggttgaccgcccatctgcctttatcagagggactgtccccgtcgacatgttcagtgcctggtggggctgcggagtccactcatccttgcctcctctccctgggttttgttaataaaatt

SEQ ID NO: 22008 - DNA, 1049 bp, Homo sapiens
ccttgaataaaaccacacccagcacccacattccatacaatctgcagtatctgtttcttttaaatggagcaggactttacaatgattacaaaatcattctatattacttttttttttattccagccctttacagctgtctcacctattcataattcagtagcagctttttctttaagatactcatcttttttgcattcatgtttcactagtttatgcagtaatttagataatttagttactagcgtgagtacacctaccacaaacaacatgggaataaacaaaactgaatcatagcaggcctagaatttaactggtgggagcagaagtgagatgacctactagccatgagcacggtgtttttgtcatcaattgagttttacagaggaaagagtaatgttaagttaaagtggtaagataattaggtggaagtcagtttaataacttctgtcagataattgtgaaaatcgaggttcttggactagcaaaaagaccacagattttaagtcaaactaggtttacttctggctctgccacttcctagctatgtgaaaaactctaaaacttaacccataaccagatatttagcttaaaaggtgcattctgtgatttgtctttatatatatcattgaagtagatgttgattcttatgaaatgttttctttctaacaggttgtaaaattaaagcactgagagccaagacaaacacgtatatcaagactcctgttcgtggtgaagagcccatttttgttgtcactggaaggaaagaagatgttgccatggccaaaagagagatcctctcagctgcagagcacttctccatgattcgtgcatctcgaaacaaaaatgggcctgccctgggaggattatcatgtagtcctaatctgcccggtcaaaccaccgtccaagtcagggtcccttatcgtgtggtaggattagtggttggacccaaaggagcaactattaaaagaattcagcagcagacccacacctacatagtaactccgagcagagataaggaacctgtctttgaagtgacagggatgcctga

SEQ ID NO: 22009 - DNA, 1017 bp, Homo sapiens
ctgtaataaaagttggtgaacgtggtcttactcactctcaaatatctttttattctgtactgtacccacctgcatttggactatggttgactgaaaggagctgaaatgatagaaagtgaaactgcagataagggaggggggctactgtaatttaaaataatatcagtagcactaaccaaacgtctaatcaatatgctaagactagtaaagtgtatcatttctgtatatttaatttgtttttcttttctaacttaatcatatttatttgaaaaagtaatgtgtatgtatgactcaaaatttattaaaaaaaataaataagaatatacagtgaaaactgcctccctccttccctgtccccctaggtcaaccacttttatgagtgtatagcattccattatatagctgtaccagcctcatgctaattcaaacaataattataaaatacagaagttattttgcacttgtgcacatatttctacaggatcaattgtacaagaagattgtagaagcgtaagaatatatgggcttataactgtgatagctcttagagggcagtttatactctcacagctaaatatgagagttcttttccccactctttactagcattgttgtaaggtttttgttatttgacaatcttataggtagaaaataataggtcagttcccttgaaaatgggaatttccatcttcagagccatttgtatatttactttgatgttagctgtttctttcacccttttattgggtttttgttgttttgatttgtaggggagagatgtgtgtgtgcatgcgtgtatgtgtgtgtttgtgtgtgtgtaagaaagtgagaaattagccatttctaataatgttataaatattttaggtttttttactttgtttttggtgacttgtgccatgtagcaacttaaaaaatacaggctaatatatcataatacggcttctgaattttatttcactctgagattataaattctattatttttaaaaatatcttcgagttttcaaataaaaa

SEQ ID NO: 22010 - DNA, 1008 bp, Homo sapiens
tttgtcatacatagcttatgttattttgagatacattccatcaatacctagtttattgacagtttttagcatgaaaggctgctgaatttagtcgaaggctttttctgtatctattgagataatcatgtgttttttgtcactggttctgtttatgtgatgggttacgtttattgatttgcatatgttgaagcgaccttgtatcccagagatgaagatgactttatcatagtggataagatttttgatgtgctgctggattcggtttgccagtattttattgaagatttttgcattgatattcatcagggatattggcctaaaattctctttttttgttgtgtctctactaggctttggtatcaggataatgctggcctcataaaatgagttagggaggattccctctttttctattgattgaaatattttcagaaacagtggttccagctcttctttgtaactctggtagaattcggctgtgaatccatctggttctggactttttttggttggtaggctgttatcgcctcaatttcagaacctgttattggtctattcagagattcaacttcttgctggcttagtcttggggggtgtatgtgtcctggaatttatccattacttctagattttctagtttattggcataaaggtgtttatagtattctctgatggtagtttgtatttctgtgggatcggtggtgatatcccctttgtcattttttattgcatgtatttgattcttctctcttttcttctttattagtctttctagcggtctatgtattttgttgatcttttcaaaaaaccaactcctggattcattgattttttgaatggtttttttgtgtctctatttccttcagttctgctctgatcttagtatttcttgccctctgctagcttttgaatttgttcgcgcttgcttctctagttcttttaattgtgatattagggtgttgattttagatctttcctgctttctcttgtgggcttttagtgttataa

SEQ ID NO: 22011 - DNA, 1091 bp, Homo sapiens
ttgcaccctcgtttttcttatgtaaatgatgtcagcatgagtacagaccaagtttgtttaatctttctgattataacaatcagtgctttaggtcctttcatcatcttaattgcattgtgggagcaagtagcctgactctgaacaagcagcttcatcaagtacctccttaatgaagcattttctggtcattctggcctcagtaatttcctttgctgttccagaacaactagcttctatagtctatgccagtggttaccaaactgtagtgcacatcagattcacctgaaggatttattaaaacagtgatgtttggttccaccctagagtttcggattcaatttggtccgaggtagagggaggggtttcatcaggcgatgctgatgctgttggtctgattaccctgtgataattgccagtgtctaccaaatagtttagcatgaaatttggtataatcttgaattatttgtcacatgcaaatcagtatattttgagtacctactacgtgtaaggcctgtgctacctgacattagagatcattagctgtattttaaggacatactgcttattttttatatcctttatcatgttagtagataattggttcatacttattaattggtgttaatcaatacaactgacttctgttttgtctttccttaaaacaatgaaggattgttagaattaacatagatcatatgcaaacatgaggatttaggtggattgtgaaaatctgtgatggagtcttttgacctctctgattgtcttgtgggaatagacaatcttattctgaagcgatttaataaacatggcatgtgaattgttcaatttcatgtccttggatatcctctgtcaaagatattgcaaaagcattagaggtgattagacttggctcttaattaaaagactttttgactttccatatatattaatggaaatgaactaaaaatcctctagactacatttaaataactagataaagaggctctgagattttaatttgctctgatgctttttggccaaaggtgaattctatgcaagagtattgatcatatattattttattgttcagtatgtttgctatgtactatttt

SEQ ID NO: 22012 - DNA, 1091 bp, Homo sapiens
gataaatcactggattacttaagtttgttcttttttttttttttttaacaggtaactttcgaccgactttccccaagagaaaattcctagaaattgaacaaaaatgtttccactggcttttgcctgtaagaaaaaaaatgtacccgagcacatagagctttttaatagcactaaccaatgcctttttagatgtatttttgatgtatatatctattattcaaaaaatcatgtttattttgagtcctaggacttaaaattagtcttttgtaatatcaagcaggaccctaagatgaagctgagcttttgatgccaggtgcaatctactggaaatgtagcacttacgtaaaacatttgtttcccccacagttttaataagaacagatcaggaattctaaataaatttcccagttaaagattattgtgacttcactgtatataaacatatttttatactttattgaaaggggacacctgtacattcttccatcatcactgtaaagacaaataaatgattatattcacagactgattggaattctttctgttgaaaagcacacacaataaagaacccctcgttagccttcctctgatttacattcaactctgatccctgggccttaggtttgacatggaggtggaggaagatagcgcatatatttgcagtatgaactattgcctctggacgttgtgagaattgtgctttcaccagaatttctaagaatttctgctaaatatcacctagcatgtgtaattttttttccttgcctgtgacttggacttttgatagttctataagaataaggctttttcttcccttgggcatgagtcagatacacaaggacccttcaggtgttactagaaggcgtccatgtttattgttttttaaagaatgtttggcactctctaacgtccactagcttactgagttatcaggtgcaggtcagactcttggctacagtgagaggcagcttctagacagagttgcttaatgaaagggtttgtaatactttacaaaccattacctgtacctggcctggcctccaaaatattaacattctttttctgttgaaactcgcgagtgtaactttcat

SEQ ID NO: 22013 - DNA, 1048 bp, Homo sapiens
cagtgttcatataaataagaggggcagagcctgggttagaaggaaaagaatgaatagaatgtgaggaaataagacacaagttctctctactagtgggaggggaagataaagatggcttgagggggaagcagtgtgaataaggacatgttttaagttgtcagtgttcaagtgcatctgtcacttaaaagaagaagtcccaggggaggaggggaaaaatggaaaatgtgagaagagaagttgggcaaattgatggggcaagatgaggaggaggtagaagatgtgatcaggagcacaggtggtgggataaccttaggagggcagcaggattcttatttctctaaaataggaggagatctgaggtggaaaggacgatgttcatagaggctctagaccttcaggcttcacgcctggcttttctagtcagtctgaagttgctctgtaggcttcttggcttgggggttaatattcagctatggtgtctaaaataaacaataaaaaacaggagtttggatatgtaggaattttagatgaacttcccttagtttcattattgaagttcagcatgttcctctggtcagttcactttgttctaatagagattataatttcaaaagggaagatgctttttaagacaatacatgagagctaaaataagttttaggtttttgtgtggctcagtttggtgaattttctccagttttcatgtaagaataagccagacctactgatagctacctgctaatttatggaaattaacatgttccaaataaacctgtctgttctattttgctgctgtacctacatttgaacacttaaagtcattctaaatggagccgtgcctttctcagtagtcagtgacagattcacacatgtgtgggaaccccgatcctgtggtaaataagagagccccttctaaaatctaaaatctctctgtacagacactttctagtttataggttgtgatataaaatttcatgtttcatttatttggaactctacatcttccaatagaaatgatattataaatggctctagtgtcccagaccga

SEQ ID NO: 22014 - DNA, 1053 bp, Homo sapiens
cttacgtcatttcaacccagatcttttgagggtttaatcttccttttagcttgcatagacaggaagtgtttaaaattatttagcaggccacttctccaaaagctttggctgttttttactttatccttatggtacctgacaatttttgctggatgcttttgattgtgctaagatattagttgtctttcctctttctttatcatcaatgtaagaattgaggtaatatttgaccactgtctcaccaataggactgtgcattgggcagaatattggaaaatagtaaaaagacaattttcatgttaatgttttaaaaatcatgatctgttatcccaagtattccagtttagattcagtttgttagtaaaggaaagatgttggttttaattctattttgatatacatatggtagatgactgctaatcagctatttgtaattgaggagatagttggcaaaatatacataggcagaaatgattcttccaattttgctatccattcttagattcattgaattcagttgataatataaattgccaaatattccaattggagaagttatttttattagagagtaaatgaattagacaatgaggtttctatttttgaggttcccatagatataaatgtttttattctttgtatcacattcttttaataagatgttcaagatagtgatattgtaattccttttaaagtgttgaattttgaggcctataactaggattaggcttctgaatattaactaggctttactgtgagaagatctgaaatgtttaatttagatgagaagcaatcattaaaaataataattctgtcttttataaccaacatcctatgcccaggtcatttatatggcagcctaatttgaattctataaaatatataaattacgaatttttaatgtattgactccttgaaaatgccttagctttaaaagtgcaaattagggtatgaaaagaaaagcattaaacagaattcagtagtgatttctacttataattaaaattttaaggtagtgatggaatttgtaaaacctagttataatagggtagt

SEQ ID NO: 22015 - DNA, 1023 bp, Homo sapiens
attttcccttagcattgttgtaaggagtaaatgggaatttatatagaacatctagcaaagtaaatttgacctatgttaattcctttgctttccacactgctcgttccctaagccacccccttcctgagcaccaagccaccttggtgaacagtgttgcctggtggcctgcattggaaactttctgacccgagctctcttgcctcttgtcatgttacattttctgaggggcatggggtctctgcttcatacctggcttcactcaatttgtgcagtttacagtaatataattcctgataattgatacagaggtcaaaatgcattgtttcttcatatcatacctcgcattggttttcatagggacattggcaggtcctttgtttagagaggcagaatgaaagagaaggctaaattgcctctgtattgcttaactatggggtggatttgagttggtcattatgaagatgttaagaaaggtaagaatagcagtagagggagcccaagttagcaaaagttaggaccttgtgtgtgtgtaaatcactgtgatttcagcttcaggaaacctttattctggggttactttgcttcttaaatgcacagaggaaaattcaggtgtatttttctaaaattgccatcttaaaacacagtgctgggtacctataaaaggggcttcagtatttatgaaatgaagagtacttttagattactgtactgttaccagaaccacagtttagttatgttaagtgtaatgtgcagatttattttctgacacttatgtttcatcaaaaaccaaacactaattcatctcttcagtttgtgtgcacttttctgctctagctgcgctggaacactcatcgtcctgcaccatggcatgcgctttcaagactctgcttgctcatacgctgtttgctctgcttggaatgtgcttacccccttccccttcatctggtgaactcctactcatccaagacccagcttcattgtctccatctctgggaagcctgccctgcatactccaggcagaac

SEQ ID NO: 22016 - DNA, 1051 bp, Homo sapiens
cttgatattttttttttaaagctttcctattttggggggaaatcttcagctagcatacttaatgtttaaacaaaatagagaaattttcattcatacatacaaaagtagtgggaactacccagcttaaacaatttgtcaacacatagtcaatcttatttcatccccatcccaatttactactcctgacccaaccttcattatttgaaggaaatctgacgtcaagtaagttcattcataaataagtattcaatatgctatttgagaagatgtaacttgtgaaaatttctaccagtgcagaactcagtgtttcaaagctagaatgaggccaacaggcagttcatgattatttgcctaacataggcaataattactatatgggttcagaggaaagaaaattcctattactgggttctgtgaaggctttgtggaagaggtagtatataaggtggattggtatttctgggctcttggagactaggggtagcatcatgcattatggaccaagtagaagacatggtgcttgcaaagaactgtagaagccatttagactattcagaatagagtgattaaaccaatatggctggagcaaaggtcactaggtaagagtggaaagtagggttgaaaggttaagaggaggccataggaccaacatagtgaaaccccgtctctactaaaaatagaaaaaaattagctgggtttggtggcaggcgcctgtaatcccagctacttgggaggctgaggcaggagaatcgcttgaaggcaggagacggaggttgcagtgagctgagattgtgccattgcactccagcctgggctacagtgcgagactctgtctcaaaaaaaaaaaaggaggccataggaaaaaggatctaaaatgcaagcctaagatgtttggcttttttgcttatggggtaaaagtccactgaaagctgttaagccagagctgttgtcaaagtggtgttttaggaagggctatgtggatagtgtagaatgcaaagagacgagcaaagttagcttatcatagtgatttagacctgaggtgatgcagact

SEQ ID NO: 22017 - DNA, 1049 bp, Homo sapiens
gttttctttccaggactctattggaccaattaaaataaagcttctgattttttgttttaatttcaacttttattttacctgtgggagtacatgtgcaggtttgttacgtgggtatattgcctgatgctgaggtttgggctactattgaatctgtcacctaggtagccagcatagcactcaggtagttttttaaccctttcccctccattctttccccctctaatagtccgcagcgtctattgtttccttctttacgtttgtgtttgcccagtgtttagctcccacttataagtggaattgtgcagtatttgattttatttttatgccttaattcacttaggatgatgaccttcagttgcatccacgttgctgcaaaaggcacaatttcattcctttttatggctgcatagtattccatggtgtatatataacacattttctgtattgaatccactgttgataggcacctaggttgtttctatgtctttgctgtcgtgaatactgctgtgatggacataagagtacacatgtctttttggtagaatgatcggttttcctttgggtatatacccagtaatgggattgttgggttgaatggtagttctatttttacccttttaagaaatgtccaaactgctttccaaagtggctgaactaatttacattcccaccaacagtgtataagcattcccttttctctgcatccttgccaacatctgttatttttttactttttaataatagccattatgactgctgcgagatggtatctcatagtggtttagatgtgcatttctctgaaacaatgttttagtccattatatgaaacaaaatgaaaactaataactctttttttctaattagaacatgctatatagtattttatgaatttctgctatctttgtgatacacatagaggctgaggtgggtggatcagctgaggtcaggagctcaagaccagcctcgccaacatggtgaaactccatctctactaaaaatacaaaaattagccaggtgtggtggtgcatgcttgtaatcccagctgcaag

SEQ ID NO: 22018 - DNA, 1051 bp, Homo sapiens
ggggttggggagtggggagggagtcgaaccaagacttggagttaagaggattttcatcttttgcatccaacaggcagaatatgatctgtgtccaaaagtgaacttgagtcaggaatgaatcaatttcagcataaacaagcacaaaaatttagtctgctggctgactggaagcaaaaaagtcaagatggaatatgatgaattccaacacaatggggcaccaaggcctttaggcctctctttttattttgctttggttttgtttgtttttctttagagacatgctctttctcatgggacttgaagtggactcatctttgtgcagtgctggttttgccatactcatttcaagtattatagacatatgtaatggtgaaaatatatgaactgtggcctttttcattcttgttacttgtgatgcaattaagtgaagataagaaaaaaaaaaaaaaagcagagatttaccatgtatcagtgcctggctttttgttataaagctttgtttgtctagtgctcttttgctataaaatagactgtagtacaccctagtaggaaaaaaaaaaaactaaatttaaaaataaaaaatatatttggcttatttttcgcaggagcaatccttttataccatgaatattacaaaaaaattgtcagattctgaatatttcttctttgtagatttttggaatcattatgagtaaaagtttgttactttattttactatttaaaagatgttattttaccatgtgttaccaagatgaaactgtatgggtagcttttttgtttgttttttgttttgtttttgtttttgtttttgtttttagttgtaggtcgcagcggggaaattttttgcgactgtacacatagctgcagcattaaaaacttaaaaaaattgttaaaaaaaaaaaaagggaaaacatttcaaaaaaaaaaaaaaagataaacagttacaccttgttttcaatgtgtggctgagtgcctcgattttttcatgtttttggtgtatttctgatttgtagaagtgtccaaacaggttgtgtgctggagttccttcaa

SEQ ID NO: 22019 - DNA, 1028 bp, Homo sapiens
cccatttttgtacccttaaaagtaccttgattccatggtgatagtttttcttccacaggaacccttcttaccaaaattcagaatcaattaaatgttctcttttaggagacagccagcctgggggaattgtgagtctatgtaaagtctacatattttacatttaaaatgttttccttgtcccaaaattcttatatgggaagtttacatgtatttacgttgttgtttaaatgaaaatcatcattgccattgccatttccaaaaggactgtttaaaatattggcaagcgtctttttacatgtgtctagatctgattgtaattcccactttaatatcagcaggcacagctgtttggtctagaaatggaggacaggcctcatcgtctcctaattatgaaggacccttacactctttggtatgtctcatttgctaatctctgtcccacccattttcaggtcatgttctttcttgttcagtctcctttactctccaagattttgattttccctgttagtaactttaagtcagcattaagcacacaggtttgcgggagccagagtcattagcctatgcttgctcctatttggagatgggaacccagatactactgtaatggcagccccagggctctaaatatctagtagcagataaaatcctggaagggcaatggccttctccccatctctaggaaagatccctgtcaatgattaaatcactttcctgctatcagagtgctggaactccagccaggtcctatacctggaacatttgattccctctacctctgctttactttccagaataacaggtttacaggagctttccttctcgtagaaacccagtggtatccttcgtggtagagaaatgcctactcttccaggagtgaattgctgaaaatttccatggatgtagttaattattataaatactcacatgatgattcagtgtctgacacttcagtctttctctcctcatgatggtgggggccagaaatatgcaggaaacaatgctggttgtgcagcatttaggct

SEQ ID NO: 22020 - DNA, 1044 bp, Homo sapiens
ctactcttagatatttgagcttgattataattcatagtcaaagtagcctccttgtaaataaccaaaattaaccaaagatttttccttatcttccaaaagcaatgccaagtaattctatccaaattggaaaaaaaaaaagaaaaaggataaaccttattaggtgtcatcaaatggtgttgacataatgatatatatgtttaaggataatgtaatagaatatgtaattaaaattaaagtatatatgaaaagaattgattttaattgttttaaaacataagatgatttaataatatgggtcggagattctttttagttttataataaatatattgatttctgaaatttgggtatattccatagtacacttagcttatgttaatactgaggccagattgctgtcaggctaatagcgtgtagatatattatagtcacactacaatcattccgtcagttttcagtttccctttttcctgtgatgtttctttcatcttgttagattattctcaagaccttctctaaataccttcagtagtaattcacaaactctttgttagttaatagttctcaagaaaattctgagatgtggttgacagaacttagatcattggtttgtttttggattcctagccaaagttttattctttgtttcttaaaaatactcaaaaaagttttttttccttattgtaagccctctggaaatagaagcaaatcactgtttatacatttaaaatgtgatgaaaattacaaaataaagtccagtgaaatatagggcttgtatccattagtgccttaagaaaaatccctgttttctgaagtgcgagtgggcttttctggtttgtttttgttttgttaaagctccaggacctcccaattttcaagggcactttggggcatgtgtagcatttatttgatgtatggatgtagatgcatattttcccacatctgtctctgtggacctatcctttgtgaaatcctaaaccttgtattaatgcttagtttatgattcatggtgttctgagagcaattatataatttttctggggt

SEQ ID NO: 22021 - DNA, 1049 bp, Homo sapiens
gcacacatatgtacccttaaatcatcattcagtgtgatagcttaagacaacatttctgtttgctgctcatgccactattagctacgtttgaagagtgatatactgagaagtttaatttgctggggtttttttctaaaaacattgctttcctgaaatatatagtattgggggctcatagcaaaaaaaccgtagtatatgggttgtgagcctgtcttcgaacatggtgggtcacttaacagcagctgtgctggagagatatttgatttgagaagactgttttgaatcttctcagccctaacaccattctggttttgaaatgggaaaatggaaaagagttttagggaatagagatatctcagccttgaaaggaagcataggtagaaatctttcagttctcactcagatgaaccagcattcctaatctggctaccctcacagaggacaaagagtctgctgggaaatgtgggtttatatttgtagagacacacttcagaggcatgagatagtgttagataccgactggatgcttcgtgcccaacatcaatttggtttgcagattgaaatttaggaaagcttgcagaggagccaatcttttttatatacagcacctttaaaaaaaagactgtccactactattaaaatctgattcagtcttctaaaatattactacattcaagacaacttttaaaatgatcaaatttagatagacatcaatgatgttaaaagataaaagccctcctacatgtaatatatagtgtcttaaaccttattttttaaaaaagggataccacttttgccaaaagtttcaatgtagggatactcaaactgtccttggaagtcctaaaaattgctagttttttttttgtttgcttctttttttgttgtttttgttttttgtttgtagttattcacaaatggagaaatatttataaaattatattataatttgtaatgcacgcaaacaaccatcagaccacacttgaatcagagagttacagttataaattgaggaaagaggatgccagcacaatgcctaatggagtgaaaaa

SEQ ID NO: 22022 - DNA, 1050 bp, Homo sapiens
aattttataatttaatcatccatttactcattacctaaaaaaatcccagctctattttcatagcaatttaacttagtttatgtaagctttgttgtaaatatcaattgcttattacttacaacaagatccacatggcttaccaccacacaaaatatttattttaacttgattccaaaaaaggtctgcagtagacatggtcacacttttctagtagcagatctgtatttctatatttttagacctctgccatgctttttttaaagctcaaataaaattatgactatttgataagagatacttcttaaattgtttcagtatgtatgagtatttgtataacagatactaaaagattggagataataaaaggtttcctttggagtgattatgactacataagacacttatatgttttctttgatacatatttaccatgacaaatagtaataaatctgtcacaatctgttgtggcaactcactttaccccccattttgaagtgggccctctctttcccttataataaaaggaagaaaacttaaacggtgacactgcatcatcaggtattatttgtgacacgcctgtggtacagagactggacttctgccgccattaggctgggtcttcctcccaggcaatcaggagagagaggggattgcctagccctgttttgaaaacactgcagcatctgtgggagagagaaaacgtaggcctggccagacatcatgccatggatctggcaggatccacgaatgtgtgtttgtactgtgtgctgcacctagagacctcacgtcactgtggaagtatgacacgatggtgggataacagaagacccaccaggcagggtctacaggacaagcacagcgtgtcggggggaagcctgtccctctagtgcacatagaccagtacttgctaaggtgattttttttttaaaggaaagcctgtgtgaaagacagctatctaattgcccacgagagctctgcttattactgcagtacatttttatcttctcggttcgtattttagtatgttgctctttttagtcacgtcccaat

SEQ ID NO: 22023 - DNA, 1046 bp, Homo sapiens
cctcttttttctgttctagtgtaaaaatggtgcctgtgtgtatccgagtctttaagaggaaatggacacattggcaaaccagtgcctcctttggctctgtgatgtggctgctgttactactcaactggagcaccccttatattccagtctccccagaaatgctcaggaacagtggagactcaatgacagagggttgagccctcctggtttttcaactggtgaaagagaaattcagatggttaaggagatagcagagtagccagcactccgggagctgctcttatctctgctatgaggctgtgcatggggaagagtagggctgcttggaatgacctccttacttttcatatattgaaacatatttctttttccttgatatgctcctgtattgtttgaattttattttattttattttttgtggtaagcattgttttcttaattaacaatgaaaggttgtagtcaataaactagtacttgatgagatttgagaaaaactacaaaactgtagattgcaagttggcatttgaccaagaaattatgattgtgctccttggatttttatgcttaggaaagagtgcacaagagggaaaaagctttcggtcagaagatacccattctagtactagctggaatggtggtaaagaatacgaaatggtctgaatgtccatggctgtgtgatattggcgtattttgctgtccatgggtctaagtggatggtattatagctttgaaagagtcatggcaaaggagggaacaggtgtgtcccaaaccctaatgaactcagcagattggcctggcattctggcaatgtagtcattcagcggagccgtggggactccctgggtggggacccagcatgcttctggaggtacctgggaggcgctgggagtagggcctgctgtactggtttgactaatgtggtgtaggtgttgatgttggagagttggtggccagtctcaggctctgttctggcactactccagcttgttggtcatgaatgcagattgagattgaatggctccttacatttcccttgaagaaaggc

SEQ ID NO: 22024 - DNA, 1031 bp, Homo sapiens
agtctgtctgtgtatgtgcagaacacagaccctcctttctccgtttgtggggaatacttccctcgggtgaaactgaagttaatttttttttttttccaaacacaaggtgagaagtggaaaggggcagagggtggaagagaggtggatggattggcatgtgatggctgaatttctgggccttgggaggttcgttttgaggcattaatgtccaggaaaattcttttgtatatagcactatgactgcatatgcttttcttaaaaagccttcgtaatgtagccgtggagtgtggagattccttcattcttaatttgtgcttcatggttgtgagtcttgcaagagtctactatctctgtgcttagcgtggtcgcagcaatctccataaacagtgtgattacttagggataaataaaagtgaaattttggaaatttgctgacagagggaaaatagggactgaagatgaaaaatgtacagagtatgaatttctgctttctgtgaaatttgagaatagaacagaccatagtgtgtcttccagtgaatcagtttctcttgtgccgtattgttatttgaatccctgtctacaacatcagctatgcaaaccaaagagaaaggcaaaatctcagtatcttgggcttcaagtctaaatagcagatcacagctgaaatgattccccactgtgtgacaaggtgagtgactcgtggaggggaggcttttgttttcttctgtttactacatgattgagatacggaataggaaaccttcagatggtgtgccctaaggagctccaaaagctgctttatcgtattataacagtgtatcctatggacttaaaggggtgagcagtgctatatggaaacatgcttcttccagtctcaatagccttttgtttggtgtagagacagagtggtggtaagcaacaggtagcaaagcgctgtcctggaggaatacattattattgtgagacgtgtgttgtttcagaaatatatcaagttaaaaatagatatatattttagatttctcctaaggatttaa

SEQ ID NO: 22025 - DNA, 1035 bp, Homo sapiens
taagacactttcattaatttcatatcaaattcatgagtgttttgagctctgggatttgagagtcttcagtgtcgggcctctagtttatttatacttttttttttttcccccagagtttaaacaccagcagcatagcatagtgctaagagcacagtctgggcaaacaaactgccagggtttgaatcctggctctgtcacttgtacctgtgtggctgtgggcaattttctagatctcagtttcctcatctgcaaaatggtgtttctattacctgccttatggggttgtgcagattgaatgaatcattttatgtagagctttgagcagtggttaatacatgataaggacacagctattcttatttggacagggaaggaaaaggcaggcatggaaacgatgaaggactgtaaataataacctcatgtatgtgttcagaactactaaaaagttcagttgttgtttaatgaactagtcctttctacatatatatagattcacagggtaatcagagatggatgggactggggatggggacagaaatttattctgagtcaaacatgtttatgatgagttccctagtctgatgccagggaacaaaaggctcattcttcagttcccagaatgaggattaacagtgaaacagccttgcttggtgttgtcctgcagcatcagataatttttcatcaaggcgtttcacgggatgatatattctcccatatagatgaatctatttcagcggtgggtgaaacacctaccatttatatataatttttaaagtggcattttacaaatgaaaggctacacaaccaaacatgaccctgttattatcctactggtcaaccacaagagggatcatctctgttagagcttatctctagaaatcattttattgataagttgctcgtctgtctctagctctttctaggtggtttagaactgtcatgtgtatccaggggcagtaatctaccaaaggtgatccttcttagaagtatccctatgagtggaatggatttatgagatcatttttttcccttcat

SEQ ID NO: 22026 - DNA, 1075 bp, Homo sapiens
agtctaagattccatgtatacattcatattttaacattgactgaaaatggagcttgtggtccactaaaatcattaagtgtttttaacattaattgctttacatccagggcttccacatctttgtgtagaatgggacttaatacgtatcctcgtctgatttcttcatgttggttttggtctgcaaatgtgcaataattctgtcctttcactctgttgatataggaagtgagatggtgtgatgcttaggaatgcaaactcttggatttatatcctggctctgcccaccctttactacctgggtgacatctaagttgctttctctgagtcacagtttcctcatctctgtgttgaagatattataaaatccatctgttgggattgttgggtgaagtaaatgaggtaatgcatgtataatgcatagaggaatccccagaacatcatcaacactcagtaatttttccctgttactattgtagggcatataaggagttaatggcgctatttttgtgattgtggatcctttctctcagtattctttctggaatactttcagtatctctttctggagagaaagtttaaggcaagtggttcatctgtgacgaatggaagaaggaaatgtggttcttgattttgagttgtgtgatgaacccaaatttaccaggcaatagataggatatgatgattactaaatttgccattgactgatagttaactggctaccttgttgggtctcttgagaaaagaactaaaacaagaacaacaacaacaaaagcttaaaattacctgaaaatatgtctctttacctacacctaattttaaggcagaaaattccaaagtgagccagctactcaatacaggtgctgaaggttatgtgaaaattcgggttaacactaatgatagattgagaggtaactgtttgctttacaaaccgcttgccaaggaatgcccatattagactatgaaaattagactcatggcaaattttcaggaacatgattcttgtgataaacaagctatctggagggtgatgtgtgagctcacaggggagttttaagaacaggtttccattgttgga

SEQ ID NO: 22027 - DNA, 1032 bp, Homo sapiens
gaataatttttttaagagaattgactcttatgctgcattaaaaacttcccatcgctataatttctcacacacccgatgccttcttgattggcttgcgtatctgaaggctagattcggggaacaaagattctcattgattttgcccaagctgctgtttatttaaaatgaaaccacttttcagatgagccatatttggtgttatgttacagctttacaaagaaaagatagatcattttcaagaaattaacgacaattaatttacaaatgataataaaaacaaagtaagatctattggtgtaggggacagtttgaactcatagcatatatgctgtgttctaaaccgcactttgtgtccagacccagagcccatgttgtgacctttgtggatattttccttctaccaaaagaaggtagtagactttagcataagtgtttgacaacactccagtctccactttcagaatgtttaactggtttttgttaaaactacaaagtatttgtttctgtctcaaaggcttaattctgctgtgatgtcgcatcagggtaaaagctatagcatcagaaataaatcagccactttattggagcagattctctattgtcaaatcaatcaagcctgtgactgaattaggcgtctgctacagaaataagtgacactaattttataggaaagagttattaactgcagatgacctgatttttttttttcctttttttggtgaactgttcatttagtaaggttttattttattgcaaagaaagaaaaaagtactggactactctttccttttgagagtggattatcattaattatgtattttgttctttatggcagtatacaattttagggaaatgataacaggcattgctagtatatttgtttataacctctatggtaatgaaacccattattacaactctgaacttcttgatttcacatgaatggttttgcattttacagatttttaaacataatacttctatttggcactgaaattccaaaacttagttcatttgtgtctctatttcaca

SEQ ID NO: 22028 - DNA, 1925 bp, Homo sapiens
tctcagtttgtgtgagggctcagccaagggttcttcctggactaggaaattagtaggagccacagatgtacgcagtctgtgagtctccataatggtgtagaggatatttaatagtgtctgttgttgcaggaagaaggttttgaggcagtgtagacttcattgtgtttcagaatgattatctttcctggaagaacttgacatcctatctctgaacgcattctgaatgtgttgaaatttttattaagaaatcaatatatttccacaagagcaggaatctgtagacttagagcaatgcaaaataccatttcaggcatttttctaatttcataaaactctagggtcctgggtgattggcatgttgtaggctcagagtatagaaaggacaactacacagctctacgtcaaatcaatctaggtaactttcatacttgtttatttcaaatcaagctgaaagttacatggtatttagtctgtgttcttagcttgggactctgatcagcatacataacttctgacaacatgtcatttgtgtattacacatagaagtacactgagatataaagagaatactctaatggtaaactaagccactgaataaatctaatgcttactgaattcttactctgatagtgttatacagggtcacggagaaggtaggattgtttaacctaaacgttttgggtgtttctaagatccaggagagtatttaaaaatcactgacctgtttagcagaacaaggagtcataaaaatgtaaggctcagattttcttagatattggagggtattattaaattaggcactcatgataaatactggtgactatggtagatatttactacggatcaagtactttcctaagtgtttaacaaatgttagttaattcatttactttaacaataactccttaatcttgcaaatactatcatccccttatcttctgttagaatactgactttggggtatgtcttgggttttcacttctgttctccttgactcaagaggccattacattttcaaggctgacagatgtccccagggcaaaaaatgtgttttcttcttccctgggttccagccttcactttgattttggctccctgattccttgttatcttgtctgctcagtattttaaaatttttcaaaaaactgttatccatcatttttagttttctgtgggagagttgtccaaatatactagcctgccctatttccaagaatggaaatcaaacttgcttatttcgtagttcacaaaaatgagtacggagaggccagtgacttgctcagaccagagaactggtcactgcagagtccctgctgaaatccagctctttatcccaactcccagtgctgtgttttctaaagtttgtctagtctgtctgatagttttgatcttgctgaccacaagagcaaagtggagctttgagtaatcggattacaagtgtaatgaatgtggatgggaaatcgcagaaggtaagaattatgtctgaacatctttcccctaaatagagtgtttggtcatagttctgcccaaactgttgtgttttggcactgatctgtcaaatactttatttattatttttttttttgagacagtctcgctctgtcacccaggctggagtacagtggctcgatcttggctcgcggcaacctccacctcctgggttcaagcagttctcctgcctcagcctcctgagtagctgggattacaggcgtccaccaccaggcccagctaatttttgtatgttcagtagagatggggtctcaccattttggccaggctggcttcaaactcctgacctcagctgatctgcccgcctcggcatctcaaagtgctgggattacaggcatgagccattgcacccgaccaatgtgtcagacactgtagaggggactcatgcagaatgaatcaaataagatgaaaatttg

SEQ ID NO: 22029 - DNA, 1028 bp, Homo sapiens
gctgagctataactgccatccaagtaagtgacgcagaatgcctaacccaatttgtatcttgctatcacctgatcacagaaagctgtttcactgtagaggtaacagttgttttctcctctgtcctgaggccaatgattatataatatgtatcaaatcactagggtgcatatcaaagtgagcataaagaggcaaatatttccctttacaatgaccatataagagattatttctgtcaggggataaggcatacatgaagtctgactgtttcactgcatttttactatagaaatcactgagcttgagacttgtacattaactccatctggtcatgtgactggcaagtgaagtgtttcaatgtgttaagaggactgatctgcatatttcttgctgaatcttaatctgtacttgcatatttgtgaaacgaatgagtatttaaattatggagaaaagatgtattgtgccaaactaacctttatagcatacctgtggttgtagtttctctagctaacagtggacaagatgaaaactcattatacattttcatcatgttaggtattcttctcaaagtcacaggagcactgcagaatggttcgtaactttatgaattcagctggcattttggatatatggacggcccctttgaggggctaaagacacagccatccatttcaccaagagtcgccgagggtgccttattgcccctaccccgtgctgggtactgagggtgggatagaaggcaaaccagacacatcccttgtgtttatgcagctttttcttcagtgggcaagacattacttgagaatcctaaaaatataaaattacgtctatgacaagtccaatgaaggagaaggacaagacacttgattgaggaggacatttattgctagtcaggggggacaaggaaagctgacccaaggaaatgatgattcagctgagttgatagaggagtgaaatagtcatagtaggaaagtggagtggtgggagttgggaggaaagtactgtatttgaagaaccacgtgttcaagttc

SEQ ID NO: 22030 - DNA, 1025 bp, Homo sapiens
tgagctgctttgttatgtagttaccaaggatgatgtaagcttctcatccaagttttcctttactatgctgcattgtcctttaaatgtcatgagaatacaaatattttcaaggtagcagtgaggaacaatctagatgagatgaccaaaaggacctctcatatgaaactgcagtgagcaaaggtttattggtctttggatctctaaatagagtgactttagatatctaaatttagtgaaaaccagaattcagtgactttagatttcagaccataaggggttgtaacacctactccttttctctgtaatgaagaaaaatgaccacaacaatgtggtggatatcagaaatagaaacttttcatcgtcatgcattcctggaaattccaggttagaaaggcataaaagagagagaaaacctgtcatagttagtatatctaccttggttagtgtttttcacttaggggattgcaaattcatatgagaattgctgagagaaacaattaatttagaacaaatattctccttccattgttacagcctgtaaaatgttacttctgagttgctacttatctatcaccatttctctttctccacttcattgttagtgtttgtatgattagggtgggcgggggtcttctggatggggttgctcacactccacaaagccttttccctcttctgttgaaagaagacacagctgaaatcagtctctttgccttttcatgatatggggatgcggtggaatcaaagcaggcaggatgaaagcccaaaagcttcctgtttccagctgttttcttcagcgaaggttttttttttttctcccaaagatgatgcttcctttcaaggggtttttaatctgctaactgtttcctcagtttatttcactacagtaaaatgtgttccctttaggtcatatctgtctcttttaaaacccaacctgtccttttcagccgtgttagttgctactcaaaagaacaaacgtgatttataaaagtccttttaatgaggtacaaagaccaataaacctt

SEQ ID NO: 22031 - DNA, 1048 bp, Homo sapiens
gcttttacatctcttcacaaatcttttgtgttgacacctattttatagaaatattctattttatataactgtcaaatgtgatgttttctagactccacttgtattttttatagggtgaaaatgtttttcaaagtataatttccctctgaattatgagtacatatttccctatattttattgtgcagatttttttctcactacacagtttttaacatgttaaactttaggacgctgcaaatctgcctttcttaatatattctgtgatgttgaggctaactacatatattttgtaaagaggtatgctggtctccatgtcagcctctaccaataggaggcgctggagggagagtagaaggctagaggaggaagaacttggcctttcctgttcttgttatcatcactctggtaacatcagtcttttccagtttttagttttgtctacattcctaaaattaacctccttggagataacagccccagtctgctggtgtctcttcctcatcacgtctctctgagcttacaggctctggaaacccaaccgcttccctgtttccccagccgtggggatggtagctgtttccatccgactgttcatgggtgcttcttctcaagtctaaagccagaggactgtaaatgtatgttgtttaagccacacatccaaccatactggttcaggaaggcagcggtcttccagtagttagttagctttctaaaaactccctttaaaaatgagactttagaaagaggatgacaaatcctgaggactcgtgtcttaagcaaattttctgtctagatatttattataaacctaattgcatctgataagtgctgtgtatgtcatactctatcaaaggtaaaagggttattaaagtaacctgcactttttagagcaatggtggatggccttgcagaaggcacatggcctttatcagtcaactcactgtggggaagctggagaaataaagttcaggtgagagtaagccgacagttctggtgtgattttcttgggaggataacgtataatgtaggtagcaaacacatgggaga

SEQ ID NO: 22032 - DNA, 1033 bp, Homo sapiens
tagtgacacctttgctttttctgttgttccaaagtacgcaaactgttttatgcacaaaattatcaaaaatattttgtaaaattacctttagcccatgtgtgtaaggtatacatgaagctgcatatgaaacataaaatacatttcatgttgaaacttggttctcaccccaaagttgcctcatgtatatgcaaatattcaaaaatcccaaaaaattagacatccaaaacacttctgatcctaagcctttgagataagggatacttaacctgtactgggtcctcagtgcctggcacagggtggatgctcagtaagtattttcttaaaagaaagaacaagggaaaggtagatgagacgataagaggtggaggtacagggaagaagaacacagaaacatggtgatgaaaagaacagtctgataccttatttgggccccagaaaatgattggtactgaagggattttattagtggtcatttaagaaacttgtgttgtactgtttttgtgtattggaaggaggctagacattgttacatggaaattcacagttacattttcactaaatgtttcattgtgaaaaacgtcaagaaaggttggagaaggtctaggaaaacttatctttgaagatactgtcttatgaatttccagctcagacttgcagcttttgggagctgaggctatgaggtgatcttgagagcagctgaggaggctctaatgggttccagctgtgtgcccagagaacccaccctctcaggataacattaaccaggtagaccctgccctgactgacttcctctgggctttatgggtccccgtggtctgttgcattgatcttgcattttcaggttttatagcaattctaaacatgtgagggtacatatttgctctttgatgtgccctttgatagaagccagagtgctttacctgagcctgcctgtaataatgggggaaggtgggttgcatgccctgcagccatacgctccctgggaggctggttttattgcggttgttgattggcagactttaatcaggggtgt

SEQ ID NO: 22033 - DNA, 1026 bp, Homo sapiens
gtttctagaactttcaagagtaattgttttctgtaatttatagtaggaaaatattgatttattaatagttaaaatgttctttgggatgcttgaagaccatgatgtgaaaaacttaaaaaaattagcattgatgttgtttctatatatttgccaatgggagtactataactttgaaatgtaggggattgtttgaaacatgaattgtgaaaaataacgcaactttagttattttatattgggtccaggctagtccgctgaagagtatgaagtacagttttatgtaaaatatatctcagattgagaatgtggaaacactgttctttaaaaaaataaaatcttcagtaagatccttttatgaatttactggtttgttctcatttgtcatcggactgtttccagatgtaaaatattactttcttgaaattgctgttgagtctactatcaagaccaggtgcatgttgttttacagctattttacttctgatttttaatgctgaaactcatagaatgccttgaactgataatttgtttaactctctacctactaattggaccaagaaataactttgtatctttatctcttttccatttcatgttttatttctgtttcaattagtgtgtgcctttggcaaaaaggagatgattttgctttctgttttaggatttgcctccaagaaaaaatatattttattgccacattttctcaattgatccagtagagttcacagacaatgaaaagagtaagaaaactaatttttaaagcttggtagtgttataattttcttccttataataatcagaaaaagaatttgtataacttttgtttctaatatagcagttctgaaaatctaggcttacacattttccttcccattactgctgtttatacttaagtaaaacaaaaatggtcgctgcaggtttttttctcattttagtgcagagtttgaattcttcaaagactgctaaggttttcccaccttaacaatttatgacagacccttatatcttcataggctgagtccgctg

SEQ ID NO: 22034 - DNA, 1055 bp, Homo sapiens
attatctctactcatttatatctccattgttttaggtgtctgatatctcaaaacaattctttataattttttagctgtaatttcgtaattatagttttataattttctccatgaagttttacattttctgatgatttattcttcagtaccttatttttctgtttctattattaccagtatatttttttaattattcaaattatttgttacttgtatatagaaagtcttttttaaaatttttatttattttttatttttagagatggaatctcactctgttgcccgggctggagtgcagtggcgtgatcttagctcactgcaacctctgcctcctgggttcaagtgattctcttgcctcagcctcccaagtagctgggactacagttgcccggcaccacacctggcattcaattgatttttgtatatcaattttcatattcagccatgttgctgagctctcttattagttctaaaaatgtctttgtgttttccttagagttttttctgtagatctgtcacatcatgtgtgactcaagacaattttattgttttttcctttcaaaccccaatacttggcctttttttttttttgtctttactgtgctatatatgaccttaagtacactgttaaataggaatggcaatactgattatcttgtcttattcctgattttcaccatgaatagtgatgttgatgttgatagatacttgattaagaaagtttcattctattcatatttcatgaagagtttttatcatgaacaggtattgaattttatcaaatactttttctacataaaattaaatgatgacttctttatttcctttaatctgttaatgtcgtgagtgacatccgtatattttcctgtggtaagccacctttgcattttgtggatgaaattaatgatgtagcttcattactcttttaaaaatattgtcctggactcaatttcaaatattttcttcagtatttttacatctatgcttacaagtaagattggcatataatatttttttcctcctactttctaagtctagttttgtctacaaagtta

SEQ ID NO: 22035 - DNA, 1033 bp, Homo sapiens
tgggaaagaagatatatcagttaaggctcattgagttgcaagtgccagaaaaacccaactgaagcttactttaaaaaaggaatttattggctgcattatagaagtccaggggcagttctgcctacaggggatagctgtatccagtgtgtcattaataaatggatttttgcatctttccattctgttcgcctccctgatagcttcattcttgaattgaatgtggtggtgtgatgactgacagtaccttcaggccaatggcattccagattcctgcctgctgcaaaagtagcctattttcttccaacagtttgaacaaaaaaaaaatcttgggcctaattttcctgggtttgaattgggtcatgtacttaaccttgagccaggagaatgtagtgtgctgattgcttaggtctgggttacacagcagccctagagctggcggtggagccagacgcagtaaagcacaaggacagtgtgtagacaggaatggacgctggaccaccaaaacacagcaatgggcactagagaagggaacctaaaatgtgttgagtgccacctatgaggtgtttggttcgttcaccttttctcatgcaaagttcacactcttccttggaggaggtcttgatttccaccattttgtgaatgagtgaactgcgatgcagagaggtgaagtaatgctcccaatgatgcacactagtaagtggcggagctggggtttgaacctatgccttctcaactctgctagtattctccatgcatctaactaacatccaaaaacagttatctggccaagcacagtgactcatgcttgtaatcccagcactttaggaggccgatgagggaggatggcttgaggccagaagtacaagaccagcctgggaaacaaagtgaaacaccaagtctacaaagaagaagaaaaataaaaagaatggggcgtggtgatgtgtgcctgcagtcccagttacttgggaggcttaggtgggaagatcacttgaccccaggagttcaagactgcagtgagctaagatcagtctgg

SEQ ID NO: 22036 - DNA, 1057 bp, Homo sapiens
caattcaaaaccacaatgagataccacttcatatccacagggtagctagaatcaaaaattcatacaacaacaagtgttggtgaggatgtggagcagtcacaaccctcctacactactggtggggatgtaaaatggttcagctcctttggaaaacagtttgacaattctttataggatgaaacatagatttaccatgtgacccaatcgttccatttctagttatatgcctaagagggaaaaaatagtatgcccacagaaatacttgtacctgaatgtttatagcagcattattcataatagccccaaagtggaaacaacccaaatgttcatcaatggacaaatgaataaacaagacatggtgtatccatccatgttggccaggctggtctcgatctcctgacctcagatgatccgcccacctcggccttccaaagtgctgggcttacaggcatgagccaccacgcccggccttggatttcttttaaatgtggtagaaatgttttaaaatttattgtgattgttgtgcgtatctgaatatactaaaaatcattgaattctacactttaaatggaggaactgtaagatatgtgaattttatctcagtaaggctatcaaaaagtaaataaaaataaaaacaatgcaaattatacatgattagcataatagtaaattagggagagaaagatttcatctgaatgtgaccctcagtttagagattgatatagtttggatttgtgtccccacccaaatctcatgtcaaattggaggaggggcctggtgggaggtgattggattatgagggcagacctcccctttgctgtcttgtgatacagttctcatgagatctgctttttttttttaagtgtgtagcacttccccctttgcccactctctcttccctgctgccacatgaagacatacttgcttccccttcacccttccgccatgattgtaagtttcctgaggcctccccagccatgacttctgtggaactgtgagtcaattaaacctcttttctttataaattacccagtctcagttagttctttatagcagt

SEQ ID NO: 22037 - DNA, 1042 bp, Homo sapiens
ttgttaatccagattaattccttctgtacattactggaacgacttctaatgggcaacagttccctagcgtcactcttaaatatacagccagagattatcaaagtgctactgagagctttatcagtacagagcgttagttgctatatactcagtttaaatgtggcagcacagaatacataggtatcccactgtctctaatgattgcatctggcaggcagtctagaacttgaggaagagtttccttaggcctggcaattcctagatgaagaggctcccaagagacccttgttgtggaattgaagatggagaacatcttgagcactctcattctttttggtgcatctacagatcttactttaattcaattatagaaaaatgtattagattgcataacagaggatgatcttacaaaattgtatgctgtttttaccaaattgcaaacctggacaataggtattttaactggttgttttccaattactattttcctgtctcatagcgtgattaccttttggggactgcaggaataattatgcactttagagctgttatgtctagatgtttcacatatgtattatgacaggtcagaagaagcagagattaagcatctacatttttacgatatgaaatatgttttattgggaaaatgtgtgagcaacaaagacgtcttggctgcctgctttacctttttgaattagatgccattggacttggctttaagtgtgccttgtgtggtttattcttaacttagttttttataagatctattactattatcttattattttctcatatcattcattaatttggctctagtttcctgtttcttacctcagtttatgctatttgattttcatttttttctgtaaccaccattctatcttgtttaccttcttaccagctagccattcagttaaagtttctctaatttgcatgaataattatccatctaactatctgcctccacctcgtgtttaacatccccctcacatcccttctagcctagtattttctcttttctgactgtcaaactacgtttttg

SEQ ID NO: 22038 - DNA, 1050 bp, Homo sapiens
ttctgtcatggttttccattttgaaagtctaaaccagcactggtctagtaatatggtagccactaggcacacttgtctattgaacattttgttatatgactagtgcaactgaggaacttaatatttaattttatctaattttaattaatttaattttaaattgccacatgtggctaatgagtatcatattgaatagcatgggtctaggctgttttatttaattaattttttttttttttttttttgagatggagtttcacacttttgtctaggctggcgtgaagtggcatgatctgcaacctccaccgtccccctggcccctgcccctgccgctcgtttgaagcagttctgcctcgggctcccaagtagctgggattataggtgcccaccaccacacccagctactttttgtatttttagtagagagggggtttcaccatgttggccaggctggtctcaaactcctgacctcaggtgatccacctgtctcagcctcccaaagtgctaggattacacgtgtgagccactgcacctagctaggatatctgttttatagactgttgcgtattctggattaacctgattattttcccatgattggcatgttgattataaaggtagcaacatttatttctcattgcaggttttcagaatatgtcagtttccagttatgtcaactatgcaatgtaataatgccagtttgtcccagacagtttttataacaaaatactttaatgcacccctttaaatatgttttgtgggctgggcgtgtggtggctcacgcctgtaatcccagcactttgggaggctgaggcgggtggatcacctgaggtcaggagttcaagaccagcctggccaacatcagaaaccccatctctaccaaaaatacaaaaattagccaggtgcagtggcacactgctgtagtcccagcaactcgggaggctgaagcagaattgcaggaggcggaggttgcattgagccaagattgcgccactgcaactccagcctgggcaacagagggagactttgtttcaaaaaaaaaaaaaaaaa

SEQ ID NO: 22039 - DNA, 1048 bp, Homo sapiens
tggacggtaggaggctctgaagataaattcctctcttctggaagcctgcctattttaatgggtttgcttttccttttctggtgtcatgcaatccttttcacatgtccatcctcctgccacttcatcctatgtaaggtgagacctcgcctgagatgccagaagggaagcccttgaaccagcctggagcaaacacatttgctttgctttttttttgagacgggtcttgctctgttgcccaggctggagtgcagtgatgcgatcacagctcaccgtagcctccacctcctgggttcaagcgattctcctgccacagcctcttgagtacctgggaccacaggcacacgcaaccacgcctggctaattttttgtatttttagtagagacggggtttccccatgttgcccaggttggtctcaacctcaagtgagccactcaccttggcctcccaaagtgctgggatcacaggcatgagccaccgtgcctggctgaaacccatttttgtatgtggggattccggtgctgccttgcctcctctgaccgtggcctcacttccttattctttcacctggggacggagcacgctgcttccaggtttggctgctggagcgtccttgtgggaccgggaaatgccacagtgtcataaggataagtcaggtatggggaggacattggagagttgagaaagaacactgatctagcacactcttctcttcccctgcgttcccttctgacaactttttaaactttattttgaagaaatttttagacttacagaaaactgattaaaagagtacagagttaaaagagtacatataccctctactcagcctctcccagtgttaacatcttacacaaccactgtacagttaccaacgctgagaaaccagcgctggtacaatactattaactgcactccaggcttcatgtggatgccacttgtgtttccaaaaatgtcctttttctctcccaggacccagtccagggtcccacactgtgtgtggctgtggggtttcctcagcatcctccaatctgtgacagtcctgatact

SEQ ID NO: 22040 - DNA, 1062 bp, Homo sapiens
tcccgaggggaagcagatccacagcgcgcatttgcagtgagccattagcgagctttagaagtttcccagcaaattccctaggcccctgaaactgttatgatccattttgatgataaaccaatgctgagaggctggactgtttgcaattttttaaaaaagagagttcggatttttgagggttgctctgagatttttggtgtaggcttcattttaaaattattttctttttccttccatttctttcttcccttcctctttatcctcctttcttgttactcactcagtgctttgcagatcatattctaaaggaactggaccattttccacttgagaagagaagcgaggtggtcattctgttttctgctcactcactgcccatgtctgtaagtaagaacattttctgggatgacctagtgatagaggattgggtgatttcattttctaaatgtgtaaaatgggtccagcttccattatgtcctaagcccagtgcaagaatgaattctcaaatctcagacttggtgctaactagcctcacttcttaaaacctcgtaacaatgaattcaaattataatgttgtaaatagatcttttcctcttttcttttttttgaaacagagtcttgctgtgtcacccaggctggagtgcaatggtgcagtctcggctcactgcaacctccacctcatgggctcaagcagttctcttgcctcagcctcccaagtagctgggattacaggcacccaccaccatgcctggctaattttttgtatttttagtagagactgggtttcaccatgttggccaggctggtctcaaactcctgaccttaggtgatccacccgcccaggcctcccaaagtactgggatttcaggtgtgagccaccacacccagctcctcttttctttaaaatgataacttgaagatatatataagactttctaataagtgggacagttaagagaaggctgcttttgcctgccctgtcagcagagctcagcttgatgtttctgtgtgttgagtgggggggtctccattcagacaagcgctctcaatcccatgcttttg

SEQ ID NO: 22041 - DNA, 1069 bp, Homo sapiens
ttggttcctcaggatatgcccagttggagagtaccttgctgctttttctccaatatgtgtttacaggttgtctttagaaagcatttagaaaacattatcagttctttccagggtattttactctgtctcactttaaaatgtggccacctgcccttgtctttatctgcaagggcagcctttctacctcttagtatgcatgatttgaggaactcccagaccctaggcatttagaccgtaaccttcagatactggacaggtgaaaagaaaatgcgagaagccggttgacctgcagcactggggatgtcattctgatcatcgtattgtttcaaagtagaatcgaaagcagtttctacttgcttgctaaacctcagctcaaatcaccaagagttgcttcaagggatttgatggtattgtaatagttggcggtttttagcacaaagcacataatctttgaacaatcagtcatttggagtttgcttatgggatcatgtcctgtgatatgttttaactgctagtgaccattttatgcaaggcagcacgaaattggtggccggaaaatggacagagcgctaaaaatgatctagttttacttccttcttcttttttgcagtacccaaccagagaatactgagtccgaccagcctttctgtgcacacatgtgcttctctcgcctaatggcattctgcttctcccttgggaatgtgttcccctggctcttagctctctgggtcaagttaggaggaatgtcgtccttgtatatatctaggtataaatgagataaactcccgtcttttccttcactttaacctaaatgtttcttgtggcaatttatgtcacattcatagttgcagcccctgctaatgctttggacagtaacattatcatggtcttattatttattacctgacactcatgtagtgattctcactatcatccctgagtgtaagttatgtgtaatcctatgaaaaggcaaggaaacaagactaagtaagtttaggaaacttgtagttttatgactttatacatgcttaaacaattatgtggtgtggatgtttttgaactacaagaa

SEQ ID NO: 22042 - DNA, 1049 bp, Homo sapiens
ttgctgagaatggtggtttccagcttcatccatgtccctacaaaggacatgaactcatccctttttatggctgcattagtattccacattttcttaatccagtctatcattgatggacatttgggttggttccaagtctttgctgttgtgaatgtgtaaacttaacactgtatcttgtttcataacgttatatcgatatataggtctggctcattttttgattactatttagaactgcatcatatggctgtaacttaatttgtttaatccatgcttcatggtggacaattagtttgtttacagtgttgcagtgaacattcttgtgcatacatctttgctcctatatgcaagtgtatctataagattaatagactttattttttaaattaagagaaatgtctacttcatttgtcttatatcctagttctcgttaggtgtgggatcaaaatgtgttacgctagtagctagcgcacatccaggtttctctgcatgggtgttgtgtgtcctgaatcttcaggtgtgctgctggaacagcttgtggagcacagctgggtattcctcagagagggtatagctttagctccttattctacaacaagagagctggctattgtcaatgacctcaagcttctgttttaaaggcttaatcttgttaggctctctaaaattttgctttttttcttttttattgagtagaaaacatttctcaggttgctaagctggaataaaatccacttacctgtatgttaaatgatttagtaagctggcaccattcatcgccaaacgccgaacccccaagattcaagagcagtaccgcaggattggaggcggatcccccatcaagatatggacttccaagcagggagagggcatggtgaagctgctggatgaattgtcccccaacacaggtatggtgtttcttcattaacatgtaactagattagttctttcgaagtagttatgaaattcaaaagagtagtagatgctaaatgcttcatatgtactggcaactcaatttgtggtgtttctacataatacatggtcactta

SEQ ID NO: 22043 - DNA, 1041 bp, Homo sapiens
atcacgtgactttctcctccctgaaactctctgcttttcataccaaaaacccctccacctttggcacttgtgtgacctgctcagttttggagacaaacaggaggctaattcaattgcttaaatatcaacttgccctcttaaatgtccttcagccatttcaagcgacccagtttcccaccttgccgttcagcccctgccaccttgctgcctcgtaatggttcctaaaaatgttgtccttaatacgtagagtagttcaactctgtgaaaagcaatcttggcagcacagtgggatcatttggggaccttaaaaataatggtgtttgggccttaccccaggccagttgaatctgaatttcagaaatgggaccagggtattttttaaaagctccccaggggaggttgttgcacagtgaggttgacagtcgccaggtggcttcctcctacttctaaactcaaccttaagcctctcttattattgctgtaggttctctattgattttgtattaatctctgtagttgaaatgggaacactgagggctgagaaacttcaaagcttgaattttgaattgccatagaataagtatatttcatccagcccttctgggaaaaaagggatgtcatgatatacaaatactgcaatttctagtatttggaaattgctggttaatgactcagtttcttatgctgaaaagtttccttctgccttatggatcataaccaatgtgatgatcaggtgaagaacatctttgaagagatattgataaactttgtttgtgggacaaagactagtttctacagtcaaaatcaagtttgtattggataaaacttgtcttagtaccccaacttacagaaatgaaggtgttcaaaagttttagctttttttcagtatttacctccaaattgctaaataacatgcttatattactttattgatttttcagttttaggcgttatttattgcccttctctggcatataaggatttcatttcttccttttcctatccccaccattcgtgttcacccttctcatctccccaagt

SEQ ID NO: 22044 - DNA, 2463 bp, Homo sapiens
taagaatatgtttatttctttttgaaagaaattattctttacacaaatgtgtatgggttaagggtaggtgtgtatcctctactctgttgaattgataggaggaaggactggtacagggtgaaggagctgcttctgtcttgttgcgatccaagttgtaaatgttaatgaagtcttgtttgacctcaggatatcccagaagctcctgagagactgatgacagacaccattaatgaaccaatcttgctgtgtcgatttcctgtggagatcaagtccttctacatgcagcgatgtcctgaggattcccgtcttactgaatctgtcagtttctgtttcaaagagtattaataattttgctttttaagggggtggggactgtcatctggaatcaggtacagctcatgccaaatatttcattctctatctagaataacaatatttaaagacgttgggttttttcaccctcccctgattgaagttgacatgctttgttaaattagagaaatgtaaacatttgaatattacatgatcatagtggctcctttagcccttggagcttaattgtaattttcatttaaactctagggcagtgctgtgtctgatcgcttgatagtaattgtgtatcttctttcacttatatttaaaggtcgacgtgttgatgcccaatgttggtgagattgtgggaggctcaatgcgtatctttgatagtgaagaaatactggcaggttataaaagggaagggattgaccccactccctattactggtatacggatcaggtaaaaccaattttttaagtactcaacatttttttccactgtaatcgttctgtatatattgaaatttttaaaaggggagaattcagggtagtactttggtatttgaatgagctatattcagtttgcaggttataatgtggtgtgtgaatattgccagctttgttttggccaagttatatgttaatttcatttgaaaacctgtttaacggccggcttgttgattgcaactgagttttaaaaaattgatcctaccagtatctagtacccttcttcattttcctcttataaatagacattgacttattttaaaagtttttaaaaatctcttctttccagggtagtacttattccctggttgattttttcataccaaattatttctttatgcatggttcatgaaggcatagagattaagtgctgggattacaggcacgagccactgaatctggccatagttgaattcttaaccacagtgagctaactcctttcatggtggaaaattttaactgtcttagatgaaagttttaacttaagtatttactcctctttctttctttctttttttaaacagagaaaatacggtacatgtccccatggaggatatggcttgggcttggaacgattcttaacgtggattctgaataggtatcacatccgagacgtgtgcttataccctcgatttgtccagcgttgcacgccataaccattttctccagaagcgtggaggaaagattatgaaaggaacaggctctttaaaaaagaaaacaaaaagccagaatcttcctttttttgtttcattggggtttctctttctgtttttctttctactaccataaaaactatctcaaatcacctgaacatcaagtgatattaaggttgtcatcttaagaaaaaatatccatttttttcttaagttcgggaaacaaagttcggggaaaatacctggcatgaaactgtagttagggatacatttcagcattttactcactttatccaagttattcattttattcaagttatatgtatgtataattcaacaattttagattatggtgtaagatactccagtaacttatctttctgtccttttaagtgtaccttgaattctttgatttattttattgcatcaatgaattaaaacaaaaatcttgggggaagaaattggcaatatcgtataaaaatctgctcatattagaacacagtataattcagcagtaaacactagaatcaaatgaatagccttttgtatcagttattaatcttttctaactctgcttagctgctaataatcctgaggcatagaaattgaagaatttgtaaaaatagaattgccttaaaggatttgaagtaagaacataattttggggagagttttttagtgattcacagtatccctcttagcattaatttaaggtaaagaggcagattgattttccctctttcctggtaattcctaagtaattaagaataaataagttccaaaagaaattgtagctggaatcttaataacaattgtgagtggctgtttgagttgcccccaccatgtccttagatctaatctgtgctaccttattaactcacagcaggcttactgaatggcttcatttcagatttagttgatttctccaccaaatgcatgtcatgtattctcaataggctgtattcccagcagtcaataaatgaacacc

SEQ ID NO: 22045 - DNA, 1050 bp, Homo sapiens
cagttatataacaggctcatgttttccattttaggaatgtctacatagttttctagtctgaagttatatatatatatatatatatatatattttttttttgagacagagtctcactctgtcgccaggctgaagtacagtggcgcgatctctgctcactgcaacctctgcctcccagcttcaagcgattctgcctcagcctcctgagtagctgggactacaggagcccaccaccacccccagctaattgttgtatttttagtagagatggggttttaccgtgttggccaggctggtcccaaactcctgacctcaagtgatctgcccacctcagcctcccaaaatgctgggattacaggcatgagccaccacacctcactgaagtaatactttataatagttttttaatggaaattttagtgttaatgtttatatttatgtatatatacacattatatttttcctttcttctgtagaactttcagccccccaaacggcctttcaaacggatgaactattcagatgctatcgtttggctaaaagaacatgatgtaaagaaagaagatggaactttctatgaatttggagaagtatgtatccctttctctcattgtttccaaggtgggattgggctccaattctcttcttctggttaatgaactagtaacatgggtggcatctgcctgtcctcaaataaatggtaacagcaggacctgcttcttgggttgcctgcagattcgctgagttaacagagtcagccttaggacagtgcctgttctgtaccacccagtaagcgtaagtgagtttctttttttttcttttttttttttttttttgagacggagtctcgctctgtcgcctacggagtgcagtggcatgatctcagatctcggctcactgcaacctccgcctcctggattcaagcgattctcctgcctcagcctcccgagtagctgggactacaggcgcacaccaccatgcccagctaatttttttatttttagtagagacagggtttcaccatgttggccaggatggtctcgatctcttga

SEQ ID NO: 22046 - DNA, 1039 bp, Homo sapiens
aaaaaggaagtttacgcaacccgctgcgtcccctccaccgccgcgcaccccgtctcgcagctggcgcggtgtttgctggtgacatgaactcaaccagcctccaccatctggggatcggggcgacatccttggtctggtttgcaagaggacccgcacgcctccagctggggcggaattggaagattcagaaaggaaagttggggaggcggggaaggaagggtgcaaaagtgacactgtgccagggtctccagggccgcggagctccgggacaggcagcgccttccgagctgcacaaacgcgtggggcggggcgtctctggatccggaagttgcctctgccctcaccaaagatggcggccccggcgccgctcgcccacctctcgtaaccaatggaaccgcggcgctcggccgattctcgcaggcgccctcagatctacgctctctgatgcaacgccggaatcgcggaaaccgccggtgcacgttggagtcataagacggcgtcggtgttgcagtctgtgtccttggaggtgaccagggccactgcaggcatggtgctaggtgggtgagactcagtgtatggcgcggtgttccctgcctggggcaggaactctgctccagtcgggtttcggcgctttccttagtgcctaccagagtgggcgccccgcgaatgtttggggaccgattgcagggagggagggagggagggtgctggcctttgctgggcccgggacttgaagggccaggccgggcttccccgagtccgtcgttcccccgggctgcgatggcggtggctccgggcccttcccctgccccgctgcgaaacctcccgattgcgctgagactcaggcgctgggacgggttcagacacagggtagcccctactcctgcagttcttcaaagtgatcgtcaggaaggggctttaggattctagttgtttttctcccaccctcatttttttattgaggtttccggggagaccatactgtgcagtaggaaaaaaaaaaaaaaaaagagagagacctggatggatgttaactgtt

SEQ ID NO: 22047 - DNA, 1056 bp, Homo sapiens
actgttgaatgcactcgtaggaaatcagaattgtgacccctgtcctcagggtcacaaagccattagcctcctactatatgctgtatgagtgaaatcatctatatgtgcagctacaaagcggacaagtctgtgtgtgtgtgagtgtgcctataggaaatgattgcgtttggcactagtcctttactgtacagctgaacacctagaaagatttattataacttcattaaaaatatcatccattatattcaatatccacttatactattggttttaacacagattacctagtagtattttctacatggtatttttagatgacctttagtaaaatataaaggcataatgtcgttttataaattattttccaattttgaacacaactcgatttttaaagatactttacctgtttttttttttaaatgatgtaatatattagacttgaaaagtaaaagtattggagatctgtgactgaaaaaaaaaaactttatagtgattttattgtatcaagagactttctgtttcagaaattccatgagtgaaaccgtcagactggtcagtggaatgcagcaccctggctctgctggaggcgtctatgagacaacacagcacttcattgacatcaaagagcacctgcacatagtaaagagggacatagataacttagtgcagcgaaatatggtaactttgtttccttttccttttataattataatctttaggaaaggaagaactcatactctactgcaagtattttaaccctttagttaatgctaatgcttatttttaatgtttaaggtagaattgtcccatttattgcagatctccatgtgtcctggttttctagttattgaaggtggaagaacagttcccatagcagtcatggttttttaatatgtaatatttatattatcatttcgtgaaaatattttctgatttccatgttaatgtcttctctgacccatggattgcttaaagtgtatttctttggcctatttttccgtcaaggttctaatctggtaatttcttgctatcttgttagcttcatttaccttcacc

SEQ ID NO: 22048 - DNA, 1086 bp, Homo sapiens
atttccctttgtggttagtattttggagaaggtactttgagactatgtaagtatccatttcaaccttctgctcattcattttagcatccattgatgtttcttgcctgtaacaagaaagtggtttttgccaaatgctgatttttttttaatttttatttttatgtatttatttatttatttttttgagacagggtctagctctgttgcccaggctggagtgcagtagtgcaatcacagctctctgcagcctcaacctcctgggctcaaatgatcctcccatctcagcctcctgagtagctgggactacaggtacatgccaccacacccagctaatttttctattttttttggagttgggattttgccatgttgcccaggctgatctcaaactcctgggctcaagcagtcctcctgcctctgcctcccatagtgttgggattacaggcgtgagccaccacgcctggccccgatgtttatatttcgaaataattccctccatatttgttcattggaattctgctgtcaggaccaactatcttttctctcccatttatttatttagttatttatttagatcagttcagactcatggatacttattccataggttacagtccaacactctccttatttattttgctgctcaaattgtttcaggtatggtcattctgagctccttcatgttggcatctttgttctctcaacaagccctcatctttttttgagcattttaaaaatttatggtactgctctatcttctagggtcatcttgtattttctctgccctcagtgagccctggttcctttttcttgagaaaggtatttgaaaaccaacctttgggcactaggtatgctcattactaccgcggtgccgttacctctaggcctcttactggacagagctagggaatatacatatgtataccaacccatgcatgtacatgagtctgtagttccgtgtctgtcaacctactcttgtgttaaaccatgagattatgcagatattttggattctggctggactgaacactacagagttaatttttaactttcccccttgtcttatttgaaaattcttcctccaac

SEQ ID NO: 22049 - DNA, 1050 bp, Homo sapiens
taaaacaataaatattgataaaatacatttacaatgataaaagtaatctcctatggaactttttcagacttttttttttttaatttgtagatgaccatgatgtcctttcttttctgactttccagttgactgaacctggaaaagagccggtaattttacacatattttcaaaaactttatcagtttagtttgccttttagctgaacgttttggaagactaacttaggtttggatcttgtttctgccagttactgctatatggtcttgtgcaagtcactgaacctctgtaatgcttcatttcttttttttttttttttttttttttttttttttttttttttgagacggagtctcgctctgtctcccaggctggagtgcagtggcgcgatatctgctctctgcaagctccgcctcccgggttcacacctgtagttccagctactcgggaggctgaggctggagaatcacttgaacctgggagcgagaggttgcggtaagctgagatcaagacactgcacttctcctgcctcagcctcctgagtagctgggactacaggcttccgccaccacacccggctaatttcttgtattttttgctagagacggggtttcaccatgttagccaggatggtctcgatctcctgaccttgtgatccgcctgccttggcctcccaaagtgctgggattacaggtgtgagccaccacgctcggccacgcttcatttcttaattgctaaaacagaaatgtttgtactggccacctcatgatattgaaggattgagacagtgcacgtatagcaagtgctcagtaaatggtagtggttattattagaggcaagagtaggccgggtgtggtggctcatgcctgtaatcctagcactttgggaggccaaggtgggcagatcacctgaggtcaggagtttgagaccagcctgaccaacatggcaaaaccccatctctacaaaaatacaaaaaatagctgggtgtggtggtgcacacctatagttccagctactcaggaggctgaggctggagaatcgcttgaacctgg

SEQ ID NO: 22050 - DNA, 1074 bp, Homo sapiens
agctgggattacaggtgcctaccaccatgccacgctaattttttttgtatttttagtggagacagggtttctctatgttggccaggatggtcttgaactcctgacctcatcatccacccgcctcggcctcccaaaggcctgggattacaggcatgagccactgtgcctggcctgtcagttgttttttaatgtcgtcttgctgctgctaatgccatttgttcacaaaagaacataggacatctgcccaaataaacattagccaagaaggagatgctagcagtcctagaccatggccaaccccacagcatgaaacggtgtttaaacaccttgaaccacaccacaaacatccagtcggcaacattccaaccatgggaaacacgacaggtcaaatgccctgggttccggcagtctgcaggcaacaggaaacttaaaggacctatcactttttaaatgagcaacactaaaccataatatctaggcatgcacaggtgggtaatacattattttttaaaacataggaagttattactatgaaaggaaagtggtgacttgttggggaagagaggagactgattgggatggggcacgtggaaggagggggtctggggtggctggcaaagttctgttggattgatttgggagttctttaaaagggtgcttactttttttatttttaatttctggggtacatatgcaggatgggcgggtttgttacacaggtaaatgtgtgccatggtggtttgctgcaactgaagaggtgcttgctttataacaatttgctaagttatatatttgtgttgtgaagtttccaggttctttgctttattttgcaataaaaacatgtttttaaatggtgtatagacctcagtgcctccacctccaccacttcttctgtggtgtgggaagaaaacaagtgatgtggtgagaaagggagagtgtggggatagattcgatgcctgtcatttaacttttagatgggtctctgtcccgcgagagcacttaaaattcagagccaactctcctgtccttttttttttttttttttttttaagttgcttgtgttctggcagcagg

SEQ ID NO: 22051 - DNA, 1050 bp, Homo sapiens
gccccaacaaaccactggccagtgatatgatctcggacctcagttgtcttactcataagacgagactgtcttggataaactcttggtctctctccagcactcttgaacatttcatccagcagatagttcacatcacgtgatggcactgtgaccacattttcggttctttaaagcacttcaattcactgagtgtctatttcttcattccaaccacaaggagaataaaagtgcagtgtgtgaaagtaaaattcttcaaaatcctggccaaaatgcccgtgtgttcttatttcggtcaggttgcactttcctgtgagaacaggatgatctcggttttctcctgctgaatcagctgtggcagccaagcaggaagagccttcctagtgccccagcactctgcttctgtcagcatgcttctgggccgcccagacgtagcccacaccactggaggtctcactgtttgcatacatttcctttgtctcgaccatttcatgaagtgtagccagaagtactgtcagcactcattagaccaaaattgtcttcagctcaaagcaaatattttgtgtgttgaaatctttatcaggtgtgtgatccacgtcccaggagtgcttttaatgagctgtgagatgttggtcatctgtcaccttcagttttttgtgctaatttaaattgctctgttcttgtggctgatgatgccctaatcagaatcttcaaagctgccctctccctggggccaattttctgtctgctattgccttctggacatgtcaactgctagttgacatcttgaaaacagggctctttgtcttatcccccaaatcaacttaacttgcccagttttaatttctgccaggagctctactgttttctctaaggtcaactcgaactccagatctatgactgctctgtcttattttttccacctccctgctcccctcagataaccctcccctcacctgacctcaggtgatctgcccgccttagcctcccaaagtgctgggattacaggcgtgagccattgtgcctctctctccctctccttttccctctccc

SEQ ID NO: 22052 - DNA, 1072 bp, Homo sapiens
gtgggttaagagagcttcatctgagggagaagggggaaggggctcatacccagaagacaaaccatctcaggagccatgtggaacttggtgatggcccttaactgagcccagctcattttcctattctcaaagtagaaagaaatttcacagatcacatttagaggtttgggtgaaggggtggggctgggggcagactttagcctacaactatggatgatttaaggtagtgcttggagctttttagtcatgtgtgcagaacactgcagtcccataaacagtaaaaacttggtctgtaagccatgtttttcggaagttgggttttattgagtgtagcatgcttagagttattcagatgtaactttgcaatggctttcttccattttctctatacccagcctaagccttataagggactgcggtgatgagtggcaactcatgaccttaaggcacaggatgtatgcgtggacagaagtcaaaattctagacttatttccatgactaccttgggcacgtcatttgaatttcttgggcctccattttccatcctgtaaaatggaaacatcctctgagctctaatgtctctgctgttcccccaaacaatggaatgtgctaccatcttactttgagatatgacctgtagatttatatttcaacagtttctgcagtggattgcattaaaattgtgaatctcatagggacaaaagaagctctgcaaaaaaacaaacaaaacaaaacaaaaaattcctttcctgtatttgatcaaatgccattgctaaaacagcactaaaaaggaaaaaaaaagttcaggaaaattcgctgaacttttcccttttgccctgtgcttgttttcatgtcttagtgtgtttcaatgtacaaccaagttgttaatgttttctgtttaataaacagaacatctataacttcctctcctgatgttctcgatcagtttggctattagctaacagggaactagtttgagccacaggactcaaggtcactttcactgttctttcatttgcattctccatataattcactgtgttaatgctctctctgaaaacaccctgcttta

SEQ ID NO: 22053 - DNA, 1037 bp, Homo sapiens
gtagcattttctgttaggatatgggctctagctagatgcactcattaagctgaaggcatcaagggagaaatttctaagtagtttatatgcccactcccccatctcacataaatgcgcattcttgccagatcactaacagataatatttgtaaatgatctgtcagggatgagaagcatagaataagtggcctggcagtactgccatgcggttggaaacccagcagtgttttcagcaattatttaggtcatagaatatttttactagaaggtgctttaggggaccatctaatccagagtcctcatttgtcaggggaggaaataggaggctcatctagaggttatttgcttaaggtaacctatctatgtaacgacagaataagagctagaatccttatctcctgattcctaatagtaatgattggcagatatacaaacaaaaaccagtagttatcatcactcactgcaatactgacatgtggctttaattcctaaaaatgtctagattccaatatactttgatttttaaatatgcatcatcaaaccatggaggggtcaaattcattcattgtttgttaatttgacataaacaaaatgcacctggggctgggtaaatacctctctggtgaccatggtgcttggttagttgagttttgtagcgacagaattggcacatgccctagcagagtcccctggcacaggatgcccttggctccacggcacatccagacagggacagcacctaggctgcagccaggccaattgggcccacagttgacctagtgggctgtgctggcagggccaggccttcagttgtgtggtgagtccctggggtgaccttggccttctggatggtgtgctgcttttgtctggttcaaccagtattattctctctgtcccatcctgcctgcctctgccacctgggccagttggcctccagcactgtcagcatcgcctgccctattccctgtttaaatatgtaaacatcttaaataaccaaaaggctgggcgtggtggctcacgcctgtgatcccagcact

SEQ ID NO: 22054 - DNA, 1026 bp, Homo sapiens
tagatcttttgtcacagtccacaggtccctgagactctgttcatttttttttaacatctatttttgtttttcaggctgggtaaattctgttgttttatcctcaggttcatggatcctttcctgtgccccctcagttctgctattgagcacttccatggaaatttttattttggttattgcattttttagttctagacttctttatttgcttcttatttacatcttctttgctgagaattcctatttcttagctcagattttctgtttttttgtgtgtttgtttctagtatgtacataattgctcattaaagtatttttataatgaccactttaaaatttttgccagataattctaacagctctgttatttaggttttgatatcagttaattgtcttttttcattctgcttgagatcttcctggttcttgatgtggtgagtgattttcttttgaaacctagacattttgggtatttggttatgagattctcagtcttatttaaacctgttttaactggcttctgacattcctatggcaggggaagaggggacactacctcatttctgcctgatgaggttagaaatccaggttccccttgcagcctccattggcacccgagagggagctccttactgctgcctgccagggaccagcgttacggcaccctgcaaggcctccactactgccttcatgactgggaaagacagaggtcccctttgcctcccatgcaacctccactaataacatggtcaggaaaggaatggcctttctacctctgagtggaggtggaattcctggctctccactaggcctcctctgacatgaccccattgaagagggggagggacctcattactgcttcatggaggtggaagtctaggctccccacgtgatgtccactgacatcctccaggtatggacagaagtaccagcttccctcctcagccttccctgacaccatgacagtggaggggagggcatagccggggagttagagtgccccattatagcctggtgaggatggaa

SEQ ID NO: 22055 - DNA, 1021 bp, Homo sapiens
agggactctgtaaaatacttgatataaatatgaagcttagcagttttgttattcttgaatcaagctagcatattcaatgctgaaagaaataactaatattagcataaatttgcatgttgttcttgatgagtataagctagaactgggtttagcatagtattatggatatgccataatgaaaaaagtttttcttccactgcttaagaatactagaaatctcatttctagttttagtatatttttgcaggatatttacatgaatttaatattgaaagtatttatgccttgtcaatatcacataagagatatttacttagatgcaataaaaactggtgaatgacatgtactttcctgcatctttgttggtggataagatttttagaagggattttaattaaggtttaaataagaagagctggggacatgtggaatgagaaatagaaggctcatcaaaatgtatgtgtgtatgtattcttatatttgtgcgtgtctatagtaatgctatctggaaactagtgcaatgaaaaacaaaacacaacaggagagaactgaggcaaaggtggctcagaaaggtctcttttgacctttaaactcagaagtcactgacatttcttcctggatatcacactgactcatcaaatttaatgtcacacattgaagccagtgatgccttttcttcctattgcaaactagcttctcatcctgttttctttatttaatacatcacacaagctgaagtccagccacccttactgccatactgcttaccaaataatcactgatatcatctctcctttctgttcaccttttaacagtcttattatttatattgctaatcattttcttacaactgttggaagcctacagttaagatgggggtggatatatatactaatgacttatttgtttattaggtctataatgccaaggacgagttcagtataacaaaccagtgaaatgattctgcttctcttccgactcactccttaaaatgtgtattgaacaaaagtgaagtagaaaa

SEQ ID NO: 22056 - DNA, 1032 bp, Homo sapiens
tgagagcctattataataagggtatccccaaggttggcttaacatgtgcatcgtgacactatgcataattttattctaatttttcttaactttagctttgactgcttcttccttcttttaaaacatgatgtattaaaaatatttcggagttggctgggtgcaagggctcacgcctgtaatcccagcactttgggaggccaaggcaggtggatcacttgaggtcaggagttcgagaccagcctgaccaacatggcaaaatgtttctactaaaaatacaaaaattagctgggcatggtggtatgcacctgtaattccagctactcaggaggctgaggcatgagaattgcttgaacccaggaggtggaggttgcagtgagccaagattgcaccactgcactccagcctgagcgacagagtgagactctgtctcaaaaaaaaaaattaacttaaaaatatcaaaaattaatattaatattaaaatgcttaaaatattaactataaggcaaaaagacactgatcaaataacatattgttacctctccatttgaaaggaatagggttgttgcatacgcatatttaactcagatttttaaaaatgtcatttagtctggtttttaaacttttagaacaaaaggttttgtctttgcagaaaattgtatctagtacagaacccctcctgaattattaaatgtcctaattatgaagaaaacatatatatttaaattttaagggaaaacatgattttgaaagtatgttgtgtcctatctttatctttttgatagattgtataggaaaaagacataaaaattcacagtcttctaaatgattttacaaaatcatctgttgatcctctgtgcttattcattgttaagaataaaagaaacattccccttttgactggtgttagcttttctttcctacatggcaccttcctcattttgatgaaattctgcagctgttgctttcagtcagagaaaggtcataaaccaaatgatactgaccttctaaaattacctacttaataatgcacta

SEQ ID NO: 22057 - DNA, 1032 bp, Homo sapiens
ttgtgtagtgtttgatttttaaaaaatatgtgcatatattgctttgataaaacttatttttaaaagtatgtttatcaaaataaatagatattctaatcattggcacaaattcagtagaatatgtaattggaaaaggatactattcataatagaaataaaatacccagcaataaaataatgagaaatgtatattgtaaagaaaactgtcaaattttattaaggacataacaggcaatataaacaaacaaatgttggataatactgttcaatactgtaaaaatgtcggtcctctccaaattacttactgaatatggtattataacaaaaggatttttgtataactcaaaaacataattttaaaatttatatcaaaaataaattctcaagaatagcttaattagttttgagaaagaagaacaagataagagatttgctctgctagataacagaacacattctaaagctattataactctaaaaaatgtagtattgatgcaggccaaacatatagatttagtggaactgattcgtgagtacataaagagataagattcacttgtctacaacgtgcaccttgacttatgatggggttacatccctaagttgcaaataatgtaagtgcaaaatggatttaatacacctaacctactgaacatcatagcttagtctagcctacctttaatgtgctgagaacacttaacattagcctacagttggtcagaatcatctaacataaagccgactgtataataaagtattgaatatctcatgtaatttattgaatactgcattgaaagtgaagaacaaaatgattgtgtgggtactcaaagtatgctttctactgaatgcatatcacttccatgttagctgaaaaatcctaagtcaaactctcataagtttgggacaatctgtatatgggatttggttttgactgaaggtagtgtttcaaatcagtaggagaaagatttgtactaagaaaattgaccatttggaaaaaataaggctagctcttgtaacctcatttcattcaca

SEQ ID NO: 22058 - DNA, 1062 bp, Homo sapiens
aatcatataaaattgattaccctaaatatatcattaggatattatgttatttacatctcttatgctaattctaattttcttttattgtagtatagtagaattgagatttgttaatggaattggttctgaggaatatataaatgttcatatgtttttcaagaaatattgattgactagtatgtgttttgcggatatagcagtgaacaggatagacaaaggctttgcattcatagagtttatttgtacagtagtgtcacaggcaaactataaccaaatgaagaagtgaataaggaatacattatcaattccttttatgaagaaaatacaccggctgttgagagtgagaataagtgagggttactttagaccagccactttagaaaggctggttaggagcctggccagtgtggtgaaaccctgtctctaccaaaaaatataaaaatgagccaggcatggtggcacctgcttgtaatcccagctactcgggaggctgaggcatgagaatcacttgaaccagagaggcagaggttgcagcagtgagccaagatcccaccactgcactccagcctgagcaacagagtgagaccctgtctgaaaaaaaaaaaaaaaaaaaaaagacaaagaaaaaacaaaagaaaagaaagaaaggctagttagggaaggactcttcgtcaagggttcaggtgcacactgctacccctttttccacgtggcatggtaactgatcatagacttcccctattttgatgttcagtgtctgcctgcacatacatattcaaagccactgtgtcctctgggggtctggcgggatggctgattcccatgtactggttcacccactctagagcatagtgaccagccctgcctgtagacctgtctggctaaaaatcaccacttgctaaaagcctgcaatatggtcaaaaaaatctaagataacatgagaaatggactcttgaggtcatatgaaattcaaggaacagaaccaaacctaaaaacattaaaattctcagaaatatttaagaaactattgcatccataaaacaaaagcagcattaactttgc

SEQ ID NO: 22059 - DNA, 1029 bp, Homo sapiens
tagaaagttgtacacatacctatccgaggctttctttccttttctggtggagtgccccctgacaggcatactatgccatttggtctattaatgcacatacctgagaagttgcatctctctggtgcttgcattcagttaacactttagtgcagcaagtgtagaccatcaggaaatggcctctccctggtgccagctgccaatctaccacttttagagaggcagtgtgataattgctgaatcatcacccgacattcctagtggtcggggaagacccctcccttgccccactcatgcctgtctaactacctgtaacaggtatattacatgcatttttgacctacaatagtttcaatttaggatgggtttattgggatataaccccattgcaagtgaggagcatctgtaatttagtagtgttaagtatgttcatgttgttatgcagctaataatctctagaatatttcatcttgcaaaacaaactctgtacccattaaacaataactccggccaggcgctgtggctcacacctgtaatcccagcactttgggaggccgaggcgggtggatcacgttctcaagagattgagaccatcctggccaacatggtgaaaccctgtctctactaaaaatacaaaaattagccgggcatggtggcacgtgcctgtagtcccagctactcaggaggctgagaggcaggagaatcgcttgaacccgggaggtggaggttgcagtgagccgagattgcgccattgcactccagcctggcgacagagtgagactccgtctcaaaaacaaacaaacaaacaaaaaaaataactcttcatttccccctcccccaacgcctggcaaccaccattctactttctatttctatgcatttgactactctaggcaccttatatcataactggaatcatacagtctatgtctttttgtgattggcttatttcacttagtataatggcctcaaaggttcgcctgggttgaatctatttactttaaaaaactcagttcatgcatcttcttctct

SEQ ID NO: 22060 - DNA, 1032 bp, Homo sapiens
caagaagatttaggagtagcactctgtatgtatgttgattgtttggctttgtacacaaatgttagaaaattaaagaatagatttggtcattgtcatgtctgtttgccctcaccagacttgacttagatatggttctttaaagtctcaggcattttagaataactttggggaaggtatttacgaattaatttttaaaaaaactctttcattttagaattttcttaaaagagatatgtttttaaaatttcaaatacctagaattgggcaaacgaggtgttgccaagtagaggctctgctgagcaaataatgaccacatcaaaacaccagccccaaggaagcaggctccgattctgctcccagagcagcacattggtgtggtgtcaaatgcatgtttctaaagaactcaaacattgttttctcttagttagataaacaaactccttgatgtctatttatgactagttgttagtgagtctcttggaagtcatacaaagcagtgagaacaagaaggtgttttgcaggttggctttgagtaaagaccctctgttttgatcagggtcttggatgccctgctcaatcccctactcgaagttctgagggcatttctctgattgtcctccaaaactgtcctgccaactgctatagattaaataggtaaggagcagctactaagtttccttcttccctcccatgaaggagcccggccatgagatttagccaatgagcccatttaactctctgttttctagctcatttatccaagggttcagtgcaccactggaaaccttcatataacagaaagccagtgtttggggggcatttggtttcaacttgcttgtgtttgagcatttatatttataatagtgctaatctctaagggactcacatcgcattaagagctttatcttaggctgccacggaaactagcatgtaccaacatgactgagaactatgagaaattgggctgggcctacagaaaattaataagctccgattttcatttaaattatcttttccatgagattttgtttt

SEQ ID NO: 22061 - DNA, 1049 bp, Homo sapiens
cttgacattgatcccattgtacagtggagccaagattagatccaggggacctggtttcccagccccatcacctcagtcctattgcattaccctctggaaatgctcagtccagtaaaggagagagtgatgatgcaatgatgtgactgcttccagtgaagagtaaaagtaatgaactagaaacgggagaaacagattgacacccttgagttgtctttctggttagggcttttgggtttttgttctgtaatacagtccaatgtggtggccattcaagggagaagggccactcatcagccctcctgctccctcacccccatcttaattaaataagtctccttaggatctcacacacctgcatgtaacaaaacaggttttaaaaatctgtagtcaaggagcactgcttgtttctttctggcaacaatcccagtggaagtaaaattacactggactgcctgaaactctgagcccaaagcgttaatttttgaaaaacgtttgaggttcctgagttcccgtggtatgctactagaatattctgtagctttaacaactcccagccttcattctgcactgcaccccccgcacacccaatacctattccacatgtctggggataggtcagctcaccgtccaccctcgctgccccctaggctgaggttccctgatgagcacagttttccgggaaggatttcagcccctctgtgaaagtcttcagttatctcctctcttgtttccagaagtagcttctttactccaacttgaaatcttgctgtattccttagtgttttggaaacaaaatgtgcagtaggagaattctggctttgtggatattggatcactttgttccctggcacaacaatctctcctttgtattaaacatctgagaacagaagtcctaaataacatttttatattccttgttgatgtaagttctttatttggggacagcagtttggtacttgttcctctgtcaaattctgatgtactttccctttttcctatgatgaggacaccactgacccctagcctggaattttactttgggtagtggt

SEQ ID NO: 22062 - DNA, 1070 bp, Homo sapiens
ggaattgagtttcagaagaatttttgaattggtacagatcagtaatttacaaaatggaatggaatcactgaatgttctaaaatctgttcagctaaaatgggataataaatttagcttacatggaccctgcacattcaacttgtgctattatgatatatatatctatatatatttactgctatttattaagcattttctgtgaaccagggcctatattttgacatacatgatcttactttgtctaattacaaagattcagtgcctttcacagaagtcattagtagattttgggagggtcgtgttgatgactttttggtgttttgagtaagtaaaatgtgtaatggcatttgagatattgaatgcttgttaaagctgaccttgaaaataagattttcattccattgccgtgctttacaaatcaaactgccatttaggagggaaaaaagacaaataaatgaagtcaactttctttatttcttaaaccatgggttaaactgggtatttggacagatcgttttcaaggccactataggatacttcaggcaagtattttgaaacttgaaagcatttctgataaacttccagggaaaattctgatcttttggtccatgagagaaataactgctagttacaactctggattggaatcgcagtttgaagataatcagaactgcagcttaaacatcatcaaagagtgacctgtagcttagctttcttaattacatgtgtcaagaacttgtgataacagacctaattgaaatgacttattgagtcaggtaacatttatgcccttttaattaactataatttttaatttacctgatcagcattaagctcactttagccgacaaaaggctatgggctacagtcaaattgcaaatagaatacttagtaaatgtgatagtattagctcctactatggactaatattagtttggtcttgaccagaagaaatccttgtgcgtatttatgttgaaagatgaaataacttactgaaattgttaatgaagtattggataagctactttaaaaataacaaacccgactaccagcaacaacacaaataaaca

SEQ ID NO: 22063 - DNA, 1070 bp, Homo sapiens
attataaccctaagactgcaagcaatatatattttattctgcttatggtttgaatttattaattggacaaatattttgttatgtatctgggctgtccagcggtgcagagcacacacattctgttctcacagcttactgacatttacagagttttcattatattcatccttagagcagactagaagatttgtcttagaaactgtttgttagagacctaggtaccttgaaatagtcttgtaccgttggatgcactaaaagctctctctttatcttgcaggtggtcaccatgggccttttccgcactattgctttgttttaccttggaagttttgacagcatagttcgtcgctgcatgatgcagagagaaaaatctgaaaatgcagacaaaactgcctaatcttcttaccccttggaagaagactgtttccaaataatttgaacagcttgctgctaaatgggacccaatttttggcctatagacacttatgtattgttttcgaatacgtcagattggaccagtgctcttcaggaatgtggctgcaagcaaggggctagaagttcacctcctgacagtattattaatactatgcaaatatggaataggagaccatttgattttctaggctttgtggtagagaggtgaaggtatgagaattaatagcgtgtgaacaaagtaaagaacaggattccagaatgatcattaaatttgtttctatttattcttttttgcccccctagagattaagtccagaaatgtactttctggcacataaagaaatcttgaggactttgtttaaaccttccataaaaaaacaattttcggtttctcgggttctctctctctctctctctgtctctctgtctctctgtctctctgtctctctgtctctctgtctctctctctctctctctttctttctttgtgtattttattcaagatgagttggacccattgccagtgagtctgaatgtcactgacagccctgtgttgtgctcaggactcactctgctgctggtggaaactcatggcttctctctctctttgatcccataaagctacgagggggacg

SEQ ID NO: 22064 - DNA, 1102 bp, Homo sapiens
tagaattttttagtctgtcagatttgtcatatctaatattggactcaacttttcttcttttagacgctttattgactccatattagtgagtagcctcctgaaaactgattgtataccttaatctgaggaacaggtttactagaaggatgtctggaaacaccggttctttaaaaagaaaatgagactttcctatgagtgtaaacgatatatactatgtcccatatacacctggctgctttctctcccattcctgcttcccagtatcattttcccaaaagttagctaacgagaaagtgccaccagccccgtgggcctgtcctcctgtcttccctgttgatatgttttttaattcagaatcaaaaatggtattttaagaaatgatgtgctgttttgtagaagaacaacatatgtgcctcatgctttttgacaacatttctgttaatgcggaaaaatgcacatttatgagggatgtctgtaaaccacagacccacactgaatttggaaaatctataggaccattggaatgagaggtgtcagcacatggtggacagccttgaagtggcctaaatgctgtcacattagactgaactgagcagaatgagaatagtgaattctgttgaaatatatacatgtgtgaagaactttgtcctgagtgcattaaaaggctcaggaagatggcacaagtgagactttatttttcctgcttatctcgggtcaaagcaaatgcatttggtgttttttgttgttgttgttgttttgtttgtttgtttgttttgagacggagttttgctcttgttgcccaggctggagtgcagtggcacgatcttggctcactgcaacctctgcctcctgggtttaagtgattctcctgcctcggccttctgagtagctgggattacaggtgctcacaaccacacctggctaattttttgtatttgtagtagaaatggggcttcaccatgttggccaggctggtctcgaactcctgatttcgggtaatccgcacgcctcagcctcttggccaaagtgctgggattacaggcgtgagctccgtgcccagcccattcagtgtttctaatgatgctaaatagctcttagtatt

SEQ ID NO: 22065 - DNA, 1075 bp, Homo sapiens
atcattcttatcaatgtaaaatttacgttattaaaaaattacaaatgatagaatctttactcagggatgggcaataaaacagcaaagagctttgtgattgggtttgaaagattttgaattatagacagtgctcttaatagtttttaataagttgatatttttttctgtgtagatttaaataatttctttaaaagcgtaagctttggctgggcatggtggcttatgcctgtaatcccagcactttgggaggctacgatgggtggatcacctgaggtcaggagttcaagaccagtctggccaacatggtgaaatgccgtctctactaaaaatacaaaaattagctgggcatgatggcgagtgtctgtaatcccagctactcaggaggctgaggcgggagaatcacttgaacctgggaggcagaggttgcagtgagctgagatcgcgctactgcattccagcctgggcgccgagatagcgccattgcactccagcctgggcgactgaataaaactctgtctcaaaaaaaaacaaaaacggtaagcttttatatttaattaactgatacctttcactgtgcaatctcaagaggaagattttctaaattagacattgtctttaccttaaagaagaaaattgtctatttcagtgtcttttttagcaagattgaccaaaacaggtggtaggtgtgtaatttttaactgtcatgaaatactgtaatgcgcacctttgctaataaggaaatggtctccctttgaattatgggaagtttcttgtctgtgatatggggtgtctgtgtacatatatgtatatttccttttttaatacaggataataatatggggtcttgtccttcaccttttaagttcagggaacagtttgtcctgaccacacatatgttatcagtgtaatgctttatgaagctttagaaatgagctcatgactcattaaaaaataataaacgatgctattttaatattttcaaataaataatctgaggatgtgtttcatactttagcatcaacgctgagttgtgccttgtagaattgcattgtctatacatgcaaaagactattaa

SEQ ID NO: 22066 - DNA, 1034 bp, Homo sapiens
tgcccagccatagttttttaaatgtatgtttgatagtttactgccagctgtaacccacctgttttattttaggcaggattataattgctcattagcaaaattgaggctcgaagagttgatgtattcactggttatattttggcaaaactaggatttaaagtagtatcacctttttgttacccaaccatgaaagtctgctacctagctggaggctgaggtgggcagatcacctgaggtcagaagatcgagaccagcctgaccaacatggtaaaaccccgtctctactaaaatacaaaaactagccaggcgtaatggcgggcacctataatctcagctacctgggaggctgaggcgggagaattgcttgaaaccaggaggcagaggttgcagtgagccgagatcgcaccactgccctccagcctgggcaacaagagtgagactctgtctcaaaaaaaataaaataaaagaaagtctgctacctataacactaacctgtgctttcctgtggaatcaagaattcagcagaaactcacaagtcatccaaactttgttaggttcacttttccaaagagcataaatattcaaagaaaatctcttccagctgcccattttttatggatataatttttgtacaatattctggtatcaagcagtgtacacagtagatgatcagaaagtaccttttaactgaactcttttcccctactagactccacgcagggcagaaatccttttgcctgtgcacatgttacggttttgatacatattggttgaatgaatgagcaaacaaatgtacttcctgttagaaggcttatgttatgcaagtctctttttgataaagtagtctctagaagaaacaaaatatatttaagacataccttagattgatttatttttaaaatattgttttgatccttagaggtttagagtgaaaatctttccagagtattcctcagtatagatgatacaattaagtgttaaaattctcatgacatttttctaaatctaaattttaggcaagagaacaccttgga

SEQ ID NO: 22067 - DNA, 1010 bp, Homo sapiens
tcttcagtcagtactagggagtatctgctggttctcaactcccgactcaaccttgacctagttttgtctgactccctcggctcctgactttgtggacctcaggaagggcacactcctaggctagtctcaggttgagctaccaccgtctccaaattagacttccacttgtcaagaaggaagtagagtccaggcataattggagcttcctggggtgattcgaggtctctgtactccttgctgtaaaatgcacaaatactccaccttaaagaatctcacggggcagggcacagtggctcatgcctgtaatcccagcacttttggaggccgaggcgggcggatcacctgaggtcaggagttccagaccagcctggccaacgtggtgaaaccccgtctctgctaaaaatacaaaaatgagccaggcgtggtggcaggtgcctgtaaccccagctactagggggcactgaagcaggagaactgcttgaacctcgggaggttgcagtgagttgagattgtgccactgcactccagcctgggcaacagagcgagactgtctcaaacaaacaaacaaaaaacaaagagtctcaccggagttccaaaatatccttcagtgactgaccatatactctagcaaaagttacttcatatatgcccggccacagctctcaatctcccatgagattcccagcaatcttccctggttttgagaaagtgtaaaaaaacacaaaaagcaaaaacaaaacacacttgcttcagctaattaatgctagagaaacaaacatagcatcataaaatgtaagcatttgaaagaaccatattgttgacgctgttccttatattttgcaggagaggatggtgaaatagaggtagtttgtgtgatttgcccagagtcccatgaagaattcacagaagaattgagactacagtcagtatggccacattcccagagaactgctttttctgccataccctgtggtaataatattgtcacaagacaattggacagtgtttca

SEQ ID NO: 22068 - DNA, 1033 bp, Homo sapiens
agatagctggattttactgatattctaagaatcattgtcttttatctggagtgtttatatccatgtgattattgatattcatggatttatttataattagcatgtactttctgtctatacctcttttaactattaatatattccttttcaacttctgttttgaattattttgagatgattaatgcctcccttccttttactagaagcaatgcatcctatttctattatttcagggcttattagagaaaaatgaaaagtgattattactcttttatacaaccactatttgtatatttattcatatgtttatgtttttctttctgtaccatcaaactgctcaagcctttattctgtgctcatttttttctgccttaagtgcatctttaatattttctcaatttttgtttgcctaaaatgtctttttatgacattcattcttgcaacgtaagttggctgtacatacagtcctaggtttacagcattttgaatatattattctacttaactctttttactacttctgttttctcaatgaaatagaaagcagaatcaatagatgagaaaaaagatggggaaagaagtcttggaggctggataagagaaaaggaggtataaaaatagtcatctagaagagtgaaagagtaaagggtatggagaggggaaattttgtaccattgctagacagctctaatggccttcttgaaagtaatggctgttcacgttctgtaagaaacctgctttaccccagctctgttcagctgcacacatgcaagtgtagaaaaaaatggaaagctagattagccagattgtgttttccccaggagtgagtgagatgacagaagaaaaaaaaaataagagataaggttgcatgcaagggactgattatagagggtaaagtggctatgagaatatgaggcttaggaaacactgtaaaagggattttaaatcgtggcatccaagattgttggaattgaggtactagctggtaagataaactaaataaactagtttttgtcattttcaaaattgcctc

SEQ ID NO: 22069 - DNA, 1050 bp, Homo sapiens
aatgttaatggagtgcttctaacatttcactactttccaaaacggacattatatgtatttcataggttcaccttatcaggacgtgatattcccttctattcttagttcgataagtgacatcttatcataaatccatgatgaaatttattgaatgtttttcctccatcttatgaatattctcctgtgtttcttgcctttatctgttaatgtaatgcattttgtgaaagtcttttcttatttgagattaaattcaacttggtttgctatgataaagtgagcctgggaatgattcattatatttgtatagtttgctgaattttctttgttaataattagtttaagatgtttacatcaacaatcgtaattgtgatttgcctgtaatcatcttttctcatattgtacttgcctaatcttgaagtcaacattatacttgtcacataaaataagttggaaatctttcagttttatgttctttagaagagtttgcataagatcgaaatgatttaatgctagaatgttccttagaacctatctgtaaagctgtctgaccattgtattttctttgtgggaagctttttaacaatgcgtaaaattgtattttgtgcttatagacttattctatttagctcatatagttattttgtaagtctgttttggcaagttgtggttttaagaatttgtctttttggtctcattctgttacataggctgcattgcatggcgtgaccttgaccgcctgggcacaagcaatctcccacctcaccctcccaaataactggaactactgctgcacaccaccgcacctggctagttttttttttttttttttttaattatttttgtagagatggagtcttactctattgcccagtctgtgtccttttctttttcacatttattgacccaagtttactcaaaatgcagattctgttgcctctctattcatcccctacatattttttctatccttaatattgagcatgtgtgctttatttccttttattacttaattggagtttcccttttataatgtgtctttttgaagattaa

SEQ ID NO: 22070 - DNA, 1884 bp, Homo sapiens
ccatggccagtatacaggaagcagagcaagctgctgaatttaaaaaacgatggactcaatttgttaatgttacttttcagatggaacccacaatcacaagaattgcatatgtcttttatgggccatatatcaatgtctccagctgcagatttattgatagttccaatcctggacttcagatttctctcaatgtcaataatactgaacatgttgtttctattgtaactgattaccataacctgaagacaagattcaattatctgggattcggtggctttgccagtgtggctgatcaaggccaaataacccgatttggtttgggcactcaagcaatagtaaagcctgtaagacatgataggattattttcccctttggatttaaatttaatatagcagttggattaattttgtgcattagcttggtgattttaactttccaatggcgtttttacctttcttttagaaaactaatgcgatggatattaatacttgttattgccttgtggtttattgagcttttggatgtgtggagcacttgtagtcagcccatttgtgcaaaatggacaaggacagaggctgagggaagcaagaagtctttgtcttctgaagggcaccacatggatcttcctgatgttgtcattacctcacttcctggttcaggagctgaaattctcaaacaactttttttcaacagtagtgattttctctacatcagggttcctacagcctacattgatattcctgaaactgagttggaaatcgactcatttgtagatgcttgtgaatggaaggtgtcagatatccgcagtgggcattttcgtttactccgaggctggttgcagtctttagtccaggacacaaaattacatttgcaaaacatccatctgcatgaacccaataggggtaaactggcccaatattttgcaatgaataaggacaaaaaaagaaaatttaaaaggagagagtctttgccagaacaaagaagtcaaatgaaaggcgcctttgatagagatgctgaatatattagggctttgaggagacacctggtttactatccaagtgcacgtcctgtgctcagtttaagcagtggaagctggacgttaaagcttcatttttttcaggaagttttaggagcttcgatgagggcattgtacatagtaagagaccctcgggcatggatttattcaatgttgtacaatagtaaaccaagtctttattctttgaagaatgtaccagagcatttagcaaaattgtttaaaatagagggaggtaaaggcaaatgtaacttaaattcgggttatgctttcgagtatgaaccattgaggaaagaattatcaaaatccaaatcaaatgcagtgtccctcttgtctcacttgtggctagcaaatacagcagcagccttgagaataaatacagatttgctgcctactagctaccagctggtcaagtttgaagatattgtgcattttcctcagaaaactactgaaaggatttttgcctttcttggaattcctttgtctcctgctagtttaaaccaaatattgtttgccacctctacaaaccttttttaccttccctatgaaggggaaatatcaccaactaatactaatgtttggaaacagaacttgcctagagatgaaattaaactaattgaaaacatctgctggactctgatggatcgcctaggatatccaaagtttatggactaaatgctgcaggtcagcagaaatttgcactaataatacttaccaacccactttgtggatatgaatcagaagagtttgtttattctttagtgtgtgtgtgtgtgtgcacgcgtgtatgtgttcagtgttgtttgcacagagagattgttttaaaaaatggcaccatatttggcctagc

SEQ ID NO: 22071 - DNA, 1034 bp, Homo sapiens
gctcagtgtttcagatacattctcccacgcttaaggaagacaggaatatgatatgttaagtttctgtaggtattgtaaaggccccatttctctaacctgcagtagtatttagaacctgcctgaaacattcagacaaagcaaaggctttactttgaatccttatttaaatatttaattgttgctaatgtttagaagcattggaatagggacttgggagtatatttcctttcttacatatataatttcagcttttattttagattcagagtctacatgtgcaggtttgttacatgggtgtattggatgatgctgaggtttggggtacaaatgatcccgtcacccaggtaataagcatagtacccaacaggtagtttttttagcccttgtcctcctccccatctccctagtgtctgttattcccatctttatgtccgtatgtacccaatgtttaccgcccacttataaatgagaacttgcgatatttgggatagtttattttcgaatgaaattcaaattgatcactgtatgcaatctcgtagaaaatttgcttttagcatgcagtggacattgtggcccagtaatcaatttctagttttatgtttattttcctaatttataaatttaaatcaataaattctttgagatttgcattgcatcacttattttatgggtttgataacttgaaaatgttttgtttagcaatgcaagaaaaagcatacctttgaagaggtcattaaaatccattcttcaaccagatgtattggtaggcttttatagacatttgctttacatcaccaccttttttatgcaattgtaataattttgaacaattacttgagaattacatttctaattaggatgtaatatttctcttagatattatattttctatctgcttagcagaggaattattttatattggaaaaaagctaaggtactatgattttatatgtgtttgtgttagttgtacctttgagaaagagttgtaaactaggaagactatcataaagagaggagagcaaagaaattgtaat

SEQ ID NO: 22072 - DNA, 1035 bp, Homo sapiens
ctaattcaataaaatttaaagttcaatttcttgttctcacgaactgtgtttcagtgctcggtgggctcctgtggcttgtggttaccatgttggaggccagatagggaacacccattcattcagaaatattctagaatgtgtttttcttactgaattctatgtgacagaaaggaacctaggactagatgagagcagtagagttttaattgctgaaataattcaaatgagtagaagacttttcaataaaaaggaacaatttgttttattataagtagcattttaattgttttgacagtcataagactacatttctgatttttattgtctttaaataaatgtgagagctgaattttatttgtttctatagataataactacacacttatgctgtcatataaaaggtactatctacatacttgacattttcattttatttacaaagtaatctgtgaggtaggtaataaggcagatagattaataccccaggattacaaaggatatagctaagaatgttagataaggagacaggtgtgtaattaaatagcaggtttatcatatgcttattcagccatccattaattggatgtttattgaatgtctgtattagacgttgggcttataaaagaacttcagagaaacttgtgtatttgaaaatatgagaaggaaaataatttgtagccacacctagtctattcacctgctctttgcttgcagtactcctcatataataagtacttaatgtatgtgatcttatatttgatcattacaacattcccttaaaatcactattcttaccattttacagataaagaaacaggattaaagagattttttttccacgataaaataatcaatgatatcaaaattcagtcttcaaatctcatgttcttattccactatgtgtttcttagcaattcagagaggcactttgtttcttcctttaaaaaaaaaaaaacactgatcatatctgtttaaatataaacatatttaaatataaacagatatcaggtttttgagcctgcctaggaaagcatc

SEQ ID NO: 22073 - DNA, 1028 bp, Homo sapiens
ggattatctgtctaatactgtcaatggggtgttgaagtctcccacgttaccctatgggagtctaaatctctttgaagatctcttaagaacttgctttatgaatctggatgtttctgtgtttagtgcatatatatttaggatagctaggttgccttgttgaattgagtcctttactatttgtaatgcccttctttgtcttttttatctttgttggtttaaagtctattttgtctgaaattagaattgcaatccctgcttttttctgtttttcattgcttggtagcctttttccatccctttattttgagcctatgtgtgtcattgcatgagatgggtgagtgcctgcaggcaaggcggcatgaaggaggctgcagtgggggaagaatgctggtgcgtgtccactggggtcactctgctagagcactctgctagtcaggcagtctgccagtgcaggagctaccgtatgggcccgtacctgggagcttcactccaagcaggtgtggctaggctcgggctctgggagaagccagcagaccaaagggtggaccagattggccccatctcatgggcaagaccaccctgcagagttgaggtcccacagttcccctagggataaagtctcctatgggagcaagtctagcctaaggggatgggcatccttggccatgctccgctatagacactcccataccaaactctctgggctctgccccagctggagttctgcttccactgcttccctaagcagctttccctgacaactcaaatgtccatggtggtccaggggttccttcctaccaggattccagcggcctgtggggagagcgaattttgttccttgccttttcaacttccccctctgcaggagttgttgggggccaggaacaagttgtggtgcttggtagccccgagcagggtccccagcttcctcccccttcagccccagctctgtgttttccctccatctgctctcgatgccctccctctgaagatctgctaggagtgtgccagtcttcctggtgtcccag

SEQ ID NO: 22074 - DNA, 1049 bp, Homo sapiens
gcagtcgctacctgcttacctgtgttcactcaaggccctaggacttcataatcagtaggtgacaaagccagccaggtttctgtccttcccttcagagcagtaagttcccccagaccctgagcaggtccagagatgctatctgtgagccagggattagagtcaaaaaccttagaattttacctgatgttctattctaatgtgactaacctggcactcaaaccacaatactgggtcctttctgctcttctctcccctttccacaggaaaaggagactctccttttggccaccaataccacggtcccatgggagttctaccacgctgctgccaatgttcacttagagcccaagggcacttctgtcattctgtgacgaatgttgccagacctggggctcacccttcaggacaatcagttcccctctggcccagagatggtccagaaatactgtccaagaggctcggcctggattcagggagcccaagagcctacttgttgctctacccactgtggctgagctgatacctaagatgcaagacaaagtcccctttactttcccctctgcttttctcaaacaaaaggagtcttttgttgtagccaccacagctgcgaatgtgctgggtcatacctaaagtcagcacgtcccagagcccaaggcctgtggtgtactatctggatattgctgctggttattcagggcctgagggctctttagtcagcaagtaatgaatcctgccaggactggtttcttcccttcaaggcagtgggttcccttggcccacattttgtctattttgtcatccaggaatgggcctggaatggaggtctcacaactctgcccagtgccctgttctattgtgactgagctggtatctaagatgcaagacaaagtcttgtttactctcttcctcaagtagaaggaaggagtcacttttgttgctgcgagccgcactgcctgggattgagggagaaatggtgtaaggcctcccttagctgccctggctgttgtctccctgtgtcacatgccaccatagtccagtggctctaagcc

SEQ ID NO: 22075 - DNA, 1025 bp, Homo sapiens
atttttcaagtttataaaatgtaaaacaacacatgtaattttgattaaacaaaatcagttctcacaacaggaaattaataatgactgtttcagtgtaaattcctttcagtttggtctgttctttccactctgtattaagtttgtgaatcagttcatgaccactcatgtgctgtctgaactgctatgaaatatttgtttgtacattgtgccaacactgcatactaagtcttgcttttaagttctggttggcaccagctcctttaacagttgcaacacaatcacacaagttggtaatctagatgatccagagtatagttactttaaaatcaacttgatttcctttttgttgaattttgaagaaattttcaaacattcacatctgaaattattcctttagatatgttctgcacatgtgcaggcttgtctgccacgtgtcctgccctgtatactgccagcttgcaattcctttctgttctcttgaccgaagaagcaaaagggcatctccaggctaagagcaaaacacatttatgctgtagtccaacagtggcttcacttcttgatgactctcaggaaaatcagaaatctctagaacaacttagtgatgtaatccttcaggtacgtcatttcttggtttttcaaaaactttatttagcgtttaaataaattgactttcagtcatggtcttgttaaaaactgtctcagtcatttaaattaagaaatagtaatgcttattatgactgtttaaatgatacaaaagtttataaagttaaattaactatctcctccttagccccacccgcttatgttgaccagtttcttcagtgaatatgatgtaaagatttgaagtgaaatattactaatctaaatctaacagttgatcaaaacagtgtttcatatcatgaccaaaatggatatatttcagaaatgcagttatggttcaaaatttattgtaattttaaagatatatctacgtctctgaaaatatattctaagtgacatttgatttctagaaatggaccacagat

SEQ ID NO: 22076 - DNA, 1068 bp, Homo sapiens
tttttctattttatatgataaatatgtttttcttttgttgagaatatattaaacatcttttgaatttagaacatctctactaatgcagtaaaggcccacacctactagttaggtaatatagctcttactagaacttgcttagcaaccaaaccctttataggaaacaatatatagttcaattagtaaatacattttttacaaatttcattttttagagtgcaaacccactgttagacctcttggttctgacagagtcacaggcacgagaagaaacagatgatatccggactgctgtcaggcaacaacttcagaaagaactgattgctctttttgataccttgctgctcaatttcatggaagttactgacaggtaccatttgtaatattgcaggtttaggtgcatttatatagaacccaagttttctttgattttcaaagttttactttgtacttctttcaaattaagaaatacttctttcaaatacttaaataataatcagttatagtgttctgtttgtttttgtttcagtttaatctgttacagcctgattgtacctgcttggtctctttcactacacacatgcactcacatatgcacacacacagttttgttctctagggtttaattcctggttctctcttaattatctacaaatctacttgagcagtcatacctatgcctatgactttatgattatctttacactgatgactttcaaatacatatctctagttatgaattctgttttttaaaaataaaaatattaagatgaaagtcactattttaaccattttaaaatgtacatttgaatggttttagtatatccgcaatgtttgcaactgtcaccactacctaattccagaactttatcatcaccccaagagaagccttgtatccatgaaaaagtctctccctattcacacattcctctgggccctggcagccactagtcttctttctatgtctgtggatttgcctattctggatatatcacataaatgaaatcaaacaataatgtgacctttagcgtctagcttcttcacttagcatcatgtttccaagctcct

SEQ ID NO: 22077 - DNA, 1033 bp, Homo sapiens
tttttctgcctccatctgagaatttgtttttttaagagttttttattatttaatgtagtgcacttatattagcaatgatttctgtcaggttttttttttttttaatctaaaaattctttctgttttaaaaaatgttatcactaggtatagaattctaggttggcagttggagtccatttttttgtaggaacattggctgtcagttttattgttgcttctttgaaggaactgtgttccccattctcttaggagttccttcagctatatcccacagcactttgcttgcttgcttatttatttgggggagtttattttatttttatgggtatataatagtacatatttatggagtacatgtgatattttgatataagcatacaatgtataatgatcaaatcagagtaattaggatgtccattacctctaacatttattgattctctgtgttaggaacatttcagatctgctcttctagttattttgaaatatacaacaaattactgttaactatttttaccctattgtgctactgaacactagatcttattccttctatctaaatttttatgtacccattagccatcccttcttaattccccccttccccaccatcctttacagcctgtggtaatcatcattctactctttatctccatgagatcatttttttttttttttagctcccacatataaaggagaacatgtgatgtttgtttttctgtgcctggattatttcagttaacgtaatgacttccagttccatccatgttgtttcaagtgacaggatttcattcttttttacatctgaatgatactccattgtgtatttataccacattttaaaaaatccattcatctattgatggacacttaggtagattccatatcttggttattgtgaatagtgctacaataaacatgggagtgcatatatctctttgacataccaatttcctttcttttggatatatacccagcagtgggattgttggatcatatgtaggttctgtttttagttttttgaggaactcca

SEQ ID NO: 22078 - DNA, 1052 bp, Homo sapiens
ttattttattattaatatttagctaaatattgacattagaaaatattttctatgattttaattctttagagtttgttgaattttactttatggcccagcatatggtcagctttttaaaatgttccatgtgtacttgaaaataataatgtatatgtagtagttgttggatatactgttctataagtctcaaaatatatcaggtttattgatagtgttcagatcttccctgtgtctactttattatatgtgtgtgaagttctttcaggtagcagagaggcatgttaaaatctccactatgacattgtcattctggctgacaatgtattttgaggccatgtaatttagtttgtaaacatgctggtgggttgtctctatcattatgaaattatttctttatctctagcagtgcttcatcatatagaattcactcgatctcttatgactgtagcttccccagcttttatttggttagtggttagcatgatatgtatttttccatccttgtagttttagctgttctgtgtccttaaatgtactttttttttttaagaagtatatagttgagtttttttgtccaatctgacattatttacagttttaatggaatattttaatgcattttacatttactataattactaatatttttggatacagattattagcttgctattttctatttgtccaatgtggtttttttctttctttttcctctctggcttttcttgattaatttttaaaattagtccatgttttccagctgttaacttgtagttacatatacattaagtattttatttatttatttatttgtagcgattgggatcttgctttgttgcccaggctagtcttgaactcctggcttcaagcaattctcccacctcagcctcccaaaagtgttgggattacaggcatgagtcactgtgcccagctaagtattcttctatatacattatttctatatattttatacagatgattattcttttataatatagagattataatttacttccttgactgtgaactagtatttttaccacatcccagac

SEQ ID NO: 22079 - DNA, 1031 bp, Homo sapiens
ctttatttctgtttgcctgtgatgattcaaaggagtagtctttgagctctgagatttttttcctcagttatgttattaatgcttccaattgcattatgaaattcctatcatgaaatttttgtttccagaagttcagttttgttcttacttaaaatgtttgtgtcagatccaatcatggatcaaaccaccattttactggtttccatgggtggggcttcagccttcttctatatcttgtcgagcttccttgccttccagcttctgaattctgtcattttagccatttcagtttggttaagaacgattgctggggagctagtgtggttatttgaaaataagaagacattctggcttttagaattgccagaattcttacactgtttttttcttacctgtgtgggcagatgttcctttaatctttgaagttgctgtactttggatggggccttttgcttttatattatttgatgccattgaggattttactgtggtataagttgggattagtcaattggcttggtttctgtgtgctttcagggccagagctcagctcagcacccctgggctgtgtgctctaaccctgggggtgcactgaacaggccagtggctttgatttctggtcccttgaggtcaagcatctgctgcactggaggagccgagatgttcccagactgctggcaacaactttccgatggtgactgcccgagaaagtgctctgggggggcgtggggcggtgctttgggagagtgcacttgtggtgggggtaaccatgggcaagtgcgcactggcaggggaggctgcaggcaagtgcacaccagtaggtattggctgtgggtgggtgtgtgcttgcaaaagcgctctgacaggaaggcagaggctgttggcaaaagacctatggggtggctgttggggagcatttcggcagggcagctgaggctgtgttgcaagctagtgagacagacaggaccctttgagaggctggcagacagggtggcattcagatcaggttggcccagtcttgtgggaaagat

SEQ ID NO: 22080 - DNA, 1034 bp, Homo sapiens
tgccacgagtgaaagctgaaacttaccactgctgtctggaaatcacgaaggtgaggttttgttttttcgtatgttttgtttttgagaacaaatagtagactctcttgttataccttcaaacttaatttacttgaccttttgtatgagatataagaactatatcccataaaagtagatgataattactagtcaattctggaaaatttgtactattaaattctcttaacttagtaagtccagcaattgaattgctttatttgaagttttattaagaattacatttatgttgtattaatgatggaaaaattataaggaaaattgatttccaggtattcaaaagtgatttctatgcccaggaaaccttttaggttgttgtggcctagattttatggttttaattctgttttttttaatgttattttttatttttcttttcttttgaaatatttatttttctgtcttcttaaatgataaaatatttcagcatagaatattaaatatttcaatattgaaaagaacactgtacataggacaatatttaaaagtatatatattactgcgtactcttgaaagtgtccttttgtatttaacactcttgtaagtactatttggttataataagtgtttacattttgccatttttacttctgattcatttttattcaaagaaaaatactagttatagaggaagcttctttgctttctcttctcccaccagcatagcctagccactcttacacagctggtgtatattcttcccatccagttgttgtatattatttataaagctgtatctttatatataaatattatctttaaataatttaaagaattttatatatagcatgattagtatatatagcaggatttgagatttgcctagttcattcaccttaactgctattaagtttgaatatacttccttttattgaatgataaatatttaggttcagtctcctttttattgaagtaagtttttcagtattttcagtgacagtctgtgactgtgtgcatacgtttgaaaatgtcatgat

SEQ ID NO: 22081 - DNA, 1050 bp, Homo sapiens
aaaggactaaatagttatttattgattgaataagaattaaaagtttataaatataaaatactagaaagctgatgtggaatggctgctgggtgacattgaataattttctgataccttattttatttctcctttgtctcacctgcatatttcaacccagtttattatgattaaacatgaaagagaggcctagttatttggcattgagaggaaaaaaaacaaaagagagagatgggcacatgccactgtcaatcctgctttctttccacctctgggctgagcgtaggctattctattatctcttttgttttttatttatttttatttattatttatttatttttgagacggagtctcactctgtcgcccaggctggagtgcagtggcacgatctcaactcactgcaacttctgcctcccgggttcaagcagttctccctgcctcagcttcctgagtagctgggattacaggtggctgacaccatgcctggctaatttttgtattttttagtagagacagagttttgccttgttggccaggctgatctcaaactcctgacctcaggtgatccgcctgccttggcctcccagagtgctggggttataggcgtgagccaccgcgcccggccttgtctcatcttttggccattccagcttaagatagatcgtagttagagtaacagcctctcttaggtcatcactcatctaccactgggcccccagttttggtggcttgcatattcctctgaggacatcgggttgcattgggttacaaagcaggaggtaagctgtggcagctctgggcctggcaggactggtgccacagtgccctcctgctcttgtccctcagaagcaggcctgtccctggtccttccctgtaccccaaggtcatcatgtcagaattggtggcttatgtactcttcagagattagaggaagaattagcacacctgctttattttatccaatgagacaagtgtagtaatggtagaagttgaaatactggtcagggcatagtgaccaaaatttggttaccagtacgttttagaccaaa

SEQ ID NO: 22082 - DNA, 1032 bp, Homo sapiens
gccagtcccatgaaacctggggttttggctgcagctctctgctctctgctgtggtgcccttgaggtgggagttgagactcaacatgtagggcagggcttagacactggaccaagttgaggactagctaaaactggaatggggttgaagcagctttccataagacataaccaccagtgtgccatgtcagtttaccattgccacggcaatacccgggagttactgcctttttctatggcaatgacctgacaaccccaaagttactgccttttacctggaaatttctccataaaccacctcttagtccacatgtaattaaaagtaggtataaatatgactgagcagtgacgtgacatgcagcccgcggtctgtacggacgcgccctcgcttcttcctctttctcgactccatcttcgcagtagtggcagctgggaccgcggttcagtcaccaatatgcagctctttgtccgcgcccaggagctacacacccttgaggtgactggccaggaaatggtcgcccagatcaaggctcatgtagcctcactggagggcattgccccggaagatcaagtcgtgctcctggcaggtgcaccgctggaggatgaggccactctgggccagtgcggcgtggaggccttgactgccctggaagtagcaggccgcatgcttggaggtaaagtccatggttccctggcccgtgctggaaaagtgagaggtcagactcctaaggtggccaaacaggagaagaagaagaagaagaggaagaagaagacaggtcaggctacgcggcggatgcagtacaaccggcgctttgtcaatgtcgtgcccacctttagcaagaagaagggacccaatgccaactcttaagtcctttgtaattctagctttctctaataaaaaaaaagccacttagttcagtcaaaaaaaaataataataaaataaataaataagactgcagaactgccttgaactgctaacctctgtctctgcaggaacagtcacgaagctgtcacactgctgcttcagttaagct

SEQ ID NO: 22083 - DNA, 1056 bp, Homo sapiens
ataagcacttccacttaggcactccccagagtccagcacagactggaggcagaacaaggaaggactggaggcggccggtgatgacctcagaaaattaggggcagcagggcaggtaggagccagggtggggagaatgggagtagaaagcttttggaaagctgggctgagctgggctggggacaggaaggctggacctcttgtgcatgtcagcttcttggggcctttgtagaccatacatgagatctgaggagccctggggtctctggctgccaggtgggacctttgctttgaccagcaaatcttaaaaagatgtggctatcatttaataatgggactggtgggtgacagtataggcagtttgtcacttgcctaacttcagtgagtttattttcataactttcccagtcctgtggaggcaaatatcttctcactgctgggttccacaagcacttcattcagatctcatctctaacactttctgcagtgtctccctggagactgcgggctccttgaaggcaggacccatctcacctcactgtcatctctgtattcccgggactttactgtggggttggagcatagtacctgctgataagtgttagattaaggtatgcttttcactttcattttaaaatggaacaaaagtccacacccagtgcctcacaagtgtatactattgcaggatttcaggacaggcactccagttttttccagttgtaaatgagaccctagagagctggtgctggttcctttcagtcccacaccacagcctcaggcaaatcacgggccttcactgcctgaggctgctcacctggaaaaccaggtgaaccgatctgtgcaactgggaaggcgaaagaagatagatagcacaggtctcgggtgtccacctgatggtgcaaacaaatacatatttgattcttcagaccagtttgaatgttctgttgccagcaaacccatgtgcttccttagcactgcccagaataaacccaagtgctggatttttcaaaagtctcagtagtgcctaatacttgggcattggaattggagtctctggac

SEQ ID NO: 22084 - DNA, 1057 bp, Homo sapiens
atgaaaatcctgcattatgtacttgaggaacattccagctaatgaggatgtaatgtcctcagtacaacgcagaccttctttttgtgttcaccaccacaagatgctggaagcttgacaaatgatatcatttaagacacatgcctgccttagggacctggtttttggcttcctgtttctggcttttatttgggtaacgtttataatggccacccgacttgtacctgggtaatgttttaaccccttccccagagttctcaattagcatgaatttactacagtcagagtttcctttaaattggggtgggggtgctaagcactgaaaatatctttcttgattactttaccatgtggacatatgggataaatactgtatttcagatttacataaaagtagattagtaatgcacagctttcagaataaaaactgataaaaaagaccaagcactatcaactttggacagtaatttcctaggtgttaaacaagttttctgaatacaatctggatgcaaaacggcctgatttgatgaattcataattttcttctgtatactttcattttattaaatattttattacttggttaaacacaagaattatctatgtaaacttcatgggcttttttgttgaaagttagatgttcagtaactaatttcccagttatggcccagaattaaacatttatgatcatatttcagaagtcaaaatacaaaactggattatcaaaacggttggtgtggtcactttaaactggactatcagtatggttgccgtggtcactttaagcgggattatcagtacggttggtgtggtcactttggtttatcatcaatacagttggtgtggtcactttaaactggattaccaatatggttggtgtggtcgctttaaagtttgttttcattttttttctatttttaattcttacgggtatatagaaggtgtatatatttatggggtacatgagatgtcttgaaacaggcatgcaatgtgaaataaataagcacatcatggagaatggggtgtctacctcctcaagcatttatccattgagttgcaa

SEQ ID NO: 22085 - DNA, 1111 bp, Homo sapiens
caactggcagtgggtcggctcctgtccccccacttccagagcaaaccctaccgtcacttccacccccacgggcacctttcctggagtttgctttacagcctaaggcagaggcactgagacgggctccagctggctctgccctgggctgctgctgtgaagtccagaagcaagctcccagggaagtgggccctttttaaaacgccaggccttgagaattatgtaaatttaaaggaaagatggcaggttctttcccttctctaaaaatagaatgtaggaaaaaaaaaatagaacgtaggcatcttgatattaaattccaaataagaaaccagcaaaactcatcttcccccttctcatgattgtgtatcttccacgggtatggaattgtgtggggtgttattgaggctgtgtggtgtgctggcgtctgaatgcagcttgacataacagaaagcagttgctccctgcgttcttatttctacaatatacagagacttttctgtcctgtagatacatgggggatgatcataagtgagcttttataagcgcagagtattacctatatcaccgtgaaagtgtatcgcatacaggacagttttggcttattaagttaaattaaaagtgaattccttttaaatgacctgcttaacggctttcctcctccaccagttactattaccttttcattctattacaggtggaaatgacatttttagggtcttccattatgtgtctaagccaccttctgacattcttagtagatggcttttttcctcctatgtatcaggatatttttgttaggaggtatactgagatgaaaaaagctgggaaaaatactggcctcgcaattaaattgactccggataccaagatgaaaataatcatctggtattaatcaagttatgtctctgcttcttgttgaggaaaaatatagtaacgatttgctttccttttcatttgaaaaggactgtgaaatgttgaatgtttcataaaaatcgctctacccaatttttgttcaattaatcaaaatgcgtattttcacactggatgtagttacatcagaaagaaaatttgcgacagccactctaacagtgcttcaaacaacccctgcaggaac

SEQ ID NO: 22086 - DNA, 1028 bp, Homo sapiens
gggcagtttccatggagtggtggatagaattcagattgcagcgtgcacctatcacagcaccagacatcataggatgtctaccgctcagctgcccttgcacctcagggaagcccacagaagtcaggccctttgctggacacctgctgggtttgtgattaaccaaaatagcaattccctttctgcaatgtctgatggagaaccagaatttaaatttgcactattaatagaaagaatttagcagccactgtaaatcagttatgcaattttaaaatggcttcttggaagaaaattgtcattggggatttccagactatttcttttataatagtactactttaggaaatgatgaagaagcttgttaaatgtaagattgcagaggagaaaaaatagtgaactcttcagttgtgatgaacttacaatgtcactgaaatattttcttagaaacataattgcaaggcaaataagtgattataatataagatgtctggcatagatagggctgtttattacctttagatacattctggattatataaccatgagttgatttgttgaaaatgcttcttgaggacagggccatgtttatgtgcctaataccttacactatgtctggcattttgatgaaggatggagggaagcgaggtgaaaaaggagggagggaaagaaaaggtagcagaaggaattgcaacggagtctccaggatgtttgaagttcattttaatgtcctatactgcatcacttccagctgaagacatggaaacaacaggcaaatgagagcacgtcagtgacctttgagggattgggaaaactgaggaagtgccagaaagtagacagatgtgttgctcttgttttaaaagtaataagatggtggattcacacgctatataccggtttgtttgagcagtcttctggaagacattattaaagaaatggtctgagagcacctggaaggaaaagcaattcaccaagaacaatgccagtgtgccctgccatgtcttcatctcttagcccaaagctcatgtagaatt

SEQ ID NO: 22087 - DNA, 1051 bp, Homo sapiens
cacctccacgccaaccccaccacggccctgccaccaccaccacctcgccaccgcagggacactccggacgcaggcccggccaggagagttcgtctgcatcgagtgcggaaagagcttccaccagcccggccacctcagggcccacatgcgggcacactcaggtatcgccctcccgcccagctatccccaaggggagcagaggaagaggggtctcttctgtcagtggcttgaccatccgcagcgagggagatactgagatttcagcccctaccaggcggcggggggcctgccatctgcctccgggatcgtatacaggccgcccccactccacacctgaaatgggtttttttggtgtccatgtgccatgtggtttaatttgagataagcctgtttgcaaatgttccattttaattagagagtaactgactcctcagaaatgaatatgctaatgaatggcattgccaccagcacacatttaatcaaagcacccttttagcacagcgtaggcttggttttgtgtcctcactggcactgactggactctgtgggatacacccgggcccctttggaccatgcaggatgtactgcaaaatccctcagcccttatgtagagagcttgcacccgatcgggctggaaactgtcaggacagcgcaggggcattagagagacagggagacggggttctctatcaggagtgtgaaggatgcacacagaagctggtctgatgcaagatgacacaggccgagtggtaagtaatgcaagaagagggtcccttacacacacaccgataattaatgttgtcagtgattgctttcttcagcagcgaggtctgaattaaaaagggcagtggccccaggcagccattatcacagtctcttactgtaagtgttacggtaaattggtattttccagccacaggctaggcgctggtgtctttttttgtggaagtacttaatctgtaatggactcatttaatgtgcacgtccggaagctcacacgctgatctgttaacaaaccccttgttcccacagtggtgtttgagtccgatgg

SEQ ID NO: 22088 - DNA, 1006 bp, Homo sapiens
aattctgctgcctcagcctctccagtggctgggactgcaggcatgtaccactacacttggctaatttttgtatttttagtagaaatggggtttcaccaggttggccaggctgctcttgaactcctgacctcaggtgatctgcccacctcggcctcccaaagtgctgagattacaggcgtgagccaccgcatccagtgtaaactactatttttttgtattagaacccagagctgatccattgtggtgagacatttaagaatgtgtggtgtctgtgtgtgcacacacgtatcacttgatttgaaaaatagattaaaagccagattctctatgtgtttaatatcacatagttggtgcgaacatgattggcccattcttctcatgacttatgtcattttaagaaatttaagaccaaattttagaatttattggtttatctttcacataattattcttaattgagcctttaaacaactacagtgctaatgaagtaggtaaccttcttcgggtgaagaaagttaaagaaaacctgaaaagagaattttgatcgacagtagtatgtagattcaaatagcagtttgtggtttactgtgtaactcttgaaaatcaccagagacacgaaaactgtgtacattcagcattgcctgtattgccagctggtatacatagtgacagagggcatttgttctgtgatcagctaaattgtaagacattatattacattttagggatgaaaacccttaaaataaactgaaacccagctgaggaaaataacacgtggaactggtatcccaactttaaataagattatttttcagtgaaatcgtacttcaggatatgctagtatgctgttcaagaaagtaggaaaatggcttgtttcagaataagtaggcttttttaaacaactggattgtaaacaattggtaatgctgaaagccaaacaacaatgaaggatttcactaatttaatgtaaatacataggaatctatatatgtacatgttagtcttt

SEQ ID NO: 22089 - DNA, 1035 bp, Homo sapiens
gacttcctggtatgacttaggctcagtcagttcttaaaggaatctgtggcttgccatttgatttgcatcattcttagtctgcattttcatcatgggcacactgaattatttcataagtttagactttcttttaaatgcttgaagcatttaagttttatttgataagtgtttttgtgtgtgtgtgtgtgtgtcctcgtctctggcacaagttcgtaatttttcatttgtgtgtatgtggtttttctttttgtggttcttagataattttctgtgtgctggacctaatctgaggctagtttttcatgagggatttgtcggctattgataggatccagtatttgcatatataatttgcataagcctttgcatattaaaatggattgccattttaggtctgtattttactagaattttaaaaagctagggatatttgtctctggattaaaggttagaaagtaagactccagttactgagattttacctgattctgtatgcatggttcacatagcgatatccatttacaggaggccttgtctcctgctttctttacaaaggaagccattgatttgaaagaagtattttcacagattagtaagacatttgggcgaactgttagctgccaaatatgttcctgtatagatgtgccaaatctgagtgttactcatgttctttctcttaactccagaatagttacgttcagcactatgaataaattctcttccaaatttaatacaattactgttttatttaataacctacttggttactgaaatgtatcacttaaaatgataattccacggtgccatttgttgagctggccatcctatagaaaacttacatacatgcttgaatctcatatctgaaacctgatggagaatggcagctgccttcaaagtcatgaaattaggttgttggtacctatgataatccagtgattgattccaatatagacattattgggatagtttgttcattggactggacaattagagaacatttttgatattgaaatgatggccaggtttccagtctga

SEQ ID NO: 22090 - DNA, 1117 bp, Homo sapiens
caaagaataagaccactctcctatattaccagcttaacacaagtaacagtagttctcaaatatcctgtaatatccagtccatattgaggtttaatttctacgaagagttctggagctacaatatgtttgaatgtgctcgttgtagatgattataggtgttggtcaaagactttttaattgtgttaaataacctgttgttgtataaaccataagggcccagtgaatatagaggtgttcctatttagctattttgaatccagctttctagctgctattttgtccttttgcatttattaaaccatgtattgtcattgccagtgaccaagtacctttgcactgatatttcattcacttattgaacaattacttattaatcccgtctaagatggattgaagatttacagtgtagtaaacattgtggcttgtatgcattaatttaaattttactggagtatgataaaatagatatcattgctatcatttacattttaaagatgaagaaatggactgaggaatagagaggctaagacacttgctcagggtcacacagctgacctcaggtagtggcagaactgggttttaatcccaggtagtctggctgcctctcacaacttgttgggtcaccagactcttatcattggctgaaggaggtcaggaaggctgtactgtacctgggtggtggttggtcagcctcatgacaggtggggcagggacgcaggcctgagggccagaggagagcatgagcatgggtacttgggaggctgttgggccggagtagggctcagggctctagacaccggggtccagggcagctatggggttcagaccctgagaagccaaggtgaagagtttggcttcatcttgcagacttggggagcctctgaagggctgggagactggtggagaccggccccatctgtgctctggaacgatggctttggcttgacttgggcacatggattcaagagtgagttgggaggtgcagccgacaggatgtggggttattactgggcactgctgagatggggagggaggagccagggaggacctggtgttttgtgcttgggtcatgaaaagtacttagaattcaagccacaccagtgtggttcccaggtga

SEQ ID NO: 22091 - DNA, 1085 bp, Homo sapiens
tgcgtgttgtcttactggcaggctgcataacccttctcctgtgctgtcagcttaatttagcctgatgacaaatctgaagcctgtggtcttccctttctgtggcttccactgttgcagataaaacaggtggtacctgtgcgtgatttacccagcctcacagcacaatataacagatgcatatttaatgcagcaaagtgattttggaaaacaacaaaactcagagtaaacgtaaaacaagaaattgaaagcagtattatatgtttgcatgaatagcttggaaaaaggattttaagtgtaaagctgagaaagtatttgtgtttaggatggagccactggcccccccccaccccccagcccccatgtgaatcagtgagttttgccttctgagttacgttacccagataaagatgcagcagcagagtctcgacctgcgccttcattctgaccgtcggggttgactgtgtggcccagtgaggatgagccacacacacattcccgggaggaagcctgggctgtggatggcaggctaaagttacaaagcacattgagggcgtcctgatgctctggacttgggtggactccttagcttgaagctgtgggtcccagaaggctggccgggataggctaatccctgagccgacttttaacacactagtttatgtgacttaacaccagctaagtggatgacagtctccttagttattgatggataaaatggaagcaagattttggggcctttagttgagcaaggtctccagcgtgcttatctctcttgcctccaattcttagtcatccagattttgttttgcagcaaggtccctgaataggcactactgctcatcgccccagagttagcaaggcagaaaaaggttctgcttgagcagtttaagctgccaaagaagtcaggccaggagcgtgagctaaagtgagcatctattgtttcacgttcgccagggctcctgagaagaggggcgagcactgatgctgtctttatctggagtgacaaaggaaggagtgagtttggtggcatctcattattgatgggtcctaccatcctccttgagttacagacgatacctgactgt

SEQ ID NO: 22092 - DNA, 1029 bp, Homo sapiens
cagggcatatgcatagcaggtgttccctggtgacattttgataggctggattgacaactaaatgcagattgttccgctgctacagttaggcggcgtcctggttaccttcgctgctgcgtttgtgctgtgactgttgaatgcttctcctgctcctggctgcccctcacagatgtgggaagtcctattagaaaccacactgtgtgggattttcccagcagccccacttggggtgatttaattcattctgaaaatacctacggtagccccaaaacgtccttgggcattgttttaatttttcttaaagagaagcagtggcaaatggttcttaaaaacataattagatgaatactaaacttttcctcatttcagaatctgagagaggccgagtggagttcggtccttctctgaacacttttagctgagagtaccagcatccaactgggagcgttgtcattgcatttccacattcccaggaaagcccaggtaggtgcagttggatcaccttcctgtcaatccgtctgacttctgtttcacaaacctggaatttcaatcaagcttaaaacaacagttattactttatggtgtagggtcgcttttcttggcatagctagaaaaatgtaaaatgatggtaaatagaagaaaaataattaaaccagagcacataactgggaagccgcctctgtgggctactttgatgaggacatagggatcacagtgtgaatgaggttttctgctgaaaaacagccagtgtaagctgatcgtagaacttggtgctcctggggtggggggtccattcctttttatgatctggaaaactattggctcgaggatattagcttgcatatgagtaagacccactttcttttcttgcccaagtttgcacagcttattacagttgggcgatgtttttgggcagacagctctcttctcttctgggaggtgccggagcagagctgcctaacgcagtgatggaattgtgtggtgcaggcttcatctgcgtccgcacgggggcaggtttcggttgttacc

SEQ ID NO: 22093 - DNA, 1036 bp, Homo sapiens
tttttccccggacagaacgaatctcgccttttgtcccatgtgtctcaagactgctgtccaactcagttttgtcacattttcaaggctaaggcagagttaaattgcttcctcattgtggggctgggtcccgttcttggaggtgacacttcaggttacctgttactcctgcttatggatctgatgttcagagcagcaagtttattactttcacggagggtcagttttcgtgcttgctatattagtcactgaaatgcttcttttgataggtcagatgatattgaaacaaactagaattctgtttcctgtctgacttgtggaattgcagtatcagtgttcagaaaacttaccagacttttgaacgtaagatcgactagcattcaagtagaattacaaagtccaaacgatatgactcagctgggataaaaagtgctgttttatcttttttctgttccagtgactcagcaaaaacagtgctttggacatacggaaatgtaggcaaacgaatatttctgcataaagggaaaatgtagacctttacttttaggacgactgtttgttagtggaccagcccaaaattcttttcagagttttgcaaatccacctgagtctccacaagtgcaatttcatctgtgggttcttctcttgaaagtgatttaagcctccgtagcaagtcaccccgcaccggcatacatctggggggctcaagagcttaggctgtttctatccagtcatgtgaaatttatagttgttcagttgcctacggttcacctagtcaggtgggacctcagtattacaataaatgaaggtgttctgattaaaacatccctttcttagacaaaccatgactggttttggaggttagtggaaaactgacacaaaactacaagcttacgtttaatcgcttggcagaatttctttcatattcatttgaccactgtttaatatgctttaagatgtctgaagttggagcttagaatgtacactgtgtcctacttttaaatgagaggaattccagtagctaagaccaatcctattc

SEQ ID NO: 22094 - DNA, 1044 bp, Homo sapiens
ggacaagatggccacaaagaggaggtgttggggaccccagagagctgaacccaggaaagtgtgcattctcctcctttctttccaatggtcaggttggctggcttgagctgtgtctgccccgggttgctgtctggacctttgcagattattaaacacctcctggaggagtctccaccccgcctgccttctccagcaaagcaggcagctgggccagggagcaggtagtttttctttgttgtgcaagagccgcttaagaaacagtggccttttgcattctcaacatgagcaaacgtagccaacaccctagatttcttttcttaagaggaaaaaaattagtaaattcagaattttttttcttttcttaagaagatagtactgagtactcttcattatttacccgaacctatatactaggtgattttgctacctttctagacatttctcaaaataggaccaatataaatgaagaaatgcaaagacttatttaatcagtgtagtcatttatggacttcatcctgtaggccgtggtgtgaggatttttgcaggctcgtttgagtatctggtcattgaaatctcactatttgtatgttggtaataatagtttgcttgtttctgcctatttcattgcatgagagaatgaagtgtgcacgtaaggtcacacgtttgatacagacagatactctctaatttacgacagggctgccttcccagaaacccatcctaagttgaagatacttttaagtcggaaatgcgtttaatacccttcagtctactgaacatggtaacatagcctcacctaccttaagtgcgcttggaatgggtaaatgttagccgacagttgggcaggagcacctggcagtgcaggttgccatgaagtaccgacgtccaccctggagatcgcggggctgccgctgccgggcctgtggagggagcagctcactgctttctgctgactgcctgtggcttcctcacctggtaaagttgaaaaagtgtaagtcaaactttcctaagttggggaccatctacagtaaaatacaaacaaaa

SEQ ID NO: 22095 - DNA, 1057 bp, Homo sapiens
acgaacacagacccccacccccacctccaccccacccacagctcccagtcaggagggcttcttccctagaaagggctgacatcagcatctcacattccgccctcagctcctggggctacgtccttggggagtccggtggaggggtggggctccctcctcctgcccagtccccactctcgtgggtgggaggctggccttgggtgtggcacactgagaaggcagggcctgactgcccttgctgcagtgattccaggccaggagaggccaatggggtctcagggtgctatcaagctctcagctcctagagagggagggtgtcattcacactgaggctcgcagctgtccccatcccccaaatccctggctcagagattcctgcctggagggagatgaaggaagtaatctcttctcaaaggaactgacttcctttgcaatggaacatgaagaagtttacaccgaagggcactctcaacgctattggaggtggtggtgaagggaattaggattcatgcgtgtgctgaccacgtagcctagactgcacgctggctaaggtgccggggaatgaggggagaagacagctggcaggagccctcctggggtcagagcaatgtcaggcactctcagaaagcaatgagaaggagctgcgatatgagcaggttgtaaaggaataacagagctttcagctggctgctaggagtttaactactgggtgtggtcagtgagacagagaagaggttgctccccaagccctgtcatcccagggtgacggtggcacactggtgcttcgacaccgagactgttgctggggaggaagaggggcacacaggcatcacaacagtaagccagccagtcaccaaagactaaaccagtgaataacaggcccaggatggggactaccaaaagggctagaatatcttgtctaaaatgtccagtttctaacaaagaatgacagggtatgtggaggaggaggagggaaggaagaaaaagaaaaagaaggaaagtatgactcatacattaggaagaaagcaacaaaaactgctgtgagagtgaccaaatg

SEQ ID NO: 22096 - DNA, 1050 bp, Homo sapiens
ttaggaatgtgttaacttccacatatttgtgaatatcccaaaatgtcttctgttatcgatttcaaatttatttccattataattgtagaatatactctgtattattccagtacttttatttatttatttttaatatttggagacagaatcttgctctgttggctgtggtgtgatcttggctcactgcaacctctgcctcctgagttcaagcaattcctgtgcctcagcctcccaagtagctgggactataggtgtgtgccaccgtccctggccaattttttttgtattttttgtagagacagggttttcaccatgtttaccaggctggtctcaaactccagagctcagggcacccacccaccacagcctcccaaagagctaggattataggcatgagcaaccacgcccagccagattccagtacttttaaatagaggcacatcttatggcctagcatatgatctgtcctggagaatattcaatgtgcattttgctgtggttgggtgaaggtggagggttgtctgttaggtcaagtctatgatttattgttcttctgtgtagttgttacgtccattactaaatgtgggtgtggaagtctgtaactatttttgaattatctttttctcttttcacttctgtcagtttttgtttgatgtattttggggcactgttgtttgttagggacgtatatgcatattttctcttttgacatctgtgtcttctgacgttagtgtcatcacatgcatgtctcctgtggttgccatttgatatattctttccattgttttacttttaacttttttatgtctttgaatttaaaatgagtcttctgtatacatacgatggatctttaaaaaaaatccattctggcaattctgccctttgatttgattgtttatttcattcacacttaatgttataatatgttcagatttacatctgctactttactttctggtttctgtatatcctatgccttttccccttagctgttgctcctttacagctttcttttgtattaagtaaatattttctaatgtaacattttaa

SEQ ID NO: 22097 - DNA, 1102 bp, Homo sapiens
tcaaaggctagggctgcagcccttgaagctcattctcttgctttttctctctctctctctctccctcactcgctctttggcatggctggtgctagccatctatctgctgggacctccacccaggctctgctgggacacccaccaaggcctcctcatgagacctgggcttcctcacaacatggcggccaggtcccaagggggagctacctgagaaagcaggtggaagctgtatcttttttatgacctaagtcttggaaatcacagcattgcttctgtggactggagtggtcacaagcccacccatgatcaaggggagaagacactgacaccacctcctgatgccgagtgtggaggaaaaggaaaatgttgctgggccctttttggatcctgagtgcctggtctggaggacgtgttcagcacagatctgtggaagtgtgtgactgttgaaaatgttcctggcagctctctcagcatcagaactctgcattccatcctacacaaacgtggatctgatcacactgctttccaggcaaggagcctcaggtagcttgaggctgtgcctaggacacagcctggtgtgggatgtgactctgcagcctgaaccatgtcttcttccccagcctgccggctggctgcctcccaccattgcctgttcacagtcacacctggatgtgagaagggaaacagtgtggactgagcagtcctgccttgggtggtccctccctcccaccccttgaggatcttggtctttagaagaggcgcccgtggagagggatgttgtctaaatcaaagcaacagagaggacgagctgagggacccatagaatccaagaggcagtgctgggggaggctgagggaggagagaagactgcactttgtatgctgcattggtttataaaaccctcaaatttggtagagatattgcagttcctgccttgtgagtggaacaacaccctaagtccaagtagcagagggcagaggtcagaggtcacctcgtatttgcttttagctgttcacttgcaaaatttccattttaagtctacattgcctggggcaggcaaacacaacctttgatcctacttctgctttctgatcccaggact

SEQ ID NO: 22098 - DNA, 1049 bp, Homo sapiens
cacaattcttggcagaccgatgaggacatgaaaataacttatgaggaaacgtttgaatagctgcatttcactgtgctcatggatggtcagacgacctaatgaaataaaagcggaaatgttttccagctatcttttatagggattttaagttttgaaggtcacaaattcagtttgaaagttaatataaaagaaacataaatggtattaagaaagagtaggttacttaaaaaattagatacataatttgttgtctgattataaagaacagtgcatgctcatggtagacatttggggaagacagaatataaagtaaaacagcttctggccggtcgcagcggctcatgcctgtaatcccagcactttgggaggccgaggtgggcggatcacgaggtcgggagttcgagaccatcctggccaacatggtgaaaccccgtctctactaaagatacaaaaagttagctgggcgtggtggcgcatgcctgtaatcccagctactcagaaggctgaggtgggagaatcacttgaaccctggaggtggaggttgcagtgagccaagattgggccattgcattccagcctgggccacagggtgagactccatcttaaaaaacaaaacaaagcaaaacaaaaaaacagcctccaccccaccctccagaggtgactactttgaacctcgtggcatgctttccaagtctcttccttttttcttctacagtcgcctttcacaaaattggcataattttcaaaattatgatcagactttaaaaagaaaccctcattccactgagatgttttcccaagccctttttgctgtgagtcagggtcagagcccctcactggagggagatgtcccacagggccccgagtgcccagcctgaggaaggcagggctggcatcagcacggtgcaacccctgggcggagctgagcctcttcggccaggccatggctgactgcggttgggagtgagtgcacacctgtctctcgtgtgctgggttatttctttttacctttcactttgcattatggagaatttcaagcgtttaccaag

SEQ ID NO: 22099 - DNA, 1030 bp, Homo sapiens
gagaccccatctcaaaaagaaacttcaacaaaccaggataaatttatgccagtacaacaaagggttaatatccttatcttgtaaagtgcacatgagtattcatgaggaaaagaactagtctcttgaaagataagtaaagaattatctacttccctaaccataaacatgcaaaatgtcatcttcatttcatagttgaagggcttttaatacaatttatgtcattgctcataagagcactgtgaaaaacttacacattgcttttatcaggtaaattagtacaaattagatgggggtctcattttgttatccatgttgatctcggactccgggcctcaagtgatcctcctgcctcagcctcccatagagttgggattacaggcatgagccactgcgcctgccctcctttgaccttttaatttccccttagaataactgtcctaaataaatacagaaaaatgcaggaaagagcatggtggacaatgcattgcatctttaaaaacacatttagctgcttcctgtattctcctgcatcatggcatacactctcgattttatgcgttcttcagtgatgttaacaagagcttgtcacagtgggaaaaatacggcattgttttcaaggaattcttttttaaagagacttctatgagaatggatgcccttgtttctcgttgcaggaacaagcacatcatgattgacttggggactggcaacaacaacaagattaactgggccatggaggacaagcaggagatggtggacatcatcgagacggtgtaccgcggggcccgcaaaggccgcggcctggtggtgtcccccaaggactactccaccaagtaccgctactgaggcgccctcagtctgcgcggataaatgtcgtggagccctttttgtatggaaacgttttaagctatttaaagcctttggaaaatacaggaagctccagggctggagcacctctgagatggaattgataacatggtcttaactcaccgaaataaacaagcacgtggtgagaggagcaggcctactt

SEQ ID NO: 22100 - DNA, 1052 bp, Homo sapiens
atagtgaccttgttttatttatttattgagatggagtctcactctcacccagggtggagtgcagtggcaccatcacagcaagcttgaactcctggcttcgagccatcctcccgcctcaggctgccaaagcgtgaggcactgccgtggttctgggcgtcgggatacgctcccctggacacgcccttggcttcctaggtgcctcctgttaggttgagaagatctgtgaggtgcaccctgcatttcttgtgaacttttcatctttcctaggtttcagcaaaggttgcgtggctgaccctcatccttttctctactgtgtgttcagcagccatttctgaatttcagcccctttggccatccggagaggctaaagaatttattccttttgttaacagttcttacactaatttgcctctttcctctcttgaaggcagcacctccgagactttgcttggaagtttccgcagctaaatatcccgagtgtgttgcttttgagctctgacttcctataactgcggaccccgtgtccctgttcctcggccactctgtaacgggggtccccttttctccgtttcccagtaacacactcctcacttccttccaagcccacaccaggtgttcctgaagtccatatttctgttaacagcctgttcgaggcaatagaggccttttctattttgcccctcagaattcttcaggtgagaacagggagggccgtcttaggtctctgccccccacagcgtgcagtggaggccagcctggggctggagatgctgtgaggggcaaggaggctgcaggcaacagccttgggtggcgggagcagcctacttagtgtagtttgatatttttaggactgatgctgtactcagaaaaggagatgaaacttccttctgctgtttctgtgatttagaattttaagacaaacggtactttagttaacttatgcaccaaacatatatcttgagcccccaccaggtttgtggtctagtggtggagcctaatgtcagataagacaggattcccactctcataggacgttgtctgatagaaacagc

SEQ ID NO: 22101 - DNA, 1401 bp, Homo sapiens
taacttgttacctgagtgaaatttaattcctgggcgattctgggagatggtaaagtgaggcggaaggagccagcggccaattcctgaactattctgggaaacggtggcgtgaggcggaaggagccggtggccaaggtcccagtagtgtcacatgatcttcccgcgtgtttgctgcactgggaaaaaatgttgaagaattagtttgaaaattgccccgttggccaggagtgatggctcactcctataatcccagcactttgggaggctgaggtgggaggatagcttgagcctgggaggtcgaggctgcagtgagctgattgcaccattgcactctaggatgacagagtgagaccctgtctcaaaaaaacaaaacaaaaattgccctgatccacacaaattcttggttttgtttttataaatgtgcttctataaaatgaaagccaaagtgttctgttatttcagtttttttttttaatctccttttaggttaaaaattttgcagttatttatcttgtggatattacagaagtgcctgacttcaacaaaatgtatgagttatacgatccatgtactgtcatgtttttcttcaggtacgttatcttaaagttgttactgaaattgaatattgtcagtttggaagcttaatgtaatcaagatctctttagattattttattttgaaggaagttggttgtacagtcatgtcccaaaatcgtttgtatcaccaggcaatcagtgtgaatctttgaaataattttcaaagtaacaattctagttttagcatttactcagtaacaaattacccttttgaaataactttgcggggaaacctaggtgaagtgtaattcaatgaaagatgttgttactgacattttagatacctggaactataatctgttcatcaaaaatgttgtaaaatcacaaatttaggccgggcacagtggctcaaagcgcctgtaatcccagcactttgggaggccgaggtgggtggatcacaaggtcaggagttcgagaccagctgggctaagatggtgaaaccgagtctctactaaaaatacaaaattagccgggcgtggtggtgcatacctgtaatcccagctactgggaggctgaggcaggagaatcacttgtacccaggaggtggaggttgcagttagccgagatcatgccattgcactccagcctaggcaacaagagcaaaactccgtctcaaaaaaaaaaatcaaaaacctaatttattaaatatgttatcatcaacttcggtgtccttttttatatccaagaggaacacctgaactactttgcttataaatacaagattattttatcagctcaaaaatttcattatggaaatttaatggggaaagaaatcaccatctgatgctgtttttacttgtttagt

SEQ ID NO: 22102 - DNA, 1451 bp, Homo sapiens
ctgagcaaggcattgaagggagaataatgaaatattattttgactttcctaatgcctgtgaccatttattttgttggtgtatttattttagcttctgtagggaagtattttgtgtttaagtcaaatcaaaagacagtttattagtttaccatgaaaataaagctggattctggcaacctgaccaacacattctcactgtggacgctgcgggaaactagagtttcagaaatgggcgttgtcagagtgaccggactcagaggggcccatgtctaatgcaaacatcactttggggttttgaaagcacatggacggggagtcgcatgcccctgcagtgggccgtgtgctcactttggggttttgaaagcacatggatggcgagttgcatgctcctgcagtgggccgtgtgctcaccttggggttttgaaagcacatggatggcgaggcgcacgctcctgcagtgggccctgtgctggagttctgatacggtttttttcaccaaagctgaagggcagtggagtctttgtgaagtgtgggctttccccctccccctctccccaccctgctccatggtttacatttccatcttaatttttaaaaaatatttcccaaagtagagaatatagtgaacccgtctgttcctattgttccacttcaacaattgctggtattttgctggtcttgtgttacctaacccctcatttttttaggctgtgtgtttcatggaaatcccagatataattatttcacctgtaagttacagtcaggttgtaaagatttagttttatatgaagaaatgttgtgcatatcccattgatttcccgtgactgctgtgagaggatgctgcaagctgaggggcttaaaacaacagaaacttctctcacaattctggataccagaagtccagaatcgaggtgttttccaggctgggctctctctgaaacctgccaaggagagtcctcatgcttctcccagcttctggtgctgccagcagcctcttggagctcctaggcttgtagacgcctctgcagtcctcgatgcccccagagcctcctgtccctgtgtctttatgtggccattttcctctaaggacaccagtcacaccagattaggggcccacctactccagtatgacctcatcttaccttaactgattacgcctgcagtaccgtttccaaataagctgcgctgtcactttgggggtttaggacttcaactgttttggggacacagtttaactcataacacatgtaagtggctacaagcttctaaagggcattgagttagtatttataaagagcctttaaaatgtcatatcctttgttccagaattttaggaatttgtctttaggaaataatgaagtatgtatacaaatttaagggggaaaatgttcacagatgaataatattaatgaacaatcagagagtaacagaagaatggtgtaggaggctct

SEQ ID NO: 22103 - DNA, 1059 bp, Homo sapiens
tggtgttgagcggcggttgagggtgcagactctagctaggctcttggcacttcataactgcatgagcgttacgaacttggccccgtgggtcatcttacctgtaaaaagggcatacttgtgcctcactcatagggttgtggtgggattaataaaggtttctagagcactcctgtcacatgggcagtaatgccactgttattactgtgattacttctctcacattactaagtttgcaagttattgtgagagctgattaaggcaaacattaattttagaaagtcaagtttttcagttttttttatggctttgacatgaattacctaaaaatgtaaaaataaacacttcaaaaatttgttgtgctaatcaactgcccagaacactttttccggaattttaggtgttttcttagctggttgagggactccatacaaaagtgtagaacagtggttggtatcatgtgccagtttggtcatgtgttttgcagagttatgtcattgtaacttggcaggtggacttagaggcatgcggaagaactgctgagcactttaattgctgacttgcctaaagaaaaagcatgcttatgaggtgtataggcaacagagttggaaaagatacttacaattcaaggcaatcaaagaatttaaaaacaatttgaggccagcgccgtggcttaaacctgtaattccagcagtttgggaagccgaggcaggcgaatcatctgaggtcaagagttcgagaccagcttggccaacatgttgaaaccccatctctactaaaaatacaaaacttagccagatgtggtggtgggcgcttgtaatcccagctactcgggaggctgaggtgggaggatctcttgaggctgggaaacagaggttgcagtgagccgagatcacgccactctgctccagcctgggtgacaaagtgagatcccatctaaaaaagaaaagaaaaagctgcctttgttgaggaagtcacaggatgacttggcagagcagtgtggctgcactcacccagctcctcctccaagcgcttggttaccgtggaaatgtcgccaccagc

SEQ ID NO: 22104 - DNA, 1064 bp, Homo sapiens
atctgggcactgtgtctcacgcctgtggtcccagcattttgggaggccgaggtgggtggttcccttgagcccaggagttcgagaacagcccgggcaacatggtgaaaccttgtctgtacaaaaaatgcaaacattagctaggcgttgtggcatgtgcctgtggtcccaactacttggtaggccgaggtgggaggatatgagtccaggagttcaaggctgtgacaagccgtgatcgcgccactgcatgccagcctgggtgacagagcgagaccctgtctcaaaaaaaaaaagttttctatttagcagctgattttatgcagttttgaagcgagacaatttcatgtacgagctgtctttccattttgtaggaacactgtcacaggagacaatttcatggacctttgagctgtctttccattttgtaggaacaccatcacaggagacaatttcatgtacctttgagctatctttccattttgtaggaacaccgtcacaggagacaatttcatggacctttgagctgtctttccattttgtgggaacgccgtcacaggagacaatttcatgtgcctttgagctgtctttctattttgtaggaacgctctcagaggggacaatttcatgtgcctttgagctgtctttccattttgtaggaacactcacagcagtgcttggggttcactgttacctaaatcccatgatgggtgagaagactgaatgggacgtttattttttgtgttaaaaagcccacgcaaatagagtttaaaatagtctcagtgagctgggcattgtagcatgtgcctgtaaccccactactcaggaggctaagacagagtatgagctcaggaggtcaaggctgcagtaagctatcatcgtgccgttgcactccaccctgggtgatagagcgagaccccatctctaaaaacaaaacaaaaaaattcctcagtaatattattgactcatgatagtacattttttttgtttgtttgagacaagagtcttcttgtgttgtccaggctagagtgcagtggcacgatcttggctcactgcaacctcagcctcct

SEQ ID NO: 22105 - DNA, 1170 bp, Homo sapiens
atactggaaatccagcgaagaattgactaagagcagtttcccaataagtaaatcactgctgtattgactttgagttatgaattctagaatctttcactgttctacattgcaggtggtggcataaacatcgggtggtgttcagatcctgctgccggcagctcgaggctaggatggctggagatgtgagggcctttgtctcatcacatccgagcacagctcagcaagatgctcttagctagaaaacagattttatgtgttaatgtaagtgtttagggtctttgccagatttgctcttttccaactcctttatgtccaatttctttgttattacagaatgaatcactgtatcactagtggacacacatagtggacacacacttaaggacagttgaaatgggctcactttggggtattttttttggtcttttaaaatagtctgatttttgtttttgtccaaaaatttggatagctttattaataaacttttaatgcgaatattataatatagttattaaaagggcaaacctaggccaggcgcggtagttcatgtctgtaatcccagcactttgggaggccagcgtaggcgatcacttgagcccagggattcgagaccagcctggacaatatggtgaaaccccttctctactaaaagtacaaatgccgggcgtggtggcacgtgcctgtagtcccagctacttgggaggctgaggtgggagaatcacctgagcccgggaagtcaagactgcagtgagccatgattacaccactgaactccagcctgggcaacaggagtgagactctgtctccaaaaaaaaaaaaagtgcacacctgaaatgcattaaaagaatattcatgttttattttcttcttagtctatgggcaaatatgacttcctaattctggaagcccttttttggagaagctcaacagaaatttttgaaatataaggttttagtataaagaacaatataactatttaaaaatttccctgtgcagaaatggcagataatggggactcttccttaccttgttccgagttctgtctggatattccagctgttttaaagtgagtaacagttgcaaatgttcaggctggacttgatatgatttttcctagatgtgttgtattgatttgctgcttccacagggcccacttgacttcatgctgga

SEQ ID NO: 22106 - DNA, 1048 bp, Homo sapiens
tagccttgggagttttaacttaggctcaaggtccaccccagcagccatttggttacctaagcaaaaagcttaacttggtggctaaaaaatggccagcttgcctctgagcagttgcagttgcatggttgagttagccatgaggaataagttaactgtttacacaccccataatgtagcagcactgctatcctctaaaggaagtctgtggctaacaggtaatcacctcctcaaatatcaagctttgctgctggaaaaacctgcagttcagttaaagacctgtcctggcctgaacccagccactttcctcccagaggaaactggagaacctgaacaggagtgtaaacaaatggtggtgcaaatctatgcagccaaaaaaacctcaaggaaataggaggaggaagtcacatcttacgtggatggtggtgggcaaagagagagcctgtgctggcaaactcccgtttttaaagccatcagatttcctgagactcattcactatcatgagaacagtgcaggaaagacccgcccccacaattcaatcacctttcaccgggttcctcccacaacacaagggaattgtgggagttacaattcaagatgagatttgggtggggacacagccaaaccatatcactatcttggggttccctctgctggctttacctttaaccattaaaaatggatataaataaagcatggtatgggagcatttttaacgctacgcaaaaaaacacacaccctgagggtaagacttactcctttagactaggtaaagttaataagatagcaaatgccttcttctgctttaaaagcagaggaaaagaaccatacttgggaaacctttaaatattccaaaagtatgctcataattgctaagagtacagagatctggagactaagaaggaacaagggtgacaccaaactgggagagactatagaaaaattttaatctagccagacctcctaggtggaattcccaatgggaatagctatccctgggcagaaatgccaccccttgccaaccttattatcaggtaataaataacacat

SEQ ID NO: 22107 - DNA, 1051 bp, Homo sapiens
gtcagtggcagaactgtcctgacttcgtgaacatggaactgctaagagggaaaactgcatctcagcattttcattttttctgaatattaagtgaaaagcaagttctatttttaagaaatagcttttgctgaggagttgtgaattcctgcacctgtgtttgatgttatttgtatgcaatggattgctggccctttgttcctaagcaagagaagaccaaagatgcttccccatgacctctccggtgaggatccgcaccccccggacttgctctctgatgaagggcatgtcgttcagtgccccagcagtcagaagcagtttttgtggaactaaaactaataatgttaccctcacaaaggaaatgttcttttactaagttattgctgattcttgaatgtctgttatataactgggtcggctatcaagaaggaaggttatatttcttatcacattttaagttgttaagcaaatgtgagtttttttttaagaaatgaggctttcactgagatttgtgtgctattcataattttaggaattactgcttagaacagctgcttgggtgtatttttctacacaggtctgtacttctgccactttctccttttaaaaaaacaaaactatgcatattatgtattaaagttttcttggttttatatatcagagaataaaaacttttttgacttttgagtaaacaaaatgcatgaatatttcacctgtgttctaagtggaagagaataccagagataaagtaatccctcaaagagaatgacagatttatcaagtgcttatcatgtaccatctttcacggaatccgcacatactctctgagggacgcagatgagaaaatgggcccaagctcatcagatagacagatgacagtccagaaccctctctcgaagtctttttgaaaaagcttttctgaatatttatacagcacacagtccttcctaaatgtgccctggttggcacggttttcattaacactgtcgttctggcagccatcaagagtcaaattacaattacaaattcagttactcagcaaattacagatgtg

SEQ ID NO: 22108 - DNA, 1064 bp, Homo sapiens
tgtgggttttcctaaacgcccctcatctggttgaagccctagtgtttctttctcacatcagaggcaaatgcattggggtgggtctggtttggacaataaatttcctctggtttggaccaagaaaaacagagttctttgaccgctaacatatatgtaaaaagaaagtttgtaaaaacaagagttaaaatgcttctaacagtgtggtcatcactgcacaggacactggaattggcattcggggttgtgtctgtccatgtggtttcgttgtatgtcatgtgctctcagctcagacagagacatccaattgacttctgacttggggcatttaaacttcataccacagctttatttagaggacttatttattgtattttccactgtttttatttaaaagttgtataaaaattgttagggctggttttgatatagaaaaatcattatgactggttttgctaagtccatacacctttgtggtctggggagcggtgagtgctgaagcaaaggaatgtctgcagaaacaaacaagggtgttctctcagcttcagagactgatgaagcaggatgaagtgggctcccgggcagagagtacttggagagagagtggccgcacagtgctcgagctggggctgtgtgtacgaccggcaggatcacgtgctgagccttgggggactcagctgggaccattagaagctctggggcctgctccacccattctgactggtgctgccctcaggaaaccatctctgcctgaaacccattagggccagggagagttgtctggctggaaaggaagaagacggatgctggtggttttttgtctttcgcttgttgttttagagccactgagaaggtcagcgtacttttccactatgcctgtatgcggctttgctcttctccatgcctatctgcagcttgttttgcagaagtctctctggctttctctctcccaccctttcacattgcaaggccctccacttcttcactaattttcctgcagatgacggagccctgcgaccaggaacctgactcttcagctcaaatcttggtttgaaagggggacttct

SEQ ID NO: 22109 - DNA, 1025 bp, Homo sapiens
ttgaacccaggaggcagaggttgcagtgagccaagattgcaccactgccctccagcctgggtgacagagcgaaactccgtctcagaaaaaaagaaaaattaatctgttgcttaaaataatctcttcctccaaaccatacaaagacacagtgataaactacagaacagcattcctttatgaatgtagatgtaaaaacccttcagcaaaatactagcacatggaaaaatgcacccacacaaaaagtacacgaatgttcatagtaacattattcacaatatccataaggcgagaacagcccacgcgtccatcagctgataaatggataaaaaagtgtgcgcatgtgcgtgtgtgtctagtcatgcagtggaatgttatcgagccatgaaaaatgatgcgctgacacatgctacagatggatgaacctcagaaaccgtatgtttaagagtgagagaagccggacataaaagttcccatattgtatgatgactttggaagttgattctcattattcaaggactgtgtattgatgaaatgttgtgaccagaggctaacaggaacctaaccctgtgtcccccggaagcaatggttctatgctcagtaattcagtgaccatgtcaactttagagaacaaactactacacgtgacaagaatcctctgtaatgtgaaaagtccagaatgggcaaatccatagactcatggttgccaggggctgagaggtggggagaattgggagggagggggtttctttctggagtgatagaaatgttctagaactagagatttgcataaataccaacaaccattgaattctacactttaaatgggtgaagtttatgtgaattatttcggaataaagctgttaaaaatagaaaggactgtctaccttaccagggcggacaggctgatgatcagacccctggatctgagccatggccctgggtaaggttttctgggtttatctccagcctttatttccaaaattcagccattctccatatgtgaatactttgactttttaataaac

SEQ ID NO: 22110 - DNA, 1808 bp, Homo sapiens
tgagccacctgccttctgcccctgcaggcgcgcctcaagttccccatcgactacccatactctccaccagcctttcggttcctgaccaagatgtggcaccctaacatctacgaggtgagcgcggcccccacgggcctcaagtcctcatcctccgggacccagggtgctgggagcctcacgtcctcatccttccgggacccggggcgctgggagcctcacgtcctcgtcctccgggacccggggcgctgggagcctcacgtcctcgtccttccgggacccgaggcgctgggagcctcatgtcctcgtccttccgggacccggggcgctgggagcctcacgtcctcgtcctccacgtcctcatcctccgggacctggggcactgggagcccgtgctgacctctgacctgttctgacctgtcttcttcttgtgcagacgggggacgtgtgtatctccatcctccacccgccggtggacgacccccagagcggggagctgccctcagagaggtggaaccccacgcagaacgtcaggtaagccggcccaaccccctgtgtccacccagaacatcaggtaggccgggctccgtcccgtatccacccagaccatcaggtaggccgggctcccccacaggctgtggcgccaaggcctgattcgggacctgccagctggcggtcctgggcctcgctgtacctgcacggtaggtgctttcacggggcctgcggcaccgtgtgtcggtgcagactcccaccaggaccccaggccggccccaccgtctggaaccacctagaggtgtcccgccatcctcagtcctggggccttctccttacccagccgtctctgggttggtcacctcgtgccacgtgtgccgcctgggcctcgtccccaggtacaagcactgggccgtgttgcccgtgtgtcctggagtgtagtctaggcaggacgtgcgggtgtgagggcagccccgggtctgacggaggggtctgcaccttgctgccctccctggtcttggcgtgggagggaggagactgatgcaggtccagcccctgctgttctgggggcctgagacagaagcagaggccatgaggccaggtgaaggtcacctgctgggtgggtccaggcgtccccgtgaccctcagggccagagaagagccggaaggctggggtgccccgggccgccccactccgacccactctccccacaggaccattctcctgagtgtgatctccctcctgaacgagcccaacaccttctcgcccgcaaacgtggacgcctccgtgatgtacaggaagtggaaagagagcaaggggaaggatcgggagtacacagacatcatccggtgagggcgggcgggggcgtcacgggaggagagactcagatccggcctgcaccccggcccctggtcccacggccgcccagccccaccttcctggtgagggtggcggagcttcctggtgcccatttacagggtgccagtcacagatggaggccgggccgagtggcggagggtccagccaggttcaagcccagcttcttgccccttttcctctttttttttgtttgagacagagtctctctctgtcacccaggctggagtgcagtggcgcgatctcggctcactgcaagctccgcctcccgggttcacgccattctcctgcctcagcctcccaagtagctgggactacaggcgcccgtcaccacgcccggctaattttttgtatttttagtagagacggggtttcagcgtgttagccaggatggtctcgatctcctgacctcgtgatccatctgcctcggcctcccaaagtg

SEQ ID NO: 22111 - DNA, 2073 bp, Homo sapiens
gacctggggaaagcggcctgggcgtggaatctggagacgggtccaccctgcctgcgagtgttagggtcagagaccctcccctgagactctctggggcccccgcaagggcccgtgcggcctggagcgatcatcttggcgctcccttctggaaaaggggcttttgtcctccaagagcacatggaggctctgagtgggtcagccctccggatcgggaagggattaccgttcttcacgggatttagccctggcgtcttgcctagggcgtgcacctgcccccgggtgttctcccagactcttaagacctcgcaggctccctcgaggggccctgcgtggaagggaaggcggaatctccctctgattctgcctggattcagcacccagaatgaggtggtctctgaacgcccctcctcctttacaggcgaggaaacagccctgtgggaagtcgaggttccaaggtcacagtgagggggccctggccacccgattcagcgcaggaaatagtgagaaagtcgtttttagccgactctgacccgcattcggtttccagtgctgtcttaggagggccgtgtgttgagggtgggcaaacgtggtttggagagcgcatttgggaaatggattgaggtgtgtttttccgggagaaaagcatgacatcctttcttgcttcatagaaaatttcttcctttgttgagacccccatttggttctgggttaaagatttatagtgaggccgggcgtggtggctcacacctgtaatcccagcactttgggaggctgaggcgggtggatcacctgaggtcaggagttcaagaccagcctggccaacatggtgaaaccccatctctactaaaaatacaaaaattagctgggcgtgttggcgcacgcctgtaatcccagccactcaggaagctgaggcaagagaatcgcttgaacctgggaggtgaaggttgcagtgagctgatatcatgccactgcactccagcctgggtaacagggagactctgtctttaaaaaaaaaaaaaaaagaggtcgggcatggtggctcacgcctgtaatcccagcactttgggaggccgaggcgggcggatcacgaggtcaagagatcaagaccatcgtggctaacacggtgaaaccccgtctctactaaaaatacaaaaaattagcctggcgtggtggcgggcgcctgtagtcccagctgctagggagtctgaggcaggagaatggtgtgaaccagggaggcggagcttgcagtgagccgagatcgcgccattgcactccagcctgggcgacagagcgagaccccgtctcaaaaaaaaacaaaaaaaaaatttattgtgaccgatgtgttgggaacaaggtgcagagctggagggtctggcctcctgaagggtcaagagcaagggcttcgagcctctgtcctgggcattgagccgtagggggccttgggcagaggctggggagggggctccttcttccagaggctttgccagctaactcctgacctacgtctgagatttcgtcttcctggtaaccaaagtggccctttatcgaatgtctcctgggcaagggcctggccccagcactgcggccagctctctggggagacacagataggagcccatgggtgaggtgagcgcggaagataagccgcccccgccagccctgtggaaacccagccaggcctgactgggtttcaagcacagcacgaggttcccacattgagctaatttggacagccaagtgggtgaaagacctttggtctctccctgctgggtagggtggttcacagttttgttccttttgtgcatttgtgcaggagactgagaagggtttcttctgagcagaaagcttagcctggggcttactggccagagctgcctgcagcctgggaagcaggtggagtctgcagtgctggcagcgccgccgtgcagcggtgtagccgtgtgtgcgcgtgtgtgtgtgtggtgagaaaccccacttttgctggggactgactcgtgaagaccacaaggtctgggcaacacagccttggcccgtgtggggtggacactgctgtttgctctgtgaattcgtgac

SEQ ID NO: 22112 - DNA, 1057 bp, Homo sapiens
tgggtccgcgcccaggcagtcgtgctagtcctggaacgtgagtggcgggcacctccctccccgcctccctcagtttccctcctgtgccgctcgcctcccggctcctgctcagtagaacccagacgcctcctcccctctccgtcccgctgtgccccgttgggcccaccgcctggacggaggggcccggacctgaagggggtgggctcgccgcctgaccaccagcgctgggcggcctggctcggggcaggcagggctctgccctccagcaggtgggtcctcgtcctcccctcgaccctcgtgccatccgttccgtcgtttctgcttccccgggcgcctgcccggctccctccctgagcgtccatactgcaagcctgaggggccctccaagctcagcccaggcttgcaggtctcagaaccttctgtgtccttcgcagcatctcgttctaagggattttcaaatttcaattcctagcgggaatattgtaaactaaccaagaaccaagagatttgcttggttggggattggcagaagaaccggggtgctcccagcactgctggagtgccgtcagcctggggctggggggatgtggggccacctgagtgcctcctagagaagggcacgggagccttggccgggggtgctgtggctattttttttttttttcctggagatggagtcttgctgttcccaggtggagtgtggtggcacaatctcggctcactgcaacttccgcctcccgggttcaagcgattcttctgcctcagcctcctgagtagctgggattacaggcatgagccaacatgcccagctaattttttgtatttttagaagagacggggtttcaccgtgttagccaggatggtctcgatctcccgacctcgagatccacccgccttggcctcccaaagtgctgggattacaggcgtgagcctccgcgcccggccaccaccgcgcccagctggctacgtttttagaaaagaatttccagtttgtgctggggctgctacaagagctcgatgccctggtccctgctcagggacgtgggtgggtgccttg

SEQ ID NO: 22113 - DNA, 4247 bp, Homo sapiens
cgccgggccttgcagccggcacagtcttcactaccgtagaagaccttggctccaagatactcctcacctgctccttgaatgacagcgccacagaggtcacagggcaccgctggctgaaggggggcgtggtgctgaaggaggacgcgctgcccggccagaaaacggagttcaagtgagtgcctgaccacgccatgccgccacctgccccttctcacggctctcttgccgccagcggcctgtggtccgtgagaacaaaagaccggtcggcaggcttgatccaggcggaagttagggaccagctccgcgcagacccccagagggaaaccccagggaggggtctgaggggcgtccttgtgaggcagggggctccagcagccctggcaggagtccccattgcttgctcctcactaggtcccgggcacgaaagggcgccacactgccaggtcccgggcacgtgtgcgggcctcccaggctctgtgctcctggcacaagagggcaccacactgaggcatgccctgctcggaccccagacgctgtcatggccggagctttgtcataactggggctgggacggccctgggagcacagagccttttgttttcaggctgactgggaagacggtcacagggtgtggggtgcagagcagggaccagaggtgtggggttcatcagtcggggagaagggggtctgttggttctctcacctgtggggtcttgccagcctggctctgtccttggggccgcacggggaccccaggagttcttttgaggttcagacttgactgggacagttttgctttttcactgtgccgtggttgggcccctggagaaccctgggtccttggaggcgtcctgcagagctggtacgcggctcacctgcctgctgtggttgcagggtggactccgacgaccagtggggagagtactcctgcgtcttcctccccgagcccatgggcacggccaacatccagctccacggtgagtcctgcagccaggggtaccgggcaccaccgactgtcgggagaagttgttggcctgaggcacccggcacatcccagagccctggccccctgctccctggaggggaacagccctcctgcgggaggccggggatgggggcgggcctgcggttccaggctcctctctctcaccctcctgtcagggcctcccagagtgaaggctgtgaagtcgtcagaacacatcaacgagggggagacggccatgctggtctgcaagtcagagtccgtgccacctgtcactgactgggcctggtacaagatcactgactctgaggacaaggtgagaagccaaggaggctgggggtcctggacccagccctcaggactgggtgagaggcctagactgggggtcccggacccagccctcaggactgggtgaggggcctagactgggggtcccggacccagccctcaggactgggtgaggggcctagactgggggtcccggacccagccctccggactgggtgaggggcctagactgggggtcccggacccagccctccggactgggtgaggggcctagactgggggtcccggacccagccctctggactgcagccctccagactgggtgaggggcctagactgggggtcccggacccagccctcaggactgggtgaggggcctagactgggggtcccggacccagccctccggactgggtgaggggcctagactgggggtcccggactcagccctccggactgggtgaggggcctagactgggggtcccggactcagccctcaggactgggtgaggggcctagactgggggtcctggactcagcccttgcctttggtcccctaggccctcatgaacggctccgagagcaggttcttcgtgagttcctcgcagggccggtcagagctacacattgagaacctgaacatggaggccgaccccggccagtaccggtgcaacggcaccagctccaagggctccgaccaggccatcatcacgctccgcgtgcgcagccacctggccgccctctggcccttcctgggcatcgtggctgaggtgctggtgctggtcaccatcatcttcatctacgagaagcgccggaagcccgaggacgtcctggatggtgagccgtctgccctcctgcccacatgccctgctctcggggtggcccagggccactcctggtccgtccctgccagccccaccgctgacccagagcttggaactgaggagccccaggcagggagttgatgggaccccgaaagaaagtgtgggatggagggtctagccccgggcagctgcggctcagtgggcagcgggaccccgggaggaggaggcggcacctccgccccacagcctcacccggcccttccctcccgctcacttggctgcaagccagtgtcctccgtggtgagccggcccttgctgctctgcatgatcaggctcgggaacctgaggtcagccatgctgtgctccggcagcccctgcctgcctcctcgcggagcccttctgccccttgggctgcgtgtgccggggcgaggcctgtgtggggcctgtgatggcagctcctggaaaacgctgtggggcaggggtgaggcccacgaggccatggggacagctcaccatggggagcacacctgcaggtggggagggctgcctttccccacagcactcagaagatgcacgtggccggggctgatgagctgccccgagccacccctgggggtcactgagggcagggctggcagcacagatgcccctgctcggggcctgagtggggccagtgctgacaggctgtcctctcgtcctctttttcatggcggcggtccttcttcagatgacgacgccggctctgcacccctgtaagttccagctgtgggggtcgggggtcccaaggagcggcctgctgccccaggcctttaaaacacaaaggcagagcccctgggcttcagtattcgggggtcctgggggccggggtgggcaggggtgacttggagagagtgacttgcgggggacaccctctcacccggcccctcgtgccccaggaagagcagcgggcagcaccagaatgacaaaggcaagaacgtccgccagaggaactcttcctgaggcaggtgcggtgggcgggagctcctcctgagccaggtgtggtgggtgggtgggcgggaactcctgagccaggtgtggtgggcgggatctgctagccaggtgtgggctcctgggtcccgcctgtgggtcgctgggaggtgggtccagtctgagcgcccctccctgtccacaggtggcccgaggacgctccctgctccacgtctgcgccgccgccggagtccactcccagtgcttgcaagattccaagttctcacctcttaaagaaaacccaccccgtagattcccatcatacacttccttcttttttaaaaaagttgggttttctccattcaggattctgttccttaggtttttttccttctgaagtgtttcacgagagcccgggagctgctgccctgcggccccgtctgtggctttcagcctctgggtctgagtcatggccgggtgggcggcacagccttctccactggccggagtcagtgccaggtccttgccctttgtggaaagtcacaggtcacacgaggggccccgtgtcctgcctgtctgaagccaatgctgtctggttgcgccatttttgtgcttttatgtttaattttatgagggccacgggtctgtgttcgactcagcctcagggacgactctgacctcttggccacagaggactcacttgcccacaccgagggcgaccccgtcacagcctcaagtcactcccaagccccctccttgtctgtgcatccgggggcagctctggagggggtttgctggggaactggcgccatcgccgggactccagaaccgcagaagcctccccagctcacccctggaggacggccggctctctatagcaccagggctcacgtgggaacccccctcccacccaccgccacaataaagatcgcccccacctccaccctcaccctctcctggctcctgtctgtgcctgacggggttgggttttccgagagcaggtgcaccctgggctctggtggtcacagcaggggtgcgtccagtactgggatttcacatgcgaggacgggtctgctgagaccgcagtgggtgttgggtggctcggggcatgggctggacagggcctgaggctgtcagccggactgggaacttggaaggtggctggggccgaccccgtgcctcagagc

SEQ ID NO: 22114 - DNA, 1073 bp, Homo sapiens
cccactactggggtcacctgcctggccctgaatcagccaggcctggtgtgccaagacctacagacaccccctgcacccctgcaggctggcagagccagaaacttgggtggaaaccgacttctgaactatttcaccattccttatgcgttagtcttttcttttatttgatgagatcccagcactttgggaggccgaggcgggcggatcacgtgaggtcaggagtttgagaccagcctggccaacatggtgaaaccccgtctctactaaaaatacgaaaattagccgggcatggtggcctgtgcctgtaatcccagctactcaggaggccaagggaggaaaatcacttgaacctgagaggtggaggttacagtgagccaagatcgcaccactgcactccagccttgggcaatgtagccaaaccccatcactacaaataatacaaaaaaattttgttggctgtgatggtgcctgcctgtggccccatctacttgggaggctgaggtgggaagatgtagaattgcttgagccaggaggcagaggctgcagtgagctgtgattgagccactgcactccagcctgggcgacagagcgagaccctgtctcaaaaaaaaaagaacataatctgggttttggaataagacagcagtttctgaaacagctcattgcccaaattccagcctcgcaactctgtagccgccaccaccccccagccccaccatttattttaactacatctgtctccaccactcctgtattaagtaaatgcaatattggctggtcatggtggctcatgcctgtaattccagcactttgggaggctgaggcaggcagatcccctgaggtcaggagttcgagactggcctggccaacgtggtgaaaccctgtctccactaaaaattcaaaaattagccggacgtggtagtgggtggtgcctgtaatcccagctacttgggaggctgaggtaagagaaatgcttgaatccaagagactgaggttgcagtgagctgagatctcgccgctgcactccagcctgaacgacagagcgagactccgtctcaaaaataaattaataa

SEQ ID NO: 22115 - DNA, 1027 bp, Homo sapiens
gggtctggggaggggcgaggggggcgccgggtctggggaggggcgaggggggcgcccgtgactgcgggggccaggggggcgcgtcctggggaggggcctgcgccctggggctgcttcccgcgcgttccctgcccgcccgcctgacattcccccgccctggccggccgggcagggacaggctgccccagacactaccgccttgtctccagcctgggaggcggccacacagccacactctgtccccgggtccggtctgagcggccacctgcctgccgggtggggacctgggcagtcggcgaccagcctgatcctggggcccaggagttccgccgttttgtggacctcccgccccagctctgctccctccggggtggccccgagcccacttagagctggaaaccaggactgtggggtggcccggggctgggcggttgttgttccaatctggctgtgcccagggccacgctgtgccctccctggacgtggcttccagccatgggaagaaggtgccgggcagggggaaccgtgtgtgagaggccctggggtaggaggcttggtgcatagccagggggccctgcaggagtagaccaacgggggaagtgaaggggccgacctgagggttcctctaagggctgatgggagccagggagcctctagagctggagagggacagggtctgattaattattattattattattgttattttgagatagggtttcactctgtcccccaggctagagtgcggtggcacgatctcggctcactgcaacctccacctcccgggttcaagtgatcctcctgcctcagcctcccgagtagctgggattacaggcgcctggcaccacccccagctaatttttgtatttttagtagagactgggttttgccttgttggccaggatggtctcaaactcctaacctcaagtgacctgcccaccttggcctcccgaagtgctaggattacaggcatgagccaccgtgcctggccttctttttttaattttaaaaaaattttttgtttgtt

SEQ ID NO: 22116 - DNA, 1018 bp, Homo sapiens
ttggggagggccgcgtcgagaaggtgcccaggcatccccggctccgcctgccccatcgctgcttggctctgcgctgctggctcccccctccctggcttggccgcagcccggcgggggggtgcgggggcgggcaggccgtggtgtaaccccgtgactctcgtgccagccatgtactcggttgagatcactgtggagaaggacaaggtgacaggggagaccagggtgctgtccagcaccacgctgctccctcggcagccgctccctctgggcatcaaagtctacgaggacgagaccaaaggtacgagcaccccggcccctgccctccctccacctgggccagagccccgaacacgtgtgctcccagcgtgtgggtctggcgtctgccccggaatcaggaccccgattcgatgtgaagcagatgacgctgttcaggccagggcctcaccccctgtggcccacagctgggctcagaggtcgttcagccctgggctcactgcccaatcattcatccactccagaaagctgcctgaaagctgagccgggcaccaggtacccagctgggctctggagggaaatccggaggtagattcagcttctgtccttgccgggtggcaaaccgggcccttccatctggagctcctaaataattcgtttaaataattactgctagcccaagggctcacgcctttagtcccagcactttgggaggccgagggaggaggatcgcttgagcccagaagtttgagaccagcctgggcagcatagcaaggctccgtctctaccaaaaaaaaaaaaaaaaaaaaattaccctggcatggtggtgcgtgcctgtggtcccagctacttgggaggctgagatgggaggatcacttgggcccaggaggttgaggctgtagtgagccgtgatcgcaccactgcactccaacctgggcaacagagtgagaccctgtctcttaagaataaaaaataataataaagaattgctagcgtgacagaagccacagaaaatgcacatcca

SEQ ID NO: 22117 - DNA, 1004 bp, Homo sapiens
gggacagccagccctcgctggaccagaccatggccgcggccttcggtaagaggctgcccgacgcggcgccagtgtgcagagtggtctattagggccgctcagtccggagccccggcggcacgggcccggccctgcaccagggtgatgcacctgctgctctctgcacggccagcacagcacggtccagtgtcccccacgtcgggaccacggccccccctggagcagcggatctgcccgcgaaggctctgccggggccgcccgccggccgggttggggcccatcccgcagcacagcgcccgctcgcggtggaggttgtgggtgcgatgattagtgtctcatttatttctaggtgcacctggtataatctcagcctctccgtatgcaggagctggtttccctcccacctttgccattcctcaagctgcaggtattcaaacgcttggtcttggttccccagcgactgcatgcccacaccaccttcccaggcagctccgcatccacggcggcagcctgggcggactgggcactcgagtgccaggtcaggggcccttcccgggagaggggacgccacgtccacagagcaggcttggccagggcagtggtaggacagggctgtggaggcccacgtgtggacggcgccagccagaagccgctaatcgcacagtctttgtggtctggttcccttcaagcacctccgggcgagcgcgaggaccgccagtggttggagggatgtctctagtagttgaatttgagtggcctggtaagcgcgcggcccgaggctgagcagcatgaccggcggcgggacgtgtgtgcgtggccgtcctcccgcttcccttctgggaccggggcccggccgccccagtgctggccgtggacggagcagcgcgtgccgcccggcggccgcctcgtctgcatggaggcatgggcgcgcatgcgcggtggtcccgggacgggccctgcttgccgagggccccgtgtctgtgctggcggagccggagcttttc

SEQ ID NO: 22118 - DNA, 1525 bp, Homo sapiens
ttttatttggtcccgtagatacgtacgcatggtttatcgccctgcatgcttttcagagttagacctgtcggtggcatatgccaccgtggccacccgctggcagcttacctgtcctggatgctatgactttgctgaacggagctgctcctgttagcgcgccctgtggctgcgagacgcagctccgcagtggccgataaagcaaacccggccgggctgagccgggccttgtgggggtgcgcggggccggggctgacggggagatgggcggggcaggcagcaggagactcaggccccatccctgggcttttgaaggcgtctacggtgacgtgcagcgcgtgaagatcctgttcaataagaaggagaacgccctagtgcagatggcggacggcaaccaggcccagctgggtaagaggccggggcggccccggggtggagggggcaggggcgggggctgcgttccctctcgggcgcctggtcacgcgggtgctgctcccccagccatgagccacctgaacgggcacaagctgcacgggaagcccatccgcatcacgctctcgaagcaccagaacgtgcagctgccccgcgagggccaggaggaccagggcctgaccaaggactacggcaactcacccctgcaccgcttcaagaagccgggctccaagaacttccagaacatattcccgccctcggccacgctgcacctctccaacatcccgtgagtgctgggccggggggctcatggggccgggggcgggcaagggctctgcttggctgtcctaccgcgtcggtgtgtggacttctggcgtttccagagtgcaggtcgggcacctcttaccccaaacctgaagtactgcaaggcctggagcttgagccgagggctgctcaagggagggggtcgttggacactttggaggttttggctcaggggatgctccctgtgagaatgtataatgcacacatttatttatttatattttttgaggcgaagtcttgctttgtcacccaggctggagtacagtggaacgatctcggttcactgcaacctccgcctcttgggttcaagtgattgtgccacctcagcttcccgagtagctgggactgtaggcacccacaaccacacctggctaatttttgtatttttagtagagacggggtttcaccatattggccaggctgatcttgatctcctgaccttgtgatccgcctgcttcggcctcccaaagtgctgggatacaggcgtgagccaccgcgcctagccacatttatttatttatttatttattttacttattttgagatggagtcacgctctgtcgcccaggctggagtgcagtggcgggatctctgcaagttctgcctcctgggttcatgccactctgctgcctcagcctcccgagtagctgggagggactataggtgcccgccagcacgcccggctaattttttgtatttttagtggaaacggggtttcactgtgttagccaggatggtgtcgatctcctgactttgtgatcaacccgcctcg

SEQ ID NO: 22119 - DNA, 1183 bp, Homo sapiens
cattgacctgcacaaccacgacctcggggagaaccaccacctgcgggtctccttctccaagtccaccatctaggggcacaggcccccacggccgggccccctggcgacaacttccatcattccagagaaaagccactttaaaaacagctgaagtgaccttagcagaccagagattttatttttttaaagagaaatcagtttacctgtttttaaaaaaattaaatctagttcaccttgctcaccctgcggtgacagggacagctcaggctcttggtgactgtggcagcgggagttcccggccctccacacccggggccagaccctcggggccatgccttggtggggcctgtgtcgggcgtggggcctgcaggtgggcgccccgaccacgacttggcttccttgtgccttaaaaaacctgccttcctgcagccacacacccacccggggtgtcctggggacccaaggggtgggggggtcacaccagagagaggcagggggcctggccggctcctgcaggatcatgcagctggggcgcggcggccgcggctgcgacaccccaaccccagccctctaatcaagtcacgtgattctcccttcaccccgcccccagggccttcccttctgcccccaggcgggctccccgctgctccagctgcggagctggtcgacataatctctgtattatatactttgcagttgcagacgtctgtgcctagcaatatttccagttgaccaaatattctaatcttttttcatttatatgcaaaagaaatagttttaagtaactttttatagcaagatgatacaatggtatgagtgtaatctaaacttccttgtggtattaccttgtatgctgttacttttattttattccttgtaattaagtcacaggcaggacccagtttccagagagcaggcggggccgcccagtgggtcaggcacagggagccccggtcctatcttagagcccctgagcttcagggaaggggcgggcgtgtcgccgcctctggcatcgcctccggttgccttacaccacgccttcacctgcagtcgcctagaaaacttgctctcaaacttcagggttttttcttccttcaaattttggaccaaagtctcatttctgtgttttgcctgcctctgatgctgggacccggaaggcgggcgctcctcctgtcttctctgt

SEQ ID NO: 22120 - DNA, 1050 bp, Homo sapiens
tcatctatccattcatccatccatcatccacccatgcagccatccatctatccacccacccaactgtccatccatccacccatccacccacccacccatccacctatccatccacccatccatccattgatcacccatccatccatccatctatccaccctcccacccacccatctaccaacctacccatctatccacctactcatccatctacccatctgtccatccacaacagtcttgctctgttgcccaggctgcagtgcagtggtgccatctcaactcactgcaacctctgcctcctgggtttttgtatttttagtagagacagggtatcgtcatgttgcccaggctggtctcgaactcctaggctcaagtgatacacccgccttggcctcccaaagtgctgggattagaggcgtgaggcaccgcacccagccatggcctcaagcctttttttttcccccactctgtcacgcagcctggagtgcagtggtgcaatctcggctcactgcaaactccgcctccaggttcaagagatcctcccacctcagccctccaagtagctggaattacaagcgtgcactaccacacctggctaattttttgtatttttagtagaggcggggtttcaccatgttccccaggctgccctcgaacttctgacctcaagtaatccacctgcctcggcctcctgaagtgctgggattacaggcatgagtgaccttgctcaggcatggccccagtcgtaatttctgccttgttatggcatcttagcaggggttcagccctcagtccagtcctggggagggcacaggtcagggctgggggctccaggaagggaaaagccatcactgaacatcccagggcagaattggatcgagggagctgagttcatgtccagtgagcattcattgagtgcctgttgcatgcaggcacgaggcccggggcagacgcggaaagtgggtagcagcgtttgtttgcacctgacacccggtttgaaaaccacccactttaacctgtgggcggccagcagaccccctgtgcctcagt

SEQ ID NO: 22121 - DNA, 1090 bp, Homo sapiens
ggctgcgccgcgttccctcgggtccgtggacacggtcaggggtccgtccgccctcgccgggcccccgcagccccgcactcacctggtcggcccgtgcgccaagctcagcgggcgtccgcggtgcgatcttccctagcgcctcgggtctggcgccgccatcttcctcggtaacaaccagtcgcctgaggcgtggggccgcctcccaaagacttctgggagggcggtgcggctcaggctctgccccgcctccggggctatttgcatacgaccatttccagtaattcccagcagccaccgtagctatatttggtagaacaacgagcactttctcaactccagtcaataactacgttagttgcattacacattgggctaatataaatagaggttaaatctctaggtcatttaagagaagtcggcctatgtgtacagacatttgttccaggggctttaaatagctggtggtggaactcaatattcgtgctcgcttcggcagcacatatactaaaattggaacgatacagagaagattagcatggcccctgcgcaaggatgacacgcaaattcgtgaagcgttccatatttttttttttttttccattttccctcccagaaacggaatcttgctctgttgcccaggctggaatgcaatggcgcgatcttagcttgttgcaacctccgcctcccgggttgaagcgattctcctgcctcagcctcccgagtagctgggattataaacatgcgccaccacgcccggctaatttttgtattttggtagagacggggtttcgccatgttggccagggtggtctctatctactgacctcctgatccgcccgcctcggcctcccagagtactgggattacaggtgtgagccaccgcgcccggcctttcttccattttctaatgtccaagagtggggaaactgtaagcgaagtcaccgaccccgttgagtattcctacttccaaccctattcccacctcctcctccaaaagccagtttaatgcaatggatgtggtgctcttctatttttatttttattttttttgagacagggtctcgctctgtggcccaggctggagtgcagt

SEQ ID NO: 22122 - DNA, 1050 bp, Homo sapiens
ggtggggagggaagatatccagaaaggagccacagctgacgccaaaaagaaaagaaaaaagatatatatatatatatatatatatacacgtatatatataaagagaatttaataaaacaggggaaaaccaaggaacacttgaatttctcaggttttggacattcagagagatgaattgtgagaacagcaaagaaatccatcagaaaaacagaaagaggcagacgtttcccagggcgttcaggcagccctgatggaccgaaggctctggtgtctggtttggccccacagcagtgtgggccgatcctgtttacctcatacatccctgcactgtgtgttttcatttttgtctgctttagttctcttttattttctattcaccacacactcaccactcccagcttctcgtgtccagtgaaacccctgaaccaagatcactgaatttttgtttttttcttgttgctttgggaaatttttttttctctgtagggtttttaagaggtttcgggggttttgttgtgtaaatattctattttattcttggggggatcaaaccttaggaaaaggatatctatatatctatatagctatatatttgtgttccttcagggaaactggtcttgaaaaagcaagaaaaaaaagcaaaaaaaaaaaaaaaaaaaaaaaaaaaaaactcacctttttatttttcccatgaccaatttgggtccctttgtccatttctgggggtgcgttgggcagctgtgagcccagcacatcggatccctggggctagagccgcggagccaatgaactcaggtgctatgggccgggctggggcagagggtgcatgctggggtcccaccggccaggggcccctgacagtgaattgctgactgtgatattccacgatgcttttgcttgtgccgtgcttgtctgctgggctctcgagtcaggggcctggaaatttttttttttttttttttttgagacggagttttgctcttgtcgcccaggctggagtgagtgcaatggtgcgatcttggctcactgcaacctgcacctcccaggtgc

SEQ ID NO: 22123 - DNA, 1067 bp, Homo sapiens
tgagccagtgcacccagtgaaggtcccctcttctctccaccatgacctgctccacccctccttcctctccaggtgggcatgacggctcccgggacccggcggcacatctatgataccaagctgggaaccgacaagtgtgacaactcctccatgtccctgcagatgggctacacgcagggcgccaaccagagcggccaggtcttcggcctgggccggcagatatatgaccccaagtactgcccgcaaggcacagtggccgatggggctccctcgggcaccggcgactgcccggacccgggggaggtccctgaatatcccccttactaccaggaggaggccggctactgaggctcccagcacgctctctccccacatcgtctgcccatctgggtttttgggtttttctgtgttttcatcttttttttttttttcttaacccgttcagtgctgccagtcaaccaagggtctgtgagtgtcagcgtgggatcaggcagcagagcttttttcccctttgccttgatccttcgcaaggctgagccactgggctgtgggggaaggggtcaaggccatatcccaatacgtgtagggcgagggtccctgctggcacattcaggctgtgctgggaagaagagacctgggcttggaaggaaccggtccccgacggtttctgcttgcctcgcctcttcccccttttgtcagctgagcagtttgtggtttctatgcccgcaagtttcaggaagtattcacaaaagaaaaatacattttttcccccaggggtggggcaaggacagtggagagagtgctaggaaatgagtcccctgggaaaggggaccgggccgtgatgttaaatatctccggctcccaagtgactggatttgcctaggaccttcagaccaacagacttcagaccctcagacctgccccggggccaggtggagaaagtgagggccgtacaaggaagtgaaattctgagttgttggggctaagcctgaccccctctccatgctccccgccccaacccactctggcctcagtagatttttttttcagttgtggttgttgcccag

SEQ ID NO: 22124 - DNA, 1058 bp, Homo sapiens
gtgtgaaatgtccagcactgccaatattcgttgctgttatcttcggagaacagtgaggggaaaggaatccttgcctgggctgggccaggcaggaggctgggggtcaggacctggaagaggcttccaggtgaggcttggggtggagcctggtgacgaaagcgttaagcccaaactcggtccctggaggattagaggatgatctttaagtccccagctgtcagccctgctcagagcgacagtcctggcagccaatcagatgcgaggacggctgcgggttgcgctcccattggtttactccacccctggggtagcggagcctctttatcgagtgactactgtttgcctcgctctaatcagagcttccaggaaccctgcgctgtgggataaaggaatgaggttcagaaaggggcagggagttgcccgcagccgcaccgcacgtcttcagcccgaccgttgtcctgacctctctgtcccgtcccctgcccagtctcaccatggccttctggacacagctgatgctgctgctctggaagaatttcatgtatcgccggagacagccggtaacgccccagtgtgagaccagggccgggtgggcaggcagcccccactgtcccccaccgtctcccacctattctcccccaggtccagctcctggtcgaattgctgtggcctctcttcctcttcttcatcctggtggctgttcgccactcccacccgcccctggagcaccatgaatgtgagcccccccagggaccaggcactttgtgtgtgtaggggaaggcagatggctcacccgtgcacaggaatcccccgtgcatgtcagggagccttcaccaggccgccaatacatggcatgggagtgagctctccatcgctggaggcatgcaagcggtgccgggcgacccgatgggggtggagtcaggcagagtccacagggcctcagcaccaggcgtctccccgcaggccacttcccaaacaagccactgccatcggcgggcaccgtgccctggctccagggtctcatctgtaatgtgaacaacacctgctttccgcagctg

SEQ ID NO: 22125 - DNA, 2059 bp, Homo sapiens
aggagtttgctacatgtggaccccacttgttgctatggcatttaggggctactgctcaaataccgagacagtaagagttggggatagacagaggttcccctggattctgcctgaagggccagaaaaggtttccaacaaggaggttctggggatgaggttttgagggatgaataggagtttgcttcatggggcagacaactcctggcagaggccccagctcgggcaaagacgcggcggcctgatggtagttgtgggttggtcccccgtgcctaggtcgcacgctgatcctctccacccaccacctggatgaggcagagctgctgggagaccgtgtggccgtggtggcaggtggccgcttgtgctgctgtggctccccactcttcctgcgccgtcacctgggctccggctactacctgacgctggtgaaggcccgcctgcccctgaccaccaatgagaaggtggggaccggccttctcctgacccctgacccccgggactctgttcagccctgaaggccaagccacttggtgcctctctgcccgcaggctgacactgacatggagggcagtgtggacaccaggcaggaaaagaagaatggcagccagggcagcagagtcggtgagggccggggtgggagacccaaggcgggtgggcagtggggtggctgtgccttaacttgaggaggaggagggggagggggaagaggaggaggagggggaggaagcggcagaggaggttgaggcggaggaggagggggaggaggagggggaggagtaagaggtggaaggggaggcgaaggggaggagtaggagggagaggaggagggggagggagaggaggagggggaggagaaggggggaggaggaggggaagggagaggaggagggggagaagaaggggaggagtaggaggggagcagaaggggaggaataggagggggaggaggagggggagggaaagggggaggagaagggggagaagtaggaggaagaggagggggaggagaagggggaggagtaggagggagaggaggaggagggagaggagggggaggagaaggagaggaggaggagagcacttgagaacctgagatgatgcccccatccctgggctgagccggaaccatgagactaacttgaacactgaccccacctttaacccaaccagggctgagcccagagacaaacctacccctgacctccaacactaggtccagcactgccctcaagatctctttttgtttgtttctgagtcttgctctgtcgcccaggctgtagtgcagtggtgtgatctcagctcactgcaacctctgcctcctgggttcaagcatttctcctccctcagcctctcgagtaactgggattacaggtgggttccaccatgcctggctaatttttgcatttttggtagaaatggggtttcaccatgttggtcaggctggtctcaaactcctgacctcaggtgatctgcctgcttcaaccctcaaagtgctgggattacaggcgtgagccactgcgcccggccgcacctggcctacgttcttaaccctgatctctgtctgccgggacagtcccctcacaggtcaccaatgcctcttccccagggagactggggtggggcgtgagccggggctccctgaagcacccctttgtccacacaggcactcctcagctgctggccctggtacagcactgggtgcccggggcacggctggtggaggagctgccacacgagctggtgctggtgctgccctacacgggtgcccatgacggcagcttcgccacactcttccgagagctagacacgcggctggcggagctgaggctcactggctacgggatctccgacaccagcctcgaggaggtgtgaggcctgggtggtggtgaggtggggccaggaggagggcttcctggaggaggtggtgttttgaaggatgaatagcgtgtttatgagcagcaaggacattcagggaggaggcatggcacatgaggagctctggtggctcagatgtcccttgggaaggcctgggggacccatggtgtaggaggggtggggggct

SEQ ID NO: 22126 - DNA, 1166 bp, Homo sapiens
gaccagccctgagcggagctgttggccgcggcgggaggcctcccggacgcccccagccccccgaacgctcgcccgggccggcgggagtcggcgccccccgggaggtccgctcggtcgtccgcggcggagcgtttgctcctgggacaggcggtgggaccggggcgtcgccggagacgcccccagcgaagttgggctctccaggtgtgggggtcccggggggtagcgacgtcgcggacccggcctgtgggatgggcggcccggagaagactgcgctcggccgtgttcatacttgtccgtgggcctgaggtccccggaggatgacctagcactgaaaagccccggccggcctccccagggtccccgaggacgaagttgaccctgaccgggccgtctcccagttctgaggcccgggtcccactggaactcgcgtctgagccgccgtcccggacccccggtgcccgccggtccgcagaccctgcaccgggcttggactcgcagccgggactgacgtgtagaacaatcgtttctgttggaagaagggtttttcccttccttttggggtttttgttgccttttttttttcttttttctttgtaaaattttggagaagggaagtcggaacacaaggaaggaccgctcacccgcggactcagggctggcggcgggactccaggaccctgggtccagcatggaggtggtggacccgcagcagctgggcatgttcacggagggcgagctgatgtcggtgggtatggacacgttcatccaccgcatcgactccaccgaggtcatctaccagccgcgccgcaagcgggccaagctcatcggcaagtacctgatgggggacctgctgggggaaggctcttacggcaaggtgaaggaggtgctggactcggagacgctgtgcaggagggccgtcaagatcctcaagaagaagaagttgcgaaggatccccaacggggaggccaacgtgaagaagtaagtatggcttgctggggtcggggccgggccgggccagtcacggtgctgatggttctgtcttccttccttctctcctccctccctcccttacttcctcttaacaccctgagctggacccgtctggcgcctgtgtcctccgtgccagggagagcgtggttgggggcctgcgttacggactttcactc

SEQ ID NO: 22127 - DNA, 1059 bp, Homo sapiens
cacaggcagggctgctgccaacctcccgcctccatctttgctgggcctgctgcctgaggccagtggcctgcttccagcccatcgctggcagccgcctgccctgaccagatctcctggatgcaggtctgtggcctcagagtcagggccccttgctgctgcaggaccacaggggcagggaggggcctgctgttccagcaagactttggggtgcagccggcctgtggcccacaggaaaatgagacctgtggacatccggggccctgccagacgtggctcggccggacgagggtggccactgcaggcgcaggtgtggctccctgctggacctagcctttcctctgtcctgtgtgcctggacttctgtgacttcccagctgggcctgtggtgtttgggaggctcccaggcagctgcaaaggggacccctgtgaggggcagggaggcctcggccccaggacgggtgtgtgctgcccgcaggtacttctgtcagctgattgacggcctggagtacctgcatagccagggcattgtgcacaaggacatcaagccggggaacctgctgctcaccaccggtggcaccctcaaaatctccgacctgggcgtggccgaggtaggcacgtgctagggggggccctggggcgccccctcccgggcactccctgagggctgcacggcaccgccacaggcactgcacccgttcgcggcggacgacacctgccggaccagccagggctccccggctttccagccgcccgagattgccaacggcctggacaccttctccggcttcaaggtggacatctggtcggctggggtcaccctgtaagtgccccgcccccccgggcactcaccacacgcacactccgaggggcctctgcgtcttgggcagctgccggcctgtgggcgcagggcgtggccaccggcccagaccctctctggccacagccgctagggggtgcttactttatggaaatgtaactcatacggcagatggtggttcacccgtgtgaagtgcagcctggcccgtcagggatcttcacagagtggcacggccgaccctcc

SEQ ID NO: 22128 - DNA, 1034 bp, Homo sapiens
tggccggcttcccgggcctccctggccccgaggcccgcacccccttccgctttcccagcggcatgtagagtcctgccctttccctacatcgcgggggcagggcgggggccgggagctgggtggtctgccatgggggtggccacagcagcagcagcagtggcgtgggggcagagccggggtcccgagccagggcgggggctgcaggtgatttcctggggcgagtgtgagcagagctccccgccgctggggggctgcggttggcagggggcccagggcgtgttggcttcacaccctcctccctgggcgcctgcgtcaggaaggagctgggttggggggggctggagggggtgctgggcggagacactgggctccccagggttgcttccctgcctggcaccgagtcatgcccgcccattagccttccccagggaggaagttgcagggcgggtggtggtggggactccagctgctctcgggaagccaccccgggcccttcctgcaaaggctgtcttggggcaggggggtagggggccgggcaggctgggccgcagggtgggggcttcaccctgccctcctccctgcctccctccccatgggccccaagcagagaaggttacgccagctactgccagtggagaggagagccgggagggagagctgggaggcggtcggttctgagtcatcccagcctatgtcacttctcagaaacctccgccacccccccccccatcccggccactggggagagcagggctctggcccatacccagagcagggggcttggcgaggacagggtgagattcaacccacacccaccctgaacgggggcagattgagggtttctgtgcttggagcaggttgtgccctccgggactccagccccagggcggtcagggccccttcctgcagccttgccacagccccctaggcctccgccccgcccaggacagataaatatttatcttgagaaagcaaaggttaggacagaagaattcgtgcaggaattccacccacttgctggccctggtgactta

SEQ ID NO: 22129 - DNA, 1028 bp, Homo sapiens
gggaactcttgaaaaaggggagagaatggctgggtgctggggagttcccccctccgagccctccttcccggcccaacctgagggatgtggatttgggactgtctgggggcccctcctgcagcgaggatgggagggggtgctgagctgtgaatcccctgggcagggggcgacaactccgtgtagcattaacccccgtggcggggtccgctgctggtctaatttggaccccctgcctctcagtgcccctgccctaggggtgtctgtctccagaggggagggacaaatcccctactggggccatttcaatggggtagtttttggatttttttccccactcactttttattttttaatgataatggagatgtctggacccttcctcaccccacctgtcggtcttgtcctggctctgcctgtcccccaccgttgttctcgtaggtgaaccccaggtcctcaactccccccctttatgtgttgaaagttaatggtttcagatgtgaacatcacgtgttataactgtagcgctgtaaatttttttgtgggagggtgggcagggaggggtcccagagggtagagctcaaggattttgggttttgttttgttttcatttttccaaaaaaaaaagaaaaaaaaatagaaaaaaaaggagtaaaaggggcgggtttgttttttgaagaactgtcttggatacctatttaaatgtgtgttctgttttgttttttaacgatttttaaataacgtctgtgcctccactggttgagggtggaacctccaggcaggaaccggctcgccaccctctgcccggtaagggctgcccaagaaagcattacccgccctcggggggtcgggctgtgggggtcccggcacctggcgtgagtttcatgtatgaaaacataaaattgaaaaaaaaaaaaaaacctacacgagcaccgtgatttcaagtaataaacagaaaatgaaacacacattgactcccgcctgctcgcctagtggggggatctggccttggttgggagggttcctggggt

SEQ ID NO: 22130 - DNA, 1026 bp, Homo sapiens
tcgcgcggcccaggccccgcccaccagcggggaagcctcattggtgatcgcaccgctcgctcatcggcgtgccccagtagcagcgcgacgaagcctccagaaggcgggacttcagcccggcagcgccgagtgcgcaggcgcaagcgcggaggcgctgcagccccgcctctctccccgcgcgtctgcaaagttgggggcgggaggcgcagccgagggtctgacggctgcggcggggcctggacggaagagggggcgagccccggggcgccgcacgtggacccccggcacgggcacgctcacgtgcacccgtcctttcacgccaacgcgtttcctgctgcccccacccctgcaccactgcacgtcccagaccccggcccagcctccccgcggtccctaggctgggggagctcagacaggaggctaggaggagggggactttggggctgaggctttgccaaaggagcaggagtttgccaagtgttgtaggaagcgggaagggtgcgccaggtagggggcacggcgtgtgccaaggcccggaaacgtgaaaccgagtgcttttcgggggcaaccgggaagtcagttggtggagaaaaatcaaagatgggaggaaaggcgaggctgacaaggaccctaaacggtgattccccaagtcggccactggagggatgacttgggggaccagagaggaagagcaggtgagggggagcggcggccaggacatctgggaggtggctagacccgtggcctggactttggggggcggtcgagttggatcgatgatcgatggggaccctggcggcctcaccctgggggaggtagagacgaaaaaggaactacggtgtgcccggaaggtggtggctttaggtccacagggaggtggttggcaaggcgggggtaacagggggaaggagaaaatctgaaatgccggtgtgagctccgggccaagagagttgaggactcaggaggcaggaatcccccgtggccgcccgctgcttggctgtgggctccaacttggtgtgtgctcag

SEQ ID NO: 22131 - DNA, 1031 bp, Homo sapiens
caccagggctgggggaggcggcggcatgagatgactcctgggcgaggagcaagtggtggccatagagggccccccagaggctttggggccgccgaagagtagtgagtgagggtccttgtaaagctggttctccagatggcggcggctttaagactcccctccgccaaccaggctcagtaggggaggcctgtggaaggagagaaaaggcctgggtggaggagcagagtgggcctggccccgcgtggggagcgagtgcgccgttgctgtgcagcacggtgggaggggaggccgagggccgggcggagtgctggggtgcagtggggactcggggtgtccgcctgcacccgacagcagggacgcacaacactatccggccaggcgagtgtgggggtgtgggccacgcacccagccgtgataatcgcggttccagtgggagttaggcttgggtgcgggttggagtttgtaggcaaactgggttgcgtaaagttggggtgcaccaaagtgtggcgatgtaggaagaattgggattgcgaatattggggttcgcatgaatggggttgtctctgttggggttttggtgggcatggggttgatggcaggaatggagtgctggggtgctgggaaaactgggacgtcggttgtattggcaagaatatcacgacaggtgtcggggttcagatgaagttgggatgtctgacagccgggtcttggttgggtaggggatctgggctaggttgttatgtcgggactgctggagcacaggcaaagtcggggtcccagtgacacccagaagtccccatgaggcctgaggcctgggaatcggggctagaggcccatttgttccccgccgcaggccagggagcaggcacgcgtaactgggtcagccccgccccgccccgccgcgcgctggtcacgccccctcgagcgcgggtggaggactgcggactgcaaacgtctcggccaatagtcgagcccgacaccagtccgcgggagggggcggaaccgagatagactcggcccccagctcatga

SEQ ID NO: 22132 - DNA, 1387 bp, Homo sapiens
ttgctgcgggctcctgcagccagacctgagcagagagagaaggtggagaagcagcgggtctgcaagccttccctggggcctgcagagctagaaagggaggcccagcagactggcgctggtcagggtaggggagccaggcgggggacgggagcgggcagctcaggcctcagggcagccctgggaggcttctggcagtggtggccagagggctggactgtgcgggcagcttagcagggacagtggacgtgcacctgacgctgacctggactgcctcagtctagaagcaggccagagagcagaggcacgtggcatcccagggcgacctcagacggccagccggttagctagttctgctgttgcttcacgagttctgagcattctctgctagcctatggaagctgcagccctcggaggacagaagtgttgtgcgcccaacagaaccctctgagacgcaagctgctcccttggctagctcatatgtggaaatagccctgtaattcgaggtaactccttccgctcgtgtccacatccctcttgttgagagctcactgaaagtcatgtgcccggggaatgttcctgtgactgttttttgtttttccttttttttttaactttgtttttgtttttttcaattaagctggaactaaagtcaggcccagccattacgctccccacgtgcagccaggtgcagcctgggcccagtcatgcctggctcatagatgaaatcccttaagcaggattgaagaccagtgaacgcccccgccttttggattttttgctcaattgaccgtcttttccagacctctttaagtcacactcttaacttagctttctctgatgtctgttgccgccattagtttttttctagagcccacactggcccacatagctccatcccatacgggtagctggctccagctgcgccaaggtgcagacccgccctgggcatgctggcctgtgacggagcctgaggtcacagccccctgactagcctgagaccttcctaggggctgtggctgtttccggggaggccgggaggggcagctgtgagccctgtggaggacgttgggagtaacgctgctttgctttggcaggttgaaggggcccggccaggactcggggaagggtggcctgagagcagcgatgacctctggggtcactgtcccaggagggacttcacctggaacaagagctggaggcagccgcttgcccaggaggcttgtcccctgtaagtgctttcgggaagagtggcatgtggcgctgagccctgtcccgggcggcacctgggcgtttcagtgagtcctgctctcccgcacctatggccccatggcgggcgcctttcggtgtgtgttgggtgcagggcagcgcctcccgggagcgccgggtc

SEQ ID NO: 22133 - DNA, 1061 bp, Homo sapiens
ggggttttggtctagtgcttccaaggttacacttccagaaatgtcttttttttttcacactaaaaaaaaaaaaagaatcagctgtaaaaaggcatgtaaggctgtaactcaaggaaagatctggcaagcagccctgtgatagtaaattatggtcgtgttcagggaatgctttccagcaattcagtagacagtgctcagctgcaatgcaaaagcccaggtccttgtctttgtctgccactggcctctcatgcctcagtttccccatctgtgaaacaatggggattggaccaaatatctgaaatcccatggttataggccttcaggattacctgctgcatttgtgctaaagtttgccactgtttctcactgtcagctgttgtaataacaaggattttcttttgttttaaatgtaggttttggcccgaaccgcgacttcaacaaaaaataagagaagaaaggaatattttctagctgtgcaaatcctctctctagaggaaaagttaagtgttgtgttgttttaatactgttttttcccgtgtagatttctgatacttcaatcccctactcccccaaaacagttgaagcccagcccactcttaatgggcttattcaccatttgtgtaattcattaatgctcataataacctcatgagaaagcaactagtttgattttatgtcagtttggaagctgaagatccaaacgaggcattctgtgagatctatggagagattggtacaaacactgaatacatgtaaattatactcagggtagaccctatttgtggttaaaatagggatatttccttttttttttttttttttgactgtttcttaatcagtgccatgccaggaaaatagggatgtttccttcccagagatctgtgtgtcttttttcagaaacgtctgtgacaggcccatcaattttgaaatatttggtttttgagcctgtcactctaaaccagcgtttaacgttcaaaaggcaaataactgatgaccaggcggcacattgttctgctccgtgagtgtctggcactgggaaaggtgtagattgtctagaatga

SEQ ID NO: 22134 - DNA, 1029 bp, Homo sapiens
ttgctttaaatggtttactttgtgattagtaaatatgtcctctgtgtgtagctcttgaaatccatggctgcggtgtacgcgtgtgaatgattgtgggaagtagcagagccaggctgcgctctggccgttagagttagatcgtgggctcagtcactgcgctgaattctcacaactgtcctgggaagttgcggccccatttccccgctttacgggtaaggaagctggggctccggcgaggacagtttacccagggccaccaggcaaggctacagcagagagcctctgcgcaaggccaccgccttccctggccgactgtctcagtccaccccatgtcacggtggcctcggtagccagccccttgcggccgggggcgtccctagctcagcgtcgggagccctgtgggcgctcaagtgctgcagtgagcctggccgataccacgtggcagacgtcttgctgcagagtggcttcctgctccctggatctgcagccagctttcatcatgtgctgtcgatgaactgcaagggatttgtctaactcagaaatgtctatttcccctctggaaatactcattttgttgtggcgacttccagcaccaacacgtcaactcagtgcagttatttttactcctctggaaaaaaagaaaaagtggttgtgtcttttccactctcagggatctgagttactttcttttgttttttttgagacggagtctcactctgttgcccaggctggagtgcagcggtgcgatctcagctcactgcaacctccacctcctgggttcatgcgattctgctgcctcagccttccgagtagctgggactacaggcaggcaccagcacacccggctaatttttgtatttttagtagagacggggtttcatcatattggccaggttggtctcgaactcctgacctcatgatccgcctgcctcagcctctcaaagtgctgggattacaggtgtgagccactgcgcccggctggaactgagttactttctaaaaatggatgaaggtgtggggtgaggagaa

SEQ ID NO: 22135 - DNA, 1073 bp, Homo sapiens
tggtgaaaccccgtttctactaaaaatacaaaaattagctgggcgtggtggcgcgtacctataatcccagctactcgggaggctgaggcaggagaatcacctgaacccgggaggcagaggttgcagtgagctgagattatgccattgcgctccagcctgggcgacagggcgagactctgtaccagaaaaaaccgccaccaaaaaaaaaacttaaaatttttgagaaatgctcttgtgggtttgggtcttgccttttcttctctgcttttagtgatctgagctattgtgtctagtccgaaagatagtactgatttaattaagaaacatcattacaagcagggattcatggactaggtttgcaccttctgaaccatgagctagaccatgtctggaggctggaacctggtgacccaggctccctgcggccttcttaaccgcaggccacttggggccagttgggcagtgcctgctgctattgagccccgtgccctctcacaggccatcatctgtgcgatctctgcggtggacgaggtggactacaagacggctgaggagaagtacatcaaggggccttcgctgagctaccggtaggccgctcccggcgctatctccagccacttgcgtctctgccttgcagtttctatttccacacccacaggcagtttgactccaggctgccgcagcccctctccctcatgaggtggcccaggtgctgggtggtgagctgatcacatacgctgaactcaccctgtgggtcactcctgccccccaggaaggctgtgcccgggtctcccagctggtcgctgtgggcagcacggggccacgggcacgtgcctgggccgtgtctgttcttaatctctttttgcaggggctgatgtttgctttttgcactttcctcccctctttccacagccccatggctgtgtgagaaatacagcaagattaagcagcagcacggcccggtgctttccagcagccagaagaatgctgtgatcaagatgtttctctcacatccgtgtgcttagctgcccttggatgtttggcccccagagcgcctaatcctgtctctgggc

SEQ ID NO: 22136 - DNA, 1083 bp, Homo sapiens
ccctgggaatccacacctggaaggtgggttagggagccatccttgggggaagctctgcttttgagtctgagaagtcgtcccaagttttgagggtccctgtgctggcttagaagtccatgtaaagcttgatgggggatgaaagtcagctgaggcctgccggtgataacggatgccttacacacaccgacttccagtcagcttgaggggggcttcatgcaggaggaagcgcatacgtgtggtggggtgtggggagtccctctctggatcctggtgggtttggcacgcggaccctacatggtggatgtgatggacagtgtcctcctttgggagcggggcctgtcctggtcctcttgtgaagggtgggggacaggcactgacctgtcaggagggttagagggttggcaccagcaggtggcctggagcgctcagagcacgcgcgatcaggaaggcccgagtctccagtgtgccctccctggccttgtgaagtcatcttaaagtctggcttgagcgcctctgacttggattctgggaagctgacacagcgcggccggggtcgccacatcctgttgagtagccgctgggtgctaggcgcctgggtggtagaccaggtgtcagggatagggcccatgcctggcctactggggagaggacagaggctcagaggggtcacctcgagcgcccaggccattgtgttctgctggcttccaaggcagcacacggtcatggaactggagagagaggtttatggaagattttatctggtacactggggaatggtaagacagggacacctggaaatattgtaggaaagtcacagagggaggaaggactcagcggagagaggagaaagccgcctctgggcagcttcgaggatacccaggactgtggccgggggccatgcagctcagagccaggcccatggcaggtctctgggtttattgggtggctgtggaaggagacatcctgagtggggctcctggctgggcccctagaggccgtgactacttgtacctgtgcagagtgagcacaaggcacctggcaagattgttggtcaggccagagagggccgtgatctgggggagg

SEQ ID NO: 22137 - DNA, 1942 bp, Homo sapiens
tccttctgcctcagcctcccaagtagctgggactacaggtgcctgccaccacctggagtctcgttacgttgcccaggctggtcttgaactcctggcctcccgtaatgctgtgattataggcgtgatctgcgcccagctgagaaagacagtactgataccaggttatctaacccccccggccctgtttcaggtttctcagctgagcgtttctagcccttcccccttaatacacaatttttgaaatttaaatgaagaccgaaactggactggtctgacgagttccttctgccagtgaggtgggggtggagggggtactgggctgcttggaggacacctgcctgttacctggctgttgggtgggtgcagtgctgactacaggctgctgtttcttcaagtgacttggatttggtttggttttcagggttttatgtgtgtgtgtgtgtgtgtgtgtgtgtgtgtgtgtgttttgtttttttttttttttttgagaactgcttgaactttaattccaaaggattgtgtaaatgagcatttttccggtcggttccagccaggcttgggggcccttccttcatggggtgggggctgctgctggctcctgctgggtgccgggccctgctggcagggatgtgggcggggctggccctgactcagcgcgggcacagcctatggagagtgaggcacagcctatggagagtgaggcacgcggaggcctcgctcctcccacggtctctaggcctgacctcaacgctccctggcctgattgcgaagggtgcgtgggagacgtaggattttaagttaatgaggcctcaacctaagcctgttgctgttgcgtgatcagcatggttttccctgaaatttgccttttcagatctcgtctctaagggtcaggaagcacagggcggctggcacaccccgcctctaattcttcccgcctcagccctccccaccgaagaacggggctggggggttgcttgttgacgttttgaagacggcagtgggtgcctttcctgtggtgggaacatgctttgtttttcacacactaaatttaaatcagtcgttcttagggaaaaaagaaggaacagggacaagctcctggcggttggctgtggcagacacttcaccaggggctgactcgcgggggctgagtgtacaggccccaggtggtggttgatgagaggtgatgagtgtgccagccaccttgcaggggtctttcctggcgagctggcaggagcagggaggagcacgttgctcctgctgctggtggggcagtaacgtgttcaacctgacagcgacgtttttgctgaaagccgaagccaagggtggtgtggttggccgtcagggatacagggccccgcgtgggaatggtgctttcagtgaggctggcaggattcttgcggctcaggtgggagctttggcctgcacggtgttttgctctctggagaccaagggtgatgatggtgctggcactgagtcacagctgagattcagctcagggacttcatttctgaatgcgtgtcctctttcccagggaaagcaggcaggatgggagagtcgccgatagaaccacctcttccctgcctcctgggcttgggggaagcttgaatgacatctaaggccccgtgcctgggtaagccttgtggtgtctcagacatgcccagtgggtgccatggctgactcaaggtggcacagtccccattgggagttggcacagtccccattgggagttggcacagccaaggccctggggccacctggagcggcagtgaggtggaaaggtgagtgggcccttgggcgtcgctgcagggtcgatggcggacgccttgggagagctccagctcttctgcccggaggagacagccccaggacgggggtggcgcgggtctttggtgggggcaggcaggaagtgccagtgctgagactgaatttcaggcccttctca

SEQ ID NO: 22138 - DNA, 1937 bp, Homo sapiens
tcatctttcatgtctgcagacagcatgggcgaggctgactcgccattgctgtgagctttgtatgccgtcacgtgcacaaggacgtttgcgtcagctgcttctgtggtttgaattaagacctcagcttggcttggatgggggcatttctaaggcgagcgctgtcttgatcctgaatgttttctcattgaatcgcaggaagctcttcgtgggcggtcttgactggagcacgacccaaggtaggtggggaaggggtgtcaggtgggtactgcagatgggctctaggacctcggccttcaagttgtgtctgcccgcctcttgctactgtcttggatattttaaagtccttttgacgttgttctgatttctgggcaggggacagagtaagtgtgtatttgctctgagactgttaatttggtatttccatcccaagttacagggaagacctcaggctgcaggttcctagctccgggctgaggtggcttgtggaggcagacagctgttgtctggaagtgcagagggctgggggctggccaggctgttactgagttcagaataggaggaaagagtgtgtagcaaagtcggcgctccttggccactgccagcattcagagttgtcttgtttgccttgccttaaacgttgccttcctggacgcctacaaagtcaggttgtaaccgctggccactgctgtgctcactggcagcccctgatttacgtgaggacctcaagtgtgtgttgggcagaattccccagcgcttcccgtacaccccccacccccagtgcagcatcgctcggtgcgtggctggtggactggaggagtgtgcgtgccggcagcactgccaggcacgtgcctaatgctctggccctgtgtgtttgtgttttcttcccgatttctgagcagagactctgcgcagctacttttcccaatatggagaagtcgtagattgtgttatcatgaaagataaaaccaccaaccagtctcgaggctttgggtttgtcaaatttaaagacccaaactgtgtggggacggtgctggccagcagaccgcacacgctagatggccgaaacgtaagtgcccttccgggagctcacacccgctctctgtctcccctgtccttcctctgcttcattttttcctggactctgaccgatgtttgcgttagagtatgtttgaacgtggggtcgattgggaaggattaagccttggtgctgaggctggatattgcaggaggatacagggtgaatggagccggcggggcggggcgggccgggctgctgtgccgtggctgctgttgtgctgacaccctctttcctagagaaacagcctcttattcacaaccagctgatttgaaatttcctgcagatcgaccccaagccatgcacaccccgggggatgcagccggagagaacacggccgaaggaaggatgggtaaggggctgggccgggcggcctccttgtgtgttctccactccacgtggaaaggaaatgcgtgccttcaatctgctgttgtcgctcgttaagattgagggcgacgcaggtcttctgggttggcactcgagcagctgaggatcacccagatttatcagtgccgtgagtgttttacagccaagaaaattcttactaatctatcttagggaaaaaaaaaatgacagctcatgccactgattatcaggagccagtcagcttccctctgtgccctgtgtgccctctgtgccgggcctgccccctcccactgcctggccctcctcagaggtgggccatccttccactgccggggctgggccgggctgtgtcagctcgtgctggccactttactgctccacttgagatcccctgacgtggcaacttgggttctctgacctgcgccctggtgcttgcctggccgacagggcactgtcctggcatggggtctccttggcatttgggtctcaccaccac

SEQ ID NO: 22139 - DNA, 1007 bp, Homo sapiens
gcgcacactcatgaaaccaccccgaacgtcacggcggcgagcactcaccccacgcgcacactcatgaaaccatcccgaccgtcacggcggcgagcactcaccctcaaaggtttatagtcttttattcaaagcagttggaacaacttaaaatgtgatagccttggatagggaaaaaaaaaaaaaaggatggttggtgggtgggggcaggaggagagcagccccagccctaagggcagcccgggagctggaccagagactcctggctctggccacccagtgagcgccgaggccccgggaagtggtgcccaggagcaggcgcccttgccagtgggaggccggcagaaggggctgtgtggtttgggccagtgtttcacacagctcttgagctgctggaggtttccgtagccatcattgtcacctgctggagatgtacagcctgaaatccagcttcctctctgctcatttcgtcgtcgctgctgcctttcccctgccgtcctaaagtccctgccttcacactggagcacttttccacgtggcagtggttgtaattcggaatagctgaggcaaggcacgcactgtgtcgtgggtccgtttagctgaaatgtagctctgcagaaatgctcaatccctgtctccttgggtctctctagaaaagtgagaaagtgtctcagcagagcccagtgtctttggacttagcgggcttgtggagtgttctgctctggctttcagctgactctttaaaccagcgcggattggcctttatgtcctccgcagctcgcgggagggtttggagggttcccgtgtgaactaactatccttcccttcttcaacagcagaaaggacccaggagcgataacagtaaatcaaataagatatttgtcggtggaattcctcacaattgtggtgagacagagctcagggaatacttcaagaagttcggagtggtgagtttctccccaccccggcagcactgtggggacagagccgcttctgctcaggcctgggcc

SEQ ID NO: 22140 - DNA, 1033 bp, Homo sapiens
agtgttggggctccagcctttctcagacagcagccccacggagcagctgttgcccgtgcacctcccccgctcagggagggcgcaccctgtgcgagagtttgggttcgtgggaacaggctgtgccctcggaagaccacctgtggtgctggccctggtgtccgtgctgacgccaccctctccttccaggtcacggaggtagtcatgatctatgacgccgagaagcagaggccccgaggtaagggcagatctagtttgacctcggccttctccctgctcctccctcagatggcaaactatctcacccgccaggcacacacaggtggcggctgtagcaaacagcctcaggaagggacgatttggagacaaatgactaaaacgtgggctcctcatgtgcaccccattcagcctgtctgtgcttcccgaggtcagacgtcacacattgttttttggcttgttcttttgaagtttttacgacttgtcatgagtctcggcctggcttctgtttttcactgtccggaagagtgtggtccttctgcatttgaccttccttcaccctcatccagtcctcccagtgtggccggtctcatttcgtgtcgtcagctgggtcagctggctcggtgtggagtttggattttccgtgatccatcccatgctttttttttctttctttcttttttccttttcttttctttttcttttttttcagttttctcccctctctgaagtcagcagggcaggtgggaggaggggtgaggagtcacctcagggcctcccctcattttccctcagcttcttgcacacccatccatgctggtttgtggagctgggacgatgggcgcccagtttctgtgccccttttccgtggctgctgctgtctgtcccgcccgcccgcatggttttggttcatcagctgcttttggccggccacgtgagcagacctgcagcctgggtctgcccgccacgtccgtgccgcccccgcaccaccggcccaggtcagtcggggcagccccgagcgccaggtggcgccgcagca

SEQ ID NO: 22141 - DNA, 1070 bp, Homo sapiens
ccctccccacggttaggagtgctcctcctccatgtcggttacgctgttaagtcttagtcgtaacttaatttagacatacatgcttagtgacgtacttaagtgtttcatagtaaagtacagtgatgttaagtaagctgtttttccttttctctctgtgaattgtgtgtgattaacgatatctctttagatttctcttctccaggtgctaaattatatcacacaggtacaggccagtcccgcagtcagaggagggagcggctttgctccagtggggtgtaaacgaagtttcaggtgtttctgtcccgcttcctcagtggtgatgtcgcctcttgacagccgcattcctagacagcgctcagggcgcctcccccaggacccagcgcctcttgcactgtgcccggaccaggcgagccctgtggtttcagacactcctgcagtttgcgaaaatgtctacttctaaatacgttgtttcatcaccgatgctgtgttccaatactgcctctgatcttgggaaacttgagcgcgcgggaatctgagggttgcttctagatcctcccggtccccctccggctgcccagagctggcgccccttctcctcgcgtcctgtcctgtcccgtgtggacgggacgtggcgagtgtcgctgagtccacactggtgtacagagcacttcggggccagcacgtggccacatgtccttagctgttgggctttgaaagtgtcccttgggtgtcaggcgagtggagggccggagagacgctgcggcgctgcttagcgggtcctcccagagagtgtgtccccttcccttggcctttctgcatcttctgagacgggtctgtgtccccctccccgccacctcctccctcttcctctccactgactgaaggtcatggccatgtccctgtcagggaccccgcctgtgtctcgggcacacagtgtctgtgcgggtccctgcttggccctcccacgtctaccctcggcccgcccgctccagccgctgcctcgttcgcctctcagtcccctcaggtcttctccatcctgcgctcctctcgctgtgtgccttgccttcctg

SEQ ID NO: 22142 - DNA, 1101 bp, Homo sapiens
agaataagtaggtcaggcctgctccatccattgtccccggccccgcaccctcctcctgagaagactgtggctcctgacacgtctagagaggaagggccccgggctgctgagcgaacacagtatgaagattgcttactgatccaaatgtccattttattgcatgtttgttactttttttgttagatgtaatgtaagattctcttatcacatccattccctctgacattagttttgagttaattgagattctttaagcgttagcctggggaaggtaagtctttatcttccattagacattttaaatttaaaaatctaagtaaaacaccagccgtgtttctcaggtatgagttaaaagcacaggtgggcgggctccaagcagtccagagggcgatgaggatgccgattgctgggaagatcctggtccctttttgtccccatgttttcaagaggaaggaggacgctgccattttacttgagtgaaagacccttcgtcacgcacgaaacccccgagggctctgggctcggtcctgctgccccgcagtgggcgggctctgtgtgtcttacggttgcatctgttgtacctgagaaacattttttaaacaaaaaaattcaacacaaaagaattttttaagaaaaaaatgctactggcctaaataaggtttatagttaagtatttagtcttaagttgtaagatgctaagtgtagtcataagttacccgagggtgtgtctaaagggaagggggtgctgggacccgcagcctcgccctaaaccagagctcggtttgtttaggtggaagttaaacgagctgagcctcgggacagcaagagccaagcgccgggacagccaggtgccagccagtgggggagccgggttgtgcccaacgctgccaatggctgggcaggccagcccccgcccacgtggcagcaaggatatggcccgcaaggtaaggctgatgcagaggtgcccacgggaatgtcccccttctcggacttggcccgcgcgccctgggctgtgccgtcgctgcggcctccccacctctgctgtgcatgcacagagccgcggttcacagtgtccttgagcccccgcgaggtgccggctga

SEQ ID NO: 22143 - DNA, 1050 bp, Homo sapiens
agcccgcggcgccgcgacgtctgcacggcccagacccaggattccaaacttgtgaactcgtgacaatcacaaacttggcggcaaagtggcgactcaaccttgggggggggggcggggggagggcgcgaggcttttggagcggctgtgggtgtcgtctggactgaggtttttaaatatttctttctctaacccatcagcacaataaaaaaaagtcactggttcaacaacagggtttaaaaaaaatgtcttcagctttaattcaaaacttcaggtttctttttcttccttttttttggaaattattttcctgagccttttgttttacggtatattgtaaacttttatgttaaagaaaaaatatacatttacaaattgtgagatttttaagagaaattttctacgatgtatactggcttattttttaatttaaaacggggtttccgtcggcactggtggagggggtgcgctgttagtcccctcgctcctggctttgggggttgggacttggtggtccagaaactctgggagcttctagaagaaatctactgagtgtatttctgttttttgtttaattccttgcttttgtcgactgacctgcttggtagtgtctgaggtgaactgtgggggttgcgcacagccagccgcgtggatcccacgcagcgctgaaccgaaccgagtaggaagcctttctccccaggcacgtggcttcagggcgtttcccattgaccagtttgaccctggtttgaataaagagaagtgcgtttggattagaaaccactttgtgtccgttttttccctccttggtcttggcctgtgcctacccttccagtgcctaggaaaggtctgaaacgcgacggaggcgccctcgccctccccttggctcttggtggtctcagcaaccccgagggcttcagggcagaggctgagtggcgagctgggcccatccctcagtgggtcttgggatgctgtgactttgaggatgtggccaccaccagttttctcggggaatgtgggctccaggcttttcccatctcaagacctttaatcata

SEQ ID NO: 22144 - DNA, 1029 bp, Homo sapiens
tcaggaggcagagcttgcagtgagccaggatcgtgccactgcactccagcctgggcgacagagtgagactccgtctcaaaaaaaaaaaaaaattgtgtgtgtgtgtgtgtgtgtgtaaagaaacaagccccaggctgggcgcagtggctcacgcctgtaatcccagcactttggggggcctaggcaggtatatcacaaggtcaggagttcgagagcagcctgaccaatatggtgaaatcccacctctactaaaaatataaaaaattagccaggcatagtggtgcacatctgttgtcccagctgcttgggaggctaaggcaggagaattgcttgaaccagggaggcagaggttgcagtgagccaggatcgcgccactgccctccagcctgggggacagagtgagactgtcccaaaaaaaaaaaagcccccacgcagactattggtgtgccctggaactgagcattagctgttccctctccgagttctctcccctacttccccagccttccaggctgggctgtgggtcactgcctccgaggagccctcctggattctgctgaagatggtcaggcccctccatccccccattttctcttatgtacctgacagccctgccttaaaaaaaaaaaaaaggtagagcaggaattcccatttcacaggggtggaagccgaggcttggaggagtcaggactggtgcctgagttctcgcagtcaggaattgaccgcgctgggctgaacgcctctagggcaggttggggactgggtgtgttttctgggtggacatacccaggtcccggcgcggaccttggcctcctcatctgtgggcttagataaaggcctcccagcctcctgttcaccagggttgtcaccacgcagggtctgactcacctgcctggagctatgccggttcccagcccaggctggcggccgtgttctgctgggacctgggacctgggctgcctgccctcctgaggggtcccagtggtcggtcgcctgccttctgggtgggtgtggtagagggagggtcag

SEQ ID NO: 22145 - DNA, 1029 bp, Homo sapiens; identical to SEQ ID NO: 22144

SEQ ID NO: 22146 - DNA, 1047 bp, Homo sapiens
tccccccacctcggcctcccatagtgctgggattacaggcgtgagccgctggtacctagccatgaattgtgcttttgaaaatgacctgtcttggctgggcgcagtgactcacacctgtaatcccaccaccaggttgaagcgggtggatcacgtgaggttaggagttcgagaccagcctgaacgacgtggtgaaatcccatctctactaaaaatacacaaaaattagtcgggcgtggtggcgcatgcctgtaatcccagttactctggaggctgaggcatgagaatagcttgaacccgggaggcggaggttgcagtgagctgagatcatgccactgtactccagcctgggcgacagcgagactccgtctcagaagtaaaaaaataaaataaaaaaaaaagaaaatgatctgtcttctggtaggtgaattatatcttcgtttttaaaaaccaatggctgtttaaactctgtgcacaccaggggttagcaggacatgagggagtgtagctctgatgcggtgacctgggccggagccctcggactagcctcagctttggtggcagcacgccctgccttgtggagccacggcctcccgggacggactccccggctctcccccagccgcccgcagccgccggatgatcctctgctcccgtctctgtctcccacagtcggcctcgctgaggatggagcccgccccgggcctcgtggagcagcccaagtgcttggaggccgggagcccggagcctgagccggcgccgtggcaggccctccctgtcctgtccgagaagcagtcaggggacgtggagctggtgctggcctacgccgcgcccgtcctggacaagcgccagacctcacgcctcctgaaggaggtgtcggccctgcacccgctccccgcccagcctcacctcaagcgggtgcggcccagccgcgatgccggcagcccccacgccctggagatgctgctttgcctggctgggccggcctcgggcccgcgctcgctggctgagctcctgccacggccggctgtggacccccgcggcctgggg

SEQ ID NO: 22147 - DNA, 1045 bp, Homo sapiens
tttcccctgtgtctccaccaaaacgaaacgctctgggctgggctgactgatgagtttcccaggcaggcagcccccgggagtgtgtgcaggtacgcgcacgcctgccttgacgtctctagggccgagagtgttttgctcagccccccacagtgagctctgagagccgctcctgcacagacgagagggaacgggagacctgcatgcaggggagccgggtctggacggggtcccaatgggagggccaggtctgggggtgagaggccaaccatgtgtcctgcaggaccgtgcagcgggcaaatggggtgagatgttggaggagctggctctgttcccttcaccccggtgggaggcgaaaccccaagtggtctgtagtgtctggatttactgtgcctgctgtgccttcggacttccttgtgtgtctaggggcttcctgtctgatttgaacctgtctagttcctctgaagaggatgagggagcagcgcctcattgcctgggctctgggcaggtctgggagccaggccgtttgcaggatggcccgcgatggtgcagcactttgtgcagacagattttgtggaattgccgatttgggtttcttcttttcttctcctcctttttaataatacagtaattactctgggctacaaaggaagtaggcgagggtttttttaattgaaagttcctgttgctcatcccaagcttaggggaagccagtatgccagccattaatttggggattggggtagtcctgttggtgtgccaggcacggttgggagggggggcactgtgtcttttggaactggtgggggttaccgcgcgcccgagtggcagactctagcgccccagcagatgcgtccgcagagccactgggacggacggaagctgagcttagggacagccggagttgcttgccctggggcatctggagagggggatcctgttgagcgtttgatgttgcctcctttctgcaccccccaccgagctgccccaggcccccaggggctcatggtccgtcaaggccttgaccgaggcctggcggagggcgggt

SEQ ID NO: 22148 - DNA, 1055 bp, Homo sapiens
gtgtgcccgggaggtcacgtgggcaccacagacgaaagtggagccgggggagagatgtcccgggatgcaccaggcgctcgtgcaaaccaagtgctgagcagagagcagcctgggagagaagggggctgccccgagcggcttgggtggccgggcctgtgggagaccttgggtttgctgttaggagggacagtgagcgcaggcacctctctctccacttcatgtttgtcctcactgagggagccgagcagatgcctttgcccctgcaggtcccccatgtcccctcgcccggggcgcgctccacaggctaggccactttcacagctcaccacacaggcagagactggagggtgcgcaggaccccgggtgactgcagacgtgggcacagaggggcctctgagggcgtctggcggcatttgagcagctgccagatctcccctggaaacactggggtgtgtgctcggtgggtgccgtgtgtggggggtatgtgctcggcgggcgccgtgtttgtggggtgggagctaggcgggcgccgtttatgtggggtgggcgctcggcgggcactgtgtgtgtggcacggccactgcttagggccccctggagctgcggggcacacggcagagccagcctcatgtcaccacgtgcttcccccgtgtgcagggaggggttggaggtgtgcgcttgtcttgtccggaagccgggtgttgggacgcgtcctgacgacggcactgcccacatcctaatgggacacctgagggacatcggtggctgagtaaggggcccctcccgagcaggtctggaggcgttggaagcacagcgcagcctcatggggcacctgcctgctctgcctggaattgaggggcgattgggactcccactgcccccaccaaagcctgtgcccctgatgtctgtccagagcacggcttccttctcggtggttcccagaggccgctgggcctcgcttcgtcctttttgggcagcgagtgtgtatgttaggggaacaggagcccggcagggccgtcttgcagggctcagcagtgggggccgtggggttggtg

SEQ ID NO: 22149 - DNA, 1048 bp, Homo sapiens
gccccttggggcgcgaccttgtgcgaggccctcggggcccacccacagcggcccagggccagaccctggctggaagccagaacgcagactgcaggggccgcgcctggctcaggcggccccacccccgggacgtggggtcacttccttcatgtaagactttggccgaaatttctacacctgtgtctagtcctcccctccaagagcattaactatttaaaacaaggaaaagaggaaaaaaaaaacagaggcccgccctaccccactcctgcccctccgtttctttgctgaagtgagtagtgtgatcctggaggccccccggcctggccccgccccgccagccgcccccgttagcgtcataaagtccagcttgtctccctcgatccaaaggccgttttctcgaggggagggcaggcccggcctggaggggtgctgtggagctgtcttgcccaggccctcctgggagggggacaggcattgttgccaggggtgaggccgtgccccaggcctccccgaaaccaaaggggaaggcaggggtggggccgtggctgaagccggctccccaaccaaaatgctgcaccaaagctcgggcgccgcgggcacggctgctgcagtctcttcccagcctggccctggcaaggggcgggtgggcgctgccaggcgggtgcttctcgacgcacttgctcccggaggctgcgccccggcgcctggaacccgaggtgggaggaccggttggtgtcaccctgctcggccctcagccctgccgcgtggggcgcgtgggcacggagcttcctgcctctctgctccgacacccggcaagcagccggagacaaaacgccttaaagcccccggcccagccctgcaggtatattgcaggggcctgggggcggccctggactggcgggcggttccccagtggggtgccctggaggctgccgggcagagtggagcagcttggggccgtgcccagggcggtggctgtgagtctagtttttgctttaccaagtgtacagaaatggcatttacgtttctctgatgctcccttgaagcc

SEQ ID NO: 22150 - DNA, 1070 bp, Homo sapiens
tcctccttccctgtcacgctgtggctttaggaggcccacgagtcccgcgctttcctccttccctgtcacgctgtggctttggcctcaggctagagggtcggtgtctgtcagcctgtgctcagacgagggcgaggagagttctggtcagcgcgtccagcctccctcctgtgttgctttgctgctggaaaaagagggtcctgatgcagaccccaagagaggagagaactcgaggtgagccgcggatcacagtgagagcagccaccaagccgcttccttacacagcgggcctccctgacagagcagggcgtcctcggggagcaggcagagggtgcctgctcttccttagcgcctccgtctgtgagaaacggccagggttgcgagtaaacctggaacgtgcagacactcactggaggccagccgggtggtgccatccgaccacccttcaagcccagcctgctcaccggccctctcagtacagcgggcacgggttctgcgggctgcccggaagacctcccccagacccatagatgctctgtgtccttggtgggcagctcataagtgtgaaccttcccggtaccttgcgagtgcctcactacgcacttcaagacggggtcgctccggttgtgttttatgaaaccagaggcctggtgagctgagcttcctctcacagcttcacagcagcctgtgtgggtggcctcagccctcctgagcccctccagtgtcgagttgctttgactgtttccagggaactcctttggttgttgcgtagcttgggctgtttgtttgtttgtttgagacaaactctgtcacccgggctggagtattggagtttagtggcgtgatcataacagtgcaaccttgaactcctggctcaagcgatccttccacctcagcctcctaaagtgctagcactacaggcgtgcacagctgtgcccagccagctggggctgttgcacatgggctagttattatcaagtcagctgaagccttgtcagccatccttggtctgagctctccctggctctcgggcagcaccgtcttcctcctgtggaggtctgagtccccttttc

SEQ ID NO: 22151 - DNA, 1054 bp, Homo sapiens
ttcctttccccagccctgaccgggctccacccagaggggagaaatcgcaggaacccagtggctcccagaccaggcccatcctcccaggtgcccggagactctgctttcgtcctgcttcccaccagctggggagctagacctgtgcaccctctactgctcgctcccagaagctgccactcgctagcctgggccccagcccgggccccacccacggctgcagcctgccgcagtccttccctgggcacacctgctccctccacagcggctggaaaggtcccccgcggaggaagaccccaggtccctgggctcccggaggccctcgcgccctccctgcatccccagtctccctcggcacccctgcgtctgggccgtgccctgcccctcccaggttggggctcccacctgctggcattctttcagcctctgcctgcactcagactctgcttgtgaggtgtcgtctcctctcaaccacgggcggggctccttgaaacgaggccctaggtgtgtcttcagcagcagcgtggcctggctgaagcacagatgagcggcccgtacacgaacagcctcagtagcctgacgaattcttgataggaccaccccatccaggctgcagggctgacggggccacccaagggtcagacagtgaaggccccttctccacagtgtctaggctgtccctgggctccttggacctcgatggacatgtgaaccttgtgcctgcaggcacgcgagccccacgtctgccccctttccacagtcctggctttgacgtggggaaggggccccaggggcagggaccaagaggactttgcacagactgggtgtggcagctcacgcctgtcatcttagcacttggaaggctgagatgggagggtcacttgaggctaggagttcaagaccaggctggtcagcatagcaagatcccacttctgtttatttatttaaatttattttcaaatttaaaaaatgcaataaaaagaatgtgtatcgtctggacgtggtggctcacgcctgtaatcccagcactttgggaggccaaagcaggcggatctga

SEQ ID NO: 22152 - DNA, 1048 bp, Homo sapiens
ctggcctcgggtgatccacctgcctcagcctcccaaagtgctgggattacaggcatgagccactgcaccgcgccgagaatgttttttaaagaagcattatttgtaggaggttgggcgtggtggctcacttgaggccaggagttccagacaagcctggccagcagggtgaaacccgctctctactaaaaatccaaaaattagccaggtgtggtggtgtgcgcctgtaatcacagctactcgcaaggctgaggcaggagaaccgcttgaaccagggaggtggaggttgcagtgagccgggagactctgtctcaaaaaaaaaaaaaaaaaaaaaaagttatttgtagaataggcttcaacttggaaggtgtttcctagtgttgcttgtaggcaggtggacaggacccggagcccagtgtgtgtgtgttccgtgtcattgttccttctctgtcaccttgagtggtgtctgctcttctgtttcctctctcctgtgtggcagtaagcagtgtctgtgtttcaggtggcagaatcgtgtcctcgaaaccctttgcacctctgaacttcagaataaacagtagaaacttgagtggtaagaaactctcatgttgttaatgatgaacacgggtaattttaaccatctgacacgcagtattcctaggtccctcttccttgaccctgtggacactggggctggatccttctgtggggtggggctgtcctgggcagtgcagggtgctgagcagcgtccctggtgtccacccactccatgccaggagcacccctggtcgcgacaaccacacacgtccccatagagcactgtgtgccatgggggtagaatcactcctcggggagaccccggcttcgaggggaggcgtgaaggatttacaggacttttgtggacagagacaggcccacggtgggaaggagccggcccctcccatgccccctgcctgccttactgtgctgcgtgctctgtcagctcccagccttgcggggcagcacggcctcctctgaggggcttccctgaggagcgcccacccgggaggtgcct

SEQ ID NO: 22153 - DNA, 1063 bp, Homo sapiens
cctgcggggccccaagcagcccactgctgtctctgggcctcagtttcctgatttgtgccacagaggacttgcagtggacagagttgggcccgtggcccccttgagtctgagctccgcgtgcctctcggtgcaggagggccgtgggcagcgctggggcttcctgtggctcaacctgctctccttccaggaggaacaggaggcagcccggcgccgccagcagcgcgagagcaagagcaacgcggccacgcccactaagggcccagagggcaaggtggccggccccgccgacgcccccatggtaaggccccagcctggctcctgctgctggagggcacccgccccctgcccgggagaccccatgggtgggaggctctgtgcccatccctgttcttcccttgtgtcctccaggactctggtgctgaggaagagaaggcgggagcagccaccgtgaagaagccgtctccctccaaagcccgcaagaagaagctaaacaagaaggggaggaagatggctggccgcaagcgcgggcgccccaagaagatgaacactgcgaaccccgagcggaagcccaagaagaaccaaactgcactggatgccctgcacgctcagaccgtgtctcagacggcggcctcctcaccccagggtgagccgcccccacgccacggcccccgctctccccgagtgcggatgcctggggtcccctctgctgggacgctgccctcctgagccccgtgtgttcagggtgtccctggagcctccctgttgtggctgtgccttcagggtggccccatcctaaggggttgctgggcacctgccccatgctgacgcctctgcccaccgctctcccgacccgccctgtgctgacgcctgccctccgctctcccagatgcctacagatcccctcacagcccgttctaccagctacctccgagcgtgcagcggcactcccccaacccgctgctggtggcgcccaccccgcccgcgctgcagaagcttctaggtgagcccgtgtgaggcgtccggcgaagggttctgggcttggggtcatcccaggaggaccgtg

SEQ ID NO: 22154 - DNA, 1050 bp, Homo sapiens
actcccaaagtgctgggattacaggcatgagccaccacgcccggttgtaggtgttttctttagggttgtcctgctgcattttgtgcattgcaatcccagtcagctcagggactgttcaagtatttgacttatgatctaagtagctgggcaggctgattaagaacagacaaagccagctcttttgcaggctggtaaaccttcatcttaggctaaacttctttggttcgggtgagggcaactaagccgggggaagcgggggcaggggaggctgacaagcaggcatcagcgatccaagcaggggcctagtacatgctgtctcttctgtagtttgctgacctaagccaattcaaggcagtttgtcctggaaatggaccactgtatacatgatttccttcacctgaggtcccggctgtggggccccgccctgggagtctccgaggacctgctttagtggggagctagggccgggctatggggtggaagttctggcggcccagagataactccaaaagccattggagccacaaggtcggctgtccctgagccctggtttgcattttggactttggctttgcttttaaaaaaaagcttacagcgtgctttgagcatatatgcacatgcattgctcactgtgtagctgacagcatgcctgggccggggccctgttctctgctggtgtctgaaggttgtcctgtgtcagtggctcctggggtcttcccttggaggtgggcctccggacactgagtgtttgctgttacgctgcagaaggcttccttgcagatccatgtgaaaagtccatcccctggtattgccttgggataaactccttggcattggccggcctctgcgtggctgggggcgctgccctggctgagtccaggtggggtggcaggtgcagtccctccagctggcgagagttctttgcagtgaacctgatgcagagctggtcccctcccgccgtggcctgagtatttcttgacatctcagcccggtgtgggtcccctcaggcatgtctgtccttgagcgtgtcttcaggaagcatgagaggca

SEQ ID NO: 22155 - DNA, 1033 bp, Homo sapiens
agccgggtgtggtggtgtgtgcctatagtcccagctcccagggaggctgaggcaggagttctggctcccaggatggcatccccaagggccatattgaggcaaaaagggccgtgtttgagcccgggaggtggaggctgcagcaagctgagattgcaccactgcactccagcctgggtgacagagccaggccccatctgaaaaataaaatagcttgtactttctgacaccgagaaacgcattcgtggaggccgagtagaggaagtgtggaggagggtgtgcagcgggaaggtgctctcctccctgctcccaggcagaggcaggtgctggtgggcggtgcccacagctgccgtgcagcctagaaagcagcaggtcacgggctttgttcccagagccccatcccgtcgacactgtgcccgcctgctcaccttacgtgtccccagcgtggtttcactgttgatggacctggtgccctgtcgctggacctctgctgccttttcaaatgactgcaccaaaccgttgctgcaaggctgtccccggaggcgggctctcacgggcggctgacggacgtcgggaagcaccactcacgtgctcccgagctgctccctcacgtgtgtggcccaggcgagcctcaccagcgtacattagagaaacggaggtcgccgacctctttaccacagccgggccctgtgggtctgcctggagtagagccctcgggaagagcatatttgggttctgaccatttttgtcatcatcttttctgtgtaataaaaaaacaatgtgtttgttaaaagaaaggaaagcaggtaaacagaacagataaactaaaaggaaaaagcccctctcagactcagcgcccggggaagctgccacgctcgagtggcgtgtccctccacaggttttacacttagtgaaactggatgttttacacttagagtctattttgagagacgagagctctttgtatcttcctgttgctctttttgaagaaggtgcttccatgtcagcaaaaaccatcctcggccctccacatgac

SEQ ID NO: 22156 - DNA, 1030 bp, Homo sapiens
cggctgcacctggagctggactgcaccaagttctcgctgcctcacttgagcagcatgagcccggagctctccatgaacggccaggctgctggctatgagctctgcggtgtgctgagccggccttcgtcgaagcagaacacgccccagtacctggcctcacccctggaccaggaggtggtgccctgtacccctagccacgtcggccggccgcgcctggagaagctgtctggcctagccgcacccgactacactaggctgtccccggccaagattgtgctgaggcggcacctgagccaggaccacacggtgcccggcaggccggctgccagtgagctgcattcgaggtgagtgccctggtggggctgggggtctgcagctggtacctgccgactctgcctggtgtgctcaggctgtcgggttctcagcaggagtgtgtttgttgaggagactgaggtggggaggtgctgggccaggccgctgcctctgagtgccagcccacggccctcgagagtgactgcagcttctcattccagagctgagcacaccaaggagaacggccttccctaccagagccccagcgtgcctggcagcatgaagctgagccctcaggacccgcggcccctgtcccctggggccttgcagcttgctggagagaagagcagtgagaaggtgcgggccgcgacccctgccccgggctcagggaggtgctcagcagaggcggcctgagcgagttgctagcaggagggcttgtcctagttgaccttggggcacggtgaggtactggggctgacctggagtaggatgttgtggcagagttgggggcaaccagtaaggacaggtcacaggtgacgttgggcaggtgccatggaggacatggggtttgtcagggtgtccctgatgcctcttagttctcagtgacggacggcaagtgctggtagagacacagagcccagtttgggaggccgctgcccatgaggacttccccgggggcactggcctgtgtgcacagggatggagagggaaggacggt

SEQ ID NO: 22157 - DNA, 1373 bp, Homo sapiens
ggctggagcttggccggcgtgtccaggtgtcaggctccctggtctgtcacggggcacgcccgtcgtctgttgtggttagaggagctggcactatgcctgtcatggtgctggccccaggtggcgtgtgtgctcgtgggaggcctcggtccccagcctgggtgagtgttgggctcccccaggcgcgatggtaacctcaggccgctcttcccgctgtgcccttctgcaggtaactaggatttctacctcaaccgcgagacctatgcaaggacggtgtggaccaactcgcgcccgcggcatggtgcccgccggcctgccgggctcccacccctggacggcagaggcaaggacggacgggagctccactgtgaatcggcggcacgcgccgcaggaggctgggactggtccagtttgtactgtcgatagttttagataaagtatttatcattttttaaaaagtataaacaattctgacttattttattccatctaagtggtaaaaggcaacttattgagaaatataaatatctatatatgagagctctatataaagacacgtgtctgcagggcgggcccgccagcggattcgccacagcctgccccggtgctatctcgtccccaggcccgcgcctgcctccacccgcttggtgctgactagacgctgacaacgccgaaccccgttctcggaaacgccgcccggccggctcccccgacgcgctgctcccgtaccaaaggcaggcccgtcgccaccacattcctcggaggcctccccgcggcctgagccccttcctgagcgccctggcgcctgccctgagctcttcacctttaccccggcactgtgaacccccagactgttcaccctccggggcgtgggttgcgcccttgcatgtgaaggggcctgcgcggtgacgcagctggccatgtgctgcgcgatggtgctgtgaggacggcgcgggcacgttgaacaagtgcatttacttttgtatttctcggctgtccatggctcgcagcatgccctgcgatgcggggcaggcctgtcgtgggtcccttggtgtttctgtacaggagagagtcacactaatgagtggcagtattttatagagatgtgatgagaatttataaatttcatagatttgacagcttttatttttagatggtataatgcacagtgaagaggaaagaaaagcgaggggaaaaaaccttatttattcaaacagtgcacaaaatggccccagcgtcagccccgaccctagacccctcagttgcagctcccagcagcccagacagagctgccggcgcccctgcctgccccacatcccttcctgtcagggccacgcctggcacccatcccttggagcctgtgctggttctcccag

SEQ ID NO: 22158 - DNA, 1050 bp, Homo sapiens
tatggggtggccccctcagggctggttagaccctggcgctgggagtgcagggtgaggggcagtctcgagggctccagcccagcccgcccagggaggtcccagcagcagccccgagttctgagccatcttcctcactctcctcttggcctccacaggtgtctcccagtctgctaaagccctaaggccatcaccatggacttccagcatcgccccgggggcaagaccgggagcgggggcgtggcctcctcctccgagagcaaccgtgaccgcagggagcgcctccggcagctggccctggagaccatcgacatcaacaaggtgggccagccaccgtgcagctgcctgtggtgggtgctgggctttccagggcagccctggagagggtgccagaggctcttcttgggcctccgcccaggctgggcgatgcagccccgtgtccagacgctcccctgttgcccccgagcagccacagctcccatctgtccaccccagagagcagaccctctgtggctctgagtcccatgtggacatgttttgttctgtccacagccttctgttttgcattatttaattttctgggagtggggagagctgatgtcagtccagccagatgtggtgaagggcagcctttgattttagcttgtgcagaggcaggggtgagccgagtcccctcagcaccgtggacatcggggctggagcactctttgtgtaccctgacatgccccacgggcctggcctatggcaagggctctgttaccgtccccgtcttccagatgaggtcatgggtagagggggtgccacagccgcagatggtggagttagactttgaactccagcgtctgagacgagatgtgtgcgcccggctgccccagcttagggcctgcagatgggcgggtctttgggtcttcagtgtagcccatttgcttttcttgtgcctgtgtctgccttgtgcctactgctggcgtggtggcgtgggcagtggacggctccctgcctcgggagtgaccggcggtgctgtcctggctgtgcctccctctgactcagaaccac

SEQ ID NO: 22159 - DNA, 1003 bp, Homo sapiens
gatagcccaccaggggtggggagggtgagcagggacagggcgcccccactgacttgggaccctcctcctccaggcccacacctcagcacccaggacatctgggccccccgcccccagcgctgtctagtttggttgcctggccgtcactcccagcctggttcccactcctgtgtcttctggggatggccctcaaggacggcatgttgacacatcaggcccagctctatcactggggagggagataggctgccagggacagaaagggctctttgagaaggccactctgcctggagtgggggcgccgggcactgtcccccaaggtcgcggcagaggagataggggtctgtcctgcacaaacaccccaccttccactcggctcacttaaggcaggcagcccagcccctggcagcacccacgatgcgggacctgcctctcaccagcctggccctagtgctgtctgccctgggggctctgctggggactgaggccctcagagcagaggagccagctgtgggcaccagtggcctcatcttccgagaagacttggactggcctccaggcagcccacaagagcctctgtgcctggtggcactgggcggggacagcaatggcagcagctcccccctgcgggtggtgggggctctaagcgcctatgagcaggccttcctgggggccgtgcagagggcccgctggggcccccgagacctggccaccttcggggtctgcaacaccggtgacaggcaggctgccttgccctctctacggcggctgggggcctggctgcgggaccctggggggcagcgcctggtggtcctacacctggaggaaggtatgtggggcccagccccaagcttggcaccgccgtcttccttcaggtgggccgggtcctcctagggaagatcaggggctggcagagcccccaccctgggcagggaggctgtggtcttgttcctaggactgggttgcgggtccgtggcctggaaggtgggcaccacactctgtc

SEQ ID NO: 22160 - DNA, 1043 bp, Homo sapiens
ccccccgccctgggaaggttgggctgtcctgggcggcgccgcccgaggagtcggggctcagtgactgctgcccttgtaggtgcttggggcaggcgttggagctgccttcgggaagcctcgggggtgtgggaccgggtgggcccctgcctgggcggggcggggtcttttggccgaggcaggggtggggatgtgctgaaggccgcccggacgccctggaggggtctccgcccggagcctggcgctgcctcgtgacctgcatcatcttcagttccagggtctccctccactgctgtagtaacccgggtccggggcctcggtggtgctcctgatgcccctcacccacccctgaagatcccaggtgggcgagggaatagtcagagggatcacaatctttcagctaacttattctactccgtgagtatggggccgggcctgctggggctgctctggggccacaggtactttcttgtgcaccttgctgcccgtacctgtgattgaatgtaatcgtgggaaccctgagtttcatcagagccggcgcacagtctcctgcagcccaggcgttgcctgagctcaacacggcctaggcccaagctttagcgctgccgggttcttggagtcctgtggggtgagtcagggttctgaattgggctgcaccccctggacaggatgatcggctgaatgtaacagaggaactaacgtccaacgacaagacgaggattctcaacgtccagtccaggctcacagacgccaaacgcattaactggcgaacagtgctgagtggcggcagcctctacatcgagatcccgggcggcgcgctgcccgaggggagcaaggacaggtgaggggcaaggacaggcagggagtgctcacccaggggagcagggaccaggtgaggggcaaggacaggcggggagtgctcacccaggggagcagggaccaggtgcgggttgctgcccaaggggtgcagggacagatgagggagggcactgccttcaggcagcacatatgggggccaccatcgctttgttggtggggacagggtc

SEQ ID NO: 22161 - DNA, 1074 bp, Homo sapiens
ggctacgcgcaggaacgaccccgctcggcccgtcttgggggtccagcctcggggatccgccgtccccgcgttgtcggccggcggtgccggggctcggccgtgaccttgcgggtctgtccccggctcctctcctttccccgcctcggaggccctccgccgctgcagcgccactcacttcccaccgggtctgaaatttgtgccccctccatcctccggttctgcttctccgtttcggggtctccagttgccgccggggacgcctctctccggctctgtggccttgagcaggcggctgcccacccctctccgagcctcagtttccccttaggcggaacgggcacggtgctaagctaacctcaccctagggggtgcggtgggggaacccagaggcgtcccgcgcgtcccccagtaactggcagcatcctggagcggccaggagtccagccctgcactggggtcggatccccgctccatcttttactccgtgaccttggacgatggaattcgtgtgcagaaggaggaccgactatggtgtggattctggaggttctgtccagggtgaccagcgcccagggccaacaggccttcattatgttcattgtgtgtcatttgatgtaaagagtgtcaggttctagtggggacagtctacgagatcgcactgtcataactgcatcttttattttcttaattccaaatcttccctctctcctgagttcggtggctcaggcaatggaacctggagcagccccacaaatgcagcccttaaccttcactaccccctcagagttctcactcttaaggcgtcgccgccacctggctcctcagtctccactcctccagccccaccgctatccctctgctgtggctgcctttgtccaccacatccccagtccatcctcgacacagcaggggtgaccctttcaaagtatgtcagaccgtgtcgcatccagatgagtgcgccgtccagttgtgacctggctgctggggaagcctgcagctcattgcagtcgcttcactctctagtcttttctcttaccctgagatgcccctggtctctgcaaggctgtcgggccc

SEQ ID NO: 22162 - DNA, 1061 bp, Homo sapiens
cagggggcttcgggctggctgccgggggggtttgtgcctcagttggtgggatcagggtggtgggtgaggcgtggcccctgcaggccagggtctccagccccagccccacagcccacagctgcacgtcgacccatggctggcgggtggctctgacgcctgcctccggtgtgttccttgaggcagcgtttcggccgcacggtgagggcggcgctgtatgcgcctaaggagccggtgctggactacaacatggtcatcatcttcatcatggctgtgggcaccgtcgccatcggcggctactgggccgggagtcgggacgtgaagaagtgagtttcgcatcgtgcgtgtgctgtgacggggtcgggcggctctgacacgggccgggacggccagtcttccagaacagcagtgagtgctttggcctcggcaggcacggctcgccccgtggagcccttcgtttcttcctcaggaggtcctgggacagaatcagtctcttttcctgccagggtgggctccgggcacctggtgggtgtgtagggctgggcaggtgtggatgtggcaggtacgggcgtggcaggtgcagggctgggcaggtggctggggccagctaccctcttcctgctgagccgcctgggtctggggaggccccatgtccagggctctttatgcagatccaagctgcggttgctgcccacacgccagcctctggcccggcctagtggccaccccagctcaacccagggacgcgggccctgccaccctctgctgtgtggtctcctctgccctggggacgttcggggcggttccttgcacttcagtcccccccgggtcccctcctgctcccgggttttctgccccgttcccccgggtggctgtgggctcccgagccccgtgtcggccagccggccccagggccccacgaccccatggtgtctcccaagaaggtacatgaagcacaagcgcgacgatgggcccgagaagcaggaggacgaggcggtggacgtgacgccggtgatgacctgcgtgtttgtggtgatgtgctgctccatgctggtgctgctcta

SEQ ID NO: 22163 - DNA, 1059 bp, Homo sapiens
gctgtcgctgataccatctggcacttcctcccagccttcctgaggcagccaagtacgcttggctttggtgtgtattggagccacggcacgtttaactggcagaaggaagatgtgaaaatattttgaatcctttgtacacaaagagaaaatgaatcttttcagttatttccaagccaggaaactcgctccgtcacatgaagttagagcaggcctcagtcagctgggcgcaggggctcacgcctgggatcccagcatttggtaggccaaggcaggacgatcactttgcccaggagttcaagaccagcctgggcaacaagcgagacgccctatttaagaaataatataaaatcagaaaaaataactggccgcagttctctgggtgcttgaagtacgtggcgcctggaattggctgtaccagcgtctcccatggaggcctctgctgttagcagccgccccgccctggagatgtttttatcccattttcaaatgaagcctttgatgtttgagacgctgaggaacgctggggaactcgtccagcaagtgacaggcagagcctgcattgggggcaggggccagcggggaggggactctggggcttcgtggggccaggagagagccgaagttgcggctggctgcaggggccgtggccttgtgcaggaggcagttctgtgctttgccccagggcaccaaccgcatggcagccccacccactgtggacccagaggttctttgaggaaacctggtgtggcacaagttttaatttaataaacagtttgggcacgggggctcatgcctgtaatcccagcactttgggaggtgaggcgggcagatcacttgaggtcaggagtttgagaccagcctggccaacatgacaaaaccccatctctactaaaaatacaaaaaaatttgcctggcattgtggtgtgtgcctgtaatcccagctacttgggaggctgaggcaggagaattgcttgaacctgggaggtggaggttgcagcgagtcaagatcgtgccaccaaactccagcctgggtgacagagtgagactccatctcaaaaa

SEQ ID NO: 22164 - DNA, 1031 bp, Homo sapiens
ggtgcctgggttcttaaccctctggacccagcagctaggagcttctggaacccacgaggacatctgccactggcatggtctactcactgatggggtcctcctgactccagggcagagacgtccgtgcgggaactgaccgaggcgtggccccaggccccggcatcctcccctcgctgcacgtggtcacttccgaagcagcgctccctgtggccgcagagacagagcccgcaccctggctgtctgtggtgcctgggccccagctcccgcccgccacccgccctgttgagtgcggcctccagactcgagtccagaatctgtttctgtcaagtcagtcgtccccagctgcacacggggactgctgagcgctgcgctctcacgggtctgttccggacagagggtggcaggggtgagccctgatcccttacaaaaaataccagcttcccagggagtaatggcgccttcactgaagccattttgtacatggggacggggtggggacgtctcttttttggtgttggacgtttgaccagtggggaggggttcagaggcggcggtcctgtccttggctccgtctgtccgtgtggccttgctgccattccgtctgatcattaaacacagcttttgatacatatggcccggcctctgcctccgcagtgcacggcttggggcatctgctctgtgcaggtcccggtgagcagaactgagagctggcaggccgcctggctgtcctgcagaggacggattggaattgccaccgcagggccggccagtgctgtgaggtgcccagcgtcactcccatgggctctgtgggccatgtggtccctgtcacgcttctcagctctgccactgttgctggaaagcatcacagaccatgtgtaaaatgggccaaaataccttttacaaaattaaaatagagatggggtcttgcagtgttgctgaggctgatctcgaactgctgagctcagacaatcctcctgtctcggcctcccaaagcgctgcaattacaggcacgagccaccacgcccatccct

SEQ ID NO: 22165 - DNA, 1038 bp, Homo sapiens
cccggtctctccctcccctcacgccccgcctttctctccagaacatcaaacgcatcaagaagaagctgagccttctgtgcatcgacttcaacaagaacctgaacgaggacacgaccttcctgcccttcacgctccaggagctaggtaggggccgagcagtggggcacgggtggccatcggtcctgggactcagtgcaggcctgccaggccctcgggggccgccgcttcctcctgtgggcttctgtgctgaagggcggcgggaggccgaagtacgtggacctgaccgccctgggctgaggactttcctcaccggaagcgctccagggccgtttacagccaaaagctctgagccctccttggggagggccatggtctgtcccaccaagattccaccctgatagaaaatgtccctggcagtggcggaagcccaggccggacggggtggccaagggtgccagtctcagccatggccctgagggaaccacaattttcccttgagaccccacttcctgcctgcctttatttatttaatttaattaattaattaatttattttgagatggagtcttgctctgttgcccaggctggagtgcagtggtgcgacctccactcactgcaacctccgtcccccgggttcaagtgattctcctgtctcagcctcctgagtagctgggactacagacgtatgccatcacacctggcaaatttttttatttttagtagagacggtttcgccgtgttggccagggtggtctcagactcctgggctcaggatctgcctgcctcaacctcccaaagttctgggattacaggcatgagccaccgtgcccaggcaggccggaatattctgatgggtgctatagaatataacctccagttctagactctgaatgtagttgcctctgaggtggtgggtggggacaaggccctcatggccggaggcctccgcaggtggcttgatgtgtggtcacctgggcgtatgtttcctgagggaacactcgcaggtcgggcactgccaagcttggctgccagccactt

SEQ ID NO: 22166 - DNA, 1049 bp, Homo sapiens
ctcccaatactgctacctctcaataccaccacctccaacaccaccatctccaacactgccacctccaacaccaccatctccaacaccgccacctccaacaccgccgtctcccgatacctccacctccggacacccccacctcctgacccacccacctcccaacaccaacacctcccgacacacccacctcccgacacccccacctcccaataccaacacctcccgacacccccacttcccgacacccccacctcccgacaccaacacctcccaacaccaacacttccccacacccccacctcccaacactaacacctcctgacacccccacctcccgacacccccacctcccaacaccaacacctcccgacacccccacctcccgacaccaacacctcccgacaccaacacctcccgacaccaacacctcacgacacccacacctcccgacaccaacacctcccgacaccaacaccttccgacacccccacctcccgacaccgccacctcccgatacccgcatctcccgacaccaccatctctggcattaagttcctggtgcattttggaggggacgcacccaaccagagcagagacctgtgagtgtccatcactcgcacattgtcatacactagttgccatgtccatggatgacttctgccgccctcaccctctgggcatcagtcatcctgccgtgactccgaaccttccctccttgcctgtcttcttactgatttgtttctgtccgtgtgcatgaggcttctgtcttattcccgggttatcattcattatcatttatcccagtgctcaaatcgtcccacatggaccctcaggagtccctccgaacaatccctgtgtccttgtaatgcacctgctgtcctctgaacctgctcttactgtggggcacatggtaccgcaggctcggcctctgagcccgcgcttactgtggggcgcgcggtaccgcaggctcggcctctgagcccactcttactgttggacatgtgatgtcgcaggctcgtcccatgctctccctgccccagccctcagat

SEQ ID NO: 22167 - DNA, 1033 bp, Homo sapiens
gtgggagggccgggcccagcgcatcacctgtgcactcgccctgtttgcactgtggcagctgacacgggccaggccggcgggaacgggctaggcaggacctgggcactctgaggctctgccccatccctgcaggcggagttcgccatgttcagcgggacccacgtggagcgggactttgtggaggcgccgtcgcagatgctggagaactgggtgtgggagcaggagccgctgctgcggatgtcgcggcactaccgcacaggcagcgccgtgccccgggagctcctggagaagctcattgagtcccggcaggccaacacaggtgcacccgccccgtccggggaagggtgctaacctcggggggcggcacacagctggggcctggcatgtgccccgggtgggggtcggagctctgggcagagtgggccggggcaggtgcagaggccagctctctccttccctcccgcccaggcctcttcaacctgcgccagatcgtcctcgccaaggtggaccaggccctgcacacgcagacggacgcagaccccgccgaggagtatgcgcggctctgccaggagatcctcggggtcccggccacgccaggtagccacccttgagccgggcacaccctggaatttggagcctcagctgcttccctgggaaggtgaagggagttggtccccatgcttcacttagcaagtgcaggagtccctgctggggagccacggagcgcgtcccaggctcctcgggggacagccccagctgagatgcagctgcaggcccagggtcggggacgggtgtgcggccccagcccccaggaggagtgtgttccctggagcctctgctttgaatgaagctggcgttttcctgattgaaatgtatgacacatgctttgtaaaaagcctggagaagtacaggaaggcctaggaatttccgatcctaatgatgagaagtgggccctgtttccatgctcacctgttgtcctgtgtgcatgtgtgttcacacacgcttgcgaggatccagaatttggaaatacagc

SEQ ID NO: 22168 - DNA, 1033 bp, Homo sapiens
tccccaccgtcctggagaaggtttgctggtgaacctccttctccccaaggcacacctgctgcagggagccagtcgggccagctgtaaagtgttgtcactccaaataagggccccttcagtggtttacaaaacagaagctcttgccctgccccgcccctgccctcccgagctcctaggttagctcctgggccgggggcggggcggtggggaaggtcggaaatgcgtgagaggcagcggtgacggaggagggggcgtgctggtggcggtggctcttggggaggaggcaggtcgcatgttgtgtggggaacacgttgcctctcctgccgtgagcctcttagggccctccgtgtcccgggttacagaggtgccttggatgaaacgccttcctgatttttttccccaaacttgtgttttgatttacctaagggttctaaaatgggccatctttccagggggccgcgggtaggcagagccgtggtcctcacgtttggaggaaatgtgcagtgcggcccgcgtggtggcactttgcacagagtggcactggctggcttttgtagtgggtcgtggactttgtttggatggaggggagttaggaattactggtgtcataaagatcttaccagatggccttgccctgtggctctgtgacctccagaacccccgccgccatccctgcatgcacccggtcttctgtgcctgcactttggacttgagattgacacggggttcaaggacgaaggtcaggggctcccgtgtctgccgccttggctgcttggagcaagtctggaagtgatgcggcccttcccgcatcctctgtccagtgcccgcctgtggcccgggggtgtctgctgcaggagcacctgtgtctgcagtcccaccccctcccactctgtgagcctgaaagttgacccctatcagcctgtaagacgggaggttgctgtcaggctcagggccaggcgtggcagataggacagtgaggaagatgtgagctcacgtgcgacccaaggaggactggtgtcagtgccacgcagag

SEQ ID NO: 22169 - DNA, 1050 bp, Homo sapiens
tcatcacaaaaggcgtggagactcggagacggacgtttttccccttttttaagttattgacgcccagcgcgcctcgcctcttcacccatcaacgctgtgctttgcccactggactcctgaagagggggtggggggctccctcggtcgcccaccctgggaagtgcctaaccttttattttattttatttttttgaggaaaaagaacgcctgactcacaggttgaagaaacaccctgggccctctctcatggccgggttccccgtccctctgcagaggctgggaagggtccccgggctggagccacgggggcttctctgggctgtgcctccggggccaacactggctgcttggggctgcccggggactccagagggctgcacggccaccctgccctggctagagcgcaccccaccggagcccacgtgggctgggcggctggagggatggtcccccggtgacactgggagaaaggccacttggatgggggcgtttctgttttgttccgctttgtgatgtcaccaatttggaaacagcgagggtgggtggggacttttacagaatattctcaggtgtgtacccgagaggcagagagagggacgtggccggcagctctgtgcgtggccttgtcccaagcacttgcgcccgcccccgagcgccgcccccggggagcgggaagccagcactcgcactttggccaggggcgcgtggaaggtggtggcaggcaccggcctgggcagcttccaggcctggctggccacgaccacggcccgagggggagcccgccaggccacgccgcactgagccacagccccgggggccgcctcccggggccccttgaggcactgaggcaccgagactggttctccccgagagactcggaaggtggggaacgaggggactgtgtttggggaggtggctttttcgtctgctgttgactgaacactacagcgccctgtggttccgggcttcgcacagctgtcccagggatggatcgcctgtgctgccttcgcccgccgccacaccgggaccctgcacggctgcttctggcct

SEQ ID NO: 22170 - DNA, 1041 bp, Homo sapiens
tggagtgcagtggtgcaatctcggctcactgtagcctcgacctcccaggctcaagcaatcctcctgcctcaccctcccaagtagctgggactataggcgcacaccaccacacccagctaatattttatatatatatatatttttttgtagagacagggtcttgctatgttgcccaggttggcctcaaactcctgggctcaagccatcctcccaccttggcctcccaaagtgttagaagtacagcaggcaagagccactgcaccacaccagttacccagtcttttttttttttctttctttttttggagatggagtttcgccctgttccccgggctggagtccagtgacgcaatctcggctcactgcaatctccacctcccaggttcaagcgattctcctgcctttgcctccccagtagctgggcttacaggtgactgccaccacgcctggctaatttttgtatttttagtagagacggggtttcaccatgttggccaggctggtcttgaactcctgaactcaaacgatccactggcctcagcctccccaagtgcggggattacaggcgtgagccaccgcgcccggcagttacccagtcttgatcttgattctttgaccttgaccttagcatctttctcctcccccacccccactgatgagcaacaaacctgctggggttggctgtgagggggcactggggacggtgggggcagagaggtgggccgggtgactgcctgttgggagcaggggccaccgtggggacggaggttctcatcgtcacacagggccagacctctctgccaccacacatcttcctcgcccggggccccgcccccacctcctccgtgctgagctgatacaattttgaagcgagcttttctgctgcagtcagcacaacctctgggcgcctccccacccccaccctgcccctcccgcctctgctcagcaggcaggcctgtgccccaggtcaggttggcctctctgagtgaaggctgcaccctcccttgcccccagcctgcccccttcatccccaagggaatc

SEQ ID NO: 22171 - DNA, 1028 bp, Homo sapiens
cttagcttcacagagagctacgcaaggattgagtcggttcgtggaattagagggtattagggagaagggcctgaaacactgccaagtgtcacctccactggcgcacttattgagcgccagctgcataccaggccttgctgaggaagcctcactgcagaggttgcagtgagctgagaggcaaaggccacccagcctggatctcactctggtgtcatcgcctcctccctctgctcagggttgtgcagcttcaggctgctcccctgccctctctgggcctcagtttcaccttcagagcaacgggaacagccccatcctttcacacactggaaaccatcaccttcttctgcctgggagggggttgtgctgtctctgggaatcccaggcatcccccaggcaggagtcaacccagaggccctcggacccgggctgtaccctgtgacagctccgggtggctacgacgctcccgtgctccaggccagccccacagacagcccgggacaggttgctgccggatggacaagcctgtgcctcgctgccttatgtaaccagtttatgcaagggcagccggcccgcttacataaggggaggccgggccagcgcccagctggggagggggaggctcttaaagggaccggcgtcccccgcggctccctccacgggcactggtgcgaattcataggcgagctgcggactccgccctcagcaaggccgccattaatgtcgttatgattatttttgtggatgttgtttatcatcactatattctttccccagggcgggggttcagctgagcggaggaccacgcccagtgcttgggcagaggcttgggctgtgacgctggctctgggtgtcacctggttaagtccctgtctctgagcctcagcctccccttctgcacagtggggcaatgcaggaagacgtgaggtcctggagggtcctggccctgctgcctgttcactgtgtggcctcaggcaggtggcatcccctctctgggcctcagtttccccatctataaaatagcgcctgct

SEQ ID NO: 22172 - DNA, 1049 bp, Homo sapiens
tgggactacaggggcagaggctgaggctaagggacgtgacgtctccaggactcacctctctggtcctcagtttccccatctgtaaaacggacatagtgatagacctcctgcatagggctaaggcggggctgaatgactgaacctcattttattttatttattttgttttatttattttattttatttattttgagacggagccttgctcttgtcgcccagactggagtgcagaggcatgatctccacttgctgcaacctctgcctcccgggttcaagcgattctcctgactcagcctcctgagtagctgggattccaggagcgtgccaccatgcccggctaatttttatatttttagtagagacggggttttgccatgttagccaggctggtcttcaactcctgacctcaagtgattttcctgccttggcctcccaaagtgctgggattacaggtgtgagccaccgtgcctggccgttttgttttatttttttgttgttgcttaatttcattttctgagatggggacttgctatgttgctcaggctggcctccaactccagtcgcccagactggactgcagtggtgcaatcctggctcactgcaacctccgcctccgaggctaaagcgattctcctgtctcagtctcccaagtagctgggattacaggtacgcatcaccacacctggctagtttttgtacttttagtagagatggggtttcaccatgttggccagtctggtctcaaactcctgaccctgacctcaggtgatctgcctcccttggcctcccaaagtgctaggattacaggcgtgagccaccgtgcccggcctgaacttcattttacagatgaggctcagagaaggcaagcgacttgctcagggtcgcacagcaagaaagcggcacagctgggatttgaacatcagtctgttaagattccaggtgtctaagttcttacccacgactgagccgcccctgcagaagcggagggcttacccaacatacgggtacactggcgctcacagggcctagctggtgtctgcagggtgcc

SEQ ID NO: 22173 - DNA, 1067 bp, Homo sapiens
agcccagccccaactgacctccatgcctagggaaaaactccccccaccactgccccctcccccgacccaggccaaagccagggcaggtctccgggtctcacctgctcctagcctcacccccctgcccccgaaaaccagactctcctcccaaactagcctcaggagcttggcgaacccgctcgctcctaaagagaaagacccaggaccctcccccatcacccccaagagaggttcgccatcctctggcctcgagcccttggtccctccgtccgtctgtcctcggggcccgctcccccggtggcccttggggatcaaagcgtgggccgctctccgggagggcgggcgggggagggggtggtcgggttgtgccattggggtgtccggaagcttctcagccagggtgggggtcgtggagtgggggagggaggccagccgggctccagaggggtcagggcgcgacgagaaccaactctttacctaactttgcatggtgcttagtcaaggactcctgcgacctggctcccgaggtcagctggcggcgctgacacacatgcatggcagactatccctggctctatctccctgttcctcgccccctccaccccccacttcctctttaaaaaaaaaaaaaaaaaaaaaaagatacaagaaaaacctttaaaaaaattccatgtttcctaatttgcacgaaattttctaccacaagatgtgccttgccttccgagaataagtattacctttaaacaatatcagcgcacacacatagctgcatgttctgctcgtgtagtttaaaaaaaaaaagacaaaacagtgacatgaaataaaaaataaaaattgaaaagggatgtatttctatttgtaaaaaaaataaaataaaaaataagaaagtgagaatctaaaaaaaaaaaaaaaaaaaaaaaaggaagaaaaaccacgctaaaaatcaagccactgaaaacaattgcccccaggtctacccagcccctggctgtccttggtcctgtctcccctcctgctgtattcaggggtgccccctggtgctcagcctctaccacccccaaccctgc

SEQ ID NO: 22174 - DNA, 1028 bp, Homo sapiens
ttcctctgcctcagtgtcctcattcatggatgggatgaggggcacacaagcagcctgcctggccgcgcctcattcagtcactcagccgccactgaccacgaatgacacaccgcccccacaacggtgaacacccccactctctcttggcttcctactccgtctggttcttccttcaggcttcttcactggcccttctttctttatttaatttttgctcgtagtagctttatttggatacacttctcctgccgcacgattcactgctttagagcgtgcagttccctggtttttatatgttcacaggctcgggccgccatcacctctgcccaattctggagcattctcattccctcaggaagaaaccagccttgaccccatcagccgccaccacctgtctcccctgcctctgtggctgggcctgtcccggacatttcatagaaatggaatcccacattgtgtggccttttgtgtctggcatctctcactgagtgtgatgtcctcaaggtgcgtctaggctgtggcctgagtcagagccctgctctttgtcgtggctgagtcatgttccgtgatgtggaggcaccgggttttgtgcgtctccttattcagtggacgttggtgctgtttccagtgtctgcctgttgtgagttgagctgctgcgaagaggcaggcgctggtggttgtgtggcgaccgtccttgttgctctgtgactgaggcgctggtgcctccactcgccggctgatcgtgtctgatggtgtcaaccccatgcaaccaccgtgagcccagctctagagacctgccttccaacctttccaccttgtcctcctgcccccagcatgtcccttccaccccagccttcccaaattgctgcacggttctgatttttttcttttttctttttcctttttgagatggagtctcactttgttacctaggctggagtgcagtggcgcaatcacaactcactgcagcctcgaccttccagcctcaggtaatctgcccacctcagtctcccgagtagctgggactc

SEQ ID NO: 22175 - DNA, 1045 bp, Homo sapiens
gtgcattgtcacaactggggggcgctcctggcatggagtgagtggaggccagtgatgctgctcagcgccccgcagagcccaggactccccgccatagacagcgttccggcccaaatgtccgcagcgctgaggttggggccctcgccatgaactccccggactgggtttctattgctaccgcctcacctcgcctgggacccgtgggtgggagctgcatgacacagacagagatgcagagatgtgcgggcctcgggaacctgatggcgctccatccgatcctgagagaccacaggcgtggtgccacgctgccttcctcctcacgtggggcactgcagccttttgtgctgccgcagacccaggtgtcttttaggtctgaaggtgtcatcaagtcagacagggctgtgggtactcggtggtaccaggaggctggagatgagcaacctcgggtcttttatctgcaggcaccatttggaagtgtggagagcagttctcacgggagtgggctggaggtgggagctgccccccacacagggaagagggtgagagctgctggccgagtagaccctggggatgcttctcatccactctagactgctattcactctagactgcctgccggctgggtacagaggctcacgcctggaatcgcagcactttgggaggcctcagcaggaggattgcttgagcccaggagtttgaaaccagcccgggcaacatagggagaccctgacccccatctctatattttaaaaacaagaagagaaaaataggctgcacacccagtgggggcagcagcttggctctgctttgcggcgcctgggtcagcacctagaacccacatggcacatggctggttggtggggaggcgtcggctggcaggtggcggcgtgagtaaatgaatgaatgacgtgcacggggtgtattcccggggcccaggcaccggcctccaacagtaactcgcctcgccatggctcacacgggcaccctggaaggcacgctgtcccctgccaagggtctgggccccacccttttttacttggctact

SEQ ID NO: 22176 - DNA, 1027 bp, Homo sapiens
gaggtcaaggctgcagtgagccgaaatcgtgccactgcattccagcctaggtgacaaagcaagactgtctcaaaaaaaaaaagagggtctcgctcggttgcccaggctggagtgcagtggaatgatctcagctcactgcaacctctgcctcctgggttctagcgattctcctgcctcagcctcctgagtagctgggattacaggcacccaccaccacgcccggctaatttttgtatttttagtagagacagtgtttcaccatgttggccaggctggtctcaaactcctgacctcatgatccgcctgcctcggcctcccacagtgctgggattacaggcatgagccaccgcacccagtgcaagaccctatttctattttttaaaaaaatggagatgcagtgaatgggctcccgcaagtgtgtaataacgggggtgagtgcatgtaccacctgctcctgggaggaaacaccagaaagtagtgagtggcaggtgggtacggggccgacagcaggggtgaggggctcatttctcattgaatattattctgtgctgttttgtttgtgttgagacagagtctcgctctctcacccaggctggagtgcagtgacgcaatctcggctcactgcaacctccgcctcccgggttcaagctaattctcctgcctcagcttcccgagtagctgggaccacaggtgtccatcaccacacctgactaatttttgtatttttagtagagacggggtttcaccatgttggtcaggctggtctcgaactcctgacctcaggtgatctacccaccttggcctcccaaagtgctgggattacaggcatgagccactgcgcccagacaattttgtgctgttttaattgtgttttaaaagctacatgtgtcttgcaattcatttcaaaagggtgaggttctcctgatcttgaaattgcctttctagtggaaaagccgagtctatgtggggtccctcaaacaggctctgtaactgaccaggctactcccatgttctgtgggcacctggg

SEQ ID NO: 22177 - DNA, 1077 bp, Homo sapiens
cagcctcctgctctgcttcctgcccactggtccccctcccatggcagcctgtgaatgttttcactgatgggtagagtggtcggcatcacccctgtgcctagccaggggcacctgttccccgcccctccaggacagtgccccctgtgtccctcatacctgactgtgctgcctctactcttgatctgggggacctgggttggggaatcagtgctggtagctcttagctggacagggtgggtccgggagttagagaacttgtatgtgccggggaggggacagcctggggagggggccagcacatgggccagctggagggggaatggtcccatccgatcagctttttttttttttttttttgagatggagtctgactgtcgcccgtgctggagtgcagtggcgcgatcttggcttactacagcctcctggcttcaagcgattctcctgcctcagcctcccaagtaactgagattacaggcacgcaccaccacacccagctaattttatgtacttttagtagagacgaggtttcaccatcttgaccaggctagtcttgaactcctgacttcaggtgatccacctaccttggcctcccaaagtgctggggttacaggcgtgagccactgcgcccagtctcattttttgtatttttaatggagacggggtttcgtcatgttgaccaggcttgtcttgaattcctaacctcaagtgatccacctgcctcggcctcccaaagtgctgggattataggcgtgagccaccaggcccggccccagtcagccttttaaaaactccctgtgtttcatttctatttaaacttgtacaattatgcgcttgtcctagaaaactggagtcaacagcagagcagtccggccggcgccctgctgcccgagtgggccgcctcggtacaccgggccggtgcttgccgccttctccctttgcatgtgtgattgtaggaatgtgtggctgtgtcctggctgctattttataaccaccccccatactgtgagcatctgctcacagcgttaaatattcatcgtcagcagcatctcgtgaggctccctggcagccttgggtgga

SEQ ID NO: 22178 - DNA, 1007 bp, Homo sapiens
taatcccagcactttgggaggctgaagcgggtggatcgcctgaggtcaggagttcaagaccagcgtggccaacatggtgaaaccctatctctactaaaaatacaaaaaaattagccgggcatggtatcgggcacctgtaatcccagctactcaggaggctaaggcgggagaattgcttgaacccggaaggtggagatggcactgagccgagatcgcgctattgcactccagcctgggcaacaaaagcgaaactcatctcaaaaaaacaaaaaataataataatgaatataggccgggcgcggtagctcacgcctgtaatcccagcactttgggaggccgaggcgggccgatcacaaggtcaggagatcgagaccatcctggctaacacggtgaaatactgtatctactaaaaaaatacaaaaaattagccgggcgtggcggtgtgcacctgtagtcccagctgctcaggaggctgaggcaggagaatggcgtgaactcgggaggcggagcttgcagtgagcctagattgcgccactgcactccagcctgggcgacagagcaagactccgtctcaaaaaataaataaataaataaataaataaataaataataataatgaatatatttttccagacatgggatcctgccatttccctaggctggtctccaacccctggcctcaagcagtcctgcctcagcctcccaaatagctgtgtactgtcctcggagcagggaacaaagcagacaataatcttttccctcctagagctggcgttctggattcaccctccaagtatttggggtcctccttggcagttacaagaaattgaaagctggccaggcatggtggctcaagcctgtgatacagcactttgggaggctgaggcaagaggattgcttgaggccaggagctggagaccagcttgggtaacaaagcaagagcccatctataaaaaaaaaaaaaatttaaagttacctgagcatggtggtccccgctaccaagggag

SEQ ID NO: 22179 - DNA, 1050 bp, Homo sapiens
tcctgttgtccttctgcttgtccatctctatatctgtctctctccgaggcttcgtcagtctcttatctctgtcttggactcttatctccttggctctttgattctctgtccctgtcttggtctgtcttggtcactctctgtctctctgtctctctctgtgtctctccgggtttccccatctctgtgactcccacgtctgcccggccccagcgttcatgttccgcctggatgcgtccacatcccaccagaacctgcgggtggatgatctctccgtggagtgggacgctatgggcgggaaggtgcaggatatcaaggctcgcgagaaagatggcaaggggcggacggcgtctcccatcaactccccagccaggtagcctgccccctcccctccctaagtctctggtggaggagatcagtctggacatggacacagagcccagtgtggtcagagttggggtggagaggggacctggggctggtggaacccagagagggaatgaagggagaggaggttttgagtggagttttgatggttaaataggagtttcccagatgacggagggcacaggcatgttctgacataaacatgaggtgctcgatatatagatagagccaaatactgccagagattgacccaacatccacggtggctggggtggactagggtagccttaccgtgggagagagaagtgttgaactgagcctcctgagcctgcccactccctgcccaccacagaggtactccatctcccaagaggatgccctcaggtcgtgggggacgggaccgcttcaccgctgagtcctacacagttctgggtaaggaaggggagaagaaaggggagaggggagttttgggcaggggcctaatggtgggggttgagggagaacctttgcctttggctgcggaaacaggcagccatcagcaaagctgctcccggaataacaggttgttctggcactgcccaaatggaaatatttcgggataagggattgctggggaaagccagaatttatggagtgaaggaaagagactctggaccagacagtgcc

SEQ ID NO: 22180 - DNA, 1064 bp, Homo sapiens
gtcccagctactcaggaggccgaggcaagagaattgtttgaacccggaaggaagaggttgcagtgagccaagggtgcgccactgcactccagcctggtgacagagcaagactctgtctcaaaacaaacaactccccccacaccccccccaaaaaaaaacaggtttttatttggtctattacatgatgaaatagttaataaaagatgcaatggcattgaagtaagtgaacataggttctttgggaaattcactctccaaagtgtttctgtgttcctcctaaccagcccgaagcctggcagactctgggagaacagtttgattgatgagaaaagcctaacagagcctagggtgctgaggccaggagaaaaaaaaaaaaccctgtccacaaatgtgtctatattttctacttgagaaccagatgcagttattatcaaatgagattttcacccattaaaaataaatttggaatatgaactgcatctgaaataaacaaatgtctcttgaaattctggcgatggctctgctaaaaggcttgtcaggattttgttttttaagttaggatgttgaagcggggcatggtgactcacatctgtagtcccagcaccttgggaggtggaggcgggcagatcacctgaggtcaggagtttgagaccagcctggccaacatggcgaaaccctgtctctactaaaaatacaaaaattagctgggtgtagtagtgcatgcctgtaatcccagctacttgagaagctgaggcaggagaatagcttgaacccaggaggtggaggttgcagtgagctgaggtggcgccattgcactccaacatgggtgacgagcaagactgtctccaaaagaaaaaaaaataagtaaaattaggatgttagaaaaggatagaatgaaaagatagcaccccccaccccctctttttttttgagacgaggtcccttttgcccaggctgcagagtagttgcaccaccacagctcactgcagcctctacctcctgggctcaagcgatcctcctgcctcagcctcccgaagtgctgggattatagatgtaagtcagtg

SEQ ID NO: 22181 - DNA, 1047 bp, Homo sapiens
attacaggcgttagccaccgcgcccagccttgtctgttgcctttatttctgagcttgccttgtttttcttgtgcttggtgtccttcactcatttctttatctgcctccgtagtctctcttgttatctaatcccagatacacacatgtatgcacacttactggagtttgtgaccctattatgacattttggttctgttggtggaaaaactgatcacctggaaaggtttctctttttctcgaagcaattgaaataacccgtgtttaaagataaacgtcttctgttttcagataactaagaaattcgtcaaaggctctacagagaagaacaagctcagactgcaaagagtaagacattttccctgaaatagaaaattaacctgctgtgctttttgcattaaatagtaagcaaagccctttgaagttcctttggtctagtttttacattttccccagccttctctgaccatcattttgattcctgcttcattttaagtacttggacttcatggtttgtggattgtgtcattttttggcttgctgagtgagtcctaaggttttgtgtgtggccttttctaagcttttatcaatagtgctaccactgtcttaatggttcagtatcccattgtagcttcaaattaccttccaaaaacccagtccatttccttgtagtcctgtctcttttttttttttttttttttttttgagacagagtctcgctctgccacccaggctggggtgcagtggtgcgatctcggctcactgcaagctccacctcccaggttcacgccattctcctggctcagcctccccagtagttgggactacaggcatccaccaccacgcctggctaattttttgtatttttagtagagacggggtttcaccatgttagccaggatggtctcgatctcctgacctcgtgatccgcccgcctcggcctcccagagtgctgggattacaggtgtgagccgccgcgcctggccagtcctgtgtctttcacttattgctaagtgctataacatctgaatagcctctacactcgatggg

SEQ ID NO: 22182 - DNA, 1049 bp, Homo sapiens
ctcactctgtcactgatgctggagtgcagtggcaccgtgttggctcactgcaacctccgtctcctggtttcaagcaattcttctgcctcagcctccccagtagctgggattacaggcgcccaccatgcctggctagttttttttaaaaatatttttagtagagatggggtttcaccatcttggccaggctggtctcgaactcctgacctcaggtgatccacttgcctcggcctcccaaagtgctgggattacaggcgtgaaccaccgcgcgcagccaatttttgtatttttagtagagacagggtttcaccctgttgaccaggctggtctcaaactcctgacctcaggtgatctacccacctcagcctcccaaagtgctggaattacaggcgtgagccaccatgcctagccttggtccctcaattctgttcatcccgtccaggccgtgctgtcctccatgctgtgaaccgagcttcctcctgggagttggagggagggccacctgtcacttgccacactgtcttgtaggatcaggagcgtctgggcaagcagctcaagttacgtgcagaaagggaagaaaaggagaagctgaaagaggaggccaagcgggccaaggaggaggccaagaagaagaaggaggaagagaaggagcttaaggaaaaggagaggcgggagaagcgggagaaggatgagaaggagaaggcggagaagcagcggctcaaggaggagcggcgcaaggagagacaggaagccctggagtgagtgtccttggaggccatgctgggcccgccaccctgctgctggattccgctcctggccactctgatggggcctttccacttcacaggcagatggcggctcccttcagttccttcccatttctccttcgtgaggtgcccgtggggccctgacgtgggagcggtggaaagcagctccctgctctttagtgctcccccacgtccaactcaccctggaccccttgtctctgctgtgaccatccttccagttcccaaccaacttaggcatttgcattgcaggattgtgggttt

SEQ ID NO: 22183 - DNA, 1070 bp, Homo sapiens
agcgggattctgtctcaaaaaaaaagcatagatggctgggtgcagtggctcacgcttgtaatcacaaaactttaggagaccgaggcaggcggatcacttgagaggccaggagttcaagaccagcctggccgacatggtgaaaccccatctctaaaaatgcaaaaattagctgagcatggtggtgcacgcctgtaatcccagctactcaggaagccgaggcaggagaatcacttgaactcaggaggtggaggttgcagttgagccgagattgtgccactgcactccagcctgggcaacagagcaagtctgcgtctcagaaaaaaaaaaaaaagacaaaaaggcacaaatgttagtgacaccatcttcatcccatgtagtcgttaaacgttttcctgactcctgttttccgtagtctgcgctcctccgtgtctgtgtttagcacttgcagtgctgctggcgagatgacagctgtccccgtgaagcaagctgccggcagctcagcacagtgggactcggtgttatgtgttaaatcctgtcttcagcctagagggtgaagagtggtgattgctctgaaaaattttggatccaagaaaagcctaatgtgtcaacgcgtctcctgtgtggagggagggcccagtgacttgaggtggctctgaagaaattggcatgttcttttgtttaacgtccccagacacctccagatcagaatgtccctcctcagcagcgtctacaggggactcttagactcttctttgcttaactattctttcaaaaaggtagttgaaaatggccgtaggccaggctcagtggctcatgcctgtaatcccagcactttgggaggctgaggcaggaggatcacttgagaccaggagttgaagggtgcagttacctgtgattgcaccactgcaccacagcctgggtgacagagcaagatgtttctcctgtgtcctcacagggtcaacccatgctgcctggggagagggacagcctgggctcccagccactgaagagaggatccaggaggggagcccctacccaggaattgatgaggctacggtaggaacccagtc

SEQ ID NO: 22184 - DNA, 1076 bp, Homo sapiens
tcccagctactcaggaggccgaggcaggagaatcacttgaacctgggagtcagaagttgcagtgagccaagatcgcaccactgcactccagcctggatatatggcaagactctgtctcaagatttatatatattaaataaaaatacagttgtctgtaatcccaggactttgggaggctgaggtgggtagatcataaggtcaggagtttgagaccagcttgaccaacatggtgaaaccccgtctctactaaaaatacaaaaattagctgggcgtgatggcatacacctgtaatcccagctactcaggaggctgaagaacgagaatcgcttgaacccgggtggcggaggttgcagtgagctgagattgtgccactgcactccagcctcagtgacagagtgaaactcccgtctcaaaaataaaaaataaaggccaggcatggtggctcacacctgtaatcccagcactttgggaggctgaggcgggcggatcacgaggtcaggagatcaagaccatccggataacacgatgaaaccccgtctctactaaaaatacaaactgggcgtggtgtcaggcgcctgtagtcccagctactcaggaggctgaggcaggagaatggcgtgaatccgggaggcggagcttgcagtgagtcgagatcgcgccactgcactccagcctgggcaacagagcgagactccgtctcaaaaaaaaataaaaataaataaatacagttgtaatctgatggggccactatcaggtatgcggcctgtcactgactggaaattattctgcagttggcaatgatggctgtttttggagatctgaatccagttcatttgagggaacccccaaggttctctggttgtggcctcttgaataaacctctcacatttggacagtttgttaccaaattgggttctggatgttggtttccttccgtgttgggggtgggaggaaggtgtcacacctgtggagttccccccgctaccgcactggcaccagggtggctgctgcctgcagtgctgatggccgtgtaccctgtctgtccagattggtgctgaagacatggacggcttcca

SEQ ID NO: 22185 - DNA, 1050 bp, Homo sapiens
gctgcttcctgggttgaaggctcccctcctcccagcgtgatttgccccaagtaacttggctgatttctcggtgatttcctgggtcagtgggtaaagccaccccctcactggcctctcactgcagatcgacgacatcgcggatggcgccgtgaagcccccacccaacaagtaccccatctttttctttggcacacacgaaacgtaagtgtccccttctggggcttggttttctcctctggtgcctcccggggtggcctcactcacctgggactggcccccgtttcccttctccagagccttcctgggacccaaggacctgttcccctacgacaaatgtaaagacaagtacgggaagcccaacaagaggaaaggcttcaatgaagggctgtgggagatccagaacaacccccacgccagctacagcgcccctccggtgagtacccggggtggagagccagtgtgaagcgcgctactgatgcaagaaggggcctccagttagggtctctcccctgggcactgtggacacatggggctcgatcgttccctgtggtggggcattctgggccctgcaggtgctgagcagtgtccctggcctccacctactcagtgccaaggccacccccaccccattcatggtgatgacagatgtccccagtcattgcccagtgtcccctgggtggaggggaacgggatagaatcagccctggcgagaacccctgctgtagaatcagtccaagtttcttttttttttttttttgagacagagtctcgctctgttgtccaggatggagtgcagtggcgcgatctcggctcactgcaagctccgcctcctgtattcccgccattctcctgcctcagcctcctgagtagctgggactacaggtgcccgccaccacacccggctaatttttttgtatttttaatagagacagggtttcactgtgttagccaggatggtctcaatctcctgacttcgtgatccacccgcctcagcctcccaaagtgctgggattacaggcatgagccactgtgcccagccttttttttttt

SEQ ID NO: 22186 - DNA, 1047 bp, Homo sapiens
ccgccccttaatgcttctgcaccccaccgcctgtccgtctacattcctgcctcagtttccgtctgtctctctgtcactctcgctgtataggttagggggagacagattgagtctcaattgccccccttggcgtggggctctgctctgggaccagcacccccatcccccatgtggactctagtggactctgccccctttaactgtagggccgcaggtgctcaggccagattccagaaccctgagggcattccaggcggtgggcagctgggccagccgtgcggaggtgggcatgactgtagcttctagctaaaccaggcatcggtccaggcatcggtggcggggagccaggcctaggccagcccgggcccacccagactggcccctaatgagctcccaagtggcctgtggggacttggcctcagttttgccagctgtgaactgggaccgtcgctgctaaggtaattggcaggtgatctgaaggacacctgccgcctcctggccttttctgtgaagtcgaactaggcccatttcctgggatgggaaactaaggcctagaaagaggccaatgcttccaatgtttgtccagggaagtggggacagaggcaggacagaatctgttttctctgcatcctcacatttcccagcaccttctctatggaggggggaagggctggtggaggagcagccccaggtgtaaacaggccgccagagtttatttcctgagccagtcccagctcagctggaggcgatgaacgccttgggaggccccaggggggccagcccagtggtggcggagcttggaccaatctaggtttgagctctgccacccgcatgatatcttgaaccagtttttcaattctgcggagcctcagtttcctcatctgtaaaacaggagtgggtcgtaactccccaagttgagggctgctgggggatcagatgcaggaatacaggccctgctcataacctgcctgactctcgctgtggctctgccccagtcacactggcctcctcctgtttctccaacaccccaggcgaggtcctctctca

SEQ ID NO: 22187 - DNA, 1021 bp, Homo sapiens
gtgaccgtacatttttatacatctccactctacggccttttacaggctttccgattttacaggcctttccaagtttccattctccttagagagagaactgtgcttccaaacagaaatcaggagtgaccacaaagcctgaaaacactttgccacccagcaaagaactggcacaattggtttgggtctgcattgccatagtgcccgagttaaaactgcaggccactctgccttgcagtggcctctgatttcattgtgggtgcatccacaggtggcccgagctgttctttcagctgctccaaggattgagacccaagtcatcatgaaaaaggcccaagtacagtcttaatgcgataaatccactagctaagacgtcgagtgccaagaccagccttccagccgaggtttggacaaagtctcaggttcccgtgactcagggtaaggtgctggggctgccagaggacctgccccagcaagatttttgtcaagagcgagactccatcagcccaggcagacgggagcaggttcttggccagcgtagacagcagcaaacagcagcagggaagccattctcactgcatcctccctgcagtagccacggccaggcccttaggaggagcagtgaccgggggtgtccagaaatatcctgtccctggatggaaactaggtctcgtttggatttttttttttttttgccgtgttaggaaattatttattaatttacaagacaggttttaactcagccgaggtgggaaatggtgtccctgtccctcccaaagcacagagcacagaaatgaggccgtttacatggcgagtctccgtgctggtgtttaagtcattaaaaagatactcaaagagaatggcctgcctgatgcgtccttggcgtgggttaactggggaagtcggaggtgggtgagtcagtccatggcattggtgtgagtgaacagagagccctagggccacctcccctagccagaggggtttctgtgttacatactggggctttttttttttttttgagaca

SEQ ID NO: 22188 - DNA, 1064 bp, Homo sapiens
ccagaaagcaccaccccgttagctgggtccatgggattttgctgagcccctgccatgtgccaggcaggtttcaggcccccttggggataaggattgagctgtcgatatgaacgtccggttaatccctgtgcgcccgcctcacgtggcagtggggagaggccctgctgtggggcaccgcatgctgcttccatggtgcattgggttggagggctcttctcccgagggtgggtgtctcccatctcttgccttcacacacctgctgtcttgtttcatttgggactggacagtcccacaggtgacagctgttgggctgttgtatgcctgtttggtgttgcatcaaaggagtgggtttgaatcagcaggtgctctcaaagctgtctcctgggagacacagtactagtgagcatttattgagcacctactgtatgccaggcaccattttctgtggttaaatgcactgcctgtttacacaacagccctctaaaggaggaaaaacatatcagagtcccatggatggaagaaaaataatgaagtaggaaaaacggccctcttaagatgaaggtcatctttttttttttttttttttttttttgagacggagtctctgtcgctcaggctggagtgcagtggtgtgatctcggctcactgcaagctcagcctcccgggttcacaccattctcctgcctcagcctcccgagtagctgggactacaggcacctgccaccatgcccggctaattttttgtatttttagtagagatggggtttcaccgtgttaggatagtcttgatctcctgacctcatgatccgcccacctcggcctcccaaagtgctgggattacaggcatgagccaccgcacccgaccagatgaaggccatcttaaagctcaaccagtttcaggtgagggctgatccagcagatcccaattattcctaaagacctggttgatagctcccttgagactggggtggggtgggtgtcccaagatgaccgccagcagaaaagagagcatctttctcccagtcaaaagccaaagtaggacctatctaaagtaagtcctggcc

SEQ ID NO: 22189 - DNA, 1198 bp, Homo sapiens
gggacggggcggccggttaccatggccaccgcggggcgggcccggtcgcgcacgcgcgcggggggggccggcaaggagggggggcgtgggcaccgaggggtcccggggtccgcggatctcgggtggggtttttccctctcagtggcacttggttgagttcccccgggacttctgaagttccggcccgcgctggacttctgggattccctcttccgtaaataggaatccgaggaatgaatgaatcaatgaatgaatgaataaacgaaccaactcggccacttggcccgggcctcctttctcctctggtcgtggggaaggagggatgggttggaccttctgcttttctttcaattccctcttttcattctccttcctcctcaatcttcaacacttggctagtcgttaatgccttaagtgcttaatttgttgtgtctggtcctggccagggtctggctgtacaggaggactggaagggcatcctgggagtttcctggtgtccacaggccggacaaaagcaaccccgactccttagagcatggcatggctcagaggtgctggtaaaactgatgggggtttttgctgtccctcccctcagcgccgacaccatgtggatccaggttcggaccatggacgggaggcagacccacacggtggactcgctgtccaggctgaccaaggtggaggagctgaggcggaagatccaggagctgttccacgtggagccaggcctgcagaggctgttctacaggggcaaacaggtacacccgccgccagcacctttgttctatgcctggtccaggcctcgcgcctctgcagccaccagccgatactttctccctcccacctccccccccaacaacctcgtccggtcccacttcatctctcccggaaggagaagtccacagaaacctcaaatgcctgcgagaggaaggaacaaagggaggactcacagattgacacgctgggctggcggctggccctcgaatctatagggtctgggcttttaaacttcttttttcaaagctccgcctcaaaataatggctagagaaagaagttttggaggtggccgatggaaggctgaggaattttcgagaaagggcccaggaccatctggtagctaggacggaggggaccaggttttcttttttaaacatccaccaccaattgctctcagcctgtaccggttaagcatcagac

SEQ ID NO: 22190 - DNA, 1031 bp, Homo sapiens
ctcttcccaaactgaaactctgactccatgaaacactcactccctagcccctgacacctctgcatcctactttccatctctgtgaatctgacaactcgggggacctcctaggaatgggatcacacaggatttgtcctttgcatctgttcactgacgtcactgagtgtgatgtccttgaggtgcatcaggctgtagcctggtcggaatttccctcctttttgtggccgagtgatagtacgtgacgtgttgtctataaacacgagcatcttggcaacggcgttccaagtacaggtacagcaagcacgcagaggtcctgggctgggacatttatggtgcatctgtggcccggtagggaggtcagtgagctgcgggtgatggaggggagtggctggggctgtgggagcctcctcactgagtctgggccttaagcgcgtggctcgggtgtggtgtggaattggtctttattctctgctaggcgcatttctgaatctgagattttctgagaaactatctggattgttatatggaatctgatttttaaatgctggtgactaactttttttttttgagacagagtcttgctctgtcacccaggctggaatgcagtggcaggatctctgcttactgcaacctccacctcccgggttcaagggatcctcctgcctcaccctcctgagtagctgggactataggtgcccaccaccagctaatttttgtatttttagtggagacagagtttcaccatgctgcccaggctggtcttgaactcctgacctcaggcgatccacccacctcagcccctcaaagtgctgggattacaggcgtgagccaccgcacccagcctatctggttttataaagggcagttcccctgcacacactcccttgcctgccgctgtgtaagatgtgcctgtgctcgttcaccttccaccatgattgtgaggcctccccagccatgcggaactgtgagtccattaaacctctttcctttctaaattacccagtctttattatttagtatgtctttattag

SEQ ID NO: 22191 - DNA, 1052 bp, Homo sapiens
tcaaactcattcttcccagggcatcctgcaatgaaactctggtttctgtgttttgtttttttttttttttttttttttgagactgagtcttgccctgtcgcccaggctggagtgcagtggcgcgatcttggctcactgcaacctctgcctcccgggttcaagtgattcttctgcctcagcctcccgagtagctgggattacatgcgcgcttctccaagctcagctaatttttgtattttcagtggaggcgggggttcaccatgttggccaggctggtctcgaactcctgacctcggcctcccagtgttggtattacaggcgtgagccactgcgccctgttccgtttcatgttgcttctgtgagtgcagctttgattgctagggggcgtagctgagctgttgccccaggcatcccgagaacccgtggtgttcaagtgctgtgagtagatttaggggcctcggcaggccagaatgttccagcgtcctcgttccttgcagggatgattctctgaacgactgtcggatcatcttcgtggacgaagtcttcaagattgagcggccgggtgaagggagccccatggttgacaaccccatgagacgtgagttctgagccagcctttccccatcttccgcggtgggcacggggcgggggctcttgtcccgtctctggcttggccgggccccgccggagctgaccctgccgccccgtgcccagggaagagcgggccgtcctgcaagcactgcaaggacgacgtgaacagactctgccgggtctgcgcctgccacctgtgcgggggccggcaggaccccgacaagcagctcatgtgcgatgagtgcgacatggccttccacatctactgcctggacccgcccctcagcagtgttcccagcgaggacgagtggtgagtgcggccctgcccgccgcggggagaccagagcgccccctacaaatccccagaggggcactgaggagatacaggagaggggcaggcgcgggggctcacgcctgcaatcccagtgctttgggaggccgaggcgggaggatcacttgag

SEQ ID NO: 22192 - DNA, 1067 bp, Homo sapiens
tggcctgtgtgggccgcaccaaggaatgtaccatcgtcccgtccaaccactacggacccatcccggggatccccgtgggcaccatgtggcggttccgagtccaggtacctgcagcgtcccggggctccaggggccacgcgggctcatcctgcttttctgggggcagtttctcctggctttggccagccaggggtcagggtggttaccagtggtgcctcggctagccgaggaggggtgtggaaagcctgcaggtttgggtttactccttattttaccagggacctgcaatgaatccttgggggtgggggctgctgctctgctcagagacacgtaaggtcattcccaaagctcctgtcccagggaaggggtggcatctgctaagagggacctgtctcagcgctggttgtgatctatcattggggcagcccctgcctgtgactgggtgttgacagtgctgggcgctgtcagctgtgggctgtgtgtcacggcagacgagacactttggcactagtgacattggagccagatggttctctggggcggggccatcctgggcactgcagggtgctgagcagcatctctggcccccacccactccatgtcctcccaagtcatgacaaccagaaacgtctgcagacatgagtgtccccttggaggcaggattgcccctgggtgagatgcactgagctgggtggacaagctgggcctcatcatggagttcatggggccaggcgtgcagggctaggagctcctggggcagcgctgtatccctagtgctcagcggccagccggggccccatgctcaggccagggcctctcaaggcattttgtggagtgagtggcaggctgcacctcaaccggcctaatgaaggccggcttttatatcataacctcatttagaactcagtcacccccacttttattttttttgagacggagtcttgctctgttgcccaggctggagtgcagtggtgcggtcttggctcactgcaacctccctctcctgggttcaagcgattctcctgcctcagcctccccaatagctgggatcacagggacatgccacc

SEQ ID NO: 22193 - DNA, 1078 bp, Homo sapiens
ctccctgcagggcgctggctctcaactgctttgctcccatcaatgaccaagaaggggccgaggccaaggactggcggtcggggaagccggtcagggtggtgcgcaatgtcaagggtggcaagaatagcaagtacgcccccgctgagggcaaccgctacgatggcatctacaaggtgagtgccccttgaggaggccgggggctctgtccccgccggggctgcctctgatggagctgacgctgatgcccgctctctgcaggttgtgaaatactggcccgagaaggggaagtccgggtttctcgtgtggcgctaccttctgcggagggacgatgatgagcctggcccttggacgaaggaggggaaggaccggatcaagaagctggggctgaccatgcaggtgtgtctgggatgggggatggcactttgggaggccaaggcggatggatcacttacgttaggagttcaagaccagcctggccaacatggtgaaacctcatctctactaaaaatacaaaaattagctgggtatggtggcgggtgcctgtaatcccagctactgaggtggctgaggcaggagaattgcttgaacccagaaggtggaggttataatgagctgagattgcgccactgcactgcagcctgggtgacagaatgagagtccatctcaaaacaggagcactgccgggctccatgacggctctgacacttcccgcctgggcaccatgtgtcctgcttggaggctgtcatccttgaaggtcattgtgggtcacagaatgggccctgcctgggcttgtggtgctcatgttctggaccgcgctgaacactccaggaggcctcccgtctcgggcccatgcttccctggtttctctctgatccagaataatttccagggccccagctgatggcacccccctagctgtcccatataaatcctccagccagggggtgatgggaacgcgcagatgacatttgcttctccgcctgccgcatctcagagttgaaaaccagacttgcttgtcttcgttctgttggtaaagggatcgctgcagaccagtcaggcatctggtgtcttctgtttt

SEQ ID NO: 22194 - DNA, 1038 bp, Homo sapiens
tccccacaatctgtccttgttgctctgttccaacttgggaagctcagcatcggaggggttctgggaaacaggctgtgaccttccaccttgatctttttaaattataaacttgaggccagccgtggtggctaatgcctgtaatcccagcacttggggaggctgaggtgggaggatcacttgaggtcaggagtttgagaccagcccgggcaacatggtgaaaccccatctctactaaaaattaaaacaaaattagctgggtgaggtgacaggtgctactcaggagactgaggtggtagaatcgcttgaacctgggaggtacaggttgcggtgagctgagatcgcgccattgtactccagcctgggcgtcagagcaagattctgtctcaaaaaaaaaaaaaaaaaattgaaaaaaacattcagagacagcatctcactctgtcgcccaggctggagtgcagtggtgccatcatagctcatcgcagccttgaactcctcgcggggctaaagagatcctcctgccttagcctcctgagtagctggggctacaggcatacaccaccatggccaacatgatgaaaccctgtctctactaaaaatacaaaaattagccaggtgtgctggtgggcgcctgtaatcccagctactcaggaggctgagacacgagaatcccttgaacccgggaggtggaggttgcagtgagccaagatcacgccactgcactccagcctgggcgacagagcgagactctatcttaaaaaaaaacaacaaaaacaaaagccacaggctgcctggggcaggtgactgtgctgtggtcaccaggcctctcccccatgtggtcaccgccctcgcccagctgtgtgacgacatgctgcagacatgtgccccctgcgtaggcatctgtgcacctgtgtacggcgtgtcactcctccctggcgtgcagccagcccggtggcatcttccctgtttgtctgcttgggaagtggagactccaggcctctcagctctgtcttctcctggctttcttccccaggcacgact

SEQ ID NO: 22195 - DNA, 1159 bp, Homo sapiens
gctggagtgcagtggcaagatctctgcttactgcaacctccccctcccgagttcaagtgattcttctgcctcggcctcccaagtagctgggattacaggcatgcaccaccatgcccgcctaattttcatatttttagtagagacagggtttcaccatgttggtcaggctggtctcgaactcccgacctcaggtgatccactcgcctcggcctcccaaagtgttgggattactggtgtgagccaccatgcctggccagcttagtggttttagtatagtcaatacagttatgcagccatcaccaccatctaattacagaactttaacatccacacaaaaagaaacctcacacccttccgcagtcttgccctgtgtccctcccccaggccctgcaagccacgaatcctctttctatccttatggatttgcctgtcctggacatttcatataaatggaattatactgtattttgtgtctggcttctgtcactaaggatggaattttcgaggttcatctgcattgtagcctgtgtcagagctttattccttttcatggctgagtaatattccactgtacggatgggccacctttctataatccccgtttgacttgttttaagatgtagtcttgctctgttgcccaggctggagtgcagtggcataatctcggctctacaacctccacctcctgggttcaagtgattctcctgcctcagcctccggagtagttgggattacaggtgtgcaccaccatgcctggctaatttttttgtatttttggtagagacggtgtttcaccatgttggccaggctggtctcgaactcctgacctcaagtgatctgccctcttcggtctcccaaagtgctgggattacaggcgtgagccatgaagcccagtccccaactgcttttttttttttttggagatagtctccatggcccaggctggagtgcagtggtgtaatctcagctcactgcagctgcctcctcctggattcaagcaattctcgggcttcccctctctagtagatgggactacaggcatgcaccaccacacctggccgatttttgtactttttgtagagatggggtttttgccatgttggccaggctggtctcgaactcccgggctcaagtgatcctcctgcctcagcctcccaaa

SEQ ID NO: 22196 - DNA, 1050 bp, Homo sapiens
atgaagacatgtgtagggtgagggatgtgggaaggggcacagagggttccgtgctctccccgggctgtgacgtctccaggaacctccacgcattcatctgtggggaagcttccatcccagtcctccgggttttacctcagcttcctcgcagaggcttgggtgacctcactgcattggcctgggtgatcaagtcagccttcagccacatgcccctcccctcccgtccagcctgggtcttttcagtgagcagccctattccctcagctcccgaggggctgccaagcccttagtcacctcattagcacactggagaattccgaggatctgggggagtcgtaggccaggaaacaggacaaaatgtatttcacagtctcactgggccggtcccttgcctccgcttccttgtctgtgatgagaggacgggagggtggctgtctggacagtgctgaagtggtagaggtgagtcgctgccgtggagggcttggcagggtgctctgtgaagggccctgtggcctggggtggaagccgcttgcagagtgctggttctttgcctaaggatggtggggcaggggggccgtgttcacacgtgctgttggctgtgtctgccagtcttcctttcttttttctgtttctgtttctttttctttgtttttttttgtttgtttgtttgttttgagacagagtcttgctctgtcgcccaggctggagtgcagtggcacgatcttggctcactgtaacctccgtctcccaggttcaagcgattctcctgcctcagcctcccccagtagctgggattacaggcatgcaccaccacgcccagctaatttttttgtattattagtagagacagggttttaccatgttggccaggctagtcttgaactcctgacctcaggtgatccgcctgcctcagcctcccaaagtgctcggattacaggcatgagccaccatgcccagtcttcttcttcttcttcttcttttttttttgtgagatggagtttcactttgttgtccaggctggagtgcaagggcacgattttggctcactgc

SEQ ID NO: 22197 - DNA, 1076 bp, Homo sapiens
ttgtaaaagttaacttttactgagaggaaattcacatacatcatattcactctttaaaggatacagtttggaggtcgttggtgcactcacagggctgggcagcatcaccactcattccggagcatctcattgtcccagaggaagctctgtccccctcagcagttgctcttcatcctgtcccccacaccccaaaaccaggcatctccttcctgcctctgtggactggcctgtcctggacatctcatagaaatgggatcgcgcactgtgtggccttttgtgcctggagtctctcactgagtggcccatcctcagagttcatccactccgtggcctgcgtcagagccttgctccatttcatggctgagtcgcgttctgctgtgtgtggtgccgggcgacctgctcccctgctgatgggcgctcatgtggcctcctctctggctattgggagtcgtgctgctgtggacattggtgtgcaggtgttggtgtggacgttggtgtgcaggtgttggtgtggacgttggtgtgcaggtgctggtgtggacgttggtgtgcaggtgttggtgtgggtgttggtgtggatgttggtgtgcaggtgttggtgtgggtgttggtgtgcaggtgctggtgtgggtgttggtgtgggtgttggtgtgcaggtgctggtgtggatgttggtgtgggtgttggtgtgcacgtattggtgtgcaggtgttggtgtggatgttggtgtggacattggtgtgcaggtgttggtgtgggtgttggtgtggacgttggcgtgcaggtgttggtgtgggtgttggtgtgcaggtgttggtgtggacattggtgtgcaggtgctggtgtggatgttggtgtgcaggtgctggtgtggacgttggtgtgcgggtgttggtgtgcgtgttggtgtgcaggtgtgggtgttggtgttggtgtgcaggtgttggtgtggatgttggtgtgggtgttggtgtgcacgtattggtgtgcaggtgttggtgtgcaggtattggtgtggatgttggtgtgcaggtgttggtgtgcgggtgttggtgtgggtgttcgtgtgggggtgt

SEQ ID NO: 22198 - DNA, 1032 bp, Homo sapiens
gtcagcctcccgagtagctgggattacagcctcctgagtagctggtattttgtatttttggtagaggaggggtttcaccatgttggctaggctggtcttgaactcctgacctcaggtgatctgcccgcctcagcctcccaaagtgctgggatgacaggcatgagccaccgcgcctggcttctttatttcattaaaaaacaaagtggcctttcagctggaaggggctgtagtggagcaggggccgtctcccaccctctgagcttttccttgtcttgcttctgccctgggagggtctcggggagagaccatatcatgtgtcctctcatctgtgtgactgttctagaacgggagctgttggccttgttactctagagttggggtcgaggatgggacttgaccatcctcagctggcactcagctgtgtgccctcaagtccctgaggccctgtcctcgtccccttcgcttggaaattgaggtttttgttttgccggaggccttgggagtgggctgggtggtgtccccgttggcactggggcttctcgctccccctcaaggctgcggctcctggtgcccaccctccctgatgggaagagagtcccaacatcgcaggtctccagcttctggtacggcatgagcgggatgccacccccacttcgcttcgtgtgtttgcacactttcatcttatgtctttcttattcatgatggagccttggtgatctttcaaatgtaaaatgtgtaaaaataaaacttacaaagtcggtgacaaatgcagcttttctcatttccaaagctgctttttccctgttggctcccagtgccgggaaagggtgacgtgggcctggagaccgtgacgtgggcctggagagcgggctggcagctccgggggccccagatgcttgctgttccagactcggccctcccagggtcccctcgccacccgcagttccaatccaatacttttgttttttgccttttcagcctcctcgaggtggagtgccgcttaaccgggagcatccccactcctggctttct

SEQ ID NO: 22199 - DNA, 1049 bp, Homo sapiens
atgtccgggacaagccagtgctcagaggcaggaagggatgcttgggtgtgggggctggagggtgacaacggatggggacgggttttctttggaggatgaaaatgctctacctttgatggcgaagatggtctccccactctgtgaatacacaagctcctgcgtcgcacacctggtgaattgtagggcacacgaatctcactgaaactgtccagaaacatccttcccccagatcagctctcagcaaatcaggaacagtaatccagaataaaaactgggcagcctttctggaaggccgtctgccatgggttacacatgtgtctcctgtggcctagcggttctgtctctggaacacgtgcataccggttccatgtctagggatatctgtagccccgtttgttgtagtggaaagttctatgaccaggggatgggttgaaccagtggaatgttatgcagctgtgaaaatgggtttgctccatgaggtttgctctgtatctttgggcatggagagatgagcgcgacaactttaagggaaaaaataggctgtggactgggactcttgtgattcccgttttttgtggggatgtggttcttgaactgggaaagggagatttgcccaagtattggttgatattagtttgatgtcatggaatttgggataccttaaaaatatgcactaacttctcaatatggttctgtctttttttgtactaaaaaaaaaaaaacccacatactcctctttccatagtcagaggggtgtagctctggggagggaagagtggggtccgccattcctaggtgcttcttgagcaagcaccccacagttcccaagtggaaaaggtttttgttgttgttgcttcgttggtttgttttcagaatgggagttaaaaaccaaacaaaaggccaagcgcagtgactcatgcctctaatcccagcatttagggaggccgaggtagggttgcatgattccagaggttcaagaccggcctgggcaacatagtgagaccccattctccacaaaaagggggaaacaagacaaaaacacaaaaact

SEQ ID NO: 22200 - DNA, 1074 bp, Homo sapiens
atgtagtaaaaggctgtaaagccccacgtggcgcatcagtcggccatccaggcttcgtggttttgttttttgttttgtttcttgagacagtctccaaaaactccagattggagtgcagtggtgcgatcatagctcactgcagccttgacctcctgagatcaagcaatcctcctacctcagcctcccgggtagctgggactacaggtattgcaccaccatgcccagctaattttttgtagtttttgtagagttggggtctcactatgttgtccaggctggccttgaactcctgagctcaagggatcctcctgccttggcctcccaaagcactgagatgacaggcgtgagccgccgcgcctggcctgtgcaggccttggtggagctgctccttcggtcctgatggggagcatttcccaaatgtgccccatggaaaaggcaaggcgcagagcagggaccgtaggatgtcattgacatgaaaagcagaggaccgctgccctgtgtgtcgggaggctggggcctcagggcagagagcgcgttggccaccttcccttttgttcttctggagctgggtactgggtgcagtgttggctgttccagaaagtctatgagttctgtctccgttttggcttggagttctcctgtgggaggtgcccagcaaggatgattcccctcggccaccagtgagatgggaaccctcctcctcctcagctcagcagagccgtcgtggacctggggcccccagcttctttggatctcaggcatggggggcgcaaatgtcagtcgggagctgtcaagctctgtggaaggtttctgcatgtttgcccgagccccaccaggaggggcttcaaaagtgcttgtccaagtgcagagcaaggcagggcacagaggcagaggcagacacagcccccagctgggccagggctggtggccaaggggcttcctcagtgtgtagcctccgtggcagcctccatgtgtagtacatggtcagtagaagccccattaacagcaggggggactcggcctctggggagcggatttcttttgcaatatgatgttaaaggaaggtctggcatt

SEQ ID NO: 22201 - DNA, 1103 bp, Homo sapiens
ggcggcgggcgacgggtgacgggtgacgggtgatgggtgcagcacccgccccgcccataggagagccctggtccactgtggcctgtggatgccgcccctgacgtcagcatctctctctggcctccctgggagcagtctcagagcagtgaagagctcttcacgtccggtgctgtggcgatactaagtaataagatctccaggttttattgggcattaatatttattcccatgaaaaggttaaatttatttcactttaaagccctggagagtgcaaggtggagccatagtcgcctctcctggcaacggccctgcccaccacgtacccacctctcccacacaggccagtcctggtgatggcctgcaggacagggcagatgtgtggggcagttgggggcacccccttttggaaggcactgctgccagtggggccggtgagtgtgcagagcccagggccaatgtgtgcctcctgcaggcaccgggcagccctggccactcctcagctctctgaccccttcccccgctctctgcagcaggcaccacacgagccaatttcgcttggcacgacgtcctgaagcaggccctgggctctgcggctgctggctctgagcccatcgacattctgatttgtattttttcatgctttggaaaaaagaaatctatttatctctgcgtcgggtcccgctctgcataaccggaggcaaaccagcagccccgcccgctttctcattttcctgggaaggtagcagcgggtcctctgaggcctgcgtcaagaatatcgggctgtcggacgcgtcagtcttcaggggcaggtgacggccgcactgcttccagctctttggcttggtgtttgggcaccagctgacgggccagccagcagcagcggtgctgaggttagtccaggtcccctgaactcgacggccatcaatcccgggcctgtcatttgcaagcagctgcagcagctggtcgagcctcctgctagaccctctctccaccccaggtttttcttaagggtctgtgacggtatctgtcagtggagactcatgttagccatgtcaggagggcctgtgttggagaaggatggagggaacagccccgagcccagg

SEQ ID NO: 22202 - DNA, 1037 bp, Homo sapiens
ctgcactccagcctgtgtgacagagccagatcccatctcttaaaaaaaaaaaaaaaaaaaaaaaaggctaggtgcggaagcttatgcctgtaatcccagcactttgggggccaaggcaggtggatcacgaggtcaagagatcgagaccatcctggctaacacagtgaaaccccgtctctactaaaaatacaaaaaattagccaggcgtggtggcgggcgcctgtagtcccagctactcgggaggctgaggcaggagaatggcgtgaacccgggaggcggagcttgcagtgagccgagatcgcgccactgcactccagcctgggtaacagagggagactctgttgcaaaaaaggaaaagaaaaaaaaaaaagaggctggaagtggtatgggaaaaagagtagcaggaatgaagagggagtgcccactctctgagaaccatttggtatagctctgactgaaaaatcatagtcatgttatacacactttaaaagataactgattaaaatcaaggatatgatgtgtactccaaatggaaaacaaatagtaaaatataaactcagctgcaccacaaatgaaaatcaaccacactgaagagccaggggaagaatggagttgatctcagtaaatttgggaaacaatgtttccactggatactgttaggctaaaaatgaaaatacctatacaccaacactatactctagttcaaaaatctagttctcatggcttagccatctgtacctactatatgtgaatattgcaattgagcaaatgagtgaattaattgtagatgagctaggtttctctctgtcagcgaaaaaagttacgtcaagggtaaaggaagcggctagaatgaacattgtgctggttggaatcagaagtgtcagtataggctgggcgcagtggctcatgcctgtaatcccagcactttgggaggccaaggtgggtggatcatgacgtcaggagatcgagaccatcctggctaacacagtgaaaccctgtctctactaaaaacaaaaaaaaaattagctgggcgtggt

SEQ ID NO: 22203 - DNA, 1090 bp, Homo sapiens
cacgtttttgtgatctgtttgataaatcaaaagtgatatctgattatggcttaaacattcattcctcttagaacgagcgaggttgagtatactctcattggattaaaagccttttgtcagaactgtcttgaaacatactattttttaaattccacgatggccatttcccgtcagtgagagggttgatttgatgtttaatcttttgcgtttctacatccatctagctcagcgtcagttgctgagatctgggtcaggggtcacacccagctttttcttctcttacgtttgatgttgataaatgagaaaaaccaggtcaggtgtgctggctcatgcctggcattccaacggttgaggaagctgaggcgggaggatcacttgaggccaagagtttaagaccagcctgggcaacagagtaagacttcgtctctaccaaaaaatcaaaaagtgagctgggcgtggtggtgggcacctgtagtctcagctactcaggaggctgagataagaggatcacttgagcccaggagtttgaggctgcagtgagctacgatcacaccactgcactccagcctgggcgaaagaatgagaccctgtctttaaaaaaaaaaaaaaaaaaaggcctcatgtcgtggcacatgcctgtaatcccagcactttgggacgccaaagtgggcagatcgcctgaggtcaggggttcaaaaccagcctgaccaacatagtaaaaccctgtctctactaaaaatacaaaattagccgggtgtggtggcacatgcctgtaatcccagctacttgggaggctgaggcaggagaatcgcttgaacctgggaggcagatgttgcagtgagcccagattgcaccactgcaccactgcactccagcctgggcaacaagagtgagactccgtatcaaaaaaaaaaaaaaaaaaaaaagagagaaagaaagccgagtgcggtggctcacgcctgtaatcccagcactttgggaggctgaagagggcagatcacaaggacaggagatgagaccatcctggctaacatggtgaaaccccgtctctactaaaaatacaaaaaattagccggatgtggtggcgggc

SEQ ID NO: 22204 - DNA, 1031 bp, Homo sapiens
aactggtggcgtcagtcggtctccagtgtagagcgagataacagatgagtggatgggccacaggtcctgggtggtgagggcggcagcagctttttgatcttaaaaatacagtttccttgtcacctgagagctctctgaaagcagtgtgtgagctgactttttggatcaactttacttttcccttctttttaggcaattgaagatgaaggtggtaatcctgacgaaattgaaattacctccgagggaaacaagaaaacatcaaagaggtctagcaaaggtatggaggatttcataagcaagtttcatgttaagtgctttcttcaaaacgaatacattgctaatgtgcctcgtttacttgtctgtgtgttggacttgtgaaccactctgaactgggagccttcagcgaagctttgcattttctttcaagatctctctactgtgttttgttttcttggtatctgggaattccaatggaggatggaaggagtatttgtcctttattcattttcctctgtagattgtcagcggtccttaaataaggagtcttttgggagtcagtcacagtggcgtgtgcctgtaattccaggcgactcggggctgtggtaggaggatcacatgagcctgggagttcaagaccagcctgggcaacatagcaaaacccagctctacaaaaaaacttttaaaggcccggtgtggtggcatgcatctgtggtcccagctgcttgggaggctgaaccggaaggattacttgaccccaggaggttgagatcagcttgggcaacatagggagacccccatccccaccaaaaagaaattagccaggcatgatggcatgcacctgtgatcccagctacttgggagttttaggagggggatcacttgagcccaggagctcaagcctgcaatgacctaatgattgcaccactgcactccagcctgggtgacagagcaagacccagtctctcttaaaaaaaaggggggtgggggcggggcacagtgtctctcacctgtaatcccaacactttgggaac

SEQ ID NO: 22205 - DNA, 1033 bp, Homo sapiens
aactgatccatcccaccaatagcaactcgtctccttgggtcctctgtcctcccgtggcatagttccttaccccttggtttaatatttatgtcatcttgccttctgtcaagagcagattgatgaggactagggctgtgtcttgtttatctttctttccccttcaatggtttaacttggtaacactcaactattggcttaagaaagaatcagctgaggcagggcgccgtggctcacacctgtaatgccagcactttgggaggttgaggcggactggtcacctgaggtcaggagttcgagaccagcctggccaacatgatgaaaccccgtctctactaaaaatataaaaattagccaggtgtggtggcgggctcctgtaatcccagctactcaggaggctgaggcaggagaattgcctgaacccaggaggtggaggttgcactgagcccagatcgcaccactgcactccagcctgggcgaccgcaagactccatccccctaaaaaaaagaatcagctgaagctgggcttgtagaccgaatgttctcttggttcatgtagagttttccctatctgaaatgcttgggaccagaagggtttcattttttggattttgtgcggtattttcgtacgcataatgagataatcttgggattggggcccaaatctaaacaagaaatttgtttcttatacacctgaagataatttaataccatattttttataattttgtgcatgaaacaaaactttcactaattccacacatcaggtgtggaattttctacttgtggcaatatgtcagtgctcagaaggtttcagtttcagatagggttgcccaacctgtaattgaaggcctggttctcagggcccaaaactaaatgagataataactaatacttggtggtgaagtactgggtttaaatatctgagagtcaggccccagtgtcagccacagtgtttggggtaagtgctgggagaacagcagaatgaagtcacttctgtggctcatgatacattgcgtgtttttgcctttactca

SEQ ID NO: 22206 - DNA, 1249 bp, Homo sapiens
agtttacaaatagctgtcccggccaagttcagtggctcacgcctgtaatcctagcactttgggaggctgaggtgggcggatcaaaagatcagcctggccaacatggcaaaaccccacgtctactaaaaatacagaaatttgccaggtgtggtggtgggcgcctgtaatccaagctactcaggtggctaaggcaagaagatagcttgaacctgggagactgaggttgcattgagccaagatagtgccactgcactccagccttggcgacagagtgaggctgtctcaaaaacaaaaacaaaaacaaaaagctgtcccaggttgtaccctaccaacaatgggtgacggtgcctatttcactaaactcaacatcaaacttaccttgtttgcctgttaccttgttgcctgttatatagaagaaaagtatttcattgtatttatctgcatttttctgcaggtgagattttcgtttgcatttcttcacagattatactcttctgataattggacatttgtgtcgtctgaatggccttttcatgccctttgccgatttctgtgctgggttgtttgtcttattgagttataaagactcatataaaatgtttctattgttttaatctgtcattcaatttaatctgattcgacttgtggtattttgatcactaggcttctagattttatgttacgctttaaaaggacttctttgcttttaaattattaaaaatatgactgtaaggccaggtgcggtggcacacgtccgtaatcccacgatgcaggtggatcacctgaggtcaggagttcaacaccagcctggccaacatggtgaaaccctgtctctactaaaaatacaaaaattatctgggtgtggtggcaagcgcctgtaatcctagctacttgagaggctgaggcaggaaaatcgcttgaacccgggaagcagaggttgcagtgagccgagatcacgccactgcactccagcctgggcgacgagtgaagcttcgtctcaaaaaaaaaaaaaactatatgtataactctgttatatatagaaagaataatatttatggttttatttttacattttacatttggaggtttaattaatttagaatgtattttgcatgtggtgtgaggtaggtagggatgaaaacatgaaacatttaggctgggcgtggtggctcatgcctgtaatcccagcactttgggaggctgaggcgggcagatcacctgaggtcaggagttcgagaccagcctggcc

SEQ ID NO: 22207 - DNA, 1034 bp, Homo sapiens
tgtcatcagaaagatcacttctgcccctcccagtgcgtctcccctcccagcccctgcaaaaataaaagtcgctgttgtgattacttcaccagatattagttttacccattctagaacttcatgtaaaatggagccatgcaatactagctcttttgtgtctcatttgttgttttgttttgcttcttgtaatcagttttattctagaaatttacagtacattttgatatctgatagggcaggtcggtaagttttcttgaattattttcaactactttatcagtgggttttatcaagattttaactgaaaatagagggactgctgtaatgtgtgaattcaaaatgctttaaaattccagaaagcatatctcatgtaatctcagttctcctcctattgcttggacttggagaaaatgacatcccttttaaacagcacttggccaaaacagaattgtcactttaacattttttttaaaaactgcttatacagcaaaagtcacattccacatgacgtgactctcaccatcttagcagactctcaaaataattatcaggggctgtgcgagatggctctcgtctgtaagcccaacagtttgggacaccgacgcggaaggatgacttgagcccaggagttggagagcagcctgggtgacatagtgagaccccatctctccaaaaaattagaaaaattagtcagatgtgatggcgtgcatctgtagtcccagctactcaggagactgaggtgggaggatcacgtgagtccaggaatttgaggttgcagtgaaccatgattgggctgtgattgctctccaacctggtaacagggcaagactctgtctcgaaaaaataaaataattaccaggaaactaaatttatttgtagtgtcatcacaaagtacaaattaataggatgttttatggtgtttgagaatgttttgtaactggagatgcaaagttggcctgtttgcttggttaagtattacccaatcctttgctgctggcttgttttgttcagtttttgttcattttggcaatttc

SEQ ID NO: 22208 - DNA, 1035 bp, Homo sapiens
tgttggagaaaggaggcccagttctgatcacacacacacagcctgggcctcactcctgagatcttcctgggctgctcctgtgggcccgagaagccttcttcccgctggagtgtacggttctgcagaccacgtagtggacgcacagccctggagtctgtgcgacccagcgtcttacttaaagtcagccctgggacctggctgggggtgtctaggtccccttctgcagctctactgttgtgcagcagggtgcgtgaacgcagtgaacgcgaacaacgcatgcaggcgcagtgggagcgcgaggagcgtgagcggctggagattgcccgagagaggctggccttccagcgccagcggctggagcgggagcgcatggagcgggaacggctggagcgcgaacgcatgcacgtggagcacgagcgcaggcgcgagcaggagcgcatccaccgtgagcgcgaggagctgaggcgccagcaggaactgcgctatgagcaggagcggcggcccgcggtgcggcggccctacgacctggaccggtaagcagatccatgctgcccttagcacgtggcgttcagaatcgtgttagggacctcacagtccagttagcttgagatttttttttttttttttgagacggagtcttgctttgtcgcggaggctggagtgcagtgacccgatcttggctcactgcaagctctgcctcccgggttcacaccattctcctgcctcagcctcccgagtagctgggactacaggcgtttgccacctctcccggctaatttttttgtattttcagtagagacggggtttcactgtgttagccaggatggtctctatctcctgacctcgtgatccacctgcctcggcctcccaaaatgctgggattacagctgtgagccaccgcgaccggccagcttgagatctttcattcaaaggaagcataggccgggtgcgctagttcacgcctgtaatcctaacattttgggaggccagggtgggcggattgccttagctcaggagttgaagaccagcctggcc

SEQ ID NO: 22209 - DNA, 1042 bp, Homo sapiens
tcaaggtcaatgatgggagaacgagaaggacaggtaagtctgaagctacagtggtagccacagaatttcccatagaatgggttcttttcccttcagcgtgccttcttcctgccctttctttgagcaagaggcaaaatgaggaaagagaaaagtaaagcactagaaaagtctaggtttgtggaatggaaatttgggattatttggggttagtcttggctgtcagtccaaacagttactctgaagctgtttttagccttgaccctggggttctgtgtgccacactcaccacacatgtgcaacagtgccagggaaccttgggatgtgacctggctctgctgggaagtgtctagtgagccgcacagctgactcagacaggtgcatctggggaggctgtggttgctgtgtctgtcctcgagtgcctgccctcttttgaaagtaaggacatccttcatcaccccagggcccagcttagccttggaaaacaactagatctgtggtctgtgctcattctcttcgggggctagcacattagaacaataagctccattttctccttccatcttacattgagactgagacttcccaggagagccttggacctctagtggctttccctataaacttgggggcagcacattgctgtgtggaagatgcctcctctctgaggactccactcatgagcccttcctcctcctgccagcattttctggactccaccataagcttcccgcttctgtcccccttggttccttaatgtggctgagcatagccaagtactcagctctgtctcgggatcctcaggaattccatcagcctcgtggggttcctttttccctgctcctggaggcaaattatatgcagcaaaacgtagaactagtcttgtggattttctttggtggaggagcatacaccaatggttccatgtaaaggctccagaatcagaactggcgtcacaccttggtgtcaccccttcctgctgagcctgtctccccaggagtgaaatgagggtaatattcctcctacaaagggtgcggtggtgggg

SEQ ID NO: 22210 - DNA, 1072 bp, Homo sapiens
atgcttgcctagcaattggtcggatgaagggctccatttgatacttccttcactgtggaaggaagaaatttgtaaaaattatttccagaatatgcacacattaaaggtttataaacctgacctttctttagtagaagacagtaagagaatactgttggctctgggaactaaccatttgagctgtgggacccagggaatctctcttgtaagcatcatctttagtgggtgactcctggtggccctcccagctctggtggtgctgtggggacctgccttggagatgccttggtactagtaccttttttgtaccaggccatgagcctagggcacagggcctctggcctgcagatttcaggaaggcagctgtgttgtgtgaaccgatacagcctgccagcacttctgtcccgagtgactgtcgttgtcatcgttagcatgttgcctgaaaagccttggggtctgggcgctgacactgaagcttttttttcccttctggctctgtgatgtccagcattacccagaacgccatggaggaccagagcgccacggccgggactcccgcgatggctgggggggctatggctctgacaagaggatgagcgagggccgggggctgcctcctccccccaggtttgtgtcccacacccgacagtacctgaccccccccccgcccacaagggggcccgcaagtcgctgggatgtgggcacagggtgggaaacacagagggattcactctccagaagccgccacagttattagcacaagagccagagatgggggcaatccaaatcagagatgtctctctttcaaggggcagacgtgactggggggaccatggccgaagagaggatgaccggtcatggcagggcacggccgacgggggcatgatggacagggatcacaagaggtggcaaggtgaggagcagctctgggctgggaccaggatgtgctggggagtgatggaaagatggaggccgcgccttctctccttgggggagcacaggaggtgctctgctctcagtgctggaatgaggaatgaagagcactccagacaccgcctgctctctggtggtc

SEQ ID NO: 22211 - DNA, 1943 bp, Homo sapiens
ggagcgcgtgccgttcttgcctctctggcctgcgcctcctgagccgagtagatatcccggagttccgcgcggcgccagcccttccgccacggccgtctctggagagcagcaggtaagtggtttcccgcactgccggtatccgccgccatccggactcccgggtcctctgtgcaggttggaggatggttggttgtggcgagcgaggctgaaggagccgggacgcggggctctgggcctcgggaactgagccggtactcacctccgccccttctccccgtcgctgtccgcagccatggccctacgctaccctatggccgtgggcctcaacaagggccacaaagtgaccaagaacgtgagcaagcccaggcacagccgacgccgcggggtgagtgcgggtgccgcgcggaggttgtcgggggtttcttggagggcggagggcatggcttgggcaaaggctctcgacctgaaagaacgcgcgttcgggcgcagaactaaggggggcttgaatggaagagatggggtgggggagtgggacttcctgcctggtgctcgaaggcgggcacccatctgggtttttcccaaccgtgcaatccacgctggggcagagggagcaccttgagagcggcgcggggcagcgggtttggggttctgacgcaggagtaggagttcgctcatggagctggcccgaggttgcggtgtgtgaggttgagggatttcaggtgtgtcagtgtattgggcgcctttattaagcgggcagcgggtttggggttctgacgcaggagtaaggagttcgctcatggagctggcccgaggttgcggtgtgtgaggttgagggatttcaggtgtgtcagtgtattgggcgcctttattcagcaggcagcccagactccaggtgcgtcctgccagtgttgcggagactgggacttagggaggatgggagctgctccgggcgcggcgaaaagcgctaggcgttaataccttggttctcacagctacccacagaggggaggaagtagccagggaaatcgcggcagcgcgagagaagctgcttaactagaatgcagggatccccctaccctgacggccgcccctttcccccctagcgtctgaccaaacacaccaagttcgtgcgggacatgattcgggaggtgtgtggctttgccccgtacgagcggcgcgccatggagttactgaaggtctccaaggacaaacgggccctcaaatttatcaagaaaagggtaggtgggcgctgccggccgaggggcggggtgggatgggagtcagggccgggctgacggcggcctcgtccctggcaggtggggacgcacatccgcgccaagaggaagcgggaggagctgagcaacgtactggccgccatgaggaaagctgctgccaagaaagactgagcccctcccctgccctctccctgaaataaagaacagcttgacagaagccctggctctcctgctgtccgtgggtgggtgtgggtgtgtcgggggcccgcagtcccctgtctggtgcccgctctgagccacaccctctccgggtgctgcctggtcgtgaatcaaaagccgtggcccgcccacccttcccggggcagcaggtgaggaagccgccgtactgcaaatgactttaatcattaaatagcttctatgccacactctgattaagccgactgaggtccctgggatctgggtcactggaccgagctgctcgctcggtggctccactgccaggtccgggcgcgctccccacagcgctcagttctggcccagacagggcctgacatccgccgcctgcagtcccggggtggccgtcaccgttccacggccagcgcctctgcctgctcgtccgggaaggcgatgtcgaagatctcccggtagtgttccacgaagtgcacctccaggccctcggtgatgaaggctgccaggtcgtagaagtcc

SEQ ID NO: 22212 - DNA, 1032 bp, Homo sapiens
agcgatcctcttgcgtcagcttcctgagtagctgggactacaggtacatgccaccaagcccagctaattttaaaattttttgtagagacgggggtctcgctatgttgcccaggctggtctcaaaaccctgggctcaactgatcctcccgcctcagcctcccaaagtgctgggattccaagcatgagccactctgcacccagccccatcctggttttttttttgttgttgtttacatgctcttgacatctaattaccttatttcacatttattatctgtctccccgactggatggtgagtttgtcggggaggggcccagggtggccttggttaccaccgagtccctggtccccagccaggccctggcacacagtaggcgctcaataagtgtttgtcaggttaattcgtgtgctggaggcggaacccagccgggcactctgggctttctgccactggggccttttactggctggatctgctctgctgtgtgtctttaagaaaatctcgtacctccctgggtctcagcgccactgttctctcaaacagcaggtcctacgcccctctctcacctctcctcttttcctcttgttaacacaggccagcgggttcccaggcagtagttgtggagtccgggagagaacaagtttggagttggatccaggttccaatcccagctcagacacttgttacttttaattaaaaacatttttttttggccaggtgtggtggctcatgcctataatcccagcactttgggaggccgaggctggcggatcacgaggtcaggagatcaagaccatcctagctaacatggcgaaaccccgtctctactaaaaatacaaaaaaaattagctgggcatggtggcaggcacctgtagtcccagctactcgggaggccgaggcaggagaatggcgtgaacccggaaggcagagcttgtagtgagccgagatcgcgccactgcactccagcctggggacagagcaagactctgtctcaaaaaaaaaaaaaaaaaaatttttttttgtaaagaca

SEQ ID NO: 22213 - DNA, 1060 bp, Homo sapiens
tgggctggagtctctcttcccgactctgtcttcccctccagactggcttggggctggggccagcgtggagcgcgatcatatttgcagagtgaatcactgtgcttctagtccctctgttagcacccctgagccacccttgtccctgtccttacagaagctccaagacatggatgaacgcagggccacccgcctgggtgccgggtatgggctcctgtcggaggccgagctggaggtggtgcccataatagccaagtgcttggagggcatgaaggtggctgcaaatgctgtggatcccaagaacgtgggtgcctggtctgggtccactgggctacgggaagggcagagggaggtacccataggctaggcactcgactgctcatccactgtccccctcccccaggactcccacgtccttatagagctgcacaagtcaggttttgcccgcccgggcgacgtggaattcgaggacttcagccagcccatgaaccgtgcaccctccgacagcagtctgggcaccccctcggatggacggcctgaactccgaggcccgggtcgcagccgcaccaagcgctggccttttggcaagaagaacaaggtgggggccgggacccttgggatggtgggggagaaggacagtgaagtggggacagtggggcccctattgagtcagccccagccgcctgaacgccgagtctcgggcaggaattttcctcttggctgccagcccggactggagggaaggaaggcggccgattggcctgggagtcccccgaggcgaaggcgggggcagggtggggaggtggggaggtccgtggcgtttgtctgctgcttctcgggatgctgggagaaaacctgctggtggaattcagggctggcctgagggctggtgacaccatccctggggactccccgagtttctctctccatcctgctgatgggactctgggagccgccctgcatgtcttgctttcttgggtttttggattttaatataccttagcacccttggtttatacctttgatttatactttgggtccctcttcacttacactctcatac

SEQ ID NO: 22214 - DNA, 1040 bp, Homo sapiens
ttcttctgaaattagtatgtgattttacttaaaattttttttttctttttagagacagggtctcactctgttgcccagactggagtgcaatagcacaatcatagctcactacagcctcgaactcctgggctcaaataatcctcctgccacaaactcccaagtagctgggactacagacacgcgcttccatgtctggctaatttttaaaaattttttgggccgggtgcggtggctcacacctgtaatcccagcactttgggaggcccgggggggggcagatcacgaggtcaggagattgagaccatcctggctaacacggtgaaaccccgtctctactaaaaatacaaaaaattagctgggcatgatggcgtgtgcctgtagtcccagctagtcaggaggctgaggcaggagaatggcgtgaacccgggaggtagaggttgcagtgagccgagatcgtgccactgcactccagcctgggcaacagaacgagattccatctcaaaaaaaaaaaaaaattttttttgtggggtctcgctatgttgcccaggctggtcttgaagtcctggactcaagcgatcctcccacctcggcctcccaaagtgctaggattacaggcgtgagctgccacagcctgtggtttttgtttttgtttttttaactgacagataacagtgtatgtatttatcatgtgcaacgtgacatattcttgaaaaatgcaagaggagcggatgttaagcactttcaccacaaaaatgagagctatgcgaagtgctgcatttgttactaagctagatttaatcatgccactgtgtatatatacttcaaagtgtgtttcctttttctttttccttttgttttttgagacggtctcgctctggcgcccaggctggagtgcagtggtgtgatcttggctcactacaacctccgcctcccaagtttaagcaatttcgcctcagcctcccgagtagctgggattacaggtgtgtgccaccacgcccagctaattttttgtatttttagtagaggcggggtttcgccat

SEQ ID NO: 22215 - DNA, 1033 bp, Homo sapiens
ctggcctcaagtgatctgcccgccttggcctccaaagtgctgggattaccagtgtgagccgctgcacctggcccctaagtgctgcttgctcaccccctattgatgaaccttatctgtgaccccatgtaactcctatttgaccctgtctggccccttgtccctagagcatgacttcggtgctggaacctgtgttggacctcacgtacccagtcacctccatgttcactgggtctgcctttaaccgcagcatccatcgggtcttccaggataagcagattgaggtaggcccacctcatcccctgccctgcctacccctccccggaggagccccctgctcctcccccacctcgatccctgtccccgcaggacctgtggctgccttacttcaacgtgaccacagatatcaccgcctcagccatgcgagtccacaaagatggtgggtgtccccgcccagcctgcagcaaccgctgacgccacgtggggttggggggatgcttccgggagggccgctgagcttctgggacgttgttaacacgagtgaccgtccaccctggcccgatcaccgaccactaaccgccacccactaatgccccggagaccccaggtacgtccgtccttgggggaggggagcagggagactcgtcggacgccttacccccctcacgccatccccgcaggctgtgtgtggcgttacgtccgggccagcgcctcctactgcccctacctgcccccactgtgcgaccccaaggacgggcacctgctggtggacgggtgctacgttaacaacgtcccaggtcagcgagcccatcgggccggctgggcctccggcgtgtctgagcgtgtctgtgcgtgtttgtgtctgtgtgtcccaccgcgcaggctccctgtggcggtacgtgcgcgccagcatgacgctgtcgggctacctgcccccgctgtgcgaccccaaggacgggcacctactcatggatggcggctacatcaacaatctgccaggcaagtggccgcccgcaccacccgcacacgcaagcac

SEQ ID NO: 22216 - DNA, 1025 bp, Homo sapiens
ggccctgcaggaggttaaaggccttaagaacaatttggacctgcagcaatacagctttattaaccagctgtgttatgagacggccctgcactggtatgccaagtacttcccttacctcgtggtcattcacacactcatcttcatggtctgcaccagtttctggttcaagttccctggcaccagctccaagattgaacacttcatctccatcctgggcaagtgtttcgactctccatggaccaccagggccctatccgaggtatccggggagaaccagaagggcccagcagccaccgaacgggctgcggccaccatagtggccatggcagggaccgggccggggaaggcaggggagggtgagaaggagaaagtgctggcggaaccggagaaggtggtgaccgagcctccagttgtcaccctgttggacaagaaggagggtgagcaagccaaagccctgtttgagaaggtgaagaagttccgcatgcacgtggaagagggcgacatcctgtacaccatgtacatccgacagacggtgctgaaagtgtgtaagttcctggccatcctggtctacaacctggtctatgtggagaagatcagtttcctggtggcctgtagggtggagacgtcagaggtcacgggctacgccagcttctgctgcaaccacaccaaggcccacctcttctccaagctggccttctgttacatctcctttgtgtgcatctacggacttacctgcatctacacgctctactggctcttccaccggcccctcaaggagtactccttccgttccgtgcgggaggagactggcatgggggacattcctgacgtcaagaatgacttcgccttcatgctgcacctcatcgatcagtacgactccctctactccaagcgcttcgccgtcttcctgtccgaggtcagcgaaagccgtctaaagcagctcaatctcaaccacgagtggacgcccgagaagcttcgacagaagctgcagcgcaatgccgcgggccggctggagctggccctct

SEQ ID NO: 22217 - DNA, 1029 bp, Homo sapiens
taatgaaagatgaatatattttctcttcctaatgatttttttttttttttttttggagacagagtctcgctgcatcccccaggctggagtacagtggtatgatcttggctcactgcaacctctgcctcctaggttcaagtgattctcctgcctcagtctcccgagtagctgggattacaggcgcccaccaccatgcccggctaatttttgtatttttagtagagatggggtttcactatgttggccaggctggtctcaaactcctgacctcaggtgatctgcctgacttggcctcccaaagtgctgggattacaggcatgagccaccttgcctggcctcttcctaatgattttttaaagtacatcttgttttctctgtcttactttatcataaaaatatatgatacaaataaaatacagaatatgtgttaatggactgtgtatgttatgagtaagccttccagtcgacagtgggctattattggtggttaagttttgggggagtgtgtgttcaagggtcaaccgcacttcctgagggcactgtgagaactaagttaaataacccacttttacaatctttggaaccgggggcaggtggctggggctcacacctgtaattacagcactttgggaggctgaggcaggaagatcccttgaggccaagagtttgagaccagcctgggcaacaaagcaagactctgtctctacaaaaatttttaaaacttaaccaggcagctgggcgcggtggctcacgcctgtaatcccagcacttcgggaggccgaggcgggaggatcacaaggtcaggagatcgagaccatcctggctaacatggtgaaaccccgtctctactaaaaatacaaaaaattagccgggcatggcagcatgcgccggtagtcccagctgctggggaggctgaggcaggagaatggtgtgaacccgggaggcggagcttgcagtgagccgagatcgtgccactgtactccagcctgggcgacagagcgagactccatctcaaaaaaaaaaaaaact

SEQ ID NO: 22218 - DNA, 1902 bp, Homo sapiens
gtgaaaccccatctctactagaaatacaaaaattagccgggcgtggtggcatgtacctgtaatctcagctgcatgggagactgaggcaggagaatctcttgaacctgggaggcagaatttgcagtgagccgagatcgcgccactgcactccagcctgggcaacaaagtgagactatctccaaaaaaaaaaaaaaaaaaaaaaattcagagtcatgcctggggtcagggggagtccagaggagtcacctgactcagcctaaggaggagtcagggaaggcctcctggaggaggtgacagttggctgggtcgctaagggtaaggaggagttaaccaggccaagagaccagtgggcaaattgcagaggagagaaactgccagggtgcttggatgaaacaaccacaaagccagggttgtaagatccagaagaggggagaggaagaagggcagagccagcctgccagccttgaacaagcatttggcattatttagagctcagggaacagactgcaggggtcgaaggcaggagcctggagaccaggatggaagggactgcaccaggccaggggagtaatggtggggctggaccaggtgaaggcgtggacgggtgagacttgggtggatcttggagagatatggagaggccgggggagggagcagctgctcatgggggagaagctttaggtgtaagtcagcaatctgttctcagcatctggaaattgccatgctgctagacacccaggtggtacggcgtaggatgggctttaaagcaagctgggagcttgggagacagcagaaagagggcagaaggaaaaccaggagtgggtggcaagctgggagccaagggagctggggctgtcataggaggaaagggtcttgaaacccctgtttgataattcagtagcaggcatcttactgtttttttaattattattttttttattttttggaatggagtttcgttcttgtcgcccaggctggagtgcaatggtgcgatctcggcccactgcaacctccacctcccgggttcaagcaattctcctgcctcagcctcctgagtagctgggattacaggtgcgaaccaccacacctggctaatttttatattattagtagagatgaaggggggtgggtttcaccatgttggccaggctggtctcgaactcctgacctcaggtgatgcacctgcctcggcctcccaaagtgctgggattacaggtgtgagccactgcgcccagcccgtctcactttcttttgtggctgctctttaccaaccctgttctgttccccatgcctttcagtacaagctcttttctttgcttttctttcttgtttttgttttgttttttcaagacaagttctggctctgttgcccaggctggggtgcagtggtgcgatcttcgcccactgcaacctccacctcccaagtttaagcaatcagcctgggactacaggcataagccaccacacctggctaatttttgcatttttttgtagtgattttgtagagttttgccagttgcccaggctggtctgaaactattgagctcaaacgcctcagcctcctaaagtactgggattacaggcatgagccactgcactcggcctctttctttctttcaaaggcagaatcttgctctgtcgctcaggttggagtgcagtggcatgatcataactcactgcagcctcgacctcctgagctcaacctcagcctcctgagagctgggaccacaggcatgcaccaccaggcctagctaatccttaaaaaaaaattttatacacatggacaggggtcttactatgttgcccgggctggtcttgaactcctggcctcaagcgagcctccagcctcaacctcccaaagcactaggattataggcatgagccactgtgcctggccaagcg

SEQ ID NO: 22219 - DNA, 1137 bp, Homo sapiens
cctgggaggttgatgttgccgtgagccaagattgcaccattgcactccagcctgggcaacaagagcgaaactgtctcaaaaaaaagagaattggtttcttaagtagtgaggtgggggtagagggctcattccctaccaaaaatgccccctctcctgtatcaaccctgtctcctgtatcaaacacaccttcagtggaaatcttttcattttcatgtactataattttctatttaaaaagtcacccttaatatatatacatacactggaatatgattcaggttttttttcttctttttccttgagacagagtctcactctgtcacccaggctggagtgcagtggtgcgatctcggctcactgcaacctctgccttgatcttggctcaagcaattctcatgcctcagccttccaagtatctgggacttacttggaagtaagctggccaccacgcctagctaatttttgcatttttagtggagatggggtttcaccatgttgcccaggctggtctcgaactcctgatcgcaaatgatccacccgtctcagcctcccaaagtgctcggcttacaggcatgagtcactgcacccagcctgattcagccttaaaagggaaggatgtaacatgtcatgtgggtgaaccttgaggacattatggtacatgaaatcagccagtcacaaaaggggagatactgtgtgattccacttacatgaggcccctagcgtcaccagattcacacagagagaaagtagaatggtgggtgccaaaggagagggaacagggaattattgattattaggcatggattttcaggtttttgttgctgttgttttgagacggagtctcactatgttgctgggctggaatgcagtggcgtgatctcggctcaccgcaacctctgcctcctgggttcaagcgattctcctacctcagcctcccgagtagctgggattacaggcgcccgccaccacgcccagacaatttttgtatttttagtagagacggggtttcaccatgttggccaggatggtctcgatctcttgacctcatgatccgtccatttcggcctcccaaagtgctgagatgacaggtgtgagctactgtgccctgccagagtctcacgatccgtccgcctcggc

SEQ ID NO: 22220 - DNA, 1043 bp, Homo sapiens
tagccaggcatggtggcgcatgcctgtaatcccagctactcgggagactgaggcacgagaattgcttgaaccctcaaggtggaggttgcagtgagctgagatcgtgccacggtactccaggctgggcggcagagtgagactccatctcaaaatgttgggggaaataatccagattcttccctgcggcccccatgccttgcaggctctgtgctgcccctcatcacctccctgccctcccctcctccctctctcccccttgctcactgcaccagccacacggacctcctcactgttgctccaacatcccaggcatggtcctgcctcagggcctttgcacctgctgcgtatttatctagaaagcccctcccccagccccaccttcttgtgtgaaaaacccacaaccttctcatctttttttttctcatagggtcttgctctgtccctcaggctggagtatagtggtgtgatcgtagctccctgcagcctcaaactcctgggctcaagtcgtactcccacatcagcttcctgaatagctagaactacagatacgtgccagcacacctgactactttttaaattttttgtagagacagggtcttgctatgttgcccaggctggtcttgaactcctgagctcaagtgatccacctgcctcggcctcccaaagtgttgggattacaggcatgaaccactttgcctggcctgacctccgcatctttttttttttttttttttaagatggagtcttgctctgttgcccagtcttgagtgcagtggcatgatttcaactcactgcaacctctgcctcccaggttcaagtgattctcctgcctcagcctctcaagtagctggggttacaggcacatgccaccacacctggctgatttttgtatttttagtagagatgaggtttcaccatgtgggccaggctggtcttgaactcctgacctcagatgatccacccgcttcagcctcccaaagtgctgggattacaggtgtgagccaccgcacctggcctgacgacctcatctttaagtcccagct

SEQ ID NO: 22221 - DNA, 1074 bp, Homo sapiens
gttccgcagccgctggatgagacgggtggcggacgccatcttccgtccgcgatactgaagggcgcagccggtgacgtctccaccgctggggctgctgggaaagacgcggcgtggtatcgcgagacgggagtgggcggtgctagaacgtcctataaaggctctccccgaagcacgtgactcctctccgccagaccgccgccgcgccgccatcatggacaccagccgtgtgcagcctatcaagctggccagggtgaggtgggggcccgaatttgggggcagggggagggattagaggagccaaacgggccgggtctgaacccagcttctttcctccaggtcaccaaggtcctgggcaggaccggttctcagggacagtgcacgcaggtaatcgggtgggggcatttggccgactgccggcgacctaaaccctgatgtgacctctaccctgccctaacccctgccagccggaatccgggagccgattctcatttcatcacggggttctgatggttccctttaacgatctgtattctggccccgacacgttctctgaattcatatctgcttcccactccgcggtgcctttccgcggcccgcccttacttcttcctccactccggtggggacccgtaggtgcgcgtggaattcatggacgacacgagccgatccatcatccgcaatgtaaaaggccccgtgcgcgagggcgacgtgctcacccttttggagtcagagcgagaagcccggaggttgcgctgagcttggctgctcgctggtgggtgcaaagaggacacccctttgatagacctttggttggtggtagggaggcttcgttaagcccagggtgagagggtttgggaggcagagtctacatacagagactgacaagagggaggcgggagtttgccaattgctgcggggcctgtcaacatctcatgtttgggtctgtttacagggtcttggatgtcgggttcgaccacttggccgatgggaatggtctgtcacagtctgctccttttttttgtccgccacacgtaactgagatgctcctttaaataaagcgtttgtgtttcaagt

SEQ ID NO: 22222 - DNA, 1034 bp, Homo sapiens
tcggccccccaaggtgttgggattacaggtgtgagccaccgcgcccagccaaaagttaaaaagacttgcagagttaagtttttatatgtacgtatacatatacatggactagagaagaatcttcccctaattttgtcctgaagatagtgagaaaataggattggacatgttaaaaaaagagcttttcaggacatcacttttatactatcacatcatctaaacttgaatatgtccctccccttccccttccccttcccttgccgagacagggtctcccgctgttacccccggctggagtgtagtggtgcaatcatggcttactgtacccttgacctcctggagccagactgtcttctttctgcatagctgggaccgcagttgtgcaccaacatacctggctaattttttgtattttttttgtagggacacggttttgccatgttacccaggctggtctcaagactcctggattcaagcactcagctcacctcagcctcccaaactgctgggactgcaggcatgagccaccatggccagtctgcttgaatatgtgtctcgaatgatatttctttgagggtcattctctacaagtctgtcaagaattagttggtggtggtagatttccaaaaaggtcaattttttaaaagttggaaatgacaagagatagttctaatctctttactgaggaaacctctcagagggaatgattagccagggaaggatttgtttgcagaggtgctgtgcccattaagcatggtgagagccgctttctcaatggtgagtcatgtgatgtggattaaccccaaaccaaatgctcagcttctgtggttagattggatagtttattcgtagccatggtatgcacctgtggaatataggttagacactttgttacctgctttggctgtaattatttatttatacatttcgtagtttataggtgagcttaagcagtctggtgaaagactggaaataattcatcatggactctgtcagaatgttttttattgtaaatcttaaagtatttgggactt

SEQ ID NO: 22223 - DNA, 1761 bp, Homo sapiens
ctccctactagctagtactgcaagtgcaccaccacacctggctaagttttatatatatttttttgttgttttgacagggtcttgctatgttgcccaggctagtcttgaactcctggcctcaaatgatccccccttcttggcttcccaaagtgctaggattacaggtgtgagccaccgcatctgaccaatactagtcttgtgtcatatgtaactttgtgtggaattgtaaacctggcaaatcaaataattatctttcacattgtgctgacatataaaccctttacctttttttcctctctctcgaattcagtgaaggagaacgacctgctcagaatgagaagaggaaggagaaaaacataaaaagaggaggcaatcgctttgagccatatgccaatccaactaaaagatacagagccttcattacaaacataccttttgatgtgaaatggcagtcacttaaagacctggttaaagaaaaaggtaatggtactggtgattgagtagggtgagaaggttggtgtgtcatcttttctgtggctaattccttggttatttttggtcagtggaagcggctctgggtagagcatgttctttccaggcttaagagtgaagcccccttaccccacctcagttttttttttttgttttgtgttttttttttgttttgttttgttttgtggtcatacccctgtgtgtcaaacaggatggtttgtatggtcctttggcctacagatgattttactggcttagtatggttaataaggcttcgattaggcttccggggagccttttcgtgttgaaattttttgaattttgcacgttaggtgggagagatttttcctttctttccttttttttttttttttaagctttttaagtttcacaggaagatagcttgtttaaaattttgtggatgtcttcctgggatcaaaatgtggtagctggaccttatgcttctcagattccaaactataaaacattagcttgtattttaacttttaggctttttcccctctgggaaaaaatagagtagactggccattggagagctcaaaataaggtatctgctttgtaacgcggtgccttaggatgtggattgtcatagcctaggtgtccaccttccagccgagggcaggggaagcagccaagctctgctgccaccaggaggcccgaggaggcctgcctctgtgatcctcacccccgtgcacactgtggtgtcctctctctctccttcttccctcctgtgctgctatcgtcttcctttctttcctgattcttggccctgctggtggcacttaggactaaagagactgctcagccctgggttagacaacaccgtggtagagaacaatttgtatattgccttgaggcgccctccccgcaccccgacctagactcaaactacccttcatggagtctttgcatgactgaaaggtattggttttctggagcattcattatgaaaagagatgtgagcttgatttgtcaaatgatttaacatttcagtgacagagatgccccgtggataggccattttggtatgtgtactggtgctccctgcattggattttgaaattatgaatggcactgccatcattgtcccatcccttattttgaccatgacatgcaagaagcactaggcactgtgaacctctccgtacagtcacgcgtgctgctcccacgtggcatttctccagataacacagatggaaaaacgttttggtgtgagattgatgtgcctgccttgatcagccaaatcat

SEQ ID NO: 22224 - DNA, 1051 bp, Homo sapiens
acatttcaggagaggacaaagagggtgaggctctagatgtaaactttggacacttggctttcttgccttcaaccaatgtgcagagccattaataaatatgtccttcagatctttaaattttttgtaaaataattttaccttgtttttcattaaaaatttttcttcctatagcctcataattttaatgtcctttaaacaaaagagttggaataggcatgacttgttgaggccgttaagcgggttatttttacccttgtactgctaaaccaaaccgatccagaggacaacaaaagcccattttttgcctttggagagtctggttagagatagttttctccagggtaacactttacatttgttttctgtgtgccatcttcaagttcagcagccattttggtggttgtcttgatggattctaacatctggtcatggtggtcatgaattggcaatccaaaccttgaggaaaatctgcagaaacttttgaaatgctttggttttttcccttttgtgtagattagaatcatatgagtctgtttaactgtttagatacaaaatctgagccctaaatttgaatttatttgtgtcctttaaatggggaggtttagaaagcggcaagaatgaagcctggcctaattcactgaagagaatccagatgctgctctggttttgtgatcttattatattcaaacattctgcctctacagatgtggagcctagtgctgtgtgcaggaccagctatagaatttgtggggcccaacacaaaacgaaaacaaggggcctcttgttaaaaaaaaaaactaagaatgtcatggcagcgataacagcattaaaccaagctcagggcccctgagtgcggggctctgtacaattgcacgagttgctcacctgtgaagctggccctgcggccgtgtgtgcctgtgagcttataccttcgcatacgtgcgtccttgtatttatagcatgtgagctcagcccgatggcatcgcaatttgtatgcatttcacctgcttgccaccaatgagagcgtatgtgtaaaacctcctcccttccc

SEQ ID NO: 22225 - DNA, 1008 bp, Homo sapiens
tcgattgagtacagagggaagcagatctaaagttggtgtgatttcttggagaccctgaatttaggtctgcttattaaatgtcagcagctctagtgcaatgctggtaacgcgtaggagaaggagatattaaggagcccagcttttaacaaggaaggcgaggcgaggcacttctgtcagcttccccttagaagggttcattttaaaagactaactttgtgacataaatcatatttttagtttgtttataactgtcattgatatttactatttttttcttttctttttccccttccttgctcttctgactggtctctggcttcctccaaagggatgtgcgtaagtatcgtctagttacttattggtatttgagccttctaacttgtaggactggtttcactcgactcgtttccttttgactctatagtgttgttgaattcaagatggaagagagcatgaaaaaagctgcggaagtcctaaacaagcatagtctgagcggaagaccactgaaagtcaaagaagtaagctcttgcttaacactgcggatactgtgtgtaattgttgagtgatcctactttggaattagggaaagacggtcatggtcccagacggcatttacaaagcaagtgccagcctgttgtttctaatgaagagtgtcggtcatagcctacagcagccattccctgcaaggactttggggtggtggccaagcagatcctgagtggctgctgaccaccttctaatatctgtgatttgtctgaggccttgttgtctcagggactctcaaaccatgagcccgtgggtttgtgccattaagttttactccatctgacccttcttcttggcccatcttttttctttttttaaaaagtgagtttgttccagcctgggcaacatggtgaaaccccctctctacaaaaggtacaaaaattagccaggcatggtggcgcatgcctgtagtcctagctacttgggaggctgaggcaggaggatcatttgagcccaggatgt

SEQ ID NO: 22226 - DNA, 1484 bp, Homo sapiens
tggtgggatgggtatgggaccaggtggcccaggaatgattactatcccacccagtatcctaaataatcccaacatcccaaatgagattatccatgcattacaggctggaagacttggaagcacagtatttgtagcaaatgtaagtaaacagaaccatcgtctaaagtagaaaatcagaactttatgaaatgaccttgtcaatatgttataaaagtaattctcacatttgagaagaaaaatgtaaagaagggttttgttcttgatttctttaaaaatcagccttataggcgggctttgtctgcattcctaagtcacaggcttgaccgtggtctcgttggggctgtgattcctgagtttcgcaggtgtttccgcaagcagtaaccgagtctgcattctccgttggtttattttatgcagttttggtgcagagtaagactgtacgagcagaagtgcactgacaccttcctcttgttgtgtctggggtgaatgataatacctccaccatctgcaaggggaaatatttttagaataaagtaggttgggtggggtggggagtggtaaagcttatcagggaaacaattttttaaaaatgttcagaaaatgagtattaatttgaagtatgaggtgacttaagtttctgagaaaagagacaatatatttactataggtacagtttatttacagtgaaggccaggctttataatcctattttaaaatttccattgcagttgattagtttttgtgacattatttcctaatacttttttccaaccaaagcatgtatcattcatgtagtaaaaatgttgtgtttcttaagatgtttacattgaggtttttaccccgttctctctcgattagctggattataaagttggctggaagaaactgaaggaagtatttagtatggctggtgtggtggtccgagcagacattcttgaagataaagatggaaaaagtcgtggaataggcactgttacttttgaacagtccattgaagctgtgcaagctatatgtatccttctgcaggaattcaacttatgaacagtttgacctaaattgctgtgttagtaatgtaggtttgtgtgaggaagaggtgactgtgtgtattcatgttttttatgtgactagggggagtgcattactgtggaattaagaggttctctgggccggaccggtcacggtggctcacgcctgtaatcccagcacttcgggaggccaaggcgggcggatcacttgaggtcagttcgagaccagcctggccaacatggtgaaaccccggctctactaaaaaatgcaaaaattagctgggcgcagtggtgggtgcctgtaatcccagctactcgggaggctgaggcacaagaatcgcttgaacccgggaggtggaggttgcagtgagccgagattgcgccactgcacaccaccagcctgggtgatagagtgagactcagtctcaaaaaaaaaaaaaaaaaaaaaaaaggttctct

SEQ ID NO: 22227 - DNA, 1888 bp, Homo sapiens
agcctttaaacttggtaagttcttggcagaagataccccagttgaaacatgtgatagaatttttctttccctgcttagtctaagcagtcttgttggatgatgctgaaatgtgaacctctcttgcaggaatggaggggccctttggtggtggtatggaaaacatgggtcgatttggatctgggatgaacatgggcaggataaatggtaagcatcgtgttttcttcctgctttcactcaccctttgccggctgttgcctctcaggtgacttttaggctgcagacccactgaataagtggtttctcacttctgcttttcaaccgaatcaaatgtcttttgaattgccttaaatatttcaaaaactagacataatagtagacttacttcacttggtcgctagtcttttgagatgtcctgtgttcccaagctctgcagtaattttcgagtacagtgttaaaaagcatgtacacgttcgtggttatggtctccgagtatgagggattctttaaagtttgtaatcaagtttgtctctgggagtgctgcaaagggttgttcttggtcatctgccccagctacaagttgtctatagaggcgttaataaaaatcacaggctcttttaatttagcatttacataatgcaaattctggtttagtataattcaaatcctccaccaacttttttttttttttttttgagacagggtctcactctgtcacctaggctggagtgcaatggtgcgatcttggctcactgcaacctccgcctcccaggttcaagtgattctcctgccccagcctcctgagtagctggtattacaggtgtgtgccaccatgcctggataatttttatatgtttagtagagtcggagtttcaccatgttggccaggctggcctcgaactcctgacttcatgtgatccgcccgcctcagcctcccaaagtgctgggattacaggcgtgagccaccgtgctcggcacctgcccccaactttttagcagaaatataataatataataacaatgtagtatttcatttagtccttgtgagaaccacatgatatgtacatactgctatccttgtttcatctgaaactgaggcacagagagtgacatgcctaggtcaagtgactggtaaacagtggtgcctgcatgtgaacccaggctgtctggctccagagcctggcacttcatcatgtgggaatcctgccttttagaagtgcctccagcacagcacttggcccagggcaccagcagggctgtagagtgtgcatgagaaattgtaaattttcctttttgaaatcctttatgtgttggtgactctttgaccttccccttcactgcaggaaagctgctgcttttttacacagaaactttcttggactgagaagtcattagggatttaggtataaaccttcctttgcgggtctgccataacaaaggatgtgaaaatggtacaaggacagacatcattgtcaggcttgaaaggcggctgtccctgatgatcaggcccttcttccggtgcacagggagcagtggggcatgatgtgtgttgccctcttcatgggtgccttgttctagaagctggtaaaaggatgtaggaaagttgtcaccattagtaataaagcaacagaggtctgcgtttccagtgtacattcaagcttgcctgtaacttgtgtgtgcatgggattttaatttttaaaaaaagtttcagaaatctggcttggtaaaatgttactcagagcagattagtctgggtgtgctggctcacgcctgtaatcccaacactttgggaggctggggtaagaggattgcttgagctcaggagttcaagatcagcctaggcaacactgcgaaaccccatctctctcttttttttttttttttttttttt

SEQ ID NO: 22228 - DNA, 1050 bp, Homo sapiens
agtcaggattcagagcctggggtacgcggtggcaaaggattccaagtgctgattctctggagaaccacaaatggagtgtgttttcctagactgttcttagatgttctgagatacggcactcggagtgctccccacaccctctacagctgagaacagggactccttcccacttgaccagcattctttggtttgggtgggatgagctctagagcccttgggcactgcaaggaaactgtacatcacactggaggaagaattgaagcagacgtttgggtttaatgaaatgttaattcatgactagagtgtagccattatggtcatgggtgctcccatcagactgctggtcatgcaggttcccaggacccacactcagcatgagtcaaatcttgatagagtggctataaaaatgtaaatcaaaagattgttaaatgtcggccaggcgcggtggctcacacctgtaatcccagcgcattgagattaatgttaaaaaaaaaaaaagagagattgttaaatgtcaaaaactgactgtagtgaggcagtgtttgacagtgaaaatgctaccctttgtgggtgtaaattggagttcacggtgctccctgagctctggggccctgttgacagccagtaagatgagttatgaggtccttgccaacatgctgatgccagcctgtggcatgcttgtctggagtggggtgctgccttcttgcagacaggtggcaggatggaaggagagcagcagaactccatgaggatgccgctgcggggctgcagggttctgtccctgccgccgtcccccccaccctcccaccaccaccgactcctgggctctgctatccagcagatagcacccatgaggagcatgctgacccatgaggtcacttgggttaattcaaactaggaatgttaagcccaccattggcagccagtccttgttaattcataatgtgctgctgctgccacatctctaatggaattgcttattttattgaaagatagggactctggctgtataatgcaaggtgttcattacatcgcacctatcttacctga

SEQ ID NO: 22229 - DNA, 1058 bp, Homo sapiens
tataggtgatctcagtgtgtacctgccacacataggcctctctaaggtgagggtagggtgagttactgggctaggtgactctctgggacatgagatatgggtcaagtgagtgtgtacctggcccgcccaggtacaggtgacggtaaacaggccaagtctgggtgtacctgtggacaggagagtccaggctaggtgattagagtacacgtaggttcagggctgtctggggcagaagaggatgtgtctgttggtggaggtgcccagctgtctatgccaagcatgaatgcacgggtcaggtgatgtatccctgtagagagcatgtacctatggactaggctgcctgggccaggtgagagtgtacctgtggacaggtgtgtctgggccaggtgaaggtatatctaatttccaggttgaaggtagagtgtacctaatggatgggtgtgtctaggataggcaagggtggcctcgtggttggggcttctagacaaggtgaatgaatgtgtgattgttgagagatgcatctggccaggtgagggtgtatctgacaggtgtgtctgggctacaagtgcatgtttgatggacagctgtgtctgctatacttgagtgtatacctgtgggcaggtgtgtctgtgccgggtaatgatgtacctgtgatggaacagattgatctaggctgggggatagatacctgtgggcaggtgtgcctgggctaggtgaggatatacctgtgatggaacagatggatctaggctgggggatagatacctatggacaggtgtgtctgtgccaggtgagggtatacctgtgatggaacagatggatctaggctgggggatctatgcctgtgggcaggtgcatatgggccaggtgagggtgtacctgtgatggaacagatggatctaggctgggggatatctggctgtgggcaggtgcatctgggccaggtgagggtgccaggctgtagtcagggtcttgctgtgcccacccactagtgcctcaccttgaagcggcggtcgtacttggtgaccgaatcggcgaagtccacccgctccctcttg

SEQ ID NO: 22230 - DNA, 1027 bp, Homo sapiens
ggtcttgggtttcctgtcctggggtaggaatgggtgtttgggaagaaacatactgaagaccagactgaaggaggaggtaacgtctagggtgtctgaatcccccttcttggtgtcccctggggggcttgcttaccacccagtttgaggggcagacatattggcttcttctgtgtcttggatcaggccttgagctgctggaacaggagcagctgtgtgagggcatcagtgtcctctctctccctggctgccccctgcccctgagaaccaggtatacacccacccaggtggaagggtccattctgcagggaaggtcttccaggggcctggagcccaaggacttatcaaggctccctcctcctcagtttctcactcagcccctctcccattattattattattattattattattattattattattacatcagggatcttgttagattctagataaaaatactcaaactccaatcatggggagagctcatgggatggggggctcatctggactggtactgacactgagaaccagatgcccctggccaactggatcacttggactcaggagcatcgcccacccccaccagatctgggggctgggctagttcttggctactccaagtttatcagagccacaaatgtgtgcagggtgaggacgtacaaagtgcctctctctcactagtacaacaggtgggcagtatcaccaaacaggccaagagctcccctgtgactgggcatccctagaatcctgcacatcacaggtaggacctcctctacttgctcagcctttggttctggtccagggcagggattgggcaagatcagcccttctccttccctccatgcctgaccttccagcaggtggcttttctcatgtcactgagcctcccttatacatctataaatgtttacctataaatgagcccattccctagaaatatattgtgaatattaaataagaggcagtaaataaattgcccggtataggggcttctctggactgttttatcttcataaataatgtgaat

SEQ ID NO: 22231 - DNA, 1023 bp, Homo sapiens
agtcacgtgagagcaagagagtagctttctggttgtcctggtgccctgctcaggcaaactgactgccattctctgaggatggcagctctgtcccccacatttggtaagttcttgggtcagtgcgtgccctgagaaagtgagtgcaagtggcccctgccacttgatggggtgaaagatacgtacaccatagagggctgctgggagaggatgggcaagtggaaaaggggtgggaacagagccccagcagccaccccagtgactgtgtctgctgagggtcttggtgggtctgggagcaggccagtgtccttatcattcatgcatgaagagggtgcaggtaatgggtaaccctgagttatctcatttattattttgatcactttcagcaaggtcacaactctagctctcagaacttgcatttcttcactcctaggttggaactatgtcacttcttatgagtatgtagcccaccaccctctttatgtttttggtggaacagggctgctctgacttgttatgaaactgatgtgtgcaagagaggtggggggaggaagagagagagaggattgaggatgtgaacactcagaatcagtgtggagcagtttcctggtttacaagtgttgtattatgagacagggcaggctctgattctcatgaaccctgttttctcctccagccacgtccacccaggattccacctgtctccaggactcagaatttcctgtttcttcaaaagaccattcctgtccccagaatttggacctgttcgtgtgcagtggtctggagcctcacacacccagtgttggttcccaggtgcactaagatctctgggtccctagagcaggagaggcacttcctggaagaccccaccagtgcatgctggaattcttgcagagcttcatctcagccagtggatgccagaacagggcccaagagagagccaaggaatattggggctgtcctggtgttggggaagttaggggaagtgatttatgtagcatctgtttccctcatgcttgcaaaatc

SEQ ID NO: 22232 - DNA, 1032 bp, Homo sapiens
ccagcagtaaaagaaattgggtttattgaagcagcagggcacagcagagtggctgccccttgtggagcagggctgactcataggcagtatacccagggtagcagcatataggctgttggctagcagtatttatacccagttttaattacatgcaaattaaggggtgggctattcagacagcactcctcattcaccttccaccatgattgtgaggcctccccagccatgtggaactatgagtccattaaacctctttatgaattaggcagtctcaggtatgtctttattagcagtgtgagacacagttgctccggcctataaatgacacatagttttaagtctgtttcctgcagttctcctatgattggccagggttttgattctgttttgtttttttgcattttcaaattaagggtagatgattctgagggtcttgctccagctctgtctcaggcccccccaccagctatccctctttcttgcagtttacctaacagagccttggggtgggcatgtgtgggaccgtggtgctaagatttaatgctttttctcattttactcatagttatgttgcaattttggcattctctatgtcttaaaggcagtgttgaaggtatagttttgtgtagaagattcataggtgtggagttacttcacagcatttgaaaggggatttggggaggttgcttaccactcactggccattgtttttagttacctggaagtctcctcaccttagtttttggagatactttggctgaatatgttattttattttattttaatttattttttgagacagagtgtcgcccaggctggagtgcagtggcatgatctcagctcactacaacctccacctcccaggttcaaacgatcttgtgccttagccacctgagtagctgggattataggtttgcaccaccatgcctggcaaatttttgtatttttagtaaagttgaggttccatcacgttagccaggctggtcttgaactcctgacctcaggtgatctgcctgcctcagcctcccaagg

SEQ ID NO: 22233 - DNA, 1057 bp, Homo sapiens
tataaatgcaactgttctcagtttgtgctcctctagggttgcttgcaattattagcttgattatggatttctcttcaaggtattttggttccagtattgttactatgtgtttccatgagtgaacagagaggtagggcttcctactctgccattttactgacattttttatgatatattacttattgaatcttaaaatacaaataaagtagttctgaattgctaattcagacccctgtggaaaacagatttattaactgagttatttttgtgtcattcttttatatttaggcttagattatatgttcaaaatactgttttccaaaatcacttagatgagttatttttatctttcaatatggttttgttattcatttgtaatacagttaaaaagcagtcgtttttgttaccttaaagtataatgttagctttggcgtttttgtagatgccctttattaggctgaaaatttttcttgggcttattgaacttcattaaaaacaatcatggttaatgaattttgtcaaattccttttctgcatctcatgagatcatctgattttctggcctgctaatatgttgcattaaattaatttacatttgaatatcaatctggcatttctgggatatgttctaacttgatgtattatcttttcatatatagaggtatacatatgtatgtgtgtgtgtatatatatatatatcactgtattcattttgctaaaattttattgagggtttgtgttaactctctgctctgcaaccagcctgtgatagctgagggcccagagtaccttaaatggatttatcttcacccctttgccctgccacttgccttggggggatggttgcctcggtcatcagggaggctacatgcacctcagtgatcctgccttatcccagcctttgatatactatggtctaatattaggtgaaggcttggtgaaagtctgtggatggattcatcactgtgaattctgtaactgagatgtctcagaattctaatgtggtcaatcagtccacactctgctgtcaaattttggtaagatttaattatgatt

SEQ ID NO: 22234 - DNA, 1083 bp, Homo sapiens
gttcaaggctgctgtgagcttgatcctactattgcactccagccttgggaagagtgcagccctgtctcccccatacccccagaaaaatataaaatagacaaacttttgcacaatgtgtgattcagcatttcatccaccccatacattttcttttttcttctttttttgttgagacaaggtctggctctatcgcccagactggcatgcagtggcgtgatctcagctcactgcaacctttgcctcccaggctcaagccaccttcccacgtagctggcactacagacacgtaccaccacacctggctaatttttgtggtttttgtagagacggggttttaccatgttgcccaggctggtctcaaacttgtgagctcaagtgatctgcctgctttggcctcccagagtgctgggattacaggcatgagtcacaccccaaatattttctaccctctgctaggacctatgaatattaaaagaaaaacttcagataaacgtaatagttaagcattaaaggattcgtgaatcaggcagcactccaaaaccagaagggttcagggggctctgctgtagcagcatgcacagttggcttttgtagactgaatgtgaaagcaaagtaaagaaattacttaattggcttagccttagcagtattctgagtttctttagtgaaccattattattactctattgctttggataaaaagttgagtgtcaacttttttagggaagccagatgtcagttttcaagtgtcttatggttattttcttatattttcttgccagaaccagttctgagtctgtaaatatacatttatatgtgtgtgtgtggtaggggaggtggaggatgatattacttatccattcatctatttttttccatagtacttgtcaccaattgacataatacatatttatggctggacacagtggctcatgcttataatcctagcactttgggaggctgaggcaggcggatcacctgaggttgggagttcgagaccagcctgaccaacatagggaaaccctgtctctaccaaaaatacaaaattagctggggttggtggtgcatgcctgtaatcccagc

SEQ ID NO: 22235 - DNA, 1045 bp, Homo sapiens
aaaactcacactcaagagaaaccatataaatgcagtgactgtgaaaaaggcttaccttcctcctcacacctcagagaatgtgtaagaatttatggtggagagagaccatatactcataaggagtatgtcgaaaccttttctcattctacagccctttttgtacacatgcaaactcaagatggagaaaaattctatgaatgtaaagcatgtgggaaacccttcactgagtcgtcatatcttactcaacatttaagaactcatagtagagtgttacctatagaacataagaaatttggcaaagcctttgctttttccccagatcttgctaaacatataagacttagaactagaggaaaacactatgtttgtaatgaatgtggcaaagaatttacttgtttctcaaaactcaacattcacataagggttcacactggagaaaaaccgtatgagtgcaacaaatgtgggaaagccttcactgattcatcaggtcttataaaacacaggcgaactcacactggagaaaagccttatgaatgtaaggaatgtgggaaagcttttgctaactcttcacatcttactgtacatatgagaactcacactggtgagaagccttatcaatgtaaggaatgtggaaaagcctttattaattcctcttcctttaaaagtcacatgcagactcatcctggtgtaaaaccctatgactgtcaacagtgtgggaaagccttcattcgatcctcatttcttattcgacatttgagaagtcacagtgcagaaaggccttttgaatgtgaggaatgtgggaaagcctttagatactcctcgcaccttagtcaacataaaagaatacatacaggggagaggccatataaatgtcaaaagtgtgggcaagccttcagtatctcatcaggccttacagtacacatgagaactcacactggtgaacggccctttgaatgtcaggaatgtgggaaagcctttactcggtccacatatcttattcgacatctaagaagtcatagtgtggagaaaccatataaggaatgtg

SEQ ID NO: 22236 - DNA, 1035 bp, Homo sapiens
gtggtacgtgcctgtaatcccagctactcgagaggttgaggcagaattgcttgaacccgggaggcggaagctgcagtgagctcagatcacgccactgcactccagcctggatgatatggtaagaccatctcaaaaaaagaaaaaaaaattaaaatatcctcagagggttttttaatgaaaaacttagttatagggaattgaggaacatttaggggtacaaattttcacttattgcacacaagaaaattggtactggccaggcatgctggctcacaccttaattccagcaatttgggaggccaaggcagaaggatcacttgagcccaggagttcaagaccagcctgggcaatatagtgaaacctcatcttgacaaagaataaataagattaactgggtgtactggtttgtgcctatagtcccagctatttaggaggctggggcaagaggattgcttgagcctggtcagggaggcagaggttgcagtgagccctgatcgtgccactacactctagcctgggcaacaggatgagaccctgtctcaaaaaaaaaagaaaattgacgccagcaaagaaaaccaaataaattatttaagtttgcctttctatatgtctttaaagactaatgatattgaacatcactttcatatgcttatgagtctttggtgaagtgtacatttaatgatcttttttcactgttgctgagaatctttggtttgaattattgaggcaggttctttcagtaagtttgagatataattgccatgtaataaactgcacatgtttttagcatacactttaagtttggacacatacacatatgtgtacatacacaccatcaagataatgaacatacctatcaaaccagatggtttcctcatgcccttttataatttcttcttctcctcacccttccctgcctgtcactctcctgatccactgatttgctttctcttagaatagacgactttatattatgtacagtttttatataaatggaatcatatagtctggcatctttcaggataattttttcag

SEQ ID NO: 22237 - DNA, 1031 bp, Homo sapiens
ccagctttttcttttcagagttgtctttactattttaggtcagaggttggcaaagttttttataaaagaccagattgtagagattttaagctttacatgctatatatagtttctgttgcatattattttttctattacagaccttttaaaatataaaaatagttctcacattccattcaacctatacagttataggctgtgagccacatttggtcttgatgtggctgtaccttgttgacttacagctgttacaggactttcgtatttccatataaagtttagaatcaggttgtcaatttctaccagcaccaccccacacccccaaagtaattcactaagattttgattatcattgtgttgaatctgcagaataattgatgtcttcacaatattgagcatttcaacccatgaacataatatatctctccacttatttaggatttataatttttttctcagtagtatttgtgtttttcggtgtttgggtcttcctaggcattttttctctgacactattgcaaatggtattttaaaaatttcaatttctctgctagttcactactactatagaggaacacagtttttttacatatattcatcttgtatgctgcacccttgttaatttgttctggaagatttatattaacattatacttagaatatattaacattataataagctacataattttatttttttattttttaaattaaaatagagattggggtctcactatgttgaccagtcttgaactcctggcttcaagcgatcctcccatcttggcctcccaaagtgttgggattacaggcgtgagccactgaacctggccacaattttattcttaaatgaaaatagatctttgatatcatcgccagattcatatttgttttttgttttcttgagatggagttttgctcttgctgcccaggctggagtgcagtggtgccatcttggctcactgcaacttccacctcccaggtttaagtgattctcctgcctcagcctcccgagtagctgggattacaggcac

SEQ ID NO: 22238 - DNA, 1047 bp, Homo sapiens
agtcaggagtttgagaccagcctggccaacatggtgaaaccctgtctctactaaaaatacaaaaaaactagccagcatggtggtgtgtgcctgtaattccagctactcaggagtctgaggcaagagaactgattgaacccagggggcagaggttgaagtgagctgagatcatgccactgtgctccagcctccagcctgggtgacagagcaggacttcatctcaaaacaaaaggaattggggcaaattttaaaaatattttagtaatatacataacatgctttttaaaaataacttttccacaatggcaacaaaataatgtggaaagagcgacatattgcatgcttttgcaaatctctttaatgtcttaagagcttaatagatgacagctgaattctcatacttgtttctacattttttgccattagttgctttgattagaaagtttggctttgctgagatacgtagttggaaaagagagaagcattttcaggtaattttggattttctttgatattacaccaaaactcaagaaatggtagtttctgaaagattagttgcaatatggaatgaaatcctgttaaggaattgtttctattctgttacattaaaattcatttgtttgtcttgcactatttttttcttttccttttatttatttatttatttatttttgagacagagtctcgctctgtcgcccaggctggaatgcagtggcgcaatctcggctcactgcaagctctgcctcccaggttcacaccattctcctgcctcagtctcccgagtagctggggctacaggctcccgccaccgcgcccggctaattttttgtatttttaatagagacggggtttcactgtgttagccaagatggtctcaatctcctgacctcgtgatccacctgcctcggcctccgaaagtgttgggattacaggcgtgaggcactgcgcccggcctttttttttttttttttttttgagatggaattttgctcttgttgcccaggctggggtgcaatggtgcgatctccactcactgcagcctccgcc

SEQ ID NO: 22239 - DNA, 1032 bp, Homo sapiens
caccagcgcttttggccacttttataatgtgtcatcagtataaatgtggatatggtgaaaaggtcaagaatgtatttgtgctattataacaatagttttttttttttgtttttttgtttttttgagacagagtgtcgctctgtcacccagggcgtgatctcggctaactgcaagctccgcctcctgtgttcacgccattctcctgcctcagcctcctgagtagctgggactacaggcacccgccaccacgcccagataattttttgtatttttagtagagacggcgtttcactgtgttagccaggatggtctccatctcctgacctcgtgatccgcccgtctcggcctcccaaagtgctgggattacaggcgtgagccaccgcgcccagccataacaatagttttaatctcacagaccgcctgaaagtgttttgggtccctcagcagtttaccaaccctgagaactgctattctgtatcacttaagtttgaagtggtttttttacacaacaataataatcagaaccgaactcatatcccttttttcttcttctttttgattattagtttcttcagtgtactagatggctgactgggaagattccagggtcccaacaggcttcagagttgcgaaggctctagaggtactgtttgctcacatagagcctaggtgttgagggcttagactctggagcccagctgctggaatgtgggccctgcagctgttactgttgagctgtgtgtctggagcccttcccttagcctttcctgagtctcattctccgttggttaaatgatgtcattaataaggcaaatgattttgttgctaaatgccagtggaaactttctaatagtcataactgtcacaaggtctgatgacctcacagttattttgcccttaacggatgccataaaatgcccgaaaagctttcccggggtcaactcacttcattacaactccctgagggagtaccattgttaatgtcttatgtggtctgtgtactatgaaatatccaccaccatctctgatgga

SEQ ID NO: 22240 - DNA, 1028 bp, Homo sapiens
ttgggctccttttccatttttttggaagagtttgagaaggattctttaaatgtttggtagaattcaacggtgaagccaccaagtcctgggcttttctttgatggaagatttttcctcactgatttaatctccttactcattattgatcttgtcaggttttctatttatgattcagtcttagcaggttatatatttctaggaatttattcatttcttctaggttatccaattttttggcatataatttttcattatggtctcatgatcctttatatttctgtggttatcagttgtaatgccttctctttcatttctagttttacttcagtcttgtctattttaatcttaagtagtctggctaaaggtttttgttggtttatcttttcatacaaccaacattcagtttcatcgatcttttctattgtcttcctagtctctcatttatttctgctgcgatctttattattatttccttccttgtactgactttgggcttagtttctttttccttctactgactttgggcttagctgctgctttttctagtaacttgaggtgtaacattaagctggtataagatctttcctactcacccttgctctctttggtttccatttacgtggaatgtcttttcccatctttttactttcgggctacatgcattcttaaagctatagtgagcttcttgtaggcagcatataccttaggtctttcttttttaatccagtcagccactatgtgttttgactagagaacttaatccatttacttttttgtttaaggagatagggtctctgtcacccaggctggagtgcagtggcatgatcatactcccactactctcagattcaagcaatcctcccaccctagcccaccaagtagctgggactactggcagatgccaccacacccaaataatttttttaaattgttttctgtagagatgcggtcttgctgtgttgcctaggctggtctcaaactcctgctctcaagtgatcctcctgcctcagcctcctgagtacatttat

SEQ ID NO: 22241 - DNA, 1071 bp, Homo sapiens
ggagatcgtgccattgcattccagccagggcaacaagagagaaacaccgtctaaaaaaaaaaagtggcatttcagataaatggggcaaaaaatgccatttgtaacaaatggaaggtctaagatagctggttagccatctgagaaaagatgaaattaaatccatacttcacagcatatacaagaataaactccaagtggactagggatctaagtgtaaaaaataaaaccacacacgtatttagggtgtttaagtgatttcttggctgagtaaggaaaaagatgttaccacaaggcggcagtagcacacaagcttcatttgggatgtgctttgacaggttagcagtgggggaggtagcaaacagcaagagaatatccacaggcttctacctgtgggtcgctgctcagaaagggtggaaaggaagaaagactctcagaggagaaggggaatcaaagagggggcttataaataactaaatgatgatattcaccagactggcagcatatcttccagttaaaaagctctgaaggataagtctggccaatatggtgaaactccgtctctactaaaaatacaaaaattagcaggtatggtgccaggtgcctataatcccagctacttgggaggctgaggcaggagaatcgcttgaacccaggagatggaggctgcagtgagctgagattgtgcccctgtactccagcctgggtggcagagcaagaccctgcatcagaaaaaaaaaaaaaaaaaagctctgaaggaccgcaggggtatggggttttcatagccctggagttatcttatctatggctgtcagatattggatataatttcagagaatacaaagcaggcgcactcgaaatggctaaaaataggcttgttcaggctatgtttcaaacaatccagtgtgttaaaattgcagtttggcaggggtaggctattgtgaatactagtgagacaaacattggtgtacaaatatctctgagtccctgctctgaacagttttggatatgccaaagtggaatatctggatcacatggtaattctgtttaatcgttctttttttttcttttttt

SEQ ID NO: 22242 - DNA, 1058 bp, Homo sapiens
atcataataggggtgctcattctcttagggtgctgtattataccctgtgtctgcggactagttcaaaagctcatagaaacagcccttaccaagacctcccacaactctcccccaccctattcagataaacgtttatttctaagcaaccaagaagagcagtgaagccagatcctgttagaaatatatgaagaggaaggactacaaaatcaaaaggggaaaattattagacaaaatgagttgctctacaaaggtccaacttcgttgtcctttgttctgtaacctttgttctgtaaactgcccttcccgcagaaactgtctttcccgccgaccaaaactgcccttcactatcactgtaatccatacccctactctatttgaaactgccaatcgggatcagcttacattgtgtggttcaaccaccagccaatgaggaaaaaacacagaagcaaaagctatgatgcattagggttaaaaaccccttcctttccctgtccaatgtgctcttgagactgctacaggcgcaagcagccaccttctgcagaagtaaaccttgccttgctgagaaatttttcttttgagtgctggtctctctctgtggcaccaagaacttatttctaacatggagtgatttccaagatagatggttaagtgaaaataaaaactgttgccaggcacggtagctcatgcctgtaatcccagcactttgggagtctgaggaggttggattatttgaggtcaggagtttgagaccagcctagccaacatggtgaaatcctgtctcttctaaatatacaaaaaattagccgggcgtggttgtgggtgcctgtaatcccagctacttgggaagctgaggcagaagaattgcttaaacccaggaagcagaggttgcagtgagccgagatcacagcactgcactccagcctgggtgatagagtgagactcggtctcaaaaacaataataataataataataatacaaataaaaaaatgaaaataaaggccaggtgctgtggctcacccctctaatcccagcactttgggaggctgaggcaggtgga

SEQ ID NO: 22243 - DNA, 1050 bp, Homo sapiens
ggctcactgcagcctctacctcccaggtttaagcgattttcctgtctcagccttccaagtagctgggattacaggtgcccaccaccacacccagctaactttttgtatttttagtagagacagggtttcatcgtgttggccaggctggtctcaaactcctgacgtcaagtgagccacctgcttcgtcctctcaaagtgctgggattacaggtgtgagccactgcacccagccagaaattcttttgtaaagttttggttctctccaaataaaaatggcctggtccaaaatgggcttccttagccctgggctgagacctcaggccacctgacccggctgtgaatggatgagaggggtggggacggaagtcagagtcaggattccttaacacctttccttcagatgaaatccacgatgggatgaacctggagctttattatcaatagatgagaatcctcatcttcctgccccgctttcctctcccatcctcatcccccacactgggatagatgcttgtttgtaaaaactcaccttaataaagacttagatgttgctttgttgttgtctctgtatgacagctgtctagtgatgggtggatcagtcgctgtttggtcatcactgcaccatcagcatgcagctgctaaaataagagctctgatcaactggatccatgagggcagagtagaccagcaggctgggagtctgtgtgggagcccagagagagctctggggtttgctgtgggtgtctgaaggtcaagagactctgggattattgtcaccctaataaaccaaagaacctccggctaatgacagtagatgtaattgttaggaattcagattctgaaatcacacagaccatgtgtggaatgtcagctctgccaccaagcagctgagtgacactaggcaaaattttttaacctctgtaagcctttacttccttatccactggaaataattgcgtttacttcatgtctgctttcaatcggcatattgtgaggaggtataaatgagtttaaagcatgtttaaacatccacagttcctggcatttttt

SEQ ID NO: 22244 - DNA, 1052 bp, Homo sapiens
ccagtaacagggcatgtttttctctgtgtcaagcgctttaagttctctctgaattgccgcaactctgggagccaggtagttattacttccaccttaccagcaaggaaactgaggtcagaaaactgaaggaactcgtccaagatcattcatttcaggggccgggggttggattaggacctaggcagtttgcctacaaatccccctccccgtgtcactgcaaactcctgaggagcaggcccagcatctgtgggcaggtcccgagtcactctgctgcctctagagcccatagcaatcgcatttgcaataataattctccttggttgagtgccaggttctggtgaactgtttggatacatggactctcctcattaaccccatgaggtttgatctccttattctctattccccatttttcagatgagaaaactgaggtgcagggagattagagcccattgccaaggttttagagtgagtcagtagctcagctgcatttgcacctggaacccgcgctctcgcccaccctgctctagccctggcctgtggctgggacctccagcataaaccggatgctctgcccagctctgggcccatttctgctgtttctgctcagttcaaccctgatggcttcctttatgggtgacactccatgtcacccaggcgaactgtcagcctttggagtggcacccagtagggtctttacttccagtttcttgttcacagtcttcactccttcatacccctcactccctgggtaacatcgggccaccagtaatgctggttcctagctctgcaacaccatgcacggtgtagtagctaagagcagagctttcgggtgtgaagtacctgagtacagttcctgccttcccctgtgtgtgcctggaacagagtaaacactcaggaagcgttacccactgctgccattcccagagatgcaaaaggtgaggtctccgttttgccatctatacaatagagataataaaggctatcccactcttaatgtgtgccagtttctgtcctaggcattttgtagatgtgtgagcttatttagtgct

SEQ ID NO: 22245 - DNA, 1030 bp, Homo sapiens
aataaaggccaagcctcataaacaatcacctgtgcccgctcccatctggctggcttcgggagcaatcgctcattcgcctgctgcctgcctgccggagcatttgtcattaggaaggtttaatgggtttcctctcagctccagagggctggggagagccggctgcatggatacaccgccaggcagaatgttctcccatcgcctggtggaggggggttgggagtgaggcagccatgccaccattcacaccaacagttggatgtggggttggggaagtgactgcacccctcctggaacagtagaggccctgggtctggaaggatcggaaattagtggctggggcccagagggtttgctgagttccactccagggtgaagaatgggctttgtgtcctgaccatcagcagcagggcccagggaaggctgtgcatcgttctgtgtgggagccgctgcccccacccgtgtgtatgtgtgtctgcgtttgcccaagaatgtgtggggccatgtgactggtcgtctctctgtcctgtgcattttgggagtcctccggttctgagagtcctccggttctgagtgtgaccacctgcccctccaggtacccccttcccttgtctgtctgtgcagtggccaaaacccaaatgagaatgtcgctgttaggtaaacatgcctccagagcccacttcggggccggtgattcattattaagcagctgcgcattccctcacctcccacccaccccctcaccccctcctgtctagaaccagggcataaatcccaggcctttaggatggtgacagtgtagtcttccctagtgccacttacaggcacctcccaggccagacccgccccagggggtcagtctctacgtgcccctggcttctgtggccgctgggcagagctggagcaggtcaccttggggtaaacggtattactgccccaggacaggagttggcttcgctgtgcccacgtccatgatgagaggggaagtcagtgagttagcagtggatagccgaagacgcacacagattgatcc

SEQ ID NO: 22246 - DNA, 1067 bp, Homo sapiens
gtctgggcgaccggaggagaccgtgttagaaaaaaaaagactagaatctggaggcagcaaagcagggttggaaactgacttctccccagtatctgatgcaagttacttaacctctctgggcctgagttcgctcatttgtcaatgggaagatgcgctgtgagcaagagacagagttagaactcaaatctgcgtccgactgactctaaaggctaagatccttttgctcctctgggcttgttgaaagggtcagatgcaagacagaccataacaggatctgcaccgtcagcttatagttgtcacaacaagggataagctatgttttctttttttctttttgtcatttccaggttcgtaagaagaactcgctgaaggactgcgtggcagtggctgggcccctcggggtcacacactttctgatcctgagcaaaacagagaccaatgtctactttgtgagtagacgccctcacccttcatctcccccagacccccccttcccctatctctcatgatgaacacatatgcctctgagctgctgtgatttctggcttcaaagtaaacgctctgaagaagagatggggcaaaggtgcctactccgggcacctctgctagacccctccagagtcactgatcttttcttctcctgcagaagctgatgcgcctcccaggaggccccaccttgaccttccaggtcaagaaggtgagaggggtggaggtggtacaaagccatgtggggtgggagctggacttggggttgtccgcagccatgtgtggttggtggtcaccccctcctctctcctgtcctacagtactcgctggtgcgtgatgtggtctcctcactgcgccggcaccgcatgcacgagcagcagtttgcccacccacccctcctggtactcaacagctttggcccccatggtatgcatgtgaagctcatggccaccatgttccagaacctgttcccctccatcaacgtgcacaaggtgggtctggcctggcgaggtggcaggtatgggggggtgcagcggatagaggtgccacaggccctcagatggattgctcactcctcccag

SEQ ID NO: 22247 - DNA, 1070 bp, Homo sapiens
tttactttttttttaagagacggggtctccgtacgttggtcttgaactcctgggcacaagcaatcctgcagcctccgcttcccgagtagctgagactacaggcgtgcaccaccacatccaactcatttttccatctactttttgtagacatggagactcgccgtgttgcccaggctggttttgaactcctgggctcaggcagtcccaccacttcagcctctggagtagctaaaactgcaggtgcgagctggaagcagcatttctagccagtgccacagtccacgaacagtgtgtgtatcccccaaagcccccacttccccaaactttgccatgagtctactggactatgctctcttcctccccttccaggtgaacctgaacaccatcaagcgctgcctcctcatcgactacaaccccgactcccaggagctggacttccgccactagtgagtgtcccagcaggatgggagacgagggggtgccgggtgggggcctccacatgcggctgatgacagcacttctgctgagacgctgtgattgctctgtccaaagtaaacgccctgacgcactgtgggaagggtgagatgggcaccgccagccccatcacgtgccccctgaccacccccttgccgtccactcatgttcctgcagtagcatcaaagttgttcctgtgggcgcgagtcgcgggatgaagaagctgctccaggagaagttccccaacatgagccgcctgcaggacatcagcgagctgctggccacgtgaggagggcatagggcgggaggccactgcggcccggggaccccagaacaggaccgggagcctgagctcccccactgagccctgttatgtcctacacacaggggcgcggggctgtcggagagcgaggcagagcctgacggcgaccacaacatcacagagctgcctcaggctgtcgctggccgtggcaacatgcgggcccagcagagtgcagtgcggctcaccgaggtgaggcccagggcagggggacccccgggctccaccagtcccaacggtgggctgacgcttcttcctcgtcccctcagatcggccc

SEQ ID NO: 22248 - DNA, 1048 bp, Homo sapiens
aaggagtgagtgcccctgtgctgctgtgccctgggcactgtggtgagcactggcaccagtaatgggtaagcaggcccccccatcctcccgaaggagggagatttttctcaccgtcatcaggtggcgcagggtatgggggaaaataacgcagggaagggagagtggaggcacgagggctgctgtcaacagtggttagggtggccttggggcctctcgcaggcaggaccacggacgtgggaagaggagcctcaagaatgtctgggtgtggctgggcacggtggctcacacttgtaatctcagcactttgggaggctgaggcgggcagatctgaggtcaggaattcgagacctcttggccaacatggggaaaccccatctctactaaaaatgcaaaatttaaaattaaaccaggcgtggtggtgggtgcctgtagtcccaaatactcaggaagctgaggcaggagaatcacttgaacccgggaggcagaggttgcagtgagctgaagtcacatcattgcactccagcctgggtgatgagagtgagactctgtctcaaaaaaaaaagtctgggtgcgaaggtaccaaggcacaagtctgcaagagcagccaggaagcctgggtgggctggtgcgagggagtgagtcgcggagcacagagggtggcactggggggtatggcgggcgggagcgctcttgggggaccttgtggggtgagtctggctttttggcggcaactccctggccaagtgtgagcacctggaagcaaaaggatggggcaggactccagcgctcgcgggtgctctctggtggccacggggagaagaggctttgggcggcggcgggtgccaaggtcagggcagagtgggggctggacccccacggggctttggacggcacagatctgaagtggagccggcaggccttgctggggctggactttggggaggaggcctctagtggggccaggtgtggtgggggagtagggtggccgctgtctgtgttaccagtggaccttgagctccaagactgcctggcccgcctaagctggtcc

SEQ ID NO: 22249 - DNA, 1048 bp, Homo sapiens; identical to SEQ ID NO: 22248

SEQ ID NO: 22250 - DNA, 1048 bp, Homo sapiens; identical to SEQ ID NO: 22248

SEQ ID NO: 22251 - DNA, 1048 bp, Homo sapiens; identical to SEQ ID NO: 22248

SEQ ID NO: 22252 - DNA, 1048 bp, Homo sapiens; identical to SEQ ID NO: 22248

SEQ ID NO: 22253 - DNA, 1033 bp, Homo sapiens
caccaccatgcaggctaatttttgtatttttagtagagatggagtttcaccatgttggtcaggctggtctcaaactcctgacctcaaggaacctacctgccttggcctcccaaagtgctgggattacaggcgtgagccaccgtgcccagctcattttcagttgttttctgatcactcactgatgtgggcattgtggtgggtgagaggatatagcagggaccacgaggacaaaacaggcaaggtccggctgtgtgcaagtggctcaggcctgtaatcccagcactggaagctgaggtgggtgggttgcttggggccaggaaagaccagcctgggaaacagcaagacccagtctctaccccttcccccacaaccccaagaaaaagatgggcaaagtccctattctaatgaaggtcacagtgtcatgggaggagaagtgaaggtgagtcagatggtcatacgtaatgtgtaattatgagcatgtcccagagaatgggacgttcaaccttgggtctactgtagaagctaaccagatcaaggaggcagtggggctagtgtggagataacaggaacagggtgtgcaaaggccctgtggcagggaccacaaggaagccagtgttgccacagaggccagtgggagcagtggggaggagtctgggttttgtgccaagaacattgaagaatccattaccagtcagggtcttatccatccaccccagaggtctggccagtcctccccctgctcacaccttccctggctccccatcaccctaggaataaagtcatcagtctgctattctgagttcttcctgatttccttgccctgctcctctttcctgattctccctgtctgtgtcatttcccatggccctccctccttgtggctacaaccacattaaaattgttcaaaaaataggccggcacggtggctcacacctgtaatctcagcactttgggaggccaaggcaggtggatcacttgaggccaggagttccaaaccagcctagtcaacgtggcaaaaccccatctctactga

SEQ ID NO: 22254 - DNA, 1032 bp, Homo sapiens
gatctgcccggctccctgacacctgcctcgtggacctgacccccctcctctttgtgcctccagagctatgccaagaccaagacgagagccgaggtgcggggcggtggccggaagccttggccgcagaaaggcactgggcgggcccggcatggcagcatccgctctccgctctggcgaggaggtaacaggacagggtggagggggcggggaggggtgggggggccagggaagggcctgggtgtttactcacacacagctgcgcacatctggcatggtattatgtcagccctgttccctccacctcatggaaccacctgggctggtgacatcggaactgaggcccttggacctcactacccatataaggggacagagatctgggagccatccactcctccctctcgcatgccctgtctcttcagcctgtggccacagcccctcttgaccccacctcctgtcaccctctcctgacccacacttcccacagcacccagagagctcttctaaatcgtggaacctgaactccggacctcggcctttgtgtggaacctgaactcctgaccttgtcattgtgggccctggtggctgcacacctttccccctcatcccctcctttccctctctgaccaggcagagatgactctctcttgttttttcggttgtgtttgtttttaactttttattttcttgaatgctaacaagatgactcagggtggtgccagccaccccatcacctgtttacctggccagctctcctcacctttcagggttctgggccacacctcctccaggaagccccccttgatctcctttccttccacatcccccggagctaccctgatttcttctacagctgagcctcttttctgccctgccggaatgtgaatggcatgagggcagggaccatgtctgttgtcttctctgctgcatttccaaggcccaggcgagggcagacaccaacacatggtgcttgcaggggtctccctgactgttgttgctcccagatcatactgcttgctccaccggagcatg

SEQ ID NO: 22255 - DNA, 1053 bp, Homo sapiens
gctggagaggggcgcctgatgactcctcggactttctcagcccgaggaggactggacctgccctgggggtgtctaaatcgggggtggtatggccctccccttgcagggttaaacgtggaggggagactgtggccctgccttgggagctggggtttccccgcctcggcaacagccttctccttgtcttccacctcctgccattcgcagcgaggactcgcgcgagcgcgcgcgcgcacacacacacacacacacacacacacgcacacacacacacacacacactttggaatcacccggaccccctcaaaacgggtctcggctccccaccccgctggccgctgggtgtcgctagagtctagcccacggcgcgtattcctggccccgcgcttggtggggggaatcgtggaggggtggaagggggctttccttgtcgtcacagtctggggccacgcatagcccctccccgttcgtcttggggtacgcttcctccgccggggctctaaggactccattactctaagcatgcagggcctcgaccacctcacacttccatgcatcccaatccacgctttgataccaggataataggccgtgttgcagccttgggccaggattatctcagattaaagggtgctccctcgggggtcaggctggataggaggagctccagccactccggtgaggggcgcctcttcctagtctcccctggagccgacgttggaggcagtgcctggagagagcgagcgaagttctccagaagggggaggattccccggtgcatggagcgggaagggccatcggacaaaaacgtcctcccgctgccgcccttccccctcgcgcttcattcaaacccgcgagtgggcgggcaggggcgggggagtccccatctcctacccctccctcttcccctccaccctggcagtccagcacatcagtggccgtcacggcccgggcacgcgcgcgcacggacccacaccccggcggctctcacaatcgcacacacacatacacacacacaccagcaaacaaagggtctggacacccccgtcccct

SEQ ID NO: 22256 - DNA, 1053 bp, Homo sapiens
cttagccgagtcttcctggagctgagaggtgcctaattgtttgtggtttttctgattgaacttgtttggtgcctctaggcaaaaattcctttggctccttctagtattttcagggtcttgaaggcccatattcctgagcatgaggaatctaagtctgttattttttcctaaattttcatgttaaataccacgttgacaaaggacagctgctaatattttgatcacacagatacagacggtgctccctggttaaggcctccaggtaggggacaggtagagtcagtgatggggaagaagccttctgtaagtccctttcctttgggtagacagtagattaccctttaggctttagcaagatgtgggggttagaagtcttctattcttggaaaagcctttagtcgttttctttgggctggggcctcttctcttagggactgctgtcaccctttctcggtttcttttgattacctttcatggccccagaggagtgatcccttcccttatttatacctcttggacttgtcatcctgctacattttgtcagcaagttaattcaccttgtgcagttttgaaagatgtgtaagtgttaacatttagtattagcatttatggcccaggaaattgtgaccttaatatttgaatcttgcttttattaaacctttacaggaactaggattttgtagggttttttttttttttttttttttgagttagagtttagctcttgttgcccaggctggagtgcaatggcgcgatctcggctcaccgcaacctccacctcccgagttcaagcgattctcctgcctcagcctcccgagtagctggaattacaggcatgctccactacacctagctaattttgcatttttactagagatggggcttctccatgttggtcaggctggtctcgaactccgaacctcaggtgatccaccggcctcggtctcccagagttgtgggattacaggcgtgagccaccatgcccagccttctaggttctgtttattggatgctttttatcttaacaaagtcctggcagagaaagatttgatt

SEQ ID NO: 22257 - DNA, 1028 bp, Homo sapiens
tcagcctcctgagtagctgggattacagacgcctgccaccacgcccagctaatttttgtatttttggtagaggtggggtttcaccatgtgggtaggctggtctcgaacccctgacctcgtgatccacccgcctcagcctcccaaagtgctgggatcacaggcgtgagccactgctcccgtccaatttttttgtatttttagtagagaggggtttcaacgtgttagccaggatgctatcgatctcctgacctcatgatccaccagcctcagcctcccaaagtgctgggattacaggtgtgtgccactgtgcctgatagtggggtgattttctacttctaactctctaatgtgtcacatggctttttttaatagattgtctgtatcaactgggggtgaactttagtcttttaacaattttcagactatgaagtttggatgtaaacacctctaatgtgggaagttagttttttttaaagtatctgtatggagttatggatatatataaatttaatgtgttgaatctgttttattttagtaacatcttttgaaaatgttcaaacatagaaaaaagggtgatacaattttagtgaacacttaggccgggggcagtggctcactgcctgtaatcccagcactttgggaggccgaggtgggcagatcatttgaggtcaggagtttgagaccagcctggccaacatgttgaaacccccgtctctactaaaaatacaaaagttagcctggcatggtggtaggtgcctgtaatcccagctatccgggaagctgaggcaggagaatcacttgaacctgggaggcggaggttgcagtgagccgagatcgcgccactccgctccagcctgggcaacacagtgagagtccgtttcaaaaataataataataaaaaatttaagctgggcgcagtggctcaacgcctttgtaattccagcactttgggaggccgaggcaggcagatcacttgaggtcaggagttcgagaccagcctgacaaatgtgatgaaaccccgtctctac

SEQ ID NO: 22258 - DNA, 1045 bp, Homo sapiens
tgttgctaatgcaagaaggaagctagtggctgggcaagtggggtttcaggtccaagtctgtgcagaagctttccttgggcgatcgatcgagtggcttgccccatggtgtgagtctcaggcatgttgagccactgagcccagggactggctttctgcccttttcatcccatgccccctcacactccttccctcctgcatccctaccctgacatgaagcctttgacctcaccatgtcctgttgctgggctttgcaggggcatcatttgactcctaggggttttttgttttgttttgttttaaatgagacagagttttgctcttgtcacccaggctggagtgcaatggtgtgatctcgactcaccgtaacctccgcctcccaggttcaagcaattctcaggcctcagcctcctgaatagctaggattacaagcatgtgctaccacacccgactcattttttgtatatttaatagagacagggtttcaccatgttggccaggctgatcttgaactcgcgacctcaggtgatgcctctgcctcggcctccctaaagtgttgggattacaggcgtgagccaccgcgcctggtgacccctaggttttatttatttatttattgagacggagtctcgctctgtcacccagggtggagtgcagtggcgcgatctcagctcactgcaacctctgcctcccgggttcaagtgattcttctgcctcagcctcctgagtagctgagacaacaggcatgtgccaccacacccggctaattttttgtatttttagtaaagatggggtttcacagtgttagccaggatggtctcgatttcttgacctcgtgatctgcctgccttggcctcccaaagtgctgggattacaggcatgagccaccgcacctggccggttttatttatttattcatttattttttttgaggtggagactctatttgccacgcaggagtgcagtggcgcaatctcagctcactgcaacctctgcctcccggtttcacgctgttctgcctcagcctccctagtagctgggatgacag

SEQ ID NO: 22259 - DNA, 1050 bp, Homo sapiens
ccggctaatttttgtatttttagtagagatggggttttacagcgttggccaggctggtcttgaactcctgacctcaagtgatccacccatctcagcctcccgaagtggcaggattacaggcgtgagccactgtgcctagcatgatgtgaacatttctacctgtagtgttttttggagagctgttaatattttcatacttgtaaaaatgggcatatttatgtaaaggaagataaaagaagtaaaataccatctgagtggcttgtgggcctgaagtcagttctggcttctagaaaccatctgttttcatttttagggtgttacgtagttaatgccttggcttagcagtggttacttggaaataaagatgtgtcctgctgtgttgacaggcccttcatgaggcagcacacatgtcattcttgctactgtgtacctagctgctgaaatgaatcctataaattatatgaaactaaaaagattttctgatcttatagagttgaagtattgataacaccaaggaactctatcacaatttgaaaagataagcaaaagtttgatttccagacactacagaagaagtaaaaatggtaagtttgtttttgatcacagatactgtttcttcactcatgtacagagatgtttgtagccttttccaaagcatttgcttccattaccatttttattagcccttttggattataaagcaatattatctattctgtattccattctgatagtgtaggaacgaagtcagtgccccattactcccactgcccagagacaacagcttttcagtttgcttgtccctccttggttcttcagttgtgctcctgcaggctttgcttttacacacgagcgatatagcatcattctgaattgtgcagcttaaaagatgaacgttgggctgcttgctctctttacatcatttttaacttaattctcacatccctagcgtccaatgcgaatttttgtgaatgatgaccgccatgtgatggcaaagcattcttccgtttatccaacacaagaggagctggaggcagtccagaacatggt

SEQ ID NO: 22260 - DNA, 1031 bp, Homo sapiens
aagtcaggccctcagccagatgtgctcttcatgtgtgttatttcatcctcctctaagtgggacagatgatgtgacagagctgcagggcagctgaggagtggatcccaagacccacggctgggctgtttggaggcatcagaacctctgccagctgttgcctcctcaggacacagtccccctgaatttatttataggataagcaaaaaagaagtgtacaatcatctataaatctttgacagagtcttgctctgtcatccaggctggagtgcagtggcctgatctggggtcactgcaacctctgcctccctggctcaagtgtttctcccacctcagcttcccaagtagctgggactacaggtgtgtgctaccacacccagctattttttgtattgtctgtgtgtatgtgtgtgtgtagatacgaggttttcccatgttgcctaggcagttcttgaactcttgatgacaggcctgagccaccacagcctttgaatctttgaatcttattccttggaaagaaaaacctgatttactttcacaatgcagatttgtgttctttcacatgggactgacgattttgggttcaggacaaagatcaggattaaaatacggagctaatgtaaatgcattagatacttctgcggagctattgtagatgaagctgtgaaatttttctagtgacaattttctttttttttctcctgaaggtacatcagcatagaggtaattccttttcttttttgaaacagtcttgctctgtcacccaggctggagtgctgtggtgcgatgttggcttactgcagcctccgcctcctgggttcaagtgaatctcctgcttcagcctcctgagtagctgggattatgggtgcccgctgccatgtccagctaatttttgcatttttagtagagaccatgttggccaggctggtctcgaactcctgacctcaggtattatgcccgtctctgcctcccaatagttctgggattacaggcgtgagccactgtgtccggcccatagtggtaattttttggca

SEQ ID NO: 22261 - DNA, 1051 bp, Homo sapiens
gccaccacgcccagctaattttttgtatttttcgtagcatctctggtctttaccaggtgaagtttcatctgtgttagccaagatggtctcgatctcctgacctttttttttttttttttttttttttttaagggaggcaaggtctcttgctctgttgcccaggcttgggtacagtggtgcaatcacagctcactgcagcctcaagcaatcctcccacctcagcctcctgagtatctgggaccgcaagcatgtgccaccatgtctggctaatttttaaaattttttgtacatacgaggtttcattatgttgtcctggctggttttgagctcctggccttaagctatttgcttgcctcagcctcccaaagtgctgggattacaggcatgtgccattgagcctggccaataattattccttaaagatgaaaataataggtatttttaaaatcattttcagtggttccttaagaggggtgaatcactctcctcccctgataacatttggtagtgtctgttgacaatgcggtgttggggtgctgtggtgctgtcagcacctgataggtgaagaccagagatgaacaccctatcatgtgcagagtagtccccccaaccaagaattatccagcccagaaggtcagttgtactgaggttgagaaatcctgtttcagatttttcaatgtatttattctcctcccaacatatttacttaacttccttcagcttgaattttcttctttctttgttttgttttttttttttttttttttttgagactgtgtcttgctctgtcccccaggctggagtgcagtggcacagtctcagctcactgtagcctccgcctccccgcctcagcctcccaagtagctgggattacagggcctgccaccgtgccgggctattttttatatttttagtaaagacaggatttcacaatattggtcaggctggtctcgaactcctgacctcaagtgacccacccacctcggcctctcaaagtgctgggattacaggtgcgagccactaccctcagccaaaagcttgaattttcttt

SEQ ID NO: 22262 - DNA, 1025 bp, Homo sapiens
ttgctgcagatgccttgggatggctgttgtgtgatgcagagagggagttcatttcctctccctcggcctttttaaattttttcctattgaacattttagcatagctaatttattgggagaacatggggaggaggcaagggaagaggattagaagataggctccacctatctctcccctccctcatgagattattccttttagaataactccccacttttgtttttatgtttgttttattttttctttttctttcttttttctttttctttttatttttggagggggcctccaatttttacaatttcctcacagggcagagttgaatgtgctctagtttctccttccctggtccagggtggagatgaattcagcttctgggaaactcagctgccctttagaaagctgccacatcccctttccacctgacagaaaccccttggtcaaactgtgccttgtcttcttattccatccatgaatagaaacgctatcagtcaacgaccccccggacgttctggacaggcagaaatgccttgctgccttggcgtccctccgacacgccaagtggttccaggtttgcattttgttcttctatttgtcttttggtagagaattcctaagttttaacttggctaactgtcaccataaagattccttaacattgacgatagccgtgccgagcttagcacctgcagctgcgcaggtcctaaaggagtgcacctcaacaaattcgaccccaaaagaggctgagactgagttggtgggctgctgctgctgctgctgctttgtgttaagagtaacactctcttgtacacgtagtgacattgcggctggccacagccttggtggtcgccagtgttgactgtttacccttggcaaagcagcaacctgacacttgtgtcgttcatgttgacttgtgccctgggcggtgcctcagactgaagagcctgtgttttgttcccctaggccagagccaacgggctgaagtcttgtgtcattgtgatccgggtcttgagggacctgtgca

SEQ ID NO: 22263 - DNA, 1050 bp, Homo sapiens
tgtctccacccctagtgcggcctttccctcagatgccactgccgaggtgagcacatggtgggcgctgggagtgactgcctggacagagcaggcagccatgtgtcctgtcagtgaggtggttactggtccttgttaatttgccccaaaaagtggacctttcaggccagaagtccgcacaggaagctgggtgctgccctccgagccgtgtcggggagggccttgtggatgttgtcccagcatcctataggctacactggggtggccttgggttgataacgtgctgttcagaggggaggcacaggaagggggcacattgctggaaggccctcactagagtcagtggagactctggcaagggctggcagtgtatgaagagcagaggccctgcctcagtcctgccactcctcccatgtgactggaatgcccatagctgagtttgtcggtcttcttttctgttttccctgagaacgtaaaacagcaggggccgatcctgacaaagcacggcaagaacccagtcatggagctgaacgagaagaggcgtgggctcaagtacgagctcatctccgagaccgggggcagccacgacaagcgcttcgtcatggaggtgcgcagcctgaagctgcctgctggggcagtcccatggggaggcctggggtccccctgcccctggagggaggcactgagtcatctccatctgcactttccaggtcgaagtggatggacagaagttccaaggtgctggttccaacaaaaaggtggcgaaggcctacgctgctcttgctgccctagaaaagcttttccctgacacccctctcgcccttgatgccaacaaaaagaagagagccccagtacccgtcagagggggaccgaaatttgctgctaaggtgagcagtggcccttgaacctccttgcccaggcatgggttcttctgcaatgtgagcacgaagggaatgtcacttccctgtgttctcttctagccacataaccctggcttcggcatgggaggccccatgcacaacgaagtgcccccaccccccaaccttcgagggc

SEQ ID NO: 22264 - DNA, 1026 bp, Homo sapiens
tttacagcaggttttgtatgaatttttaaccttttaacaaactcccaaatctggttgatgcctttgacagtgatgaaaacgatttcaccacatctgaatccagagaaaccggctttttttcttattgcgagcatgttaaaacgttgggaacatgtggggaattgtatattgcgctgaattaacttctcccgcctcttgtaatgctctggtgggttcttgtttgggaatgcgatattttgtggctggtttagctagagagtgaactctcaaaggtatcaaaactgtgcttccattattagtgcaagaaacagacaggctttaaggggtagatgacgtgaaattttgcaagtcttaattacagctgcagatgcatgggattctggatttttttgttgctttttagtttaatgggactttaaaagtaattgaggagaaagaaccgtgatgttccctgtttctccagtaaaggactggcttttgcttgggcagaggtggtgctgctgggtgtgcagctgccacagactccaaaggcgtagaagtttgtgccaacacacggagtcattctggctctctgctgaggcccctgttttctggcaggtgccctccttggaaactggttttggctctgatcagcggttctttttgcagcaaagcctgcatctgtgttgacttgcaagattttgcgtttattcaggcaaaaactggtcaaaatggttactacatgatttgttcccagaggtttgaaacattcagtgaaactttttaaaactttgattgcatgatgtattttttttttagaaagttattgtttgagaataatgtctttttataccaggaaaatagttatcctgaatgacgttgaaaactccccctcccctttatttttttttaatcaatacatgtgaaagtaacaagccctcggcccttgcgtcttcattcattcccggcttcaggcggggcgaggtggtgtgctcagtgcaggacactggggaagctggggctgtggggctgtggggtgtgggtcct

SEQ ID NO: 22265 - DNA, 1051 bp, Homo sapiens
gagccacttggaaatgacatcttctgtttccagtgactttccttttgggcaaagacaaattgcatcttgaaaaggccatacatggccgggcatggtgactcacacctgtaatcccagcattttgggaggccgaggcaggcagatcacaaggttgggagtttgagaccagcctggccaacatagtgaatcccgatctctactaaaaatacaaaaattagccaggtgtggtggcgcatgcctttagtcccagctatttgggaggctgaggcaggagaatcacttgaacccaggaggaggaacttgcagtaagcggagatcacgccattgcactccagcctgggggacagagtgagactccatctcaaaaaaaaaaaaaaaaggaaaaaaggaaaggccatgcaaggctcggttagggtggtctgcagtgctgggcctgctggaattggtacagtccagagggatctgtgggaatatggaaggcttggttctgccacacaccaaaaaagtgacctcacttctctgggcctcagtttcctcatctggaaaatgggaacatggtggtctctgcctactgggagtggactgagaatcacgtagcaaattgttgtgaaacaggcagcatttgtgatctcgttggttggcttttgtctccttttatctgggatcaggactctgatgacaggtgtacgtttcttttctcttgctctgtcccccagactggagtacagtggcgtaatcatggctcactgcagcctccaactcctgggttcaggtggtcctctcacctgagtctcctgagtagctgggactataggcatgagccaccacacctggctaattacaaaaaaatttttttggcagggagcgatggctcacacttgtattcccagcacttggggaggccgaggcgggcggatcacggggtcaagagattgagaccatcctggccaacatggtgaaaccctgtctctactaaaaatccaaaaattaggtgggtgtggtggctctcacctgtagtcccagctgctcgggaggctgaggcaggagaatc

SEQ ID NO: 22266 - DNA, 1051 bp, Homo sapiens
aggtgcagaggcctcgcacacacccggcccgctgagtgccccctgcggaccggaaaggaccagtaggcacgtgagagttaggacgctgcccgtggaatgccgacttttctaaatttgaattacgcaagtagagcgtggagacagtgttcttggaaaaagggaaaccattacagatgaggaagagcacactgcccagcccgtcccttcctccagctctacctgggagcaccactgtcacttcagggtatgtctagccagacccctctggtgtttctgtacttaggtacatgctggtacctatagagaatacgtggcaccattatgggtggttattttttttttttttggaacaggtctcactctgtcacccaggctggagtgcagtggcacagtcatggctcgctgcagccttgacatcctgtgctcaagccatcctcctacctcagcctcctgagtacctgggacaacaaccacatgccaccacgcccaactaatgtttataatcttttgtacagatggggtttctctatgttgccaaggctggtctcaaactcctgggctcatgcgatcctttcacgttggccccccaaagtactgggattgtagacatgagccacctctcccagccacgtgcatatatttgttgaatgaaagtagctaaaggctggaagtggtgactcacgcctgtaatcccagcactatgggaggccgaggcaacatggcttgagctcaggagtttgagaccagcctgggcaacatggtgagacctcgtctctaccaaaaatacaaaaattagcaggcgtggtggtgcatgcctgtactcttagctacttggaatcccgaggtgcgaggatcccttgagctagggtagcggtggaacttgcagtgagcccacactgtgccattgcactgcagcgtgggtgacagagcgagaccctgtctcaaaaaaaaaaaagtagctaaaaaccagaatggagtgaatttcactgcacagtcatggaggggaccaggcagaggacagccctgggtcttggttttggagactcacagc

SEQ ID NO: 22267 - DNA, 1084 bp, Homo sapiens
ttgtatttttttttagacggggtttcaccgtgttagccaggatggtctcgatctcctgacctcatgatctgcccgcctctgcctcccagagtgctgggattacaggcgtaagccacctcgtccagccatcttctgtgaatcttatcaggagtataggataccaacaagactgataaattattgacagtgataactgatgatgctgaccttgatctcttggctgaggtaggcttgctaggtttccccactggaaagttactagttttcttcttttcatactctatcctttgggatcatggaaaattttatttttattttatttttggagagtctcgctctgtcatctaggctggagtgcaatggtgtgatattggctcactgcgacctccgcctcccggattcaagcgattctcctgcctcagccgcttgagcagctgagactacaggcgcccaccaccacgcccggctaatttttttttttcaagagatggggtctcgctgtgttgctcaggctagtctcaaactcctagactcatgtaataatcctcttgcctctggctcccaaagtgctgggattacaggcattaaccactgtgcccggccttttctggcactattgaaaagaccatcctttctccctaaagttgcttttgtctggaattagttggccatatttgtgtgggtccaacctgaactgtctgttctgtgacgttgatgtatggctctgtcctttctccaaaaccacatatctttcttctctttttagatagagatgggggctgggcacagtggctgacgcctgtaatcctaacactttggaggcaggtggatcacttgaggtcaggagtttgaaactggcctggccaacatggtgaaactccgtctctactaaaaatacaaaaaaattagctgggcgtggtggtgggtgcctgtaatcccagctaattgggagactgaggcaggagaatcacttgaacacgggaggtggaggttgcagtgagccaagatcgcgctattgcactccagcctgggcaacagagtgagactctgtctcaaaaaaaaaaaaaaagaaaaaaagaaaaaa

SEQ ID NO: 22268 - DNA, 1034 bp, Homo sapiens
tatgtgtggattttttcctgttctttccttccctgatctcagtgtatttctattcttcccacccgaggctgacatgaggtgggcgtatatcccagctggaaaccccctcgggcctccttgggaaggatcttgggtcagaagctagacccgggagaggtaagggtctccgtgccccttccctgctaatctgcaacatcagctctgggcgttcaacactcagtttgtgttaatgtcttcttgcggcccttttaaatactctcacactgggaaggcagctgacacacacacccccattctacagatggggaaactgaggcttagccatgctgcctgcctttccaatgggccccagatctgggacctgcatccaggcagatctgacctcaacgccagctctcagcttggcctcccaagactcctcactttcgtcctctggccccgcccaacctggcaagaaggcgtgtctccagtgagagacagcagccgatgggcccaccacctcttctttatgagctctgctatttcgtacgccaccgatgggccaatgggctgccacctctgggttcaggcgtccaatcagctgtgccaggaatgggcagccccaaagtcctgagagtcactatagaaatcagtgttggtagttttctgtttctcattgagcaggatggggacagatgtgcaaactgcatttttattttattttattttgagacggagtctcactctgccacccaagctggagtacagtggcgggtgatcttggctcactgccacctccgccttccaagttcaagcaattctcatgcctcagcctcctgagcatctacaggcatgagctaccacgcccggctaattttttgtgtttttagtagagacagagcttcaccatgttggccaggctggtctggaactcctgagctcaaatgatctgcccgcctctgcctcccaaagtgctgggattacaggcgtgagccactgggcccggccacaaactgcatttttaatgagtccctggtgatgctgccagtctctgg

SEQ ID NO: 22269 - DNA, 1065 bp, Homo sapiens
gcccaggctggagtgcagtggcgccatctcagctcactgcaagctccgcctcccgggttcacaccatgctcctgtctcagcctccggcgtagctgggactacaggcgcccgccacctcgcccggctaatttttttgtatgcttagtagagacggggtttcaccgtgttagccaggatggtctcgatctcctgacctcgtgatccgcccacctcggcctcccaaagtgctgggattacaggcgtgagccaccacgcccggcctgttttttcttaatggactctctctgcgccagcacacgagaacaggcatgcagatcggctctgcccagcacagggcctggcgccgagcaggtgctccgcatgcacggccgagtgaacgagctcaaagggctggtgctgtgccccttcttgcctactgggcgggaagtgatgggggttactttaccaagcatcttcccctggtgagcctggtccatcactctgccattccatctgcagccttgtatctagagagcagaccaagctggcgtgcgtcaggctgtgggctggctgggatgcctgcccaggctgacaccttcccagtggcaatttgtcctggactgggagatatttgcgtattgcctcggattagagagaactcaagggctaaatgggcatgggaagtgttgtgtgctgtgcccacttcttggtctgctgaaggctctcaaaagtcctgcatgagtggatcctgcctgctggcgtggtagctagggtctcctgatggtggcagatccccaagttgttccccctggtcctgcctgccaacagcaggtttgggaaaggcagatctcctctccttgccttcagggccagcctcgtcattgtgttctttgctgggggaacggtgagaagatccagggcagagccccagtgtgcaaagcactgggaccctagcccagcccctgagggttccctgagactaacagctgagccgtgtttgtgctcctgatgggatttgatcgcagtcatatgggagccccggcactgggttctgtgtcattgcattttggggaaactgaggtgctg

SEQ ID NO: 22270 - DNA, 2008 bp, Homo sapiens
gctccttgaagctccctggctgtcaccccttcttgaccaatgcccggcattctcagacttccctggagccaccgacttctctgtccctcagctccgggaatggcctgaatgccagcgacatcatgagagccagctggggtcctaagtgcccctgcccaccccctgcaccccacgctgtcccccaggggcagcccatttttggatccacttagtcacagtgcctctatgcgctctcgacgagccactgcctccactcagcaggacgcgccgggctcccccaacccgcgccaacgccgcgggcctggttcccagggcagcacgctttggccaagcagctgaaatgcctcccagtgggcagtctgtgcttgcgcgaccacagtgtccccagcgctccgggttgccagggaatttctgcttgagcccctctgttcttagtctggaaaagcccacatttgctgcttaagcttcttcgattagaaaagggagggggaaaacagtccaaacaggttggaaaacgctcgtcctagagccaggtgtcatggacatgaatgttagaggactccgcacaccttggctgtctgtctgtgcaatgacaaccccccgtggcccttctgtaactacaccccagaccgagcccacacccccaaaccccagacctctttgatccgaagcagcttccggggcaaatgcgggcgcaggctcccccatgcatggactaatcagatgactctcgtttcttctcttctctctgtctcctgtcctgcgtgtgtggcctgcactgtccctgggtgtctttctgcctcatcctgccctccgcatgacccaggacggggctcttcacccccgacatggcctttgaagccattgtgaaaaaacagattgtaaaactcaaagagccgagtttgaagtgtgttgatctcgtggtctcagagctggccacggtcataaaaaagtgtgccgagaaggtaacaggttttgttctcatctccgcatttgtccccgtcctccccctccatgtgttagtctcaacccgagcatctggaaaattcagcctcggcaggaacccccttccgcctaccagttgtcacttagagatgtcgccaccttgcattggcagatggaatggggggagtggcatcacacgtgggttgtggctgcccgtgggggcggtcagcctttgttgttgccaaacgcattgcatttactaagcagtgccctttcctggaacccctagagaaaggggtttcccagccagcaccaaaacagcaaaacacaggaaacacatcatctgtatagccctgcatgttctcacagtctaggccacctgagagtaaccattccattttccccgactcgtggacttgacccacactgcagaagatgggactcccctgtgcatgaggtctggttaagttggtgctgcagatgaagcctggggaggtgggggcatttggcgagtgtgtgccacagatacagtgatcaggagtggttctctgcaaggagttcctatcgaggctgatggcccagatacccgccttaccattctagaacagacgctactcactcacgctggcgaggcccttcagggttcctgctctcacccagtgctgggcaagaggggggtgccctgaagccctgcatggcaaacatgcccctgcttttctgctttcatgttgcctcctgcctcctgccccccggtcactggctggaaaagcagctctgctctcctgctgtctccggtccacggtgcccccactcttctgctcttagctcccagctggactcactgggggccaggagcaaggtgtgggctcggtgggccccctcatatctcattccccacccccctccgcattttctacctgtgtggttcatgttgcttcccgtgccacgaggaccccgccaatgcgaccactctgcttgttcccccagctcagttcctacccccggttgcgagaggagacagagcgaatcgtcaccacttacatccgggaacgggaggggagaa

SEQ ID NO: 22271 - DNA, 2028 bp, Homo sapiens
cccagctatttgggaggctgaggcaggagaatcgcttgaacccaggaggcagaggttgcagtgagccaagattgtcccactgcactccagcctgggcgacagagcaagactccgtctcgaagaaaaaaaaaaaaaaaacaaaaaaaacaactgcacattattaaacccttggcagttgggcctcctgtcaccccattccacagctcagtaacgtgaggcccagggtcacacggccaattagtggctcaatcaagactccagaccttggggacagcggccctgcctgtgactggcacattgggctgcgtggctgtgctctgttgtcccaggctctgttgcctatgagggtgtggggagtgcgacgccagcccctgttctcctgtctgggaagcctcctggttcccacgccttccctgctggcaaggccaggaaatgctcttgccgctgcccccccttgccaggcttggccttgtactcacagtgacccccgctctcccccagattcttctgctgatcgacattgagcagtcctacatcaacacgaaccatgaggacttcatcgggtttgccaagtaggtacttttagagactggctggtcgggcggcaccaatcctcactctcagatccaaggaggtgactgagttgggattctctgagagggcaggtgtcagacagtctctgtcgggggtcctggggtgaaggcagagccaactgagaatatctggaagctctcctgggctgatagtggtccactgtccccaaccaacacgccttctgtgaggcatccccatggttagtttagggagagggcagtgctatgttcagatctgcagggagagggggaagccagccagctgctgcaccccctctccttcaggacttctcagagcctttagcgaccagtgtgcagcttttcccagactctgccacttcatggacagcatctcatgggctcagggctccggaagctgctctttgggaaatgctgcctggggtctccctagcttcaaggcatacactgtagatttaaaccagaaccttccgtggcacccagatgagggcccacatcggggagccctgatttcagcaggatgtcgattcagtgtgcgtggtctcaggcatcacccgctgattccttcagccccttggcatgcttaggcctcactcagattgttggagaggctcacgcaggccttcctgcctgaggcaggccgggtggtgccgctggtatgccctctcgctgggccctgtgatagagcagtgggcaaacccacacccagctccccaccctcagaggaagaccacatgcagggaaccgatggggacccagggcgttaaggtgtagtgtgcttagtgctgggcggggccgtgcagggcttgtgggtgtccagagggcggccactgggccttgccttgaggggtcaggcaggcttcctaggggagggcctctagagccaaatctcaggctatggagtcaccagatacaacatttatcggtgcacctgacaaagctgattgaggatctgttccgtgctgggcaccaggtaggtgaggagaagggaggaaggaaaacgaaggaatgagggcctcatcagaacccctcctagagatgagccgaagtccctgactgggcctcccctgcctgtgggtggcagcccccggccctgtgctcccggccgccgggtgtgtgtgggctcacagcgctggtccccatctttggtttgctgctgttttcctcaccttgatgtctctgcttctcacacttcatccacagttccttctcacaatctctcctgtttttcctttgaccactctttcctctggattcctgggccttcccacttaccccagctgttactatactgagcagctggtgacctggtgggtattgcctgctgtgtgcctttgccctggtgtgtgaacggggtacgccctggctgggtggccccagccctgggtgggacatccctggggcccgctgaagagctacggggtgctctctcagagccagggccagtgctgggcct

SEQ ID NO: 22272 - DNA, 1059 bp, Homo sapiens
tggttcccatctctacccgggagactcaggccaggaccctcacccaggaaagagactggagcagcctgccagaggatccctgctttgccgccccctgcctgccctgccacccataccgccccatgtgcctgcctgcctgtcactgtgcaccctagcccgcaacggcctgccgcctcttctgtctctcccacccctacttccttctaagcccagtcccattgggatgtgtcccttggatgcaaacctgactttctgctgaggcctggctgctccctttctctggctcacaagtggtggatggctaacgggcctttgtttgccacccacagcttgcagctccctagggtgggattttgtctctgaacccgtgtggagaagggcacctcagggcttctgccagacgtcctgccccaaggcttggtgtgccatccccagcatggccccgatcagtgccctggccctgtggccatgcaccccaaagtgtagcgtgggccctgtgctccagctctgaccaacactaaccccggctggaggcaggagagccaggccaccgaggggtgtgcgggcacatccctctccttagaaaccgggccaggcctaggagtatggaggcctcacatttctctgggggagcaccgacagcctgtctccctgttttccctcacctggttgtcattcagtcatggaaccagggtctactaagcactcgttctgtgcccagctctgggctgagacaaggcagtgcccccaccccgctccccccgggtgaatggaggcattcccagactgccagacctttggtgctaacaccaggacgtcctggacagaccaggaagagctcgtcactgcgttcccagaggggatgctgtgacctcacaggggctgctggcctcagccccctcacccaccaccaggcagcccgtgaatggccagatgccaggggtcactgcctgctccaaacaactgtgagagtcctgtctgctcatcccagggagggataagtctgtacccttggccttaacaaggggcgcccggtggcatctcatgctgtccccagcc

SEQ ID NO: 22273 - DNA, 1223 bp, Homo sapiens
ggcagagttgggatgtgaacccaggtttggccctgatccgttcacttggccatcagccctgcagcccctcctgccacttttcccactctctgactcctccacagggcagtgcaaggccatggaggaagtgcctgcccaaggcttacccctgctgctcctggtccttgtcctgtgtcaccgtgttggccatagcgacctcttccagagctcgccaaagccagggtcccgtctcccctggttcctgccgtgtgcctgatttctttgtggcatcagtagtgtctgcccccttcgcctgtgccacatctggaatcacatctggcgaagcagcctgcaggtcctggggcggaaggcggccttcctaacccaaacatactgttctctgagccttggtggggccagaagggctcctggagcgccctgggacctggcagagggccttcctgcagctttgtggcccaggacatcctgtgtctctggctgatggtcaaaacctttccttattctttatttttttttaaatgttttactttttgtagaagcagggtcttgctttgtcacccaggctggtctcaaactcgtggtcccaagccatctctctgccttggcctcccaaagcactgggattacaggcatgtgccagcatgctctgactcagactctttcaagaggtgcactaggcagggacttcaagtgggcctcagccccagggcagcttctccctgacccaacttcgatttcctccattggaggctgcctccgctccagcctctctggagcgcccccctgtactcccctcctctgggtgaggcccttttgccagcctgaaggcaggccccagcccagcttgctgcactgagctctctgtccttggcaatgagagccagggtgtggagggtcccagtcgctctgggagatgatccccctcagcagcctggggtcttcttgccgctccatgacacgcctcattcagcccgaccttccaggccactgtgggtgtctcctctgcaaagggcctcctgctggcctagtccccatagagagctgcagcccagctcctgccatgtgtcacaatgtgacagaccctctttagcaccaggaagcaggcttgattgcctccttgtagtggtgaggctcaggggtcaactagcctggcctggcattgcccaggcccagagcacaggtagaacctggggtcccctgagcgtggcccccagtacctccca

SEQ ID NO: 22274 - DNA, 1054 bp, Homo sapiens
ggttttttttgctttgttttgtttttatttttatttttttgagatgagtctggctctgtcgcccaggctggggtgcagtggcgtgatctcggctcaccgcaagctccgcctcccaggttcctgccattctcctgcctcagcctcccgagtagctgggactacaggcacccgtcaccacacccggctaattttttgtatttttagtagagacggggtttcaccgtgttagccaggatggtctcgatctcctgaccttgtgatccacccgcctcggccccccaaagtgctgggattacaggtgtgagccactgcacccggactttttttttttttttctgaagcggagtctcactctgttgcccaagctaaagtgcagtggcgctatctcagctcactgcaacctccacctccctgattcaagcaattctccctgtctcagcttcctgagtagctgggactacaggcacccaccatcatgtctggctaatttttgtgtttttagtagagacggcattttgccatgttgaccaggctggtcttgaactcctgacctcaggtgatctgcctgcctcggcctcccaaagtgctgggattacaggcatgagccactgcacttggccagctttttgtttgtttgtttgtttttgtttttgtttttttaaagaggtggagtcttgctatgttgcccaggctggagtgcagtggctgttcacaggcagtcatagctaactgcaaccttgagctcccgggctcaagcaatccttccacctcagcctcccgagtagctgggatctcaggcatgcaccaccatgcccggctaattttgtttatttttttgtagcgatagagatggggtcttactatgttgcccaggctgaccttgaactcctggcctcaagttatcctcccatcttggcctcccaaagtgctgggattacaggcatgagcctgtgcctggccctggctatctctttgttgttgagttaaaaaagttcttggcccagcccagtggctcatgcctgtaatcccagcactttgagatgccgaggcggac

SEQ ID NO: 22275 - DNA, 1079 bp, Homo sapiens
aatcaccagccctgtatgttcaagggagaaacgtcaggacatacggccatccagaaccttccctcccagatggccacatgctgggttgctgaccgccccccggtgacttggcttccctgttccagatttctgttccttctacaacatcctgaaaacctgccggggccacaccctggagcggtctgtgttcagcgagcggacggaggagtcttctgccgtgcagtacttccaggtgggttgtactccccctcagccaggccgcctccccccggcagcccccctgccactcacccgcaggaggccacacagcacagggaaggcccacccaagttcccgtcctggctctgtcccttactggccatgtagccttgggcaggtttcctctgctggctgggcctcagtttcctcatctgtgaagcggagatgcaggtgcctgcctgagagggttgctggaaggatctgagcacaggtggagctcagggccacaggcgttgtgaataacggtagagcagttacaatgccctgagcgctccctgcatgccaggccctggtctaagcgctgtcacatgcacagaagcacttggaccctcccaacaacgctaggaggtaagtgctattattgtccccattttacagatgagaaaactgaggctcagagaggttaagtgacttgctccaagtcacacagctatatgcaacagagccaagatgggaagccaggtctgcctgatgccaaagtctgtgcccctgcccaggtgccacgctgcctcccgatcgcccgttgtcttacagagagacaccacacctcacctgcctggcgctctgagttctagggctctgttcgatctgcttctcttcttctttggggccctcaagatgaggcaggtggcccccgatgccagaaccctgcctgtggcaaatcttgagttctcctgggcggcttccaggtccaggcggcatcagctgttgccatcggctgcagtgatagtggcggtgtcctcctgggggctgccctccggcttcctgctccctctcctggagctgctagtggggcccaggcagagggtgcacgacctccc

SEQ ID NO: 22276 - DNA, 1031 bp, Homo sapiens
tgccaggtctagtaataggacataaagatgagccaccagcctcccagtctcaggtggaattcgtgagctggtgcaggtcaggtacccgtggtggtgatgaaacactgatcagaataggcgctcggtgccactgtcacaggagtgcaggaacgaatggatgacaggctgggagcacccagggttgggggtcttggggtcctttggaagctctgccaggcagtgtgggatgtgtcacctgacgccagcacccctccctgccccactcccaggaaacatgtttcctaccattggtgacgtccaccttgcacccttcacggatgaacagctctacatggagcagttcaccaaggccaacttctggtgagtgtgccctgggtgtcccgcctgggccccacagcctgccttctcagggacagccccagctccccagagagcctgcactcctctttttctgaaagacttgggctagatgagggctgactgggagagaaggcagggctaccccacctgcctcttctgcagccctgaccttgctgtgggggtggggcctgtccacaggtaccagccatctttccatggagtggacctgtcggccctccgaggtgccgcggtggatgagtatttccggcagcctgtggtggtgagtagggcctccagggtactgctgcagtgatcacttgccattgctgtgcagctgtgcagccctcaggaagctacagcccctctctgagccctctcctctgccctgcacagcgctctcacagagatttgggccaaaagtgtcaatgcatgtagacacttagcacacagcacacatgcaatacatgtggaacattattaggtgaggctaaggcagagggggcatttaggctcaggagttcaagatcagcctgggcaacacagagacgccatcgctatttttaaaattaaaataaataaataataaaaataaaaaagaaccattactagatgaatttatccttggtgagctgatgtgatttattgattgattttacttgagatttttgata

SEQ ID NO: 22277 - DNA, 1048 bp, Homo sapiens
gtcttgaactcctgacctcaggtgatccgtccgcctcggcctcccaaagtgctgggattataggcataagccactgcacctggcgttgagcctcttattagcggctttctgcttggtgtcttagcctctgatgccctgcctcgctcaaagctcaggagttggccaatttcacaagcgcactgagtgtgcaccgcccaccttgccctcctgcacttatttccctttgctttgacatcacagccccttgaatccgagctgccttggtaaccctgagctcccattttgctttccccacccaaggaagctgctgaaaggtcgaggtggccgttttctgccctccccatggggaaaaggtagaggccagaaagggctccctccagaaagggcatttccctcctttccaggagcttgatccccaaaatcctggccgctctggttggtcaccagtgcttccaacaactggtttattcttttctttggattttattcggtttacatagttcatggcaggtgtgttagtcggatataaacattgctgggagtggacagcagcactagtgttgttgttgtttttaagagacagggtctccctgtgtttcccaggcttgattcacactctcgggcttaagcgatcctcctgcctcagcctcctgagtagctggagttacaggcatacaattccacacccagctagcacctagttctttaacttgcttttttggttaacttgcttaatgatttagcttggagatctttcctcatctgttcataaagagcctcttcattctttctcacgtccgcatggtctttgatgggagagccatcactggtttaattagatggtttccagtgtgtcgctaccacggacaatctaattatacatgtaagtttgttgatgtgttcatgtatctggaggttaaactcctgtagtgccaaatcttttatgtggataaacacttgtcatttggagagctgtcacctgattgccctcggtggcgttgtgccggtcccctcctcacggcgtgtctgggaagagcaagctcgtttt

SEQ ID NO: 22278 - DNA, 1043 bp, Homo sapiens
agacggagtctcgctctgtcacccaggcttgagtgcagtggcacagtctcagctcactgcaacctccgcctcctgggttcaagcgattctcctgtcccagcccccacaccgagtagctgggattacgggcgcctgccaccatgccggctaatttttgtatttttagtagagatgagttttaaccatgttggccaggctggtctcaaactcctgacctcaagttatccactcgtcttggcctcccaaagtgttggaattacaggcatgagccaccaagcctggtcctaatttttttattattagtagagatggggtttcaccatgttggtcaggctggtctcgaacccctgacctcaggtgatccacctgcctcggcctcccaaagtgttgggattacaggcatgagccaccacgtccggccctgaatacttttttttttttttaatataacacttccactttctatgtgacattgtgtcatgtttggctatttctgtcactctgctgtccactcctccaggtaggaattgtgttgttctctgccagatgcctggtgtttggaaccagcttggtgcattcagcgctgttcgtatttgggggtagtcatcagtaagtcctctgctgtggcggtggggaaggcctgtcacgagtgacactgggcaggtatggattctgcatctccctgcccactcttggcctttgcatgcctctgttgtggggactcctcttgccgtctccacacagtgtcactcctcacgctcagtgttgcgtatatagctgataacacagcagacccggtggtggcgcaggacatccatccagtgggcctcggccagccgaaaagaaagaataggggccgggcacagtggctcacgcctgtaatcccagcactttgggaggccaaagtggacggatcatcggctcaggagtttgagactagcctggccaacatagtgaaaccccatctctacaaaaaatacgaaaattagctgggcatggcggtgtgcgcctgtagttccagctacttgggaggccggggcagg

SEQ ID NO: 22279 - DNA, 1087 bp, Homo sapiens
atgcaggtggatcaggagttcaagaccagcctggccaacatggcgaaaccccgtctctactaaaaatacaaaaaatatatatatatatatattttagccaggtatagtggtgcgtgcctgtaatcccagctactcgggaagctgaggcacgataatcgcttgaacctaggaggcggaggttgcagtgagccgagatcacgccactgcactccagcttgggtgatggagcaagactctgtctctaaataaataaataaatagatagatagatatctcaatagccagtaagcatacagaaaggtgctccgtgccattagttgtgagggacatgcaaatgaagaccataagaagatgcgattggacattggcaacattgttaaaagttgtaaggactgacagcagcaagtgttggggttgatgaagagcacctggaatgctgtccctgtgtgggaggtgggaccgtgtgtgtagatgatacaactattttggaaaactagcaaagctaagtttatgcctccctttataaccaccagtttcattcttggacacccaagaagaaccaatgcatgtgttcaccaaatgactctcatagcagcttgatttgtgctggccagaacctggtagagtacaatgtctatgaaaatgagaatgctcacataaaaagaacggatgactctcccagacatggtgaccctgtgtgattgtcttttttttttttttttgagacagggtctttctctgttgcccacgatcatggctcactgcagccttgacctcctgggctcaaacagttctccctactcagcctcctgagtataagctaatttaaaaaaaaaaacttgtagagacagggtcttgctatgttgcctaggctggtcttgaattcctggactcaagcgatccttctgccttggcctcccaaagtgctgggattataggtatgacccactgcccccaacattatattatttatatgttacatatattatatgttataagtatatattgtatattatataatatatgtattatagacgtgacccaccacacccgtcattttattggaagttcaataacaggtgaaagg

SEQ ID NO: 22280 - DNA, 1841 bp, Homo sapiens
cccgagtagctgggactacaggcggcccctcaccacgcccggctgattttttgaattttttttgttagtagagatggggttttaccatggtctcgatctcctgacctcatgatccgcccgcctcagcctcccaaagtgctgggattacaggcatgagccactgtgcccagccctaatttttttatttttatttttagtagagacggggtttcaccgtgttagccaggatgatctcgatctcctgacctcgtgatctgccctcctctgcctcccaaagcgctgggattacaggccaatattctaggttttaaacaagccttgcggggagatgtgtccaccatgctgctgaagggtcagccttctcttttgtgctttcctgcaggaatacctcaatagcattctccagcatgccaaggatttcaaggaatatcacagatccgtcacaggcaaaatccagaagctgaccaaggcagtggccacgtaccatgccaacacggagcgggagcagaagaaagagaacgagcggatcgagaaggagcgcatgcggaggctcatggtatggtcctgccttcttgacgtgcgctcttctacatgtgtagctggtactgcgggctccaggggtcactccccagggttacgccaaggcatttcacagctcggagttagaggtgggacagagggaaaagagcaggcgcgggcttgggagtcagtcctgggctcggatatttgctgatctctctgatcatcagaatgactgtgtgacctcaggccacttagccggctcctctgccttctctggaaaatggaggtggtgcccccttccctcgttctgtgagagccaggtggtgtgatccagacccccgacccctagcataaacatctctgaccatttatttgtgactgagtcgctggttgggcagatattggcagcgtgttctgggccaggtgctgctctgtgtacggggacatggcccctgcctttgtgggggctcctggttgtgcttgaggggcagatacgcgaatgaagcaaacagagtagtggatggtgaccgctacagtgaggagggggaagtggagtggaaggggagggacagggtagtaagtaaaagccttgaaacagaggcccaaagggtggccctgatgcacaaacgcagagacccagggaaggagccccaggcagtgcggacaaaggttgaggtggcaggcagccatgtgccagggcagccggtagccctgggctcccagaacagcgttgtgtggggcaggaggtgaggtcagagcttacaggggcaggtgggaggtgggacctttcagaccattgggaggactctgggttgagttctgatcatgaaggggagcctcacccgggagggttttggctgtggggtgatgtgatctgatgtattcttagaaaggtggggggctgctgtaggaggtggtgggagggatgcaccttggacttggtggagagaaggcttcgggtttggggtgtatttcgtggacagagtgggtaggactggctcatggcctctgtaaatggctgctggcgggactgtctgcctagcgggtgcccttggaacctagcccttggtgggttttgaggaaatgattcctgaatgaggagtcgattgccgtgtgaagggctggtggcacggcacccgcgtgagctacgcgtgccctcagtgcgcttctggattgactggccatgggtgctcacagacatgcacattgtgccaccacattgcagtaacccccatgcttttgtaggctgaagatgaggaggggtaccgcaagctcatcgaccagaagaaggacaagcgcctggcctacctcttgcagca

SEQ ID NO: 22281 - DNA, 1061 bp, Homo sapiens
tggtacatgcccaccattcctggagcacttccttcctcatcagacttttcttctgctttccctgcctgagctctctggagccaactctttctccagggagtcctggttccttttttttttttttttgtctgtcaagacggggtctccctgtgtcacccaggccggagtgtgtggtggtgcgatcatggctccctgtagtctcaacctcctggactgaagcgatcctcccacctcagcctcctgagtacctggggctacaggcgcacgccaccatgcttggttaagtgttctgtatttttttgtagagacagggtttcaccatgttgcccaggctggtctcgaactcctgagctcaagcaatctacctgccttggcctcccaaagtgctaggattacagacatgagccactatgcctggctatatttcgtattattacagaagaatatttacatgccaagatctgactttgggggtgcttcctgctagtgggccatcactgcttctaggccctctgagcagccggatctgggaaatagatgtatgtacacatactcatctgcattgctgtttgtatatattaaaacttgtggctgggcatggtggctcatgcctgtattcccagtactttgggaggccaatatgggaggactacttgagcccaggagttcgagaccagtgtgggcaatatggcaaaaccttgtctttataaaaaattttaaaaattagttgggtgtagtggcatgcacctgtggtcccagctacttgagaggctgaggtgggaggatcacttgagtccaagagtttgaggctatagtgagctgtaatctcaccattgcactccagcctggtcaagacagtgagaccctatctcacacgcaaaaagaatcttgaggttatactgacacctccaattctaatccaacagcacagggttaatttttatcctttccgcctttccataattctaaaatcagcaacctgatttcccttagcaataataggcttacttacctgctccattttagaatacacagaaagtacgttccaaagtgctaatgga

SEQ ID NO: 22282 - DNA, 1050 bp, Homo sapiens
ccggctcttactggtccagttcaagtcacatgtccagcaagcagacagtcaccggcctgggggttagtctggtctgattgggcaaacttcagcatagcatttggtctggccctagagcacagcccctaactccaaccaggcactcattgggaccactacagccacgagtcagcagcggacccccaactcctggcaggctggggagcggcatgcccatgctccaaccccatgggaaaatgcccttctgcctataagacagccaggccccatgggtcacacacccatagggtaggcctgacgtcctgactgttgcagggaggactggaggaaaggtgaggaccccagaaccctcccaggtttactgtggaactgtttctttcttctatctccctgcttcctacgtggcgggtagaacagactgctctgaaggagcagggcgtccttgtgcacagcgctgcaggtagctgcacctcccctcgtggtcagacccagattgctacagcgttcctgctgcacctgcctgagctctgtcccctgtctgtgtctggaggctgttccttccggctctgcccacctcctggctcccctctgcccttcttcccctggaggctgatgggtgcagtggcagtcgccctctgcagttcccgattttccctcctttcacttacagacttctcagatcaccatctctgctggaacgccgctctccagggtgctgttgttttgcagccttggttcttagttgttaattttttgctttaaaaaatttttttaaacttttcattttgaaatgatctcatttatttttatttttttttattttttgaggagtctcgcactgttgaccagcctggagtgcagtggtgccatcttggttcactgcaacctctgcctcctgggttcaagcgattctcctgcctcagcctcccgagtagctgggattagaggcacgcgccaccatgtccggctaacttttttgcatttttagtagagacagggtttctccatgttggctaggctggtcttgaactcctgaccccatgatctgcc

SEQ ID NO: 22283 - DNA, 1050 bp, Homo sapiens
cactgttgctagcctggctctgggcgtgaagcctgtgctctgaagctgcattttcccggcagcaggtccaggcttccccagccctggcagcattgtttctgtcccccatcacatctctgtgtccctacttctcactctaaagggccttgccctcttttcccagtggcctcccttctgtcctctgaggcagagcccttcacgtcctcgccagtctctcttcctccctccctccctcagctgccctaaacacagtttctctgcccactcggagggctgtggccatgttggcctcgcccctgacagccagtggctatgggtttgcacagtgagccattgatgagagaccggcacttgactctcatttccttgttccatcagaacgctgtccaactgggcgtacgagtttgacaagtgggccccctccgtggtgaaggtgtcttacaaggtaggtcacagccactgaggtttcctctcttgctacggaggtgcaggcggtggtgggcaggacgtccacacatacctctggacagtgaacctgagaatgctgggtctccagtcgcatggagtctccaggacagcctggaactccagtcacatggatccgggagtttggactgggcagggacagggcagattagctcactggggaggagacaggagtgagcatggtggccagcactcagaggccagctcaggcgcctgagatggggacccaggaagaggggagcctgtcagccaccaggaatgtgcagatggcggtgcaggctgcgtggttccctcaggccccggccgccgctggcctgcactgcttcctcttccccctgcagcgcgtgttctgcgtggtgaggtctggggacgcgccagcggccctgccagcccctttccccactacccctgtgaggacgagccctcccgccgtgtcactgggcagttgcagggggtgcctgtgcccctcttgccacctggccacccggctccaaaagccgagctgtgcatcctgcttcccttgcagggatccccagcagcaagacgggcctttgtcccccagct

SEQ ID NO: 22284 - DNA, 1214 bp, Homo sapiens
catgcttcaggtgcctcctttgtggctcacccctgctgactccttacaaagccaggccgttggcaggcacaggaaccaggctctgaaaccccgtgctcccctgccagtggctcagttgatgtaatcaccctgcagtgggagtgctctttgagtgcggccactgcgccccctcccgacccgcatggccctgtatgtagtggcgctggcccctaccccatggggcccacattctgaaccacaggctgctcattagaaatgtaccgtcaccaacccagttcccctgagaccctccacaccagcaggacaagtcccccagtcagcaagatgtgtcttctgccagaacgtgctcggcatttttctgtgctgtagattcatatgtgtgattttgcagggaagccagattgcttttttgcaatttgcattgttcacctgccaatagtcatggggtcacgggcctgtctctgcccaaggcttgcaagaggctacgttgtgtggctccaactcggtgagtcagccccggggcaggacgtcaggcctgtgctctccacccagctgcgctcttccacctggagccttcctggctgctgggcgcagagtgggagattctccccatgtgccgggccacctgctgccccctgccctgattgcccactctggggcccgcagatccgttggaagtacatgattgtggacgaaggtcaccgcatgaagaaccaccactgcaagctgacgcaggtgctcaacacgcactatgtggcaccccgccgcctgctgctgacgggcacaccgctgcagaacaagcttcccgagctctgggcgctgctcaacttcctgctgcccaccatcttcaagagctgcagcaccttcgagcagtggtttaacgcaccctttgccatgaccggggaaaaggtgggtttgcccagctgtgcccatgctgacggttccaggtgcggctggctttgctggttggaacgtgttgagcaccagctacagctggctgggcctgtgctgggtgcctggtgagagtctgcatctgcatggagcaggggagccctggaacccaaggctggggcagccacaagggccccaggggagcagggcagaggtcatggtggtgaatctcggaatgctcggggcgtctctgaccctatgctccaggtgcagagtggatggtgaggaagatggccctgaggcagctgtgggaccgcaagcgt

SEQ ID NO: 22285 - DNA, 1047 bp, Homo sapiens
cttgtgttgcgagcggcggtgttgccggcattggccgctgtgtcttccgctccccatggaatggcacagggtagagtagaggagagaatccagggctgtggtggtggtggctgtgctgacgctggacgctgtggcctagctgtgggctgggtgctggactctgtgctccaggcccacctcctctagttctcccagcggggcctgttttcatttctgggatgtgtggagagacgttttgtggtgaaacactggaaatccagttattcgccagtggcccacaggcccgtgtggagagtgcggagccagggatctggggatgctggcaggtgctgatcctgctcctgctctcagaagcaggtgttccttggtgtccccactctacccctgaggtcaccccgctgaccctgttctcctctgtgcccgtcaggaaccacgaaggcggaggaccggggcatgctgctgaaaaccttcaacgagcccggctctgagtacttcatcttcctgctcagcacccgggctggggggctcggcctgaacctccagtcggcagacactgtgatcatttttgacagcgactggaatcctcaccaggtaaaagcgggccgggccccaggtcgaggagaaggaagggggtgcctgcaaaacctcgaggagacggccctggcttgagggtcctccagcctcctccacattgtcttggaccccaggagccgggaggagctgcacccatatctccataggtcatcagggagaaaagaggcggggtcctcctgtttcccaaaatacaaacagcctttccctctgattgggaaagcagtgtataagccatccgtcggtttggtttttcttaaatcttggaatggcacccatgaggaggtggaaagtatcctgatcaatctgcgccgtcactgtggggcggcccctgcagtgtgccctgtgagcacacacactggcgcttgttcagacacaattgggggtaaactccatgccacttcgtttacttcctcctcttgttccataaccatgtacccctcatgggcctcggca

SEQ ID NO: 22286 - DNA, 1028 bp, Homo sapiens
tcttttctgtacagagaagatagttctttttttttggtcaagaaattcaaccattagttttttaaagacaagcttgggtggggtgcctgctgggggcagtgctggtctttcactgcagcccaggcaccccttgagagtcccagtgtgtgttatgccccgagccagtcaagctgaagggagagcgggtgcgggggccctcctccgtgtcccagcccggcccctgggattgcgtcgcggcctctgcttgtcgacctgggtgctggctgtcctattttactactattgaccctgaaggccatcgaggagggcacgctggaggagatcgaagaggaggtccggcagaagaaatcatcacggaagcgcaagcgagacagcgacgccggctcctccaccccgaccaccagcacccgcagccgcgacaaggacgacgagagcaagaagcagaagaagcgcgggcggccgcctgccgagaaactctcccctaacccacccaacctcaccaagaagatgaagaagattgtggatgccgtgatcaagtacaaggacaggtaagcgaggaggcggggagggcgggggctgtaggggtccccgtgggagcaggcctggcatctgcactctgactctgcacactcaggcttgggccgctcactctttcactcatccacaaacactgactgaatctctgtgtctttgagcctggccctgaggaacatgctttctggaacagggaagcacacatgtatctgcggtgatgagagggaatgtcacatgtggtcgagaggagaggcaggggtgcgggtctcggagaaggggacattgcagcagagccttgagagaggggaggttggggagagtgcaccagcagaggccacagcaggcggagaggctctgccaaagttgtggcctggtggcctcaagggatgaggtgggatgaggggttatatggcagtaatgggtgctgcccgtgtggccaggaggttggggacaagaggctggcatgtctggagcagagaaagtggcagccctct

SEQ ID NO: 22287 - DNA, 1097 bp, Homo sapiens
gaccatgcgggccaggcgcaggcgctcacatctgtaatcccagcactttgggaggccaagccgggctgatcacttgagctcagaagtttgagaacagcttggccaacgtggcaaaaaccccgtctctattaaaatacaaaaattagccaggcatggtggcactcgcctgtaatcccagctacttgggaggctgaggcaggagaatcgcttgaacccaggaggaggtttcggtgagccaagattgcaccactgcactccagcctgggtgacagtgagactacgtctcaaaaaaaaagactgtgctagacggtggtgttgaacttgaacttgatgcttgtgctgaggtcaggagacacgtgcacagcttcagggctagaggggcacaatggctgcagactatgctcgggcagctcggaaagacggtgacgggtccaggctgccgcagctaagcctcacaagagctctggccccaccaggcgggccctctgggttccattcccactccccactgcctggaggcagcagccctgtggttactgtaggagggacctgaatgcagtgaagatctgcactccacacctgtctctgtgcctcagtctccacgtctgcagcacaggggcctgactgaaataacgtggccaggcacacagcccagacgccagcactgtgtgcactgtgggaggggacgatggtccctagcccagggcctgagctgctgccttgccaattcgtggtgacagctttggcctgggtctggcaggggctggctgctactgctgaaggcctgtctgcactgtttccctgcctttccacaagcactgtccctcctggctcttcagagttgagtggttataccttgtgcaagaaaaacaatgaaacagattgtctgaatgtttcagacctgcctgaaacattctgcaggagaggtcatcccaaggcttgaaagtgtttgtcacactccttcaagcccccagggcagggcccctgagggaagggtgcaggtggagggtgggcaggagtgggagccattccttggggacaggggggctcctcagggctgtctggcccttggcctgtggttccaggtctatggtctg

SEQ ID NO: 22288 - DNA, 1265 bp, Homo sapiens
cctgtggggcggtgctcccacgcccccacgctgcaggtgggaaagctgaggcttgacctgccatggctgaccccaggtcacacagccagtatgtggcagggctgccactcaaagccaagcctgtgtgaccccggaaccagctctcagtacccgtgggtgtctggggactgggggacacgtgagtcctcaggacaggcagcaggcggtcccagggcaccagggctcctgggctgaggccgggcaggccagggcttgattagggttgggtaggaggtgctaggattggggacccaccagacagtgccccgtctcctcagtggcatagagaatgggcagaaacgccaagaccacagtggatagtttttggggtgcagtggggagccggagaagatccacttgctggctttaaataatctcacctctgtctctggcccttcctggctgtgggacctggcaggtcactttgcttctcaagcttcagtttcctcttatgcaaagcaaggaggctgcatggattagggggctgcccccaccgaagggcctggctcccgctgaagcccagcgaatgccattttgtcatcacagaagcagcaaatttcagtgcctgggaattagtctgacgaaagacgcacgtgacgtttgaggacattcatgaagtcctcatgtggaggggaggcccctgtgtcaggcaggagggtctgggctgtgatgctgtctctcttgcctaatccagagcagggtgttttatggcccatgccaggctgtttaaaaaggttttatgaggccaggtccagtggctcacacctgtaatcccagcactttgggaaactgaggcaggaggctcacttgagcctgggaggtcgaggctgcagtgagccgtgatagcaccactgcactccagcctgggcaacagagcaagaccctgtctttaaaaaaaaaaaaaaaaatatatatatatatatatatatatatatatatatatatgaaagagcaaagatctttcacagtcaggaagaaccaagatggtttggaagctgtaggtcaggggccaagggccaggcaggtgacatgggacagagcagggaaggcacgtggagcctcgaaggtcccgagagggccgagtgtggtcacagggactcgtcctgtagagaaacatgaagtttgggcatggccatggcgccatctcggctcactgcaagctccaccccccgggatcgcgccattctcctgcctcagcctcccaagtagctgggactacaggcgcc

SEQ ID NO: 22289 - DNA, 1408 bp, Homo sapiens
gccacccaggctggagtgcaatggcaggatctcggctcaccgcaacctcctcctcccaggttaaagtgattctcctgcctcagcctcccgagtagctgggactacaggtgcccgccaccacacccaactaatttttgtatttttagtagagacagggtttcactatattggccaggctggtcttgaacccctgacctcacgtgatccacccgccttggcctcccaaagtgctgggattacaggcgtgagccactgtgctcggcctcagtgggtctttcctttgagtgacagttcaatcctgtctcttctgtagtgtctgtcacctgcaaatccggggacttcagctgtgggggccgtgtcaaccgctgcattcctcagttctggaggtgcgatggccaagtggactgcgacaacggctcagacgagcaaggctgtcgtaagtgtggccctgcctttgctattgagcctatctgagtcctggggagtggtctgactttgtctctacggggtcctgctcgagctgcaaggcagctgccccgaactgggctccatctcttgggggctcataccaagcctcttccgcccttcaaatccccccttgaccaggaggcattacaaagtggggatggtgctacctcttcgggtttgtcacgcacagtcagggaggctgtccctgccgagggctagccacctggcacacacactggcaagccgctgtgattcccgctggtcgtgatccccgtgatcctgtgatccccgccccgtgaggctgaacacatagtgacgcttgctagccaagcctcaatgacccacgtaacatgaagggggaaaagccagaaagttctgccaaggagcaaggccaagaatcccgaagggaaatggactttgaagctgggcgtcttcttggctgtcttaatacaagtggcacatccaaatccaaaaccccgaaattcaaagtcttgagcacccgaaattctgaaacgtcttgagcactgacctttagaaggaaatgcttattggagcattttggatttcggatttttaccactgagtgtggagtcctaattaggaaaaaaaccaggctgaccgaaccaaaggaaagcaataaaagaaggcagatagggtcaggcacggtggctcacccctgtaatcccagccttttgagaggctgaggcgggtggatcacttgaggtcaggagttcgagagcagcctggccaacacggtgaaaccccatctctactgaaaatacaaaaactagccaggtatggtggcgtctgcctgtaatcccagctactcgggaggctgagacaggagaatcacttgaacctgggaggcagaggttgcagtgagccaatatcacgccattgcactccagcctgggggacaagagcgaaattctgtctcaaa

SEQ ID NO: 22290 - DNA, 1103 bp, Homo sapiens
tccatggcagccggcagtgtgaccgggaatatgactgcaaggacatgagcgatgaagttggctgcgttaatggtgagcgctggccatctggttttccatcccccattctctgtgccttgctgcttgcaaatgatttgtgaagccagagggcgcttccctggtcagctctgcaccagctgtgcgtctgtgggcaagtgacttgacttctcagagcctcacttccttttgttttgagacggagtctcgctctgacacccaggctggagtgctgtggcacaatcacagctcacggcagcctctgcctctgatgtccagtgattctcctgcctcagcctcccgagtagctgagattaaaggcgtataccaccacgcccggctaattttttgtatttttattagagacagggtttctccatgttggccaggctggtcttgaactcctggtctcaggtgatccacccgcctcggcctcccaaagtgctaggattacaggtgtgagccactgcgccaggcctaatttttttgtatttttagtagagatgcggttttgccatattgcccaggctggtctcgaactcctgggctcaagcgatctgcctgccttggcctcccaaagtgctgggattacaggcacaaaccaccgtgcccgacgcgttttcttaatgaatccatttgcatgcgttcttatgtgaataaactattatatgaatgagtgccaagcaaactgaggctcagacacacctgaccttcctccttcctctctctggctctcacagtgacactctgcgagggacccaacaagttcaagtgtcacagcggcgaatgcatcaccctggacaaagtctgcaacatggctagagactgccgggactggtcagatgaacccatcaaagagtgcggtgagtctcggtgcaggcggcttgcagagtttgtggggagccaggaaagggactgagacatgagtgctgtagggttttgggaactccactctgcccaccctgtgcaaagggctccttttttcattttgagacagtctcgcacggtcgcccaggctggagcgcaatggcgcgatctcggctcactgcaacctctgcctcccaggt

SEQ ID NO: 22291 - DNA, 1055 bp, Homo sapiens
tcccgagtagctgggactacaggcacccgccaccacgcccggttaattttttgcatttttattagagacggggtttcaccgcgttagccaggatggtctaaatctcctgaccctgtgatccacccgcctcggcctccctaagtgcttggattacaagcgtgagccaccacgcccggccccctttttattttttattttttgagacggagtctcgctctgtcgcccaggctagattgcagtggcgtgatctcggctcactgcagcctccgcctcccaggttcaagtgattctcctgcctcaacctcccaactaattaggattacaagcatgtaccaccatgcctgactaattttttgtatttttagtagagactgggtttcaccatgttggctaggctggtctcgaacccttagcctcaagtaatctgcctgcctcagcctcccaaacagcggggattacaggcatgagccactgtgcccaacccaaccctggatctcttttaaacaagacaatgctcgctgttgccacagaacaatgggtggggtacatgtggcccagtgtgtttggccacataactgccaggccagagggaaagagactctcagactgtctccactcagatacaaatgtgtgtgttgtgtgcgtgtgttctggtctcatatttgtttgttttgagacagggtgtcgctctgtcactgagtctggagtgcagtggcgcaatcagagttcactgcagcctcaaactcttgggctcagttgattctcccacttcagcctcccaagtagctggaactacaggtgaacaccactgtgcccagctaatttattttatttttagtagagatgaggtctcactatgttgcccaggctggtcttgacctcctagcctcaagcaatcctcctgccttggtctcccaaagtgctgggattacacgtgcgagccattgcgcatggcttgtgttcttgtgtttcttcctttttctttcgagatggcgtctcagtctgccacccaggctggagtgcagtggtgtgatcatagctcactgtagcctcaa

SEQ ID NO: 22292 - DNA, 1026 bp, Homo sapiens
gggggcaggaggcaaggaaggcttcttggaggaggaggcctctatctcacatgaaatctgttgggtaatttggagttagccaggtagagtgttccaggctgaaggaacagcatgtttgaagaaccggaggcagaagagcgtttgggggtctgaatgttgtcagggcgactggatcctagtaagatagggatggggcaaatggggctggagaatcaggcaggggcctgattacctgggcccttgcgggctacattgaggcgtttgggcttctctccagagggctacagggaaccccagctcgggagagagacccagcttggtgtgtgttttggaacatctccctgctgccctgtggagtagaggcagggaggtagtagtcaatgaggaggaggcagaacagaggagagctggtctcttgccttctgcccacccagaaaaagctcattgagctacaggctgggaagaagtctctggaagaccaggtggagatgctgcggacagtgaaggaggaagctgagaagccagagagagaggccaaagagcagcaccagaagctgtgggaaggtatggcagaaatggccaaggactcaccttcagtcctgggtgggagcaggtctgggcctaggagtctcccgctcattatctgttgtcagtttcagcaggtttttgatcatgctgcccatcgccttgtgtgctttgaggttcgcttggattgtggcatatgtcaggagcctcctttttaaaaattgtttaaataatttgttttttgaaacagcgtctccctctgccacccgggctggagtacagtggcgtgatctcagctcactgcaacctctgcctcccaggttcaagcaattcttgtgcctcagcctcctgagtagctgagattacaggcacctgccaccacatttaactaattgttttgtatttttagtagagacggggtttcacaatgttggccaggctggtcctgaactcctgacctcaagtgatccacctgccttggccccccagagtgctgggatt

SEQ ID NO: 22293 - DNA, 1052 bp, Homo sapiens
acacgtggtggcctagatcttgacaccacccccaacacacacaggccctcctcagtggggacacacagacagacgccacctctttctacgaccgcgtctgggccgccatcagggacaagtaccggtccgaggtcagtggaggagaagggaggggacttggtcctcccaccacactgcccccaccccgcctcacaaaggagctgcctctggttctggcacctggccaccctggccagctgggtggccccagcaccccccaccgagaccccccgaccccagctgtcggtcctccctgcaggccccgcaggaggggcagagacaccgaggctgccccttgggctgtggtgtgagcctgagggtgtgggtggaccctgagtccacaacaccgaccgcactgctcacccgccaggcactgcccaccgaccttccagcaccttctgcccctgacttgacggagcccaaggaggagcagccgccagtgccctcgtcgcccacagaggaggaggaggaggaggaggaggaggaggaagaagaggctgaagaagaggaggaggaggaggattccgaggtgcagggggagcagcccaaggtccgtgtttgggggagaagtggagacagagagggtgggggaagggctactcactgaccctgcccctgccccaggaggccccaccgccactgtcacccccgcagccggccagccctgctgaggaagacaaaatgccgccctacgacgagcagacgcaggccttcatcgatggtgagggtgggcgggggccaggctcctcgggtgggcccagcgtttcctgccgtggtggcacaggtcgagggaagatcctgagcttagaccctgctctgactcggccagcacaagccccagtatcttggggagtccaggaagggggcctagggtaagccagtcccaccctcgccagccccaaggggcccttctgcctccccaagggccgcagcttgtttgtgtcactcctggccccactcgctcaggagctgggagcctgggcagcaagtcggggctgctctatagctggtga

SEQ ID NO: 22294 - DNA, 1017 bp, Homo sapiens
tttgaaactaaataggccaggcgtcgtggctcacatctgtaatcccagcactttgggaggctgaggtgggcggatcacttgaggtcaggaggttgagaccagcctgaccaacatggtgtaaaaccccatctctactaaaaatacaaaaaaattagctgggtgtggtggtaggtgcctgtagttccagctgctcaagaggctgaagcacaagaatcacttgaacccaggaggtagaggttggagtgagccaagatcatgctactgcactctccagcctgggctacagagtgagactctcaaaaaaaaaaaataataataataagagaaaatagacaaggtctccaggctggtcaactcctggcctcaaatgatcctcccacctcagcctcccaagcagccgggactacaggcaaacatcaccatgtccagctgtccccagctttctaatctggtctttctcttgccccagaacctcaagaaggcatgaagccagcccctgcagtgccgtccacccgcccctctgggcctgcctgtggctctgttgccctcctctgtggcggcaggacctttgtggggcttcgtgccctgctctggggcccaggcggggctggtccacattcccaggccccaacagccttcaaagatgggtaaaggagcttgccctccctgggccccccaccttggtgactcgccccaccacccccagccctgtccctgccacccctcctagtggggactagtgaatgacttgacctgtgacctcaatacaataaatgtgatcccccacccaaacttgtctgtgtctgcctcgctttgctggggtgtggaccggggtgtgggcaggggttgagcgcaggggacgcagctttctgcagatcccacccgggcctcccccaccatctggggatcactcctgaagataccaggtggatggaccctggaccatttctgtcttgagcatccatccgggcccgtgtcccaccttccctgggtctcatctgtgctctgtggaggcca

SEQ ID NO: 22295 - DNA, 1035 bp, Homo sapiens
tttcatgtgaacttgagaggaatgtgtattctgctggtgttgaatgaaggattctataaatacatattaattaaatgcagttgattaattgatacagtttggctgtgtccccacccaaatctcatgttgaattgtagttcccataatcctcacctgttgtggaagggacctggtggagataattgaatcatgggggtgtttttccccatcctgttctggtgatagtgagttagttctcaagagatctgatggttttataaggggcttccttcttcgctgggcactcgttcttctccttcctgccaccatgtgaagaaggacgtgtttgctttcccttccgccatgattgtaagtttcctgaagcatgtctttattagctgaatgagaacggactaatacattattgatgctgttgagtttagctatatcattagtgatttttttgttgtattgacctattaattatggatagaggtgaactgttggcttccaactataattttggatttgtatattttgtcttatagttttatgtttttgtcttgtatcttgatgttatattttatgggcatacatataagtaataaagattattataccttatgtcttttttttttgagacagggtccccatctgtctcccaggctggagtgcagtggcacaatcacagctcactgcagctttgacctcccagtgcccaggctcaagtgatccttcagcctcagcctcctgagtagctggtactacaggcatgtaccacgatgcctagctaatttttgtttttttttgttttttttttgtagagacaaggcttcgccatgttgcccaggctggcctcgagctcctggactcaagcattctgctcaccttggcctcccaaagtgctgggattacaggtgtgagtcattgcgcctggtcctattatgtcttcttgcaggattgacctcttcactgttacaaaatctcttttacaaggcaatgatggtccggcgtggtggctcacacctgaaatcccagcactttgggaggccaagg

SEQ ID NO: 22296 - DNA, 1060 bp, Homo sapiens
acgcgtaagccaccgcgcccggcctatttttaattttttttagtcatggtttagcttgatcacccaggctgttctaaaactcctgggctcaaaagatccttcccgcctcagcctccctctggggtagctgggaccacaagtacttgccaactcacccagccttttattatcagtgcctaatgcttaaggaggatgtgggctaccttttactttcagataaaaaacattgaggtgagataattctgttaattttttttaacacaaaggttcataacttgaataggtagtttcttgcctaaatcatttaattaaaaaatttcgttttcattttgtagtctcttggatcttggagttgattgaaatgtatttttaatagccaagtagattcacttttatatggttttaaaattgttgtgtatataaggggcatttgaaacattagatttttgtatttgctgtgactttcctactggccagtgtgccaggtaccggatatcctccgggaactgcaggcaggcccgtctctctttcacgggtgagagccgcagcctactcttggcggaagcggaaaccctttcctccatcacgtttcgcccattccaggccagaagcaggccccgctccttgctgctcgcctgtgagcatatttcgtcgaatcccggctgggcggcttggtcgcagtgtgcctgtgctgggcccggagcgcgttcatcgcccacagccgctccagttcttgcgagtggttgttcctgcacgccaggagccgtgggccgggccatcaggccatacaagtgctgcgaaagcggcctcgccttcggctgcatcatctcggggatgtttcacttgtctcttctcccagttccagccccagcccctcgaactcaccgggtctccacagcacactctgatcaatatcccacaggtgaggaatataaaatactctttataaagtggaagctagtaagtcgttcttttcaaactttcacaagaaactacagatctttttaaaagattctgattcagcaggtcattggggaaggcctgatcctctgcatttctg

SEQ ID NO: 22297 - DNA, 2088 bp, Homo sapiens
gcctgtaatcccagcactttgggaggccaaggcgggcagatcacttgaggtcgggagttcgagaccagcctgaccaacatggagaaaccccatctctactaaaaacacaaaattagccaggcatggtggcacatgcctgtaatcccagctactcgggaggctgaggtaggagaatcgcttgaagctgagaggcagaggttgcggtgagccgagattgcgccattgcactccagcctgggcaacaagagcaaaactccgtctcaaaaaaaaaaaaaaaaaatccttagcagtcttatgcctataattccagtactttgggaggccaaggcgggcagatcacttgaggtcaggagttcgagaccagcctggccaacatggtgaaaccccatctctactaaaaatagaaaaattaaccaggcatgatggtgtgtgcctgtactcccagctacttgggaggctgtggtgggagaattacttgaacctgggaggcggaggttgcagtgagccgagatcatgacactgtactccagcctgggtgacagagcgagactctgtctcaaaaaaaaaaaaaaaaaaaattccttaactgtatccttcacaaagcaaatttttattttaatgaagtttaatttctcaatttttaatggattctgcatctttgtcatatgtatgcaattgtaacgtaacccaaggtcaaataatttcacccacattttctttacattttatagtttagattatacattcagttttgtgatccattttgagttaatgtttgtatatagtgcaagacacagatctacagtctttactttttgcatatgcatattctattttttagcattatttgttgagaagagaaattttgactcaattgttcactttgattaaaaaaaactactggaccacatgtgtagaaatgttactggaacatttattctgttccatggatatatttgtctacttgccaaagacattgtcttgattaggattgctaaattttctttgtttttttttcagaattatttggctatttgtttggttatttcaggtacttttcaccttttttttttttttttttttgagatggagtttcactcttgttgcccaggctggacaacaacgacaacgcgatctcggctcaccgcaacctccgcctcccgagttcaagtgattctcctgtctcagcatcccaagtagctgggattataggcatgcgccaccatgcccagctaattttgtgtttttagtagagatggagtttctccatgttggtcaggctggtttcaaactcccgacctcaggtgatcctcctgcctcggcctcccaaagtgcttgggattacaggcatgagccaccacgcccggccttcatcataattttataacttcataatacattgttctttttctttttcttttttaaaagattcaatgattttttttaaagcaataaaaaatagtaaaaaaccctttgtgtttactgaagtggttatcatttctggtcctcttctttctttccggatttccacttggcttcatttttctttgcacccatgcagtttagggatgtctcttatggagcaagtatgctgattacaaacactttcactatggctgaattaataatttattttcccttcatttggaaagatattgtttgctggatataggattctcagttgatatacttgttctttcattactttaaggtagttgttctatggtctcctgatctgcgctgttgctggtaataagtatgtaatgaatcctatctttggttcagtgtagttaatgtgtctttttcctgttgccttaaagctattttaattgttcttgctgtgaagtagtttactgatgatgtgcttggtgtagatttatatacatatatgctcatggtttgttgaacttttttgatttctgggtttataattttcatccagtttggcaaatgtgaaaccagtatttgttgaaatattttttgtcatgctctttcctctgccaaagagtcttgttatttgcatattatgtcacttgtaattttcccactacacagctcactgattttctgttttttgttgttgttgtt

SEQ ID NO: 22298 - DNA, 1027 bp, Homo sapiens
acccctctaaatgcggctcctactctgtagctgacagacacccacagacgtgtctgtagcatcctctgtcacactgggacccgtactggcagcaggagccgtagggaggactgggacacctggaagccaggaattggtgagtgtgcggggctgagggtcccgagactaggatgggactggttggaaccggcaggaatagaccgtggcgggacccgggcctcttcgtagttgactctgggttctgagacccaagtccccctggcgcacctcggccctggttcctctcaggccgcagggtggggctgcgacggcagccgagacccctagccgtccggtccagtccctgtgcaactgactgtggccccaggcccagcgccctctctggtcagctccgcgcccgctgccccagtcacgcccgctgcctccgtgtctccccagattgtacgggggccactagagggtcatgggggaaatcctgcctcgagtatggggttcgtgtgagaggagctgtaggctgtggggtccccagttccctctttctcaccaggggcttttgtattttatctgagtttcccaaatatacgcgaagcagggtctcaaatccgcgactgtggtccctaggctaccttctcctaaggctggcagcaaatttgggatttcctgatccctttccgcattttataacacggatttcctttagttcacaacagtatcacttcttcgtcctccaggctatgtttcaaacacaggcagtattttaatcgtcatttttttagagggcagtatatggccgttttaaaaatatttgttttgtgtttgtgaacgtttcagagaaaaaccacctgacactccgctgtaaacaatctttgtgtctctttttatctgccctaggcacagacaccttctgagaatgtcttgggttgagattcccctttggaaactttacagtgatgcgacctcagcccaccctctgccttttcctgatcctgggtttcaggactacctggggctggcccaagatgcctac

SEQ ID NO: 22299 - DNA, 1052 bp, Homo sapiens
ttgggcaagtcactgcgcctctttgagcctgttatttcatctgtaagaagctgagataattaatatatcatagataatgtagtgttctcagtagaaactgaaacagcactctgagatcaaactcattaatattcctacaacaaaatgagtaaatacttgaaacagaacaaaacagccaataaatagcctcttatttcttgatgtcaggttcatgcctaccttacaaaatagagttgtcagagctttttggttcgtagaactgaagaaaagggactgtagactcatggaagtgtctaatgtcagaaagccagatatgtcaaagatgaatttctgaaattaaaacattttatttgggaagaaatacttgtaattcagggcatacacacagaccaagtggtctttggtatgtcttaaaaacagagaacattggaggtttcatgaaaaggagaagtgttacatatggttcttcaagaaagttcattggcactagtaaggtttttgggagttggaaagttctgatcgggaaatgatggcaatgagtaaaactattcttagagccacagcaagttgtttcagtaactattagataaaaccggtttcaggatacaactggctgtttcagcagcttggcagagaatgacatgcttggagcattggtacgtgccctgagtgcttttcccccttggcctgttgactcttatagttgagtttggcaagaatgacccaatttatgtgatcaacattcagtttgctaattcacaacaaaacaattttctgccactccatgactaatgtttttaaatagccctcagcctttggcttgaacttaccaaaggacttttcaaactaaaccatgtccactcttttttttttttttttttttttgagacagtctcgctctgtcgcccaggctggagtgcagttgtgcaatcatgattcactgaagccttgacctcctaggctcaggtgatcctcctgcctcagcctcctgagtagctgagaccacaggtgcatgccaccatgcccaactaatttctatagagacaaagttt

SEQ ID NO: 22300 - DNA, 1030 bp, Homo sapiens
gagtggctgggattacaggcatgtgccaccacacccggctaatttttgtatttttagtagagatggggtttcaccatgttggccaggctgttcctgaactcctgacctcaagtgatccactggcctcggcctcccaaaatgctgggattacatgtgtgagccacctcaccaggccagaaggtatgtttttatttttagtttacaggttgaaggctggacttttataaggtacatgaggagacaaaccagataaatgcttgattggttgcagagatgcagtcaccttatttggacttgtcaacccgaaataatcgaaagtttcagatttcaactggaagagtttattcaagcaaaaagatagcaatggcccatttgggaaaaacacagactccagagaaatggactcagtactccaaaattggaagttaagttcttgcttatattactgggaaaagaggtcctgatcagatcccaagagagttcttggatctcatacaggaaggaattcaagacgagtcggaaagtacagtgcaaagagagtttattgaaagctactctgggccagcatgatggcttaggcctgtaatctaagcactttgggaggccgaggtgggaggatcacttgaggtcaggagtttgagaccagcctgggcaatatagtgaaaccccatctcttccaaaaataacaaaaattagccgggtgtggtggcctgcacctgtagtcccaggtactcgggaggctggatgggacaatcacttgaacccgggaggcagaggttgcagcccagctgaggacacgccactgcactccagcttgggtaacagagtgagaccccatctcaaaaaacaaaaacaaaacaaacaaacaagacagagttcaagaccaacgtggccaacacagtgagaccctgtctctatttaaaaaaaaaaaaggaaagaaagaaagaaagcctctcttacagagtagggcatcctcctaaagcaagtggaggaacgtactgtctaagtttttcttatgtagggatcttgt

SEQ ID NO: 22301 - DNA, 1045 bp, Homo sapiens
cctatcctgctgtggctttagcccttgttcagttctagcatcacaattgctttatgaactagccaggtgtggtggcacatgcctgtggtctcaactactcaggaggctgaggcatgagaattgcatgaacccaggagtaagaggttgtagtgagccaagatggtgccactacactccagcctgggtaacagaatgagacgctgtcttaaaaaaaaaaacaactgctagctgggcatggtggctcatgcctgtaatcccagaactttgggagcctgaggcaggcagatcacctgaggtcggcagcctgaccaacgtggagagactctgtctctactaaaaatacaacattagccaggcatggtggcatatgcctgtaatcttagctactcaggaggctgaggaagaagaagtgctagaaccccggcagtgagccgagatcatgccattgcactgcagcctgggcaacaagagtgaaaaaaaaaacaagttgctttgtggaagaaagtaagtatacacagggagaaagagatctgatgaccaaagcagggaatacgtgtttggagtccacggcatcctgagaacttcttgggaatagagtctaggcccccagtgctgtcactctcacccatcttcttctacacatgtgagatgtttcaggacccagtggcttttaaggatgtggctgtgaacttcacccaggaggagtgggctttgctggatatttcccagaggaaactctacagggaagtgatgctggaaactttcaggaacctgacctctttaggtaaggatgacaatattccttccctcagtccattagtgaaccagtgtttctagctcattaatgctgttgagtgatttagaacatagacaggaaatactttgatgaataaatgaggtatggctgcagtaaatcatgggcgtagaatctaataattttttcacaattttatactgcctcaggactattttttctgtgtctgtattttaggaaaaaggtggaaagaccagaacattgaatatgagcaccaaaaccccaggagaa

SEQ ID NO: 22302 - DNA, 1508 bp, Homo sapiens
aaagaaagaaaaagcttctctgtttcagagtagggcatcctcatacagcaagtggaggaacgtactgtctttaagtttttcttatgtagggatcttttctatgtaaagaataaactacctgtgcctatgtgcatgtgggctgacagcatcacaaaatttattactctgttgatttaaagaaaactatcctttacattttagcacccaagtgcattaaaacataactataattatcttgaaagcacatattgttataggtattgggacatcaggacattctattgttgtgggagtgtaaggatacttgcaggcatcttcaggctgttttcttcatgggaaacattttgtgatcatgggttgtgactgacaaggagtgtttcttgttagtgtcaagatggagctgaacttaaattggtgttactctggctcccctaggcacctgcttccctaacacttgtataggcaaaaggcaaataaatgtaacaggattatgttttccatagaaggctgatgtatgagatacaacaattttttttttttttgagacagtatcttgctctgtgacccagcctagagcagtggtgcgatgatggcttactgcagccttgacctccccagctcaagcacctccgcctctcaagtagctaagactacaattgcccaccagcacacctggctaattttttattttttacagaggttaggtctcgttatgttgcccaggctggtctctggctcctggcctcaaacagtcctgcttccttggcctccaaaagtgctgggattacagatacagatatcagccactgcacctggctaacaacttaattcgtaatggtttacttttttcccccagagcttgttttcttttctttctagctggtttttatttccttttcaatttaagagtgaatttaacattccatctgaagacaatctgatagccatgaaatctttgtgtgagaaagtagtctctgggccgggcgcggtggctcacgcctgtaatcccagcactttgggaggccgaggcgggcggatcacgaggtcaggagatcgagaccatcccggctaaaacggtgaaaccccgtctctactaaaaatacaaaaaattagccgggcgtagtggcgggcgcctgtagtcccagctacttgggaggctgaggcaggagaatggcgtgaacccgggaggcggagcttgcagtgagccgagatcccgccactgcattccagcctgggcgacagagcgagactccgtctcaaaaaaaaaaaaaaaaaaaagaaagtagtctctgtagtcttactacagagatcagtagtgaagaggggcctggtaggatggctcacacctgtaaccccagcactgtgggaagccaaggcaggtggatggcttgatctcaagagttcaagaccagcctgggcaacatattgagaccccatctcatttgtgaaaaatcatattaatataagttaaaaaaaatagtggagagggaaagggtctttcctgtttc

SEQ ID NO: 22303 - DNA, 2014 bp, Homo sapiens
ttacaggcgtgagccactgcacccggccaatatgtgatattttatattggattttatttaaactcagttatgaaccttacatggaatgatagttaattcactttcttatttagttgattttattatttagaacagtggttgtttacccaaaacattgagcagataatccagagttccctcatttttcttccaagctcatagttccccctattttaaacatcttgactggccaggtgctgtgcctcatacctgtaattctaccacttagagaggctgaaatgggaggatagcttggactcaggagttggaggccagcctaggcaacatagcaaggccctgtttcaaaaaaaaaaaaaatgttttaaaccaaggaaaccatattgactgtgtgtagtgtatcctataattgatgcaagaatatattacatgtgaacacgatgaaaattgaagaagccaatattattattacctaaagtccatcttttacatgaaacttcactctttttgggctgtggtttaagacaactacgtgtgtcatgtatccaccatcacagtcttatacagaagcgtgtcacaggcctcaaaatcccctgtgctcttcctaatcatagctctcccctccctcttctgccacccctatttatccctggcaacaaatgataatgttcctgcctcggttttgcattttccagaatattaaatatttggaatgatgctgtaagtggccatttcagacttgcttcctcgatgtaaaaatatgcattgaaggtctctcgatacctttgttgcttgacaactcatgtattttttatttttatttatttatctaaaaaaaattttgtttttgaatggtgtgaacccaggaggcggagcttgcagtgagctgagatggcgccactgcactctagcctgggtgacggagcaagactccatctcagaaaaaaaaaaaaaaaaaatttgtttttgttttgttagagacagggtctcaaacaccccagctcaggtgatcctcccacctcagcttcccaaagtgctgggattccacttgtgagccatcatgtccggccactcattttctttcatcactgagtaacattacgttggatgggtgttaccatagtttctttattcacctactgaaaggctcatcttgagcctggtgtgatgcctcatccctaaattcccagctacatgggagacagaggtgagacgattgcttgaggccaggagttagagaacagcctggtagatacagtgtgagacctcatctatttttttttaaaaaaagactcaccttgtttgagtctagtttttggcagttatgagtaaggctgctaaaaacgtctgtgggaggacttttgtgtggacatcagttttcagttcatttgggtcaatattgtaggattgagactactgaatcagtaggaccatgcttattttcttcagacctccgcagactgtcttccgaattggctgtagaattttccattcacatcgatagtgaatgagtgttcattgtcattggcattaggaagtgtcagtgttttggattttagctactgcaccaggtatttgctgctgcctcattgttttcttttttttctttttttctttgtttgtttgtttgtttgtttggagatgcagtttcgcttttgtttccctggctggagtgcaatggcgcaatctcagctcactgcagcctctgcctcccaggttcaaacgattctcctgactcagcctccagagtgtctgggattacaggcgtgcgctgcctctcctgaccaatttttgtattattagtagagatgaggttttaccatgttggccaggcaggtctcaaactcctgacctcaggtcatccacctgcctcggcttcccaatgtgctggattacaggcgtgagccactgcgcccggcctgttttcatttcgctctttaatgacacgtgatgtagagcatcctgtcatatgtttgccataattacagtctttggtcgggtgcggtggctcacgcct

SEQ ID NO: 22304 - DNA, 1044 bp, Homo sapiens
ctcagttcaggagtttgagaccagcctgacaaacgtggaggtttccatgtctactaaaaatacaaaattagccaggcgtggtggcagaggcctgtaatcccagctactcaggaggatgaggcaggagaatcgcttgaacccaggagacagagattgcagtgagccaagatggtgtcattgcactccagcccaggcaacaagagcaaaactttgtctcaaaaaaaaaaaaaagaaaagaaaagaaattagtccagcctgggtaacgtggcaaactttgtcaatacaaaaacatacctggtcatggtgatgtgtacctgtagtcccagctactcaggaggctgaggtagaaggatctgttgagcctaggagtttgaggctgcagtgagctatgattgcaccaccacactccagcctgggcaacagaatgagcctgagaccctgtttcagaaaaaaaaagggaagaaaagaaaaaagaaaaaaatgagtttcaatagagtatgttgtcttttaaaaattacattcaacaggttgtggctgataattgaaattcactgagatttatttttgtataaagtgtgcattctagaaacttagtaaaaatattacatatgcacaaaatacataaaagaattgcacaatgaatccaaataatgatggagccagtattgggaataagataattgccttactttttatactttcacaacctgggtatgcatccccatcagtatattttatttttgcacattttttatgcaaatgataaccaatgtgtgatattttatattggattttaactcagttatgaaccttacatggaatgatagttaattcactttcttatttcattgattttattatttagaacagtggttgtttgcccaaaacgttgagcaaataatccacagagttcccacatttttcttccaagctcataattccccctgttttaaacatcttgactggccagatgctgtgcctcatacctgtaatcctaccacttagggaggctgaagcaagaggacagcttgaactgcagtgttg

SEQ ID NO: 22305 - DNA, 1057 bp, Homo sapiens
agaaggagtcttgctctgtcgcccgggctggagtgcagttgcgtgatcttggctcactacaagctccacctcccaggttcacgcaattctgctgcctcagcctcccaaatagctgggactacaggtgcctgccatcatgcccggctaatttttttgtatttttttttagtagagatggggtttcatcatgttagccagcatggtcttgatctcctgacctcgtgatccacccatctcggcctcccaaagtgttgggattacaggtgtgagccaccgtgcccaccccggtaaagggtcttaaaatgtatcttcccttgctgcagaagctattttgaagtgccatatttttcattaagcattaagtagagaacatcaggataaattagtaggatcatcagtattacatgaaacattagattgctgaatgaattgcataatttaactagaaacactttattctcaagtagaaaagttgtttgctttggagaatttaatcatctgttacttgttcataaatattcccccgaagggctctgacctctccctccagtgtgagcctaattcctaaaactgaataattatttgctgctgcctgtttcacaaacacacatggatgggtcagatgtgtctccttttcctcaaccttatatgaaggaaggagcatctgagcacagcacagaaatgatccaaaccaagctactgtgaagtgtaaagagagcagcatggcttttccaaacaggacagcatcacaaaccctcccaagggtacaaggagagcagttagaacagaaggaaaggtgacccgcagactgttaggactggtgaaaatgattcattgaaaatctaagaaagaactcttgtctttggagccctgtgcccatttctctggagtgtgtcttttcctgaatggccattcccagcttttcacttgaataaactcttcacaactcagtcctacgtttttgcatgatgtgaggttgacgggacacacacccaatacccatggactctatgctccctgccaccaccttcctcttccctcctggcctgcacaaatg

SEQ ID NO: 22306 - DNA, 1031 bp, Homo sapiens
actggctaattttttgtagagatagggtttcaccatgttgcccaggctggtctcaatctcctgagctcaagtgatcctcctaccttggcctcccgaagtgctgggattttaggcgtgagccaccactcccagctccttttttgtgatttcaaatagaatcctagagtgtagccttgagaaggctacagggagaaaaagctcagagaaatagggagaatcactcttcattatggcttcacataactgaatctatctatctatctatctatctatctatctatctatctatctatctatctatctatgtttatcttgagacagggtcttcctcttttgcccaggttggagtgcattggcacccatcatagcttgctgcattctcatactcctggtctcaagcagtcctctcacctcagcctcctgagtagctgggactacaggcgtgcaccaccactgctggctaatttttaaatttttctgtagagatggaggttctcactgtgttgcctaaactgatgttgaattcctgggctcaaacaatccttctgcctcaacctcccaatgtgatggaattacaggtgtgagccagttcacccggccactgatacattttgatgagaaagtaggtagataaattggtgaattcaccaatttattttcaccaatttagtgaagattcatcaagctgggtgtggtggctcacgcctgtaatcccagcacttcgggaggccaaggctggcagatacttgcggtcaggagtttgggtccagcctggccaacatggtgaaaccccatctctattaaacatacaaaaattagctgggtgtggtggcacgtgcctgtactcccacctcctcgggaggttgaggcgggataatcccttgagcctgggaggcagaggttgcagtgacccaagaccctgccactgcactccagcctgggcgacagagcaagactccatccaaaaaaaaaaagagggctgggtgtggtggctcacgcctgtaatcccagcactttgggaggccgaggtg

SEQ ID NO: 22307 - DNA, 1033 bp, Homo sapiens
gtagaagctatatgtatattttgttaattagtggctcatatttaaaatagttctctgactatggatttcaaatgcttaatctcacaaagaaatgttaaattgatataatcctgtaagtaatctgaaagcaatagtgcatgaatttcataggtagtgttgttttaggtcagtaaataaaatatttgtctttccattttgaaatgtgtttaatccaacaatgaatttaaatgtgtttctcatattcaggtatgttaaattgtatatggttgcttaattgttctgtgattgaggaccactgaaaaataagtcttaataaatgttggtatgaacctacttgcttcatttagcaggttcttgattccctttccacattatatacattccatcatatttattggaacagctccttttttttccttttttcttttttctttcttcttttttctttttgagacagggtctcgctctgtgctctgttgcccaagctggagtacagtggcatgatctcggctcattgcaacctctgccttctgggttcaagtgattctcccaccttagcctcctaggaagctgggactacaggcatgtgccaccacacctggctaattttttgtatttctagtagagatggggtttcaccatgttggccaggctggtagaactcctgacctcaagtgatccacccacctcagcctcctaaagtctgggattacacgtgtgagccatcacacctagcccattttttttttcttggctcaaataattttattttgcttcctattaaagagttgttgttaattctaagtatgtaaagtttatcacagactgtagtctcgtgaattattattttaacctgttgttctttactccttgttatttattctggctgctctttgtataattgattttgggataaggagacagctatgatagaataataaaatctaaaatgggagatgcctttcatggattgtgtcatgtcaatctgggtaatgggaactaaacttttcagacttcatttctttctttcttt

SEQ ID NO: 22308 - DNA, 1045 bp, Homo sapiens
tggtgaaaccctgtctctactaaaaataccaaaaaaatcagctgggcgtggtggcacgtgcctgtagtcagagcagctcgggaggttgaggcagtagaattgcctgaacccgggagacagaggttgcagtgagccaagatcacaccactgcactccagcctggcaacagagagagactgtctcaaaaaaaaaaaaaaaaaaaaaaatagctgggcatggtggcacgtgcctgtaatcccagctactcaggaggtcgaggcaggacaatcacttgaactcgggaggcggaggttgcagtgagccgagatcgtgccactgcactccagcctgggcagcagagtaagacttcatttcaaaaaatgggaagaacagcaaacattttaactagctcagataagcatcctccttcacaaggaaaagccgcattcagaaaatgaatcacgttcccaaccttaagagccaggttctgactgctgtaacgcagccccagaggggatcagtctgtgagttcctgtcccctcagtgtggaaatgctccctccttcaggaccttaattttcaccagcaggaaactctcacctggaatcagcttaaggttctgatctaaataaactgtcaaaatcataaacccattctccagaagacaacccaaacaagtctttctctaaacctgaactaaacagatttttttagagggagtctagctctgttgcccaggctggagtgcagtggcgtgatctcggctcactgcagcccccacctcccgggttcaagcagttctcctgcctcagcctccccgagcagctgtgactataggtgcacaccaccatgcccagctaatttttgtatttttagtatagacggggtttcaccatgttgaccaggctcgtcttgaactcctgacctcaggtggtctgcctgccttggcctcccaaagtgctgggattacgggagtgagcgactgcacctggcctttttttttttttttttttttaaacaagatgggggtctcactatgttgctgaggctggtctcgaagtcctgcc

SEQ ID NO: 22309 - DNA, 1101 bp, Homo sapiens
aaccagtattaccgtgcttctaattttttacagaagccatacgggagagagactctgtgaaggtaaagaaggtagtcaatgtgcagaaaacttcagtcccaatctcagtgtgacgaagaagactgccggagtaaaaccatatgagtgtactatctgtggaaaagccttcatgcgtctctcatcccttactagacacatgaggtctcacactggatacgagctatttgagaagccatataaatgtaaggagtgtgagaaagcctttagttatctcaaatcctttcaaagacatgaaaggagtcacactggagaaaaaccctataaatgtaaacaatgtggaaaaaccttcatatatcaccagccctttcaaagacatgagcggactcacattggagaaaaaccctatgaatgtaagcaatgtggaaaagctcttagttgttccagttcgcttcgagttcatgaaaggattcacactggagaaaagccctatgaatgtaaacaatgtgggaaagccttcagttgttccagttctattcgagtacacgaaagaactcacactggagagaaaccctatgcatgtaaggaatgtgggaaagccttcatttcccacacaagtgttctaacacacatgataacacacaacggagatagaccttataaatgcaaagaatgtggaaaggcattcatttttcccagttttttacgagtacatgaaagaattcacactggagagaaaccctataaatgtaaacaatgtggtaaagccttcagatgttccacctccattcaaattcatgaaagaattcatactggagagaagccctataaatgtaaagaatgtgggaaatctttcagtgcacgcccagcctttcgagtacacgtgagagtgcatactggagagaaaccctataagtgtaaagaatgtgggaaagcctttagtagaatcagttactttcgaatacatgaaaggactcacactggagagaaaccctacgaatgtaaaaaatgtgggaaaactttcaattatcctctagatttgaaaatccacaagagaaatcacactggagaaaaaccctatgagtgtaaggaatgtgcaaaaac

SEQ ID NO: 22310 - DNA, 1045 bp, Homo sapiens
atgatgaaaccctgtctccattagaaatacgaaaattagctgggcgttctggtgtgcctgtagtcccagctacttgggaggccaaagcaggagaatcgcttgaacccgggaggtggagattgcagtgagctgagatctaccactacactccagcctgggtgacagagcgagactccgtctcgaaaaaaaaaaaattacagcacagatgtgcaatatatacttgataataaatggctaagttactggtttatatatttacaatcctgttttagaatgtattcctgtgtttttttaacagtaagacagtctcaggcaggtccttaaggagatattcccggaaaaactttgttatgataggcgatgacggctccatgtgcaggactgcccctgaacgtattctggcgggacaaaacatggaggcagaagacaatgatattgatgatcctcaccccgtgtagtcctacactaatgtgtgtttgtgtcttagttagtctttaacaaaaatagtttaaaaaaatttaatagaaaaagcttatagaatatggacataaaatatttttgtacagctgtacaatgtgttttaagctaaattattacaaagtttttaaaaataagtttataaagaaaataatgtacagtaagttaaggtttattcattattgaggaaaaaatgtttttatgaatgtagtgtagtccaagtgtacagtgtttataaattctccattagtgtacagtaacatcctgggccttcgcattcactcaccactcaactgactcacccagagcaacttctagtcctgcaagctatgttcatggagtgtcctatgcaggtgcatccttttttatcttttatactgcatgtttactctgtgtattttctgtgtttagactcataaatacttaacattttgttacaatttcctacagtgttcagtacaacaacatgttgtatggtttatagcctagtagcaatagactgtaccatatagtctagatgtgttgtagctataccatctagatttgtgtaagttcactttgtgatgtt

SEQ ID NO: 22311 - DNA, 1038 bp, Homo sapiens
tgtagtcccagctacttgggaggctgaggcaggagaatcgcttgaatccgggaggtggaggttgcagtgagctgagatcgcgccactgcactccagcctggctacagagtgggactccatctcaaagaaaaaaaaaagagtggcagggagcttgaatgttatggtgcaacttggactgtcaccattgcccaccctaccccagatcccaagacaaaagcgtggttgaaggagcacgtggagcctgtgttcggcttcccccagtttgtccggttcagctggcgcacggcccagaccatcctggagaaagaggcggaagatgttatatggtgggtgtcatggatgtcctgggggtgctatagggaaggaaggagggaggccagcgttcagccctgcctgagagggttgctccctgtgtaagtggtcactgtcatcacctctctcccacagggaggactcagcatccgagaatcaggagggactcaggaagatcacatcctacttcctcaatgaagggtcccaagcccgtccccgttcttcccaccgatatttcctggaacgcggcctggagtcagcaaccagcctctagcagctgcctctacgcgctctacctgcttccccaacccagacattaaaattgtttaaggagaaccacacgtaggggatgtacttttgggacagaagcaaggtgggagtgtgctctgcagccgggtccagctacttccttttggaaccttaaatagaatgggtgttggttgattaattttatttggtttgatttttttcatttttaaattttatttattttattttattttattttatttttttgagagacgaagtctcactctgtcacccaggctggagtagaatggggcaatctcagctcactgcaacctctgccttccaggttcaagcgattctcctgcctcaatttcccaagcagctgggactataggcgtgtgccatgcccaactaatttttttttttttttgagacacagtctcctgttgcccaggctggagtaccatggcacaatct

SEQ ID NO: 22312 - DNA, 1079 bp, Homo sapiens
acccgcctgcctcggtctcccaatgtgctgggattataagtgtaagccactgtgcccagtctgtttttgttttctgagacagggtctccgtcacccagaccgaagtgttgccatgtgatcttggctcattgaagcttcgaatgcctgggctcacagggtcctcccacctcagccctgtgagtaagtggaactacaagtatgccaccacgcacagccaatttaaaaaaaatggctgggcgcggtggctcacgcctgtaatcccagcactttgggaggccgaggtgggtggatcacgaggtcaggagatcgagaccatcctggctaacacggtgaaaccccgtctctactaaaaatacaaaaaaattatctgggcgtggtggtgggcgcctgtagtcccagctactttggatgctgaggcagaagaatggcatgaacccgggaggcagagcttgtagtgagccaagatagcgccactgcactgcagcctgagtgacagtgcgagactgagcctcaaaaaaataaataaataaataaaattaaaaaaaatttggtagagacaggatcgccctgttgcccagattggtctctcaaattcctgagctcaagcgatcctcccatctcaccctcccaaagttcttgggattacaggcgtgggccactgcgcctgccctgctctcttttttgagacagagtcttgctttgttgcccaggctggagtgcagtgttgcaatcttgacttactgtgccctcaaactcctgaggtcaagcaaccctcctgcctcggccttcaagtagctagcactgcaggcgtgtatcactatgctcagctaagttttttatttcatagagatggggccttcctatgtgagaggaggcctagcactttgggagtccaacggtatgttgtgttcttgagatgaggtctcactctgtcacccaggctggagtgcaatggcataatcttggcttactgaagcctccacctcccgggctccagcgattctcctgcctcagcctcccaagtagctgggattacagatgcgcacctccatgcccacctcggcctcccaagtgctggg

SEQ ID NO: 22313 - DNA, 1031 bp, Homo sapiens
ttgctctctagcccaggctgcagtgccgtgcagagccactgcactgagccaatttttttatttttagtagagacgtggtttcaccatgttggccaggctggtctcgaactcctggcctcaagtgatccacctgcctcggccttccaaagtgctgggattacaggcgtgagccactgtgcctggtccccccattatatattctgaagaggcatcaggtgcaaccattcatgtaggacctgaacatcacaccagcttttgcaagatgtaagccctgggcatgtggaagaagctccactcccccgtcacagaccattcgatggcttctgcaggacatatgggtgtgacaatgcaagttgtgcctcaaccccctactcccgtggctgctcgaccttgcgtgaagtaagagggctgcgtgttggaggcaggagggcatccaacgccccgctccctcagcctggctctctcgtcaggcaaatcattcatttccaagccttatctatatcatgggtccaatctcttctctgtaggactattctaagggtaaattgagatacagatggtcccaacttactacagttcaacttactacatttttgacttacagcattttcaactcacaatgggtttattgggacgtagccccatcataagtggaggagctcctgtgctgtgtgtgaatggcctagcaccgtgcctggtgtacaacagacaccatcagtggttcattccctccccttttgcataaggaatcccccctctcgctgggtggagtctgtcaccttggtcttcaggctgttcctgaagttggtcatgagtgcatggtccttttgccggctcttgttgatgttttcgatcagctcctgggctctcttctgcaggatgtcaatgcttgagtccagagaggagaagtagagtcccgacttcccttccaggaccgtcagctggcaactggcactggaggtggcgacacaagggcaagaaacctgacttctcagagtacaggaagcggccaggtgtagtcgctcatgcct

SEQ ID NO: 22314 - DNA, 2017 bp, Homo sapiens
ctgacctacccctctaatcccccacttagacgggtggacttcccgctggatcgaatccaaacacaagtcagattttggcaaattcgttctcagttccggcaagttctacggtgacgaggagaaagataaaggtaagagcctaggagtgggtgctcagatccgggaggacttcctggcagaagtccttgtctgtacacacacagccgggacagtccccttggaggaggacaggtggaggaagtgggggagtcttctctattctctaagtcgagggtcctcgcgagtcaaggcccaacggtgacctcactaccgtcccgtctcaggtttgcagacaagccaggatgcacgcttttatgctctgtcggccagtttcgagcctttcagcaacaaaggccagacgctggtggtgcagttcacggtgaaacatgagcagaacatcgactgtgggggcggctatgtgaagctgtttcctaatagtttggaccagacagacatgcacggagactcagaatacaacatcatgtttggtgagggcctgcttcctggtgctgatctctgtcccattagttagagggagacccagaccccattgactttcttaataatgattttttttggaaggggagctaaaagaataagtcccagcaacaatttattgcattatgatcgcagatctaggctgttaatttaatttgcgtgtttgtatatagttatttcccaatcttactaatgaggattttgagttctagagcactgattttttttttttctcctttaaacttaaggctccacccacagcccattcaggacagaatcagggtctgagtttctcttctcagccttgacagacccgagttgaagaaccaggtcttccttttataaagaggggtgagagcctcgagatgatgggtagtctctgactcttaactggatctgcttcacacctaggtcccgacatctgtggccctggcaccaagaaggttcatgtcatcttcaactacaagggcaagaacgtgctgatcaacaaggacatccgttgcaaggtgtgcctgggggtggtggcaaatggctgtcatggggagattcagaggtcagcctcattggggggtggcccccgctcaccttcttccttcttcaggatgatgagtttacacacctgtacacactgattgtgcggccagacaacacctatgaggtgaagattgacaacagccaggtggagtccggctccttggaagacgattgggacttcctgccacccaagaagataaaggatcctgatgcttcaaaaccggaagactgggatgagcgggccaagatcgatgatcccacagactccaagcctgaggttggtgtttgggcaggggctctgctctccacattggagggtgtggaagacatctgggccaactctgatctcttcatctaccccccaggactgggacaagcccgagcatatccctgaccctgatgctaagaagcccgaggactgggatgaagagatggacggagagtgggaacccccagtgattcagaaccctgagtacaaggtgagtttggggctctgagcagggctggggctcacagtggggagtgcaccaaccttactcacccttcggtttccttctcccttctgcagggtgagtggaagccccggcagatcgacaacccagattacaagggcacttggatccacccagaaattgacaaccccgagtattctcccgatcccagtatctatgcctatgataactttggcgtgctgggcctggacctctggcaggtgagacttggaggaaaaaggaggatccctggggtacctcaagtgcataagatcacccaagaggaaagggacagggtaggcaccccaggtgagtctgactcaaaaatggtacttcttgtaaacagtacttcctggtctgtccctgtgaagtcctcacagcaacccctttaaggttatacttgctgtgcaccaagtacttccccaagtacttttatgcaaatcaacttctttacc

SEQ ID NO: 22315 - DNA, 2047 bp, Homo sapiens
cgtccctggctgtctctccatctttccatcttttttttttttttttttttttttggagatggagtctcactctgtcacccaggctggagtgcagtggcacgatcttggctcactgcaagctccgcctcctgggttcacatcattctcctgtctcagcctcccaaatagctgggactacaggcacttgccaccacgcctggctgattttttgtatttttagtagagacggggtttcaccgtgttagccagggtggtctcgatctcctgacctcgtgatccgcccaccttggcctctgggcgaggattacaggcgtgatccacctcacctggcctctccatctttttaactgcagtgtcagcggtgttccttgtcttctctgcagatgcaggcagcagaatatagtggttataggaacacaggtggaaaccctgtccaaagcaagggctatcgggtatcacctctgaccatccttcccattcatcctccaggtcaagtctggcaccatctttgacaacttcctcatcaccaacgatgaggcatacgctgaggagtttggcaacgagacgtggggcgtaacaaaggtgaggcctggtcctggtcctgatgtcgggggcgggcagggctggcagggggcaaggccctgaggtgtgtgctctgcctgcaggcagcagagaaacaaatgaaggacaaacaggacgaggagcagaggcttaaggaggaggaagaagacaagaaacgcaaagaggaggaggaggcagaggacaaggaggatgatgaggacaaagatgaggatgaggaggatgaggaggacaaggaggaagatgaggaggaagatgtccccggccaggccaaggacgagctgtagagaggcctgcctccagggctggactgaggcctgagcgctcctgccgcagagctggccgcgccaaataatgtctctgtgagactcgagaactttcatttttttccaggctggttcggatttggggtggattttggttttgttcccctcctccactctcccccaccccctccccgcccttttttttttttttttttaaactggtattttatctttgattctccttcagccctcacccctggttctcatctttcttgatcaacatcttttcttgcctctgtccccttctctcatctcttagctcccctccaacctggggggcagtggtgtggagaagccacaggcctgagatttcatctgctctccttcctggagcccagaggagggcagcagaagggggtggtgtctccaaccccccagcactgaggaagaacggggctcttctcatttcacccctccctttctcccctgcccccaggactgggccacttctgggtggggcagtgggtcccagattggctcacactgagaatgtaagaactacaaacaaaatttctattaaattaaattttgtgtctccctcctgtgtctccttctggggaaagacagacttaaggaaacccagcagtggtctttttggggggggggggggtttccagtatatctcctttttcagctattgctagagaggttgctgagtgttccacaagattccagggacccttatttaccccataaccctcaaaaccaacgggggaatggctgttgctgctgtaaatactccacatactaacttactgaatccttgaacctaactggtaagttttggttctgcttatttatttatttttaagatagactctcgctctgttgtccaggctggcgtacagtggctcaatctggttcaccctgccccttaaactggcctttttcatgcttctattcctttggggtcctgtggctcagcccaacccctctgggatgcctccaggactggtagatccaagggagaattctgtatttaatgtagtgaggctttgaaagttaacatctttaaatacttctggggtcagattaggtatagtacaacaaagtactcctgcccggagacccaagaatgaaaattgtaggttcattccaaaactccagatccctaaagaatgaatgaggctacaaaatggcac

SEQ ID NO: 22316 - DNA, 1011 bp, Homo sapiens
actgtcccctttattctgttaattatactttatactacccgaaattacattttcttcacattagtgttctctcattgagagcagggacttacttgtgttgagtttgttctgtgctgtggcctctgtgtctaaaacagcacctggcacataatgggtgtttagtataagtaaatactgtgttgaatggcatgatgattgaatgaattcaaatctagcatgctttagatgctgagaaagcttaaaaaacccagcgtgcttgcctttctgccatcagggctggcagtttctctgtcctaaactagaagggaaaagagaatcttggggtctccagtgactgtctgtaccactccctctaggtgaaggtgctaaaggagaagatagaagctgagaagggtcgtgatgccttccccgtggctggacagaaactcatctatgccggcaagatcttgagtgacgatgtccctatcagggactatcgcatcgatgagaagaactttgtggtcgtcatggtgaccaaggtgggtgacgtgtgctggctgggagggtgggtggacgagctggggagctggcaaagagcctgtgtgcccaggagagattagctgtgaacagggcggggccacagcggagcgggttgttgggtctgatagggttgctgatgccagctccctttttcttgctgttgcagaccaaagccggccagggtacctcagcacccccagaggcctcacccacagctgccccagagtcctctacatccttcccgcctgcccccacctcaggcatgtcccatcccccacctgccgccagagaggacaagagcccatcagaggaatccgcccccacgacgtccccagagtctgtgtcagggtaaggcgggggcagcagtcccagcttgggccctgtcctcctagcacattccagcgtccacataagtggtcccacacacctggagggagggcaagccgccagaagccagggtccgatttctctctcttgaatttgcagctctgt

SEQ ID NO: 22317 - DNA, 1055 bp, Homo sapiens
ctaattttttgtatttttagtagagatgggatttcaccctgttagccaggatggtctcaatctcctgacctaatgatctgcccgccttggcctcccaaagtgctgcaattacaggcatgagccatcacacctggctgactgaaaagcactttcttctttaatgtgaaaatgatcagatgcatacaatggtagagttatatcagagcttccagatacccaggtagggcacagtggctcatgcctgtaatcccagcactttgggaggctaaggcaggcagaccacttggtcaggagttttagaccagcctggccaacatggcaaaaactcgtctctactataaatacaaaaagtagctgagcatggcggcaggccactgtagtcccagctactcaggaggtggaggcaggagaatcgcttgaacccaggaggcagaaattacagtgaaccgagattgccccactgcactccagcctgggtgacagagtgagagtgtctcaaaaagaacagaaacaaaaatgaacaaatgaacttccagatacctaaatccaacacccagatgagttcactttttttggtttgggggctggtaggtgggaatagagacagggtctatgttgcccaggctggttttgaactcttgggcccaagcagtccctcctgccttgcctcccaaattgttgaggttacaggcgtgagccaccacacccggccaagttcacctttctaaaagatccacagaccacgtcttttcccatgtaactgtcaccaccgtggcttccccctgctctagaaaatgggtctgacttgggccttcctctctggtgtcattgtctgcctcctcccccttcccttgttcgctgttttttgttttttttgttgttgttgtttgtttgtttttgagatggagtttcgctcttgttgcccaggctggagtgcagtggcgtgatctcagctcaccgtaacctccgcctcctgggttcaagagattctcctgcctcagcccccagagtagctgggattacaggcatgtgccaccacgccctgctaattttat

SEQ ID NO: 22318 - DNA, 1027 bp, Homo sapiens
tgttcattagacgtgaacttgtcgattgggcaaattgtttttggtctccaactgccgggggctctccccaccctccctgctcgcccggttccctcctccccttggacgcagccattggctgctcgtggatgtctctttgccaaataggtggatccttctctctctttctctctctctctctctctctctctctgtctctttctccccccacccctttttactggcttggcacaagcaaatggatggggattgagcctgaaaggagagagagagagggagtttgagagagagaaaaggagcaaaaaaaaaaaacaccccaaaaacccaaccagtgcgcacacacacgcgcacactcacacacacgccccatcccatccacgtcctccctcgatcctcgatctctccctcccccccttcttcctttcctccctccctcgctccctctctctcttttgcacgcgtctgccagcaacggtctgcagccggtcagaactcgtcctcttccccgggaatctgcgagctcccccttttcctccgatcaggcagctcgaagtttacacccctgtgccgctgccaaagccgaaagcctttttcttcagctgccgctttttccctcctgggttttgtttttgtttttgttttgcacgggggtggggtggggtgcgttgttggttgtggggagatggtgggaggctggttttgatttttaaattttgcatttttttctttttttttttttttaaactggaagaggatgcacaggggaagaaattgaaaaaaaaattttgttggcttttgtttacctggcgtgtgtggcagccggctcgctccctctctctgcttgctatccctgacctttctttctttttgctccttttcaaaaaaaatattaatttcccccttctgtgcaatggagcatggggggggggaggagggggaagggtttgagaatccacccaagcccggcccctattccccagaacaccaataataaccccctttaaaacatttaccttcctcccctgct

SEQ ID NO: 22319 - DNA, 1042 bp, Homo sapiens
agggacccttgggggtcaccgtggcatggcagtttcctctcagcttctggccttgggactgcagaagtggctcttgagactgtctggtggtgagcaggtgctggccatggtatcttaatggcagcagcccccaggtccacttctgaggtgcaagcccatgctggccgccagcacgtgccagagagctcctgaggaagcagctgctgctgacacctgaggccagctgcgcagtctgccacaaggcccctggggctgccaaggtcgcacatgtcctcccaggacttgaagggggaccaggggagggtgagctgttgctgtggactgtggactttgacatcactcatagacaccccctctctcacccttgcatcccagacagtgtcccccagggccatgcaggcagggacacacagcccccttgtgccctgccccaagtccctgtgtgtaagtgagcatgctctcatcagacttggtccccactgccatggcactcttatctgtgtgcctgaatatgcatgcttattcatctcgaaaactgggccgtagggccaggtgtggtggctcatacctgtaattctagcactttgggaggccgatgtgggaggatcatttgagcccaggagttcgagcctgggccacgtagcaagacccccatctctataaaataaaatttaaaaaaaaagaaaaaagagaaaatcgggccttatatcattttctacatcctattcggcccatggaagcgtaagtgtcttcagcctctgttgacccttgtcccccaccctttctctgtgatactccaccttacccagaacctgactgtcctcaggccctgggtagtgggagctgcctcaagactcctgaggccccacaagaggcttttgaattgcagcagtggatgtgggtagttgtgtaggacagagggaggcgacagcatcgtttctcccctttcttccttcagctggggctgtggcatggcagtgtgggccatccagtgtctagagggcttgtggccacgcagtcgtgggtgggatgcatatgttca

SEQ ID NO: 22320 - DNA, 1051 bp, Homo sapiens
ggcacctccgtgtgtgtgcgcgcgtgtgtgtgtgtgtgtgtgcgtgtgtgtgtgtgtgtgtgtgtatgtgtgtgtctgagtctgagcatatgagtgtatgcatccaagtgtatgcacatacctgggtatgcatatgtgggttcagctaaggccaaatctgtgcacacccctcagcctccataaaacttgttaggccaaagtccgtgggggcaattggccagcaaattatacatggcccctttcacagtacaagtttgtttcgagcaggagctgagggcagtgttggctgtagccagcaggaattcctccctcaccctagtgggagccataactacctccccatctgtaggtggaaaatatatatatatatattaaaaacatgcatccgggcacggtggctcacgcctgtaatcccagcactttgggaggctgagacgggcggatcaccaggtcaggagatcgagaccatcctggctaacactgtgaaaccctgtctcttctaaaaatacaaaaaattagctggtcctggtgacaggtgcctgtagttcccagtactcgggaggctgaggcaggagaatggcgtgaacccaggaggtggggcttgcagtgagccgagatcgcaccactgcactccagcctgggtgacagagcaagactccatctcaaaaaaaaaacaaaaacaaaaacaaaaaacaaaaacatgctgtcagttggagtttatgtgcaatcccaggctcctcctggctgctggagcttcccctccagagctctactgaagaggcagtgtcctcttggaaacacgcacaagcacacgtgcctgcaaacagcagaaggaagaggggggtgctgaagaggtgagggggaggcaaaggaaggacagagggaggggagccaagggagacagggaagtaagatcagaaatggggatccaaggggaaaggcagctgaataaaagaagtaaggtggggacttgttccaggggctgagaaggggagctggtgtgggtgtgagaagggcaattttgcaggagaactttgtggctgttccagag

SEQ ID NO: 22321 - DNA, 1076 bp, Homo sapiens
tgggcaacatagtgagacctcatctttacaaaaaaatttaattttaatttgtttttcacccgtgacacagccctcaggaggtcctgagaacatatgtctctcgtctttgcaaaaaattgttttaattagccgggcgtggtggcacacatccctagtcccagctactcaggaggctgaggtgagaggataacttgagcccaggagtttgacgctatagtgatccaagattgcaccactacgcttcagcctgggtgacagagcaagaccctgtctcaaaaaaacaaaacagactgggccattgataaacaacagagatgagctgctcatagttgtagagggtgggaagtcccatatcacggtgctagcagattccgtgtctagtgagggcccatctctcatagatagcaccttttaggtatctgcacagggtggcaaggacaaacaagctccccctcttttatacgggcacagttcgtattcatgaggacagagccctcctgactgaatcaactcccgaaggccccacttttttttttttttttttttttggtgagacggagatttactcttgttgcccaggctggagtgcagtggtgcgatcttgactcaccgcatcctccgcctcccaggttcaagcgattctcctgcctcagcctcccaagtagctgggattacaggcatgtgtcagcatgccaggctaattttgtatttttagtagagacggggtttcactgtgttgcccaggctgatctcgaactcctgatctcaggtaatccgcctgtctctgcctcccaaagtgctgggattacaggcgtgagccactgcacccagccctttttaaatttttgatcaacaacttcttttttattttgagatggagtcttgctctgttgcccagcctagagtgcagtggcgtgatcttggctcgctgcaacttccacctcctaggttcaagcaattctgcctcagcctacctaatagctgggattacaggcgtgcaccactgcgcccagctaatttttgtatttttagtagagatggggtttcaccatattggccaggctagtctccaactc

SEQ ID NO: 22322 - DNA, 1241 bp, Homo sapiens
cgtggccggagcgcaaagccccgcccctccgcgccccccccccggaagccccgccgccggccgctaaggcgatcacgggccctgtcctaatatgggcaaccggaagcggcccgcgcgactgccctacgtcactccgtccaaatttagttgtggaagtcagcgggcgctggtggcgggaaggcgccgcgagccagtgcgggcggaaagggggcggggggcgcaccaccccttaaagggcccgcaccaggaatgaatggagccattcgaacaattctgcatcctatttttggaggaagtggaattagtatttcttggagagacggcgcgtagcggagggtagggcggagattttctatctgctctgtctctgcattgctgggtttccagctcccaacctaaccccgcctccccgaacgcggagacggaactcggcccccttgtttggggggcggcagccacgtgttcacggggactgtcgtgcgcgccgggttcgcagccgtgcgagctctgaacccacccgtggagctcctgtcgcgggaaactgcgggggaatggcttggtacgaatcacgggaacccgtagcccggggcgggtcaccgcctacaagcaagggctggcgtacgctagagaccgaagagctggaggccccagtggccccctttcacagcagtagcaaatattgtttgtttagtaaatattggcctagtgactctgccttggtttccccacttgaaggaagcagatagaacagtatcctccgaggagtggaggctggggatcggtgaattattgataaaaggagagctcttaacctagcctggcacgttgtaagcgctgttagcatgattattggtgcagaaaacactcattagacacacctggtaaatgctaagaacagtggccacaggggatgttcaggctggaaccagggtcttcccctgtgtgaagggaaacttgctgcccacgacccactggggcctccagacgggagcatgtgggtaggccgtgagctccacccccggcccccctcccttgggccaaggcgctgatgcatcggcggggctcagagaaaggagcccacccagaaagctcagcgtggagtcgggggacgctcctcctcgccagggttcccgtcccctttccctgctgggtaaatcgcattctgtctctttaaggagtgtttggccgcgacgagttggaaagcccggatgcgtccttcggttgggcggggtgtctcagtg

SEQ ID NO: 22323 - DNA, 1027 bp, Homo sapiens
ggaagaagaggagggagcgtcatccgaagtcgccgatcgcctgcagccccctccggcgcaagcggagggcgcctttcccaacctggcccgcgtcctgcagaggcgcttctccggcctcctgaactgcagccccgcggcccctccgacggcgccgcccgcgtgcgaggcaaagcccgcttgccgcccggcggacagcatgctcaacgtgctcgtgcgggccgtggtggccttctgaggaccccgagcggcgctgccggagcccagagcgcgcgtcgaaccgtcggcccgagggcgcagacctgaggcgaggccacccccctccatcctgggggaagcgcccgcgaaaaccgtggagagaagccgccgcccgggctgctgagaggcccggagagggactctgtccccggggagccatcgccttcagtgtgcagggacggcaccgaggagtctgagccgggggcgcgggcgccttccgcagagacctgcgcccacaggtgctgtcttagtggactgggacgtgaacctttcgctctccttctggactgggagaagggaggcttgggtgttgtgttttttgttttgtttgtttgtttgtttttaaagatctcctcagggtcggacttcattttgtactgtgggctgtgctggccctttcaaggtttttcaagagttggttttgcgtttccaacctcggagaattccaggcactccccttccccctccgctgacatacttgtataagcggtcatcgttgcgtcatggggcaggcgtggggagcttcctgtcgccttgcgtgggtgtggggcctgggaggaggtcctggggcgtgcacccgccctgggcagtggggaggagagtggcctgagttacttcacccccgcgtgctgctggttaatgtcccgcgtctctgcaccttcgggtgggagcggggactgatctactttcacattctcaagtttttctcatctgcattagaggtgcccagtaggttcccaggttccagcgtgcccctccctcagacacacgg

SEQ ID NO: 22324 - DNA, 1050 bp, Homo sapiens
aagaaaagaataggggtttggggcttctgggaggatggtggtaacacaagttatgggagggtaaggggagaaattgtatgatggagaaagtctgtcttgttaagcaaataaaaaagtcttgcaggtaataaaagttgtctcagagcagccctcagaaggatacatgattgggaatggtttcactcttccctagttaataagatcgtaggaaagcattcctctttctgtctttaggcagataagagaaattcagagaaaacctctccttccctgcatttgctgttcccccaagtgcccttattttgaagcaatcagcagacaaaagcgcatatccctgtgttccaatgaaattttatttacgtacgctgaaatttgaatgttttattttcataagtcgtaaaatagtttttcccccacctaactatttaaaaatgcaaaaacagagcagtggttcacgcctgtaatcccagcactttgggaggcaggaggattgcttgggccctggagttcgagactagccggggcaacatagtaagaccttgcctgtgcaaataatttttcttgagacggagtcttgctgttgttgcccaggctggagtgcagtggcgcgatctcggctctttgcaacctctgcctcccgggttcaagcaattcttttgcctcagcctcccaagtagctgggactacaggggcccgccaccacaccctcgctgaccggctgcagcgcgcaggacagcacgcctgggagggcggtgccaggaggcgggcctcggattgggcctcacgtagtgggctggacagaggatggagcctcttggcgtaagcgcggttgggcggggcattcctggattggcccactccggcgtcgcagaacgcttggcgtatcgtccttcagccaatcagcgtggagctgctgcctcgccccgcctcacgccggcgtcctgggggcgcggagagggcgcccaggttcaccgcgctctcagcgcgcacttccgggcacggtcagggcgtgacgtcgggaggagggcaggtaagtgccggcgggcggag

SEQ ID NO: 22325 - DNA, 1058 bp, Homo sapiens
ccccaatccagggcctggaggccaccaagcccacccagcagagtctggtgggtgtcctggagactgccatgaagctggccaaccaggatgaaggcccagaggatgaagaggatgaggtgcctaagaaggtttgagggttggggccgggcgcagtggctcacacctgtagtcccagcactttgggaatccaagatgggaggatcgcttgaggccaggagtttgagaccatcctgggccacacagtgagacccccgtctctacaaaaaaattttttaaaattagccaggcatggtgggactcacctgtagtccctgctacttgggagactgaggtgggaggatcacctgaactaaggagttcaaggctgcagtgagccatggtcatgccactgtacgccagtctgggtgacagagcaagacctcatctccaagacaattaaaaaaaaaaaaaagtgtttggtgagaattgcttgaaccgggaggcagaggttgcagtgagccaagatcgtgctactgcactccagcctggacgatacagtgatactctgtctcaaaaaagaaaaaaaaaaaaaaaaaggtgtttggggccaggggctttgagtgaggcaggggagtagcaaagtcctgggagcccactaaatgaccactgttgtcaccatcagaccctgatccttggggactggactcatcacaggcgctacgaaatctctaacatcctctctcttcctctacagcagaacagccctgtggcccccacagcccagcccaaagccccaccctcaagaactccccagtcgggatcagccccaacagccaaagcgccccccaaagccacatccaccagaggtaagttccccctccccgccccagctgcctgttgcctggctgtggcctgggcagcacccatagcagctcctatgcccacagcccagcagcagctggccttcctagagggccgcaagaagcagctcctgcaggccgcactgcgagccaagcagaaaaacgacgtggagggtgccaagatgcacctgcgccaagccaagggactggagcctatgc

SEQ ID NO: 22326 - DNA, 1096 bp, Homo sapiens
acaggaccattcctttttctctgagcatcatttttctcagagaagtggggatggccacccctgcctcaaagaaagacagccaggattcctcatgtgatagaatagtactcataataggaaacatttgaggagcttgaactgggcgcccagcaaaggccacccagtttaaggaagtgacatcacttttgcttgcctcccattggcccaaacagtcacatggctacatttagcctcagaggagcctgggacatgtagtctttgctggacactggagacatggccttgagcaaaaaaggcaaaaatccacactctctctggacatggtgggtcacacctgtaattccagctacttgggaggctgaggtgggaggattccttgaggccaggagctcgaaactagcctgggaaacacagtgagactcactgtcatggagtggatgttctaattgagagaccacaagaaacacacaaataaatacagcaccttatcacggcccatgaagactgcaccatctgccccatcagctcccttgcctggtctctttcttgtttttgttttgttttgttttgttttgagacggagtctcgccctgtcatccaggctggaatgcagtggcacgacctcagctcactgcaacctctacctcccaggctcaagcgattctcctgccttagcctcccgagtagctggaactacaggcacacgccaccatgcccggctaatttttatatttttagtagagatggggtttcactatgttggccaggctgggcttgaactcctgacctcaggcaatccacctgcctcgacctcccaaagtgctgggattacaggcatgagccactgtgcccggcctgccccttctctttcacccaccccctcgctcactcttccccttgctgtctggtagcctcaaacaccaggcactctgcaacctcagggcctttgcacatgcagttcccactgcctgaatgcttttcccacagacacctgtgtggttcactttctcccatcattaggtctctgctcagacatcacatctccaggaggcctaccctgagctgtctaaaatccctccctgtcacccagatccct

SEQ ID NO: 22327 - DNA, 1035 bp, Homo sapiens
tcaagactaccatcctggctaacatggtgaaaccttgtctctactaaaaatacaaaaaaataagctgggcgtggtggcgggagcctgtggtcccagctactcgagaggctgagacaggagaatggtgtgaacccgggaggcggagcttgcagtgagccaagtttgcaccactgcactccagcctgggcgacagagcaagactccgtctcaaaaaaaaaaaaaaaaaaaaagagaaatgaagatggcaggctgggcacggtggctcacgcctgtaatcccagcacttttggaggccaaggcgggaggatcacttgaggccgggagttcaagaccagcctggccaacatggtgaaaccccgtctctacaaaaatacaaaaaaatcagccgggcttggtggcgggtgcctgtaatcccagatactctggagactgaggcagaggaattgcttgaacccgggaggtggaggttgcagtgagccaggatcgtgccatcgcactccagcctgggcgacagagagagactctgtctcagaaaaaaaataaaataaataaataaataaaagaagaagaaatgaagatggcagtaaatgctcaggcacaccggacagcagtcatgtggtttactcccacacacactacactggggagtgggcgccatcatccctattctacagagggaaactgaggcagagaggcccactgtctgggatttgaactggggatgcctggctcctgtctgttttcttagccactccccacacaccccaggtcagaagagcagcagctggagctgagacccccaccaggctcatggcccttccctactcagttcctgaaactccaccctcaagccgagctcgggaggctgaggcggggaggatcgcttgaggccaggagttcaagatcagcctgggcaacagagcaagactctgtctgtaaaataattttttgaattatttttaggccggccacagtggctcatgcctgtaatcccagcactttgggaggccgaggtgggtggatcacgaggtcagg

SEQ ID NO: 22328 - DNA, 1095 bp, Homo sapiens
tctccataggacaggccaggccagggccctgagtcctgggtttgccttgctggccctcaggtgacccctgtgccttgggtagaagtgagtcactcaggggaggagaacccaggagcccagcctccctccctctgtgcattacagacctcagctgctggaggtggggctgagggaggccacctctcctctctgcctggacttccccagttgagctggccccgctcttggctgtgtcctccctctgcctgctggggatggggtggggccttctgagcgagggtggtatttggtgagcctgggcttaaattccagcgctgacacttcctcgctgtgtgtcctgggcccagtgccttcgcctctctgagcctcggttctgacctaggaaaaatgggactaagagggtgttcatgggagagagagagaccgagaccttgccagcacttggcaggcagggctgctgtgaagtcgttactggtaagcgtcctggtcagcagctcagggtgtgaatctgtgtccttattgattgatttactgatttatatttatttattttagaggagagagtcttgctctgtcacccaggctggagtacagtggtgcgatcctatgtcaccgcagcctcgatttccaatttccggggctcaagtgatcttcctgcctcagcctcccaagtagctgggacaaaaggcacagaccaacatgcctggctaatttccttttacttttgtagagacagggtctcgctctgttacccaggctggaatgcagtgacgagattcttgttcactgcagcctcaaacacctgatctacaggactacaggcatgcaccaccacacctggctaatttttttttctttatttttttaaattgagactggggtctcactctgtcacccaggctggagtgcagcggcatgatctctgcctcctagactcaagccgttctcccaccccagcctcctgagtagctgggactacaggtgcacaccaccacgcctggctaatttttgtatttttagtagagtcagggtttcgccatgttgcccaggctggtcttgaaatcttgagctcaaagtaacctgcccgcctaggcc

SEQ ID NO: 22329 - DNA, 1160 bp, Homo sapiens
cccaccctacaaaaaaatgcaaaaaacaaaaccaaactaaaaaaagcattgttttggtagactcatccattttgttgtgacaagctatagttaattcatatttattcctgtttagtaatccattatgttagactgagccatatcgaattgcctctttctgaaagcaaaaaaatagttaaatatcagcaatttcgtacttcagctactaagatggtatagcagttttaaaatattaattctcctgttaatggactgtgggatgcctctattttggactgttacatacactttatataaatgcatctcctgatgtatacccacatgcatttggctagggtaaatcctcaggagtgcctgggcgcggtggctcacgcctgtaatcccagcactttgagaagccaagaccagtgatcacttgaggtcaggagttcaagaccatcctggccaacgtggcaaaaccccatctctactaaaaacacaaaaattagctgggcatggtggtgtgcgcctgtagtctgagctactttggaagctgaggcacgagaattgtttgaacccagaaggtggaagttgcagtgagccgagattgtgccactgcactccatcctgggtgacagagagagactctggctcaaaaaataaatgaataaataaatccttaggagtatgtggctgggacttccatgtagaataaaattgaatttggatccctgcctcacatcacaccatgtaaaaaaatcaactggattaaaggcttcaatgtcaaatgcaaaactttacagtgggagaaaagttatggaggggaggattcattttaaaaagatagcagacagctaggcctggtggctcatgcctgtaatcccagatacttgggaggctgaggcaggagaatatcacttgaggccaggagtttgagaccagcctgggcaacataacaagactcatctctactgaaaaaaaaaaaaaaaaagaaaaagataatagacatgcccctttctgccaggattttctttctttttcttttttttttttctttttttttttttttgagatggagcttcactcttgttgcccaggctggagtgcagtggcgtgatctcggctcactgcaacctctgcctcctgggttcaagggattctcctgcctcagcctcccgagt

SEQ ID NO: 22330 - DNA, 1012 bp, Homo sapiens
tggagaaaccttgtctctactaaaaatacaaaagtgagccgagtgttgtggcacacgcctgtaatctcagctacttggaggcagaggttgcagtgagctgagatcatgccactgtactccagcctggatgacagagcgagagtctgtctcaaaaaaaaaaaaaaaaaaaaaaagggaagcttcaaactcactgttcaaagtgaccttgaaggaaaaaataaattgttattttgctgtgttgtttgttattctctgccaacctttgccaagtacccatagaggcgatagctacagggcttctgggtgggagaagcagttgtttcccggcccagcggattgcatagcaagcagattagtttaactgcatgtgtgtattgtaggtcagtaaaaatagaaaggatgctttcactcacacttaacaagcaatttgagaaaaggtttgtctacatcaaagaatatatttctggccgggcgaggtggctcatgcctgtaatcccagcactttgggaggctgagacgggtgaatcacttgaagtcaggagttcgagaccagcctggtcaacatggtgaaacctcgtctctactaaaaacaaaaaaattagctgggtatggtggcacgtgcttgtagtcccagctactggcttcgaggctgaggaatgagaatcacttgaagctgggaggcggagttgccatgagctgagatcacgccactgtactccagcctgggtgacagagcgagactctgttttaaaaaaaataaataaaggatatatttcagctgggcacagtggctcatgcctgtaatcccagcactttgggacaccaaggtgggcaaatcatgtgaggtcaggagtttgagaccagcctggccaacatgatgaaactccgtctctacaaaaaataaaaaattagctgggtgtggtggcgcacgcctgaaatcccaggtacttgggaggctgaggcaggagaatcacttcaacctgggaggtggaggttgcagtgagctgagatc

SEQ ID NO: 22331 - DNA, 1078 bp, Homo sapiens
tctcctgcctcagcctcccgagtagctgggattactggtgcccaccaccacaccccactaatttttgtatttttagtacagacagggtttcattgtgttggccaggctggtcttgaactcctgaccacaagtgatccacctgcctgggcctcccaaagtgctgggattacaggcatgagccaccgtgcctggccataatttttgtatttttagtagaggcaaggtttcaccatgttggccaggatggcctcgaactcttgatcttaagtgatctgccggcctcggcctcccaagtagctgggactgcaggtgtgtatcactatgtctggctgcttttttttgtttgtttgtttgtttgagttggagttttgctcttgcccaggctggagtgcagtagagtgatctcgattcactgcaacttccgctttccggtttcaagccattcttttgcctcaggctccggagtaactgggactacaggccacacgctgctaattttggtatttttagtagagacagggtttcaccatgtgggccaggctgatctcgaactcctgagctcaagtgatctgcccaacttggcctcccgaagtgctgggattacaggtgtgagccactgttcccggccagtgcctggctaatttttaaaggatttttcttggtagagacgcagtctcaccgtgttgcccaggctggtcttgaactccttggttcaagtgatctcctgcctcagcctcccaaagctctgggattctaggtgtatgccaccgtgcctggctggcaactggcttcttctggcctcttggccacaagccctgggtccatcctgcccgtggctgtcctgttccccatcatctcaaccctcctggcacagcggcccttctgagatggaagctgccgagacaacactgggcactcaccgcacaggttgtgggcaggtcctgctggtccaggccttttcccgtcataggaccctgcctctgttttccagtccatcacttattcattagttcatttgttccaacatgttttttccctcttatcaatgctaagaatcgtgggatgaacgaaccacatt

SEQ ID NO: 22332 - DNA, 1062 bp, Homo sapiens
gggatcccatcctgcacccctctcccaggggcctgcagagatgccccagtgtggcccaggcttctggggcgtgactggggcaggcgcctccacgtggcactccgcaggaacgcccttgctaggctctgggaaggacaagatcctgcttctgcccgcgctcttctggcttgtgtcctgaaaccgcacaagcctgagggtttgcccccaggtgggaggagctgtggagtcctggggtccttgcaccctgggaaccctgagaagctggcacagtggctgggcagcggaccggctgagccctgccaggctgtgggctgtaactgccctgttctccccgcagatccgcagtggtaccccgcccgccagtccctccgcctggaccccagtgagtacagctgtccactcggcccgccccctgggctcctgggtggcagtgggagaaggcccgggtagcccctgagccctggcccgcctctctgcagagggcaagtccctgaaggatgaggatgttctgcagaagctgcccgtgggcaccacggccacactgtacttccgggacctgggggcccagatcagctgggtgacggtgagtcctgaccctacccacggcctcttttcccgtcagccacgttgggtgactcatcttgcccccctctactctcaggtcttcctaacagagtacgcggggccccttttcatctacctgctcttctacttccgagtgcccttcatctatggccacaaatatgactttacgtccagtcggcatacagtggtgcagtaagtggggcaggtgggaggagggtaggggaaggcagaagacctgccggaccagccccagctgagcctgctccccccgaccagcctcgcctgcatctgtcactcattccactacatcaagcgcctgctggagacgctcttcgtgcaccgcttctcccatggcactatgcctttgcgcaacatcttcaaggtgagagcccgtccccgcctcacccctaagccccgcctttctgccccaccccgccccgcccccaccgagccccaccccaaggcccttcctgtctg

SEQ ID NO: 22333 - DNA, 1067 bp, Homo sapiens
caaggccaataagaacaattccagcaaccacaccagctacaattggaatgatgtctggaccagtgggacactctggattctccacaacatgaaccatgacctcgttgttcccattcactgaatacgtaaaatagaaccaacagtcgtcaacatccttctccttacaatgggacacaggatcaggttggaccggctggggtaatttgtcccgactttctaccttggtaatgttaaaataggaacattcctgtgtgcatgtgtctttcttttctcctttattgaaggctctgcactgaacacattctttatgctcagcacagacaccaaggcaggtctgacacatctcacacgtttgcccttgaaacttcggatctgtacacttacagacaccacactcgcagatgccccggccattgcagatctgtccgttgctggcttcacaagtactagtataatttttaaaatgttttattattttgaaaataatgttgtaattcatgccagggactgacaaaagacttgagacaggatggttattcttgtcagctaaggtcacattgtgcctttttgaccttttcttcctggactattgaaatcaagcttattggattaagtgatatttctatagcgattgaaagggcaatagttaaagtaatgagcatgatgagagtttctgttaatcatgtattaaaactgatttttagctttacaaatatgtcagtttgcagttatgcagaatccaaagtaaatgtcctgctagctagttaaggattgttttaaatctgttattttgctatttgcctgttagacatgactgatgacatatctgaaagacaagtatgttgagagttgctggtgtaaaatacgtttgaaatagttgatctacaaaggccatgggaaaaattcagagagttaggaaggaaaaaccaatagctttaaaacctgtgtgccattttaagagttacttaatgtttggtaacttttatgccttcactttacaaattcaagccttagataaaagaaccgagcaattttttgctaaaaagtccttgatttagcactattta

SEQ ID NO: 22334 - DNA, 1028 bp, Homo sapiens
aaacgcaagatccaggccctgcagcagcaggcggacgaggcggaagaccgcgcgcagggcctgcagcgggagctggacggcgagcgcgagcggcgcgagaaagtgagcgccccggcctcgggccccgcacccgcagcctcctcccccgcgcgccctcctttcttcccggcttcccgcgctgcccgcccgcgcgcagtcctcgggccgcctttttacgccctcggacgccgatcgccgacccacatccctgcgcccgcagccaggaccccctacttcctccgccgtcctccttcctgggcctgggacaggggagggggcgccgcctccgggtcgggcggggccggccaagcgggaaatggggggatggggcggagggggtgagcgatctccgggtggagaagtggagcggcgggagggggcgtatcgtgcaggctccgactccggggctggcgccggggtcccgggccgaggggaacccgcgaccggacttgtgggggagaatgaggatgaaaacgtggagcttccattgtctagggtttgaccggccgacagggatttcgacgggggaccggggatctggggagggggtcgcactttctcgcctctttcgcggcttcccggcttctgcttgcttccctgaccgttcccaggggcgcggcggcgacgtgtctgctccaggcggcgggggggatggggggtggaggaagttcagccccaagccgcccgcctttctccagctgattcctgcgggaaccggggcggcgggaccctgcctctctccagaaggccccgggaacgctggcgcggggccctgaacccacgatcgtttgagcgcctgctgtgcgcctccgccgcgagtcgcagggcccgagataaacaatgggtctgaaaaaggagggagtttcaccatcctctctgcatcatcctcctggctgtccctcgggacagatggtggcaccgccagggtctggggacagatttggattctggtcccatatcatgccacccacaggcttcatgacttggta

SEQ ID NO: 22335 - DNA, 1031 bp, Homo sapiens
ccctagagaggcaaaagatgcccagccagatggaattggtggtgtgaattgccaggactggaaagagcccagatgggggctgcagcatgggccttggttgaagcctctaatcctgtaagggctgctttggcccaagaggccttagaaacccggtgtaagcctcaatcggtagccggtctggcctctttctcacacttaaccgacacagctcttgctctgatctcatcccaagtcatctcgctggaggacaattaactcggcttcaaaatggccctcagcctggagccaagatttaggagcaagaccgtctagttgggagagaagatgtttttggagagttgaagacttcttgaaaaagttcgaaaagttcttgaaaaagcaaaggatgcttctttccgtctgggagagggaaaacctctcccagggcaaaaggaactaagaccaggggtgggttaaaaaaaaaaaaaaaaaaacctttcactcttgtagaataagccaggagccggcgtgtggtagacttctgggcctgtttcccgacagctggtttcgtttagatttttgtgtgattaactgacatcttcctgttcctttgccacatgtatctagcaagcctcttttaccttataagggaaatcctttgtagcgtgtggaaggctttgattgcaggaaggggtggaacccaaaatgactcggccgtgactagcagtttttcaaaaatacatatatatgtatgcatgtacagatatgcgtgtatctcccaactccagacagctgaaaatctgccaaaagcgttgtttgccaggattcagaatttcccacataagggctactcacttcttaaaagacaactcatgaatcaagcacctctgtttgatctttaaaatcaattcctcgactgctaatgggtacacagttttttgtttgtttgtttgtctttggcgggttatgaaaatgtcctggaattcgataatggtgttggttgcagagtgtttttgcaacatcagttcctggcccagttactgaaggtggta

SEQ ID NO: 22336 - DNA, 1031 bp, Homo sapiens
ggaggtcaggaattcgagaccagcctggccactacggtgaaaccccatctcgactgaaaatacaaaaattagctgggcgtggtggcacgcgcctgtagtcccagctacttggaaggctgaggcaggagaatcgcttgaacccaggaggtggaggttgcagtgagccgagactgtgccactgcactccagcctgggcaacagagggagactccgtccccctgcaaaaaaaagaaacaccagaaaaacccatgttgcagctggtctaggggtctgggtggggcatcattgggggctgtctgcagtggatgggagaggacacggctggtggggatcgggctcagctgggcctttctgtctctgcaggtagctcgtaagctggtcatcctggagggtgagctggagagggcagaggagcgtgcggaggtgtctgaactgtgagtggcagaacaggactgagcgaggctggctcgattcctggggcggagtgggaaggagctggctgtgttgggaattggctctgaccggggtctctgctcaagtggacgggcgtcaggggctcatggctcatcttttctcttggcttctgtgacaaagaggtggtgacttgttcttactgccatgggaagcactgcccacgtgttgaccctttctgcaaagatatgaggaaataggagtgagacaggaggcagcagggaagcccagaagtcccattttcccagagaggatatctcagggggctgtgccatcttaacagaacactgacctgctccagaaggcaggctcccccggtcagtatgtaaatgcttttgctcctgtcagtgtttggccgtgacacattcctggcgggaaggtgagaagcttaaccagaatcccacaagcaagcaccgaaaaacaaaacacctgtcctcttggccccgggtgaggaattcagccccacagagcatccgggagtgctgagagagatctggtttcacaaatccactccgggcttccttcccggagtgtcccctgcaaactcccattgctctctg

SEQ ID NO: 22337 - DNA, 1033 bp, Homo sapiens
acatggtgaaaccccatctctactaaaaatacaaaaattagccgggtggtggtggcacgcgtctgtaatcccagctactcgggaggctgaggcaggagaattgcttgagcctggcaggtgaaggttgcagtgagccaagatcgcgccactgcactccagcctgggtgacagaatgagaccctgtctcaagaagaagaaaaaaaaacaaatctttttttttctttcatttaacaaagacgcttattaatttatctttccccatactcttaatcctcaccagagaaacttgcccaggccaaagaagagaacgtgggcttacatcagacactggatcagacactaaacgaacttaactgtatataagcaaaacagaagagtcttgttccaacagaaactctggagctccgtgggtctttctcttctcttgtaagaagttccttttgttattgccatcttcgctttgctggaaatgtcaagcaaattatgaatacatgaccaaatattttgtatcggagaagctttgagcaccagttaaatctcattccttccctttttttttcaaatggcaccagctttttcagctctcttattttttccttaagtagcatttattcctaaggtaggcagggtatttcctagtaagcatactttcttaagacggaggccatttggttcctgggagaataggcagccccacactttgaagaatacagaccccagtatctagtcgtggatataattaaaacgctgaagaccataaccttttgggtcaactgttggtcaaactataggagagaccagggaccatcacatgggtagggattttccatccagagccaataaaaggactggtgggggccgggggtggctattgtgggaagtcataacccacagatagatcaacctaagaatcctggcccttctccactctccaccatgcaggacaaacatcttctcaagcagtcaacgtagaatgcttgggaaatagtcataattacccacatatagtaattaatagatggtaattaattga

SEQ ID NO: 22338 - DNA, 1074 bp, Homo sapiens
gatcttgtctcaccgcaacctctgccccccgggttcaagtgattctcctgcctcagcctcccaagtagctggtattacaggcatgcaccaccacgcccaactaattttgtatttttagtagagacggggtttctccatgttggtcaggctggtctccaactcccgacctcaggtgacccacccacctcggcctcccaaagtgctgggattataggcgtgagccaccacgcccggccctactgttcacctcttaatctgactttgggagtcgggtaggtttaacttgcagttcatcctgcagacattggtagtaagtcaagctctggctgccttgtaagttccaagccatggaagtttctccacttccagcacgttggtgccatgtcaccctttgttcccaagtccaaagtgacactgcatcagcaagcagaagtttcactttcctcctgccttcctgcttctgctcttagcaatcgtggtgaggttagtgactcaaaactcttctaaggactgtagttgaaaaaaaaatgactggtttttttttttgtttctttgtttttttgagacagagttttgctcttgttgcccaggctggagtgcagtggcacgattttggctcactgcaacctccgcctcctgggttcaggcaattcttctgcctcggcctcccaagtagctgggattacaggtgcctgccaccacgctcggctaattttgtatttttagtagagacggggtttcgccatgttggccaggttggcttcgaacccctgaattcaggtgatccacccgcctcggcctcccaaagtgctggaattacaggcgtgagccaccgcacctggcaaaaatgactgtttttaaccactcatgtctcctgctgctggtgtcagaaagtcagcttagctccaagcaaggtgtttctgcacaatccagacgtatagagccctccgggtcccagcagggccgtgggaggaaccctgggcttggagacaaaagacctgagtcttgccctggctctgtcaccaatcagttaggtcacctttaatttttttttttttttttttgacaaagtct

SEQ ID NO: 22339 - DNA, 1056 bp, Homo sapiens
gccagccagctgtcttctcctggatgagacagactccagagggtaaggagctagcgccatggtggcctgcagtatgcagagccccgcaggacccagcgtgggcgcccttccaagcttcctctagctttgggcctatgctgtcccctgcaggccctagggaagccacttgcaactatgcggccttcagacttcctcctcagccacctggccactgagacagcatagcctgggtaacggaacagccacctaaggcaagaatggaacggacacaccttgctcctttctgagcccgtttcccaaaaccccccttccaggtgcttctaatgggtgttgccatagcagacgctgctaatgcatcacagcattctttgaaatggaaccagacacagcctgcctctcaatcctcagctgggggctcctagcagcctcttgtatttactcagagttgacacatcacacagatcctgtttggcattcctaccttacggacgtctcaggggtgacaggaccagggcagagccccggtacaaacagacaaggctgcagtcaaatgggagggtccaggtgtccgtgttggagggctgggatcttgtagggcctgtgcgtcctggctgaggatcaaaccacatatgttattgggagaaacgatttctgttgacgtagatattgaaagaataatgaaggcagaagagaaaaacgaagtgtggaatttggggttgtcctgtgtaaattacacaataaagcaaaagtcagttattgtaagtctgagtgtcttctttttttttttcccagacagagtttcactctcttgcccaggctggagtgcagtggcataatcttggctcactgcaacctccacttcccaggttcaagtgattctcctgcctcagcctcccaagtagctgggactacaggcaaccgcgactacgcctggctaatttttgtatttttagttagaaacgggatttttccatattggccaggctgatctcgaactcctgacctcaagtgatctgccgcctcagcctcccaaagtgctgagtgtcctcttatagg

SEQ ID NO: 22340 - DNA, 1060 bp, Homo sapiens
ggaagttggggagggcgctcaggcttgggactcctctggggacaaggctcaggaccttggggagggagtgttcgctgggaaaccttgagagattccgtgtcttagaatgctggagagagggtgcatgcttaggacccgtcggggagcgtggctgacaacagtggggagtggaccttgcgctcctccgaccccctgggggtgaggatccggattgtggggggagttggggatgtagggcaaggatccctcaggggcgcaacactaccgcggggagcgcgtcaaggccctggttagggataggttgcgctcgccggggtagccatacgtgccctgtcctgggaggggaactgacgcttactctcgccccctccctgcaggtgagaagccctaccactgcaactgggacggctgcggctggaagtttgcgcgctcagacgagctcacgcgccactaccgaaagcacacgggccaccggccattccagtgccatctgtgcgatcgtgccttctcgcgctccgatcacctggcgctgcacatgaaacggcacatgtagccgggacgcccccgcccacctgcgcgcggccgtggcgggtcccacgcgccgggcgcggccccctcccaaactgtgactggtatttattggacccagagaaccgggccgggcacagcgtggctacagagggtctccctcgatgacgacgacgacgacgccaccaccccagcccccgtctgtgactgaaggcccggtgggaaaagaccacgatcctccttgacgagttttgtttttcaaaatggtgcaataatttaagtggcatcttctctcccaccgggtctacactagaggatcgaggcttgtgatgccttgtgagaaataagggccttaatttgtactgtctgcggcattttttataatattgtatatagtgactgacaaatattgtattactgtacatagagagacaggtgggcatttttgggctacctggttcgtttttataagattttgctgggttggttttttttttaattaaaaagttttgcatcttttaaaaaaaatcac

SEQ ID NO: 22341 - DNA, 1028 bp, Homo sapiens
acctgtttcatgagggactgttcctggtggggagtgatggcctgaggtgagagtgagtgggtgtgcttgaggaacagccaaggagaacggcagggtcaggagctgaaggagagaagggggagagggagccaggagcgtgagaaccactggatggttctgggaggcggttctgctgctgtgctgagaatgaggggtcaggaggcccctgggagaccagggaggggccccaagtgatggaggcggggtagacagtgatggaaacagagtggatggtgacaaggaccagagagggtcccaagtgatgggaacagagaggatggtgacaaggaccagagacaattcccaagtgatgaggacagaatggatggtaacaaggagtagggaaggcctcccgagtgatggggacagaggtggacagcaatggcgacagagtggatggtgacaaggaccagagacagtccccaagtgatggggactgagtagacagtgatgaggacagagtggatggtaacaaggactggagagggatcccccgagtgatggggacggagtggacagtgataaggaccagagaagtgccctgagtgatggggacagagtgactggtgacaaggaccagagggggttcccatgtgatgggggcagagtggatgatgatgtagatcaggagcgggggtgtcagtgagagtgagaagtctgggctgatctcaggatgcctgattctctgggtaaaagtgtgggcccctgctgaggtgcataaggccagggcagttggggggctgctatgtgtctgtgcggtgcctgccatttgaggctctgttaatcagtacccaggcggggctgtgtgtggatgctcagatggacgtgtcggccacgcaggatggttgtcatggtgtgggaggcagttcgaactctgcctgatgaggccacccagggcacggggagagaggaggtgccggaagaaaaagaaaactgggcttgtgctgggtggtttagagcagcacagtcggcaaatggtagcttggaga

SEQ ID NO: 22342 - DNA, 1045 bp, Homo sapiens
gtgcagcataattctggtttagaaacaacagctcctcctctgggggagtggtcctgtcccaccacaacatgggagggaggcaagcttctttctatttttgctcatatcggctgaaaagtacacgcatagagggcattcttggtgggtgttcagggcctgtcttttctcccaagcgaccgatgcaccttattgcgattggcctgggtcttagcaccaaaaatgtcatgtcccttgaagtccccaacaacctggacagtgggtcgcctctaacctccagggtccccatcttatatatcctaccttggcatcactgctggcagcagttgcctttccacgtgaaagcaatcttgctgaaacagattgcaggaggcgtgggagacttctctattatatgcagcccagcacttggcaccacagaggcttaaacatccactttgtacatttctcctgaatgtgaagttttccaaatgcaaggtgctcgttgaacttgttgtgttccttgagtagattggtaaggatcgggtggaggtgagctgggaagactcacctgtgcaccccgccctgcttgcctccaggctctcagaagtaacctttccctgtctctaatacagcttggctccgtgctgagttttttctgttcctgtgcagacagtggctgggcctggtgtttttcacaatctgtttccagtgtcgggcctggcagtaactcattgtcgccttgtcaggagaattcgcacaaccacggggacggtgcagaggacttcaagcagcaggtgccgtataaagaggacaaaccccaggtgcccctggagtccgattccgtggaattcaacaacgccatcagctatgtgaataagattaaaacccgcttcctagaccacccagaaatctacaggtcattcctggagatcctgcacacgtaccaggtaagaactcagattacaattccttgtgggttttggatttcatccagtttggggccctgcagatattcagattttcttgtcggaattcataaaatcctgtaaaattctaattagttgtg

SEQ ID NO: 22343 - DNA, 1055 bp, Homo sapiens
tcagggcccgcccggcatcggcacagtttctttttttgtttttatttttttgagactgggtctcactgttgcccaggctggagtgcagcggcatcatcacagctcactgcagcctctacttctctgggctcaagcaatcctcccacctcagcctcctgagtgactgggactacaggcgctcactccgacgcccagctaagggctaagaggagacggggtttcaccatgttgcccaggtgggtcttggaactcctggcctcaagtgatccacccacctcagccccccaaagtactgggattacaggcgtgggccaccatacccagctggatggcatctgcattttaaacaaggcccctggtgactccagcctcaggttgtctagttttttcaaatgtaagtttgaactgttgtgtaaattatcctggttttagaatgttggttcagatatttcagggatactgttagagccaaaccaggcagctccagggtccatctggccgtgtgttactgtttctccatctttgtggggctttccttcagactttctctctgccaccttctccctcggggttcttatccgtaaaatggccacaaaactggtggtgccaatgagcctgggttcagtgaggttaactgagcaaccagttcaggcacaagcctgcctcaggtcacccctgggtaactgtcacccattacacagccacgtatgcatgtcctgtgtgtgctgggatgaacagttagtcctgccctaacataagtgggaccctaaaaacgagctccctctgcagagttgcaaagtgtgatgggaactgcaggttcatgggaaacagactcagggtatgacattcaaaaacttcctcagggacacctagaaaaagataggcaccgactctaaacagcagcgccgttacgcgcatattaagtggccgagaattacatgaatgccacagcaaatcgggtactgaccttggaagagacctgaggctggtttgtggatctggtggcagcctgtgaattatgtgaaggccgggaggaggtcatctgaaatcagaca

SEQ ID NO: 22344 - DNA, 1035 bp, Homo sapiens
acttgcttcccttcccacaggctgcagcgggtgcagaggggcaggaggcgccagcacagggattcctcctgctttgcagccgtgcagtgggactctggaagccacgccatattatccgggaggctccggtgctattgcctcttgttctgtgacactcttgggtgtaaaattgatacggacgtatttctaacagccacggcggttttgctggcccgttcctgccttccaacctgggttccctttggtcctcttgttgctttaaggtctggatcaggccattttccttgggtctcagtgactccgggccagtaggtgcctcggcctggaagtcccttcccttcatggcccagcgctccccagttctacactccccatttcccttgggaaggcctggggttcgcccctgaccttgtacttccccggcccacccctgattacagccagcctgtcacctccctgccccctctgttcgtggacactgctgggtccccaccatactcctggacgggacctgcccatggccggggctcaggccatgctgggcagcaagatccacaagtgtgcagacaggaccctgcgggcaggtgctctttcctgagagtcatcctgtccccttcacggagggctgcctgagtgtcccggcccagggcacagcactccttgactaacgacttattttccctttcctgaaaactggcagaaggagcagctgaacacgaggggccggccattccgaggcatgtctgaagaggaggtgttcaccgaggtggccaacctcttccggggccaggaggacctgctctcagagtttggacagttcctgcccgaagccaagcggtctctggtgagtgccgagagcccctgcccagcctcgggggcctcagcgaggacggagggccccagccagcttgacccatgtccgggccaagcctatgtaccctccaggccacactagggtcccccagaagctacgcaggttgcagatacccaggggttcctcactgtaggctccacctgcacagcaagctcgtaaac

SEQ ID NO: 22345 - DNA, 1051 bp, Homo sapiens
tgaaaccccttctctactaaaaataaaaaaattagccagacatggtgacctgtgcctgtagtcccagctacttgggaggctgagacaggagaattgattgaacccaggaagcagaggttgcaatgagcaaagattgtaccactgcactctagcctgggcaacagagcaagctgtctcaaaaaaacgaaaacaaaaaaaaatgaccagcctgggcaacatagtgagacctcgtcagaaactagccagaagtggtggcgtgtacctgtacctactttggaggttgaggtggctggatcgcttgagttttcgaggcagaggttgcagtgagccctgatctcaccactgcactcagcctgggtaacagagtgagaacctgtctcaaaaaaaaataaggaagctgaggctcaggtcgaacccctctaacttactctaggacaagcactcataggtgagcttagcgtgctgttaggcggcagccagggtgctccagccccaaagccagccctttgcatgttctctgccttctgggcacagtggctgctgggcttcggtgtgtatttttttttttaactcagcatttcttggaagtgtttcagcatcagatgtgaacccatgtcctcatttttaagcaactgcaccgcttttccttcccttaccagggtctctaacaatggacatttgtctctagtcctccctgtaagtggtgttgacagcaaatgctcctgagtctgcgaccctcatgggtcaagctgagcccatcagaaggcctttccctggtggtctcaggcatgcacgtgttggggtgatcttttcagtgggttttctttcttgggctgctgaaggtctgtaaacgccctgaagaacagcccagagcaggatggtgttactctagtctcagccaaaacggggactcctggggtctgtttgtgacgtgggtggtgggcacacggctgggctttttctgtggatgtggaatgcacattcaccttgagttgcctccactgggcttagaatccagcactctctgagcctgggtcccacctgggaaaag

SEQ ID NO: 22346 - DNA, 1063 bp, Homo sapiens
tggtctagtttggttggttttggtttggtctgatctgatctggtctggttttggtctggtctgatttgatttggtctggtttggtttggtttggttaggttttggtttggtctggtttggtctggtctggtctggttttggtctggtttggtttggttttggtttggtctggtctggtttagtttggtctgatctggtctggtctggtttggttttggtttggtctggtctggttttggtctggtttgggtctggtctggtctggtctgtttggtctggtctggtctggtctggtctgtctggtctggtttggtctggtctggtctggtctgtttggtctggtctggtctggttttggtctggtttgggtctggtctggtctggttttggtctggtttgggtctggtctggtttgggtctggtctggtttggtctggtctggtctgtttggtctggtctggtttggtctggtctggtctgtttggtctggtctggtttggtctggtctggtctgtttggtctggtctggttttggtctggtttgggtctggtctggtctggttttggtctggtttgggtctggtctggtttggtctggtctggtctgtttggtctggtctggtctgtttggtctggtctgtttggtctggtctggtctggtctggtctggtttggttttggtttggtctggtctggttttggtctggtttgggtctggtctggtctggtctgtttggtctggtctggtctggtctgtttggtctggtctggtctggtctggtctggtcggttcggtctggtctggtctggtttggtctggtctggtcggtttggtctggtctggtctgtttggtctggtctgtttggtctggtctggtctggtctggtctggtctgtttggtctggtctggtctgtttggtttggtctggtctggtctggtctgtttggtctggtctggtctggtctggtctggtctgtttggtctggtctgcccacagcctgtcaggattctggtctcttcatccctgtgtcatgcactctccatcctgatgtgtttctggc

SEQ ID NO: 22347 - DNA, 1076 bp, Homo sapiens
cagacacttggtagattcctggggacagaggtgaatccttatgacccagaggacggacacgctaatgcccgcccccgacaactttgcacttcctcttcagaaagaatggagttcaagctgggccgcggtggctcaggcctgtaatccctttgggaggccaaggtgggtggatcacaaggtcaggagttcaagaccagcctgaccaatatggagaaaccctgtctccactaaaaatacaaaaattagcccggcgtggtgatgtgcgcctgtagtcccagctactctggaggctgagacaggagaattgcttgaacccaggaggcggagtttgcagccagccaagattgcgccattgcactccagtctgggtgacagagcaagatgccctcaaaaataataataattaaaaaaaagaatggaattcagatcaggtcatcagtacggtgacagaggggccacaagatattatggggggagaattagggacaaccaatgcaagctttaggacaagggggattccagcaagtttcctcggaagtagtggctggccccaggtcaaacctggaaagataccacgtgttaaaccactccgggtggaagggattgcacaagcagatacctttgaagcccggcctgtacagggcatcccagctctctcattctgccaaccggcagtgcgagggtccttgttcttatcttcctgatacagaaacaggcccaggcaggtgatgacttcagagatggttccttgagctttctagaaacatgcaggatccttagtaacctttaactggggaaacccaaatctccagggccgtttctcacccgcatcaccattgacagttggggctgtgcactgtagaatgtggaatagtgtccctggctgtcacccatgagatgccagtagtattccatcccctccaaggggtaacaactgaaaatgactccagccatggccacgtgtcccctgggggcagaatcacctcccccgccaggtgaaatgtgatgctcattagtaaaacctggttcccctctagggcccatcattgccttggtgggtccttggtgtttgtgga

SEQ ID NO: 22348 - DNA, 1009 bp, Homo sapiens
gaggcagcagggaggccgaggaggggagcctgggcggtcctcctatgcctgagtgcgctcccatccttactctggaactgccacgtaaagaaaagcagagatgccccgtggttcatacctgtaatcccagcacttcaggaggccgaggcaggaggatcatttgagctcaggagttttttgtttgtttgtttgttttgttttgtttttgttttttgacacagagtctcgttctgtcacccaggctggagtgcagtggcgcaatctcagctcactgcaggctccgcctcccgggttcatgccattcttctgcctcagcctcccaagtatctgggactacaggcaccaccaccatggccggctaattttttaattttagtagagatggggtttcaccatgttagtcaggatggtctcgatctcctaacctcatgatccacctgcctcggcctcccaaagtgcagggattacagctataagccattgcgcccggccaagctcgggagtttgaggtcatcctggacaacgtggcaaaaccccgttgctacgaaaaatacaaaaattagccaggcgtgctggcgcatgcctgtagtcccagctactcaggaggctgaggtgggaggattgcaggcccatgatatgtcaaaggcaggatgtgtaaaccaagatggaggtgatgaggagcagcttgtgcccaactgtcaggagcagcaagggtctttgtatcatatgatccctctgggctcagggcagtgcctgctgtggcttccccagacccaaggaggatgccacacagtataccattcagcgttggagtgagcgcccaagacaggctgggcagccaccgctactgccccttttcagagcagattggattcaaaggagattatttagccataaaaaggaatgaagggccattcaggctcacatctgtaatcccagtgctttgggaagccaaggcgggaagattgcttgaggccaggagtttgaaaccaccctgggcaacatagtg

SEQ ID NO: 22349 - DNA, 1040 bp, Homo sapiens
agagctggattccgtccagacacctactcttgcccactaagggcacttctgggagactatacagtttattcatttagcaaacacctctctgcatgaaccccaagctggcacttgtagggatacagccccaggcccctggcccttgaggagcccttgaacttgggggagagtcaagggaaagcagtcgggccagaagaatggacagcggttgagagaagacgactccttttttttttgagaaaggatctcactccgttgcccaggctgcagtgcattggcgctatcattgctcactacagcctggatctcctgggttcagggaatcctcccacctcaccttcaagtacttgagactataggtggttgctaccatgtccccaggctggtctcaaactcctggccccaagggatcctccctcctcagcctcccaaaatgctggaattacaggcatgagccacacctcactcagcccttggagaggaaaggatttttaaagggcggataggggaacaccaggcagagaggagagtgtggctgaaatgtaagatggtgtgtgtagagggttttgcatgcctgatggaagggctgagcaggttttacctggggaaatggggagccaaggatagtgtgtgagtaggggaggggttcagatctgagtatcagaaaatttttcttccttttttttttttttttttttggttctaacaacagaggagaattcttctagggcccaaaatgggggcaagattgccaaagacaagcttgcaatccctgagtttacagattgagaaagcccagagtggcgcagggaccaccccaaggacacgcagcgagcttgaactcaggcctcctcggcttcctgccaagaggcggagacttggctgcagccaggacaagctgccagccagctgtgtgccatctgcccagctcccgctgggggcgggaagaccaaccagccgcttcctgcagctgccaccagctgcgcccggccaccgcggggcaccctctgccggtcaataggagagagaactacagctca

SEQ ID NO: 22350 - DNA, 1018 bp, Homo sapiens
gtactgagttccagccccaaaaagacctcccagggcagtgtcaggggaggagcctggggaggggaggcgtctgcgactttctctatctttcctccttagtcatcgtgacagaaaagacaaacatcctcctgcgctacctgcatcagcaatgggacaaaaaggtgaggcccacagggctctggtgcagggattgtgggtggacagagactgggcacctggcaggggcttctgagcacaggaaggactctagtgattggagcagggccttgagggctgggtaggagtgccctgggcgatccaggagagggaagagcgttccagtggagggaaccgctgtgcagaggccacaggacaccagtgctcaggaggctggaggccaggcccaagtagccgccaggcccagttttccatggctctggcattaggtagactgtattggtatgaactagatagaatattttctgaggccgagtgtggtgacgcatgcctgtagtcccagcgctttgggaggctgaggcgggcggatcacgaggtcaggagatcgagaccatcgtggccaacatggggaaatcccgtctctactaaaaatacaaaaattagctgggcgtggtggcacgtgactgtaatcccagctacttgggaggctgaggcaggagaatcgcttgaaccagggaggcggaggttgcagtgagccgagattgcaccactgcactccagccttgttgacagagcaagactgtctcaagaaaataaaaaaaggccgggtgaggtggctcacgcctgtaatcccagcactttgggaggccaaggtgggcagatcatgaggtcaggagatcgagaccatcctggctaacatagtaaaaccctgtctctactaaaaaatacaaaaaaaaattagccaggtatgctggtgggcgcctgtagtcccagcttcttgggaggctgaggcaggagaatggtgtgaacctgggaggcggagcttgcagtgagcctagatagggccactgcattccagcct

SEQ ID NO: 22351 - DNA, 1031 bp, Homo sapiens
ggactcaccctccctgggcgccccgccggagcaccgtgcccagacacacgccgaatccggttcctaactccgctgctttggacgcgcctcgacgcgaggcccccagcgctcagccacaaaatacagcctggcacgcgcagcgctcctcgcccacctcacgggcaggcccagcgcgtctccaccccaccgcgggctctgtcggtgcactgggccgcgtgcgcccccagccgcctgcacctgcttgctggccgcccccgaccccagattccctccgcgcatgcgccctcagctcggcgcgccaggcccccagcacagccacgctgcccaccccggcgaggacccacgggctcgccacctgcccgtactttggcccgggccgcgagcaggaggccccggagggagaggaggagcaggcggaaccgcagggccgcgagcgggaccagcaccgcctgcagctgccgctcgaggctctgggacagggacaggacgagcaggagctgtgaagggaccgacggacagatggacggacagatggggggacgacaggcagagagaggacgcacagacgacggacaacggacggacagacaggagagaaggatggaggaggggagggaggggctggagagcccttggaccccttgtgccgggtctggcccctcgctggccgccatgggggcaggggggactgccgctggggcgggggtctcacctctttcaagcgctccatgtccttgaggtagaaaccgatgtagaagaggctcaggtacgagttgacaaactggaactgcaggaaggaggcaggcggtggtcatcctgcacccccacccgactccttggagccttccttgtgccccatacagacggcacagcttccccgttgtccccctgcctgtccgatggtggtgactcaccaggacaactttgatgatgaggtgcttctcataggcgctctccagccggtaattttctaggggccaagggggggagtgagggggcagccgcggtccccccaagggtggcagggatcc

SEQ ID NO: 22352 - DNA, 1052 bp, Homo sapiens
ccctttctggctttcggggagccagagactgaccggacacttggctctgcaggtgcagacctggaccagagagacagagagccaaggaagtccacagtggagagagggctgtgctgggggttccaggaagacttcctggaggaggggatcttggagctaggccttgaagacgagtttgtcaaatgaggaagggcatccgaagccgagggaacggcagaagggaacgctggggaggggagagaatctggagagttccggaaaaagcaagtaggactctttccagaagttcgggcaagattttccctggatcagggcgtgggttctccagtactcgtccctcccggtcaccgagatgctctgagtttccggtctgaacctgaacgtaaagaggtgtagtccctcctttcttgaacgggaaaactgaacgcacataggtccttgccacgcctaaggctgcggagtgagcagatggaaaatgcgggactcaaaacctcccctcgctgtaatttgcactgccctgtgccaaactctgtcctttcttccattccttattcctattgtcagcctcgctgcgctaggaccctaaaaatttggtctcatgttgcccggggaacaacatttcgctacacctacctccataccgcctcccgctcccgctctcccttgcaccagccaatggaagcgagtatcttcagacggtgggcaggacgtatcctaagatacccaatggtggtcgagaatagttgagcactttactagtcaagccgcggagtgggcggggccccctgcccagacttgaagccacacaggcaggtcgggcaggcgggtcgcaggttgtaaatccatgtggcgggggctttggaccctggcggcccaagcggcacgtgggcctcgcaggtggggctacaggggaaggggtgcgacagcttggggtgctgcttggaccccagacccactccctgggttttaggggcccaattccctgcggcagagcaatcattcgcgttcttccgtgcctcaatcgttcatgacccttgcggcagagcccatat

SEQ ID NO: 22353 - DNA, 1061 bp, Homo sapiens
tgtgggagcccagagccccagtgacagcagccagcgcctcctcctggtgctgaacaagtcggacctgctgtccccggagggcccaggtcccggtcctgacctgcccccgcacctgctgctgtcctgtctgacgggagaggggctggacggcctcctggaggcgctgaggaaggagctagctgcagtgtgagccccctcccactcccagcctcccctgacccacagtttaagtgtgggtccctcaacttcaatttctgaacctacaaaatgggtacaaccatttccccttcaagggatggttgtaaaaggtcgggagagaccatgtctcttgtctcttccaggtgtggggacccgtccacagatcccccgctgctgacccgagcaaggcaccagcaccacctccagggttgcctggatgccctcggccactacaagcagtcaaaagacctggccctggcggcagaggcgctgcgggtggcccggggtcacctgacccggctcacaggtggagggggtaccgaggagatcctggacatcatcttccaggacttctgtgtgggcaagtgacgggatccagggaagtcgcacccaagctgcgtggagacccaggagcctcgggggatctggaaacagtttaggccaattgggattctcattcgcctgggaaagaacttgattctcaaatagtgaagcaacacagctgagaggtagtgagatccctgcagggactccctggagattcaggccctggaatggggctgaatggaggtcccgttcgacccttgatgctggggcatccgggttgggatggagataggaggatctcagtatatttgtttcgtagttttttatttattttgcaaataccaaaggaatgtaaaaaaaactcaggtgatctagaagtgtttattttcttcccttcccttcccttccctttccttttccctttccctttccccttccccttccccttccccttcccctacccttccctcctctgtctattgcccaggctggagtgcagtggtgcgaccttggctcactgcaacctccatctccgg

SEQ ID NO: 22354 - DNA, 1051 bp, Homo sapiens
gggtttcaccgtgttagccaggatagtcttgagaccctgaccttgcactaccatatcccatgtctggctaatttcttattttttatagagatggggtctccctatattgcccaggctggccttgaactcgtggactcaagcgatcctcccaccccagcctcccaaactgctgagattacaggtgtgagccaccacaccaggacaacctcttgtatcttaaaaatgactggcaaggccgggcgcagtggctcatgctgataatcccagcactttgggaggccataggtgggcggatcacgaggtcaggagatcgagaccagcctggctaacacggtgaaaccccatctctactaaaaatacaaaaaattagctgggcatggtggcatgcgcctatagtcccagctatcgggaggctgagtcaggagaattgcttgaacccgggaagcagaggttgcagtgagccgagaccgtgccactgcactccagcctgggcgacagagggagagtccgactccgtctcaaaacaaataaacaaacaaacaaaaatctgactggcaaaacctaggggtctttctccctctataagctgaatctttattcattcattcattcactcactccgtgaatattcatcaaactcctgcatccagcattgtacacatcattttattgaatcttcaccacagcacgatgttgtggctattttcttccagttttgcagatgagaaaactgaggctcacaggaatagttacttcctggagtttccccagctttggggtttgaacacaggtctgtttgactccaaatctgagtttgctgagggcctcctgtgcagcaggcaggatgttggggtcacagaggggagcaacaggcttggtccctgttcacattaaagaagtgacaagaggccaggcgtggtggctcacgcctgtaatcccaacaattttggaagccaaggtgggcagatcacttgaggcctggagtttgagaccagcctggccaacgtggtgaaaccccatctctacaaaaaatacaaacattagccaagca

SEQ ID NO: 22355 - DNA, 1050 bp, Homo sapiens
ttgcagagacaatggccgggattccgggagaacttggaggaagtaagataacagagaaggaagggactatggcatctttgaggatcgaataaggtaggtgaagggtccgtcgggattgcagccctcaattgtggagaagcagagagactctctgggggaggggttcccagagctgggtactgcagaatgaataagagtttggggaatcgggccaggtgtgatggctcatgcctgtaatcccagcactttaggagcccaaggtgggtagatcccttgaggtcaggagtttgaggccagcctggccaacatgatgaaacccctgtctccactaaaaatacaaaaattagccaggtgtggtggtgtagtactgtaatcccagctactcgggaggctgaggcaggagaatcacttgaacctggaaggcagaagttgcagtgagccaagatcgtgccactctactccagcctgggcgacagagcaaaactctgtctcaaaaaaaaaaaaaaaaaagagccgggggtggtggctcatgcctgtaatcccagcactttgggaggccaaggcaggcagatcacctggggtcgagagttcgagactagcctgaccaacatggagaaaccccgtctttactaaaaatacaaaattagccgggcatggtggcgcaagcctgtagtcccagctacttgggaggctgaggcaggagaatcgcttgaacccgggaggcggaggttgcggtgagccgagactgcgccatcgcactccagcctgggaaacaagagcgaaactccgtctcaaaaaaaaaaaaaaaaaaaaaaaaaagagagagagagagagaatctgggggatgaagcagggggaaacattctgacaatgcatggcctgtgtgtgtgtacagatcccagtttaaatcccagcccagcattttctgcaggcgggaagggaagcaagacaaggttactctcagttacagcctcagtttcctcactggatccccaggaatcaggagaggctctagggaggagatgagaatacaacacctgggaaacggtg

SEQ ID NO: 22356 - DNA, 1050 bp, Homo sapiens
acgaggcctccagcctctatggcatctcaggtgagcacagagtggggaaactgaggcgtggaagtggagggtgtgactgtcttgagattacacaaccaggaaggatcttcctacttccctctcccaactctggattctgtaaagactgaaggagccaggctgtgcgggttgggcctctgtgggtggggtgggcagttccctacacctcacctcctcccctcgcacgtgtttttcagccatggatggggttcccttcacactccacccacgatttgagggcaagagctgcagccccctggtgagtcggggtctcagggagcctgggtctgcgcctgccatcaccattctgggtgccaggacatccctgtatccagtgccccagcacagagggccacatcctgggttggggctggagtgtgtcacctccaggtggcagctggaaggtcttcagtcttagaatggggagggatccatccagagaaagcagctggacaccagtagctagaggctgtgacaagaagggggagggatgctgggcatggtggctcacgactgtgatcccagcactttgggagaccaaggcaggtggatcacttgaggccaggagatcgagaccagcctggccaacatggtgaaacctcgtctctattgaaaatacaaaaattagccaggcgcggctttagagactttgtctctaaaaacaaaacaaaacaaacaagaaaaataagggggagggatgtccgagggaatattcggggagtgttggggggagggcaggaccccttgaagacgaaggaaagggggtttcaggttgagatcgggcccaaggctgacccacctctgcccgccaggccttctctgcttttggggacctgaccatcaagtctctggcggacattgaggaggaggtgggtgcagggctagggaggaggtgggtgcagggctagggaggaggtgcctgaggggccggcacccgcccctcgtccgccccaggctgtcccagttttccccatccccgctttgccccagacacacaccatctctccaggg

SEQ ID NO: 22357 - DNA, 1027 bp, Homo sapiens
ctggccaacgtggaggaaccctgtctctactaagaatacaaaaataacggcatggtggcaggcgcctctaatcccagctactcgggaggctgaggtgggaggatcacatgaacccaggaggcagaggttacagtggggctgagactgcgccactgcactcctgcctgagtgacagagtgggagggactctgtctcagaacaaacaaacaaacaaaaaacatctggaaggtggaggggcactgagcaggccctggaagatggagtgtgggccccttgcaggaagggactgatactggttcacagccacaggcctgggtatacagtaggcagggaactgaaaaggagtgagatcaagaagggcccaactcagcacgaggctcccttctagggtgacccagggtgagcagagcagcaggcgggcaggcagggcttgggtgttgcctgcagccgcccccggctcctgatggtctcttgagtcacctcccggctgctgctggagaggaaggaagtgtctgtagtctcattgtcccagttggtccttgtggcttcctgacacttcatggggcagaaagtggagctggaaatcctgtctgctgtgtgtgaacttcgtggccacttcccttctttatgccttgatttccccacctgaatggggcaatatccctgtgtggcaaaaagcgtgctaaggctgggtggggtggctctcgcctgtaatcccaacactttgggaggtcaaagtgggaggattttttgaggtcaggagttcaaaaccagctggggcaacatggtgaaaccctgtccctactgaaaatgcaaaaatgagctggacctggtggtgcacacctgtagtcccagctactcaggagcccgaggagggaggatcgcttttacccaggaggcagaggctgcagtgagctaagattgtgccactgcacttcagcctgggcaacagagcgagaccctgtctcaaaaaaataaacttaggcctgacatggtggctcacacctataatcccagcactttggaa

SEQ ID NO: 22358 - DNA, 1033 bp, Homo sapiens
cctagcgctttgggagggtgaggtgggtggctcacctgaggtcaggagttcgagaccagcctgaccaacctggttagcggggcgtggtggcacacgcctgtaatcccagctactctggagcctgaggcaggagaatcacttgaacccgggaggcagaggttgcagttacccgagatcgcgtcactgcactccagcctgggcgacaaaagcaaaactccgtctcaaaaaaaaaaaaaaaaaattattcgggcgtggtggtgggtgcctgtaatcccagctactcgagaggataaggcaggagaatcgcttgaacctgggaggtgaaggttgcagtgagctgagatggcctgggcaacaaagtgagactgtctcaaaataaataaataaggccgggcgcagcggctcaacgcctgtaatcttagcactttgggaacacctgaggtcaggagtttgagaccagcctggccaacatggtgaaaccccgtctctactaaaaatacaaaaactagctggacgtggtggcgggcgcttgtaatgccagctactcaggggactgaggcaggagaatcacttgaactcgggagatggaggttgcagtgagccgagatcgcaccattgcactccaggctgggggacaaaagcgagacttcatctcaaaataaataaataaataaataaataaataaataaataaataaataaagtgtcgtcctgtccaccagcacatcttcctgttgtatttccttttaatccatagccctagcagactcttacttgtttatatgtttatatgtcaatatgtttatattgattcccccaactgtgagcccatgagagctgcaccctctccatcttggttgtttctgggtgcccgctgcccaggacaggacccagtacctgtacccacacaccaggttcttgggaaatgttggttgtgccccagcttggcagcactgctgggtgacctcgggaatgttccttaacctctctgggcttctcctcttccccagtctcagaaataagaaagttggcc

SEQ ID NO: 22359 - DNA, 1080 bp, Homo sapiens
tcccagctattcgagagggtgaggcaggagaatcgcttgaacctgggaggcggagcttgcagtaagccactgttgtgccattgcattccagcctgggcagcaagaggaaactccgtctcaaaaaaaaaaaaaaaaaaaaaaaaaaagcaaataagttagagcatattcgatacttctaagtgctacgaagaaactaaagcagatgacgcgaagacaggaggaggtgacttcccttgaggtggggttgggaacctccctgagggggtgacttggagctaagccccaaagaggagctaggaggtgactgtgaagagagctggggaaatggaactccagactgggaacaggctgcacacagtggctcacacctgcaatcccagcactggccaaagcagccagatcacttgaggtcaggagtttgggatcaggctggccagcatggtaaaaccccgtctctgctaaaaatacaaaaattagccgggcatggtggcaggtgcctgtaatcccagctactctggaggctgaggcaggagaatcgcttgaacgcaggaagcggaggttgcagcaagctgagatcgtgccactgcactgcagcctggccgacagagcaagactccgtctcaaaaaaaaaaaagactgggaacagcatgtgcaaaggccccagggtgggatgaggcttgggaaaaatagaagcagccctcttggcctcaccctctctagctgtgcagagagattgcagtcagaggagcaggtgtccaagaacctctttgggccgcccctggagtcagcctttgaccacgaagattttacaggtgatggggataagggattggagggcatgggtgtggccggagggaggttgggtggggccattgcagagttaggccaatgaggtcccctggaagccaggctggagggaggactagtccgtgtaggggtgggcggggccagagtgcgcgtgggaggggccatagatagggtggggccttggccagtgggcggtgactgagtggatgggccggacatttgtggagagggaagtcaccagaaggtgtagccttgggggcgtgcacaaggact

SEQ ID NO: 22360 - DNA, 1410 bp, Homo sapiens
ccgcgtggagagagcgatgcgtgacctgggccagctcagggatcgcgggggcccaaggactccgggtcttcttcccgggggaaggaataagtcgcgcagcatagaggccctagccccggcacctcgtcgagccgccaagtttctgttttcctttctgcaacgtggacgtggcggtagagcaatagtgtgttttctttctgccggaatggctgtgagaagcagatgaaaattgctaacagtgagccgaaacggggagcgtgaggcttaacgctgtggtacatactggatagaatcaaacggctctatggcgcagagataggagaacctggactcccatggagtgggtgtattatgtccagatctccagcttcggtttccttgctgtcaaaggggcgggccccattgttcccttcctgaacgtgtgccgaggccggtgggtcaggttcacagtaaaagtaggaactgcgataatttgtgactatttttcattgataactagtgaaaagctggcgagtcagtttcagaggtggtttctttgtgccatatcacagagcctggacttgaccaaagattctcacctctgcatctgtaaaccgggagtcttccctgggccaaacgtttggattgcagttgggaaaacggaggcagccgcagctcgcgtggcaacagtgcagggatcccagggctggggagagacctgaggtcttgtcctagttctgcctggaatgggctgtgagatcccatgctggtcactgggcctcagggtgaaagaagatgttggctggatgttttgaggtgcagagtggctgtttgacggcgactgcaaagcaattcaggactgcagcatgaagaaaggaggctgtgggtctaagccacagctttcctggtctgaaacccttagcccaggcaaaggagaggcaggcaactcaattaatcctccctggagacctccctctcctcagttcattttgtgtataaagttgtggtcgggagtgtgacctacagtcaccaagaatccacatggaggccctagggtggccctgcctcctgcttcccgaatctgtggtcactagatgtaggaaagggagtgaggtggatctccacagttgcctctgggtgctggccttaccctcactcctgtttcctttcagctacgagagtacaaggtagtgggtcgctgcctgcccacccccaaatgccacacgccgcccctctaccgcatgcgaatctttgcgcctaatcatgtcgtcgccaagtcccgcttctggtactttgtatctcagttaaagaagatgaagaagtcttcaggggagattgtctactgtgggcaggtatggagaggccggggctacgtggggtctggagtggatttgcgcctcttgggacatcgtgcatctcaagaattaatca

SEQ ID NO: 22361 - DNA, 1050 bp, Homo sapiens
cacatcagacatcagagccccgggttgtgtttctgcctgggtcacgggactggagcagagcttatgtgccatttccctgattagaaagccagggacccagggagcgggtgggtggcatggtgggacaccttggttggtgctgtcttccctgggccctgtctgttaagtgaggagaggtgatggctatctggtcagtgggtggtagctaggttggcccagacaggttccaggagacttgagttcaggaactgcatctggggctgggttggtgtccgtggcagaagcctggacttcaggctgttgccatgggaagttcccttacctcacgctccctgaggatgcctgaaggtaggtggggctgggaaactgaggcacaagagtctggccatagagtaggcctggagcctggggtgtgctttagaggcagagggttcagtgaggatggggctagggcacatcggcttgctgctctcacatctccctgtggcctctccttggcaggtgtttgagaagtcccccctgcgggtgaagaacttcgggatctggctgcgctatgactcccggagcggcacccacaacatgtaccgggaataccgggacctgaccaccgcaggcgctgtcacccagtgctgtaagctgcctgtcccgcctccagctttttagaccctccttgactccctcacactgaggcagggcaagtgccagaggttcccagtgcaggagagtctcaggactggtggcggggcacaggaagacaaaaggatgccccaggccccagatggcgcttttctgagagccctgccaggctcggttgtaaatcacatcacatctggaaactccctttttgggtctgcaccttgtttagactgggatccacatcaccactgttttctgggacccactgagaaccgaattgaacccctgcctagtgttgggagctggcaccttttccctggctcacctgccagggtctgtgagacccccacacctccctgattgcacctaaacccaagaatcactgtttcttatagcggtggtttaaacagaggt

SEQ ID NO: 22362 - DNA, 1060 bp, Homo sapiens
gagaggtggaggtggaggcgctggccatacttcagaggcagagccagagaagagctggagcctgtctgccttctgagattccagttcagggtgggccctaggacttgattgggggtaccatgttgtgtttggggtcaggaaatgctggctgctctgctgttattcctacaggggaggcatctgggccaaatccttctgtgctgaatcctgggcaggcttcccagtggaggatttcttccttagtgggggatgagtcagatctcattgcagagggaggaggaaggcactgggctgggaaaggcctggaggctgcagtgagcaggtggatcggagtgggtgtgagcaagcgtcccgtcagagactgcacatctgggaagggtggagtgggatttgaacctagttctggcttcctagaacttagccagcccggaagaatagaggaagggcagctgggagatgggcctgtgaggctttgtgggctgagcaaattgcttggactcatgagggcggcaggggatggaggtgcccccagaagctgcagtggtcagggccgggtgcggtggctcattcctgtaatcccagcactttgggaggccaaggtgggcggatcacctaaggtcaggagttcgagacaagcctggccaacatggtgaaaccccgtctctactaaaaatacaaaaattagctgggtgtggtgacgcatgcttataatcccagctactggggaggctgaagcactagaaccgcttgaacccaggaggcagaggctgcagagagtcaagatcacagcactgcactccaacctgggcaacagagcaagactggcaacaacaacaaaaaaagttgcagtggtcagatcatctgcagcacttacccagtgggctcgggtagaggttggagcagcccctggtgcaagaaatggccatcaagtccccactgtgtgcctggccttggacagccctgctgtccaaggtcatccataacagtggggggaactgaggcacaagggtagagggtagggttgaaggacttaccaggccactgctgtggctcttgccca

SEQ ID NO: 22363 - DNA, 1041 bp, Homo sapiens
aaaaaaactgatttactgagcatgtagtatacctggggcaggttcttgggaactctactcccagcagctccaagggaaggctgtcagtatacccattttacagatagagaagctgaggccctgagagggaccggccccaaggtcacccagtgattcagggaattccaaatcaggatttgggcccatctccgtgttgggggtgagaggagttggcctggctaacgctgccctatccctgtctccctaggtcggcgtcctcagctggccgagcatggtggcagcctgcacccttggctcccttgtctggtgcagccagcagagccgccagccttgggcgcccatggccctccgtgtgagggcgtgagcggcctgccccagcctcacctgctgatggaggactcaatggcccagtgacctgacaccacaccaccaactccctcccaccagctgacgaatggtggacccagtgacgagtggcccttgtaagggtcatggaataatttgaagcgaggcatgagcggcccctgtggtcgcctgtgactgctggagatagaggtcccagcaccccaagccaacccagcggaccctcccagccctgcttcaaccaatggggccagtggggctccaagcagccacctaaccatccagaccccaccccactcacgcggccatggcgggccctgagggcttccagtaccgcgctctgtacccgttccgccgggagcggccggaggacctggagctgctgcccggcgacgtgctggtagtgagccgggcggccttgcaggcgctgggcgtggccgagggtggcgagcgctgcccacagagcgtgggctggatgcccggcctcaacgagcgcacacggcagcgaggtgacttccctggcacctatgtggagttcctggggcccgtggccctggcccggcccggccctcgcccacggggcccccgcccactgcccgccaggccccgtgatggggcccctgagccaggtgagcagcaagcaggggccctggaaaggggggtggtcccctcagaccc

SEQ ID NO: 22364 - DNA, 1006 bp, Homo sapiens
tctttttagggtaacatgtttgctccctcctcccccactcggactatagaagtatcaccaatccactgcagagaaattgggaaaattcagaaaaacaaaaaataaaaagaaatccacctcccattctccctgccctccgcgcccacgcggtagtccgtgctctgtggggggctccagggcagctggtccaggccctggcctgccgcctccttggaggggaggtttttcggttgctcagctccctgatcgcccaaaggcacgcttcctacatgggtggctctctcggaaatacctcctgccttttttccccaggaagagaaaagtgagccacgagaatgtgcggaagcttccgtcactgacttagtattttaaagtaaaaatagccgggtgcggaggcttacgcctgtaatcccaccactttgggagaccaaggcgggaggatcgcttgagcccaggaattggaaaccagcctgagtaacatagggaggccccatctctacaaaaaatttaaaaattagctggatgtggtgtcgcgtgcttgtggacccaaatactcccgaggctgaagtaggaggatcacttgagctcaggaggtcgaggctgtaggaaaccgtatcgcgccactacactccagcctggacgacagagtgagacgctgtctcaaaaaattaattacttaatttaaatttaaaaagaatgcaagcccttgattgtccagagcagcattgggctctggaattagaaatggttgagctgggggaggggctgcgggattggggtattttctttgtgtcaggggagacagagctggtgggagaacgggctaggcttccaggccggtcccactcagaggaaagtccagaggcttccctgcatccctaccctatcgtctacactagacaaataaaaataaaaatgtggccaggtgcggtggtttatgcctgtaataccagcactttgggaggccgagtcaggaggatcactccttgaccttgaggtcaggagt

SEQ ID NO: 22365 - DNA, 1086 bp, Homo sapiens
cctgggcgagggtgcccaactccaggggctgggctgatgaggcaggaatgccgggtataattattacatgcttgttaccactatcatggctgttagggcttaatgagccactattaagactggctgggaagggggtgtgagggaggagagatggacccaccccaccaatactcacaagggatccttaggacatctggatctgacctacagcctctgcatgcacccctccagctccccacctctgtctgaatggagcccacaccctcctttccctgacctccttcccctcactctctctgatccttggcctcccagttgcaggactaatcgtacctctgggcctttgcacgtgctatgctctctgcttggtactcccttcccccagtgcaaagatgtgtcttcaggaagtgccccaccctcagactttactcctttattgtagcctctgaatctgccagaatgatggagtggaccatagtccctgaaggtcagggacattgcctatgctgagcctgctgacagggcctcgcatagaatggatgctcagtattaaaggtgaatgcggggctgggtgtggtggctcatgcctgtaatcccagcactttgggaggccgaggcaggcagatcacttgaggtcagcagttcaagaccagactggccgaaatacaaaaatacaaaaaaaaaaaaaaatacgaaaattaaccgggtgtggtggtgtgcacctgtaatcccagctactcaggaggctgagacatgagaatcgcttgaacccgggaggcagaggttgcagtgagctgagattgtgccactgcactccagcctgggagacagagtgagactccagtctcaaaaaaaaataaaaaataaaggtgaatgcaacaaaaggttgcttgtgtgggtggtctctagcctcagtttgtctgcctggccagtgggcatgcgttactccttttctatcctccttactcacctggctctgcccccaactggggcatgaaggccataagggaggctgtcctcatcaccaagagaggtggcctgtcggccacacgcggtgactcctgcctgtaatcccagcactttgga

SEQ ID NO: 22366 - DNA, 1049 bp, Homo sapiens
taggaaactgaggcccagaggagggatgaagggagttctccgaggtcacacagccaagaaatgggagtggcattgcctcagaagtgccccaggccctggccagcggctacagatctgggtctggagggccaggtgtggatataaacgtagctggtttccaggacacagctgtttatgtggtgctggcgtctactttacctaggaattatccaactctaggatctccctcttttttttttttttttttttttgagacgaaatctcactctgttgcccaggctggagtgcagtggcgcgatcttggctcactgcaaccttgccttctgggttcaagcgattctcctgcctcagcctccagagtagctgggattacaggcacctgctaccacgcctggctacttttttctatttttagtagagatggggtttcaccatgatggccagactggtctcaaactcctgacttcaggtgatccacccacctcggcctcccaaagtgctgggattacaggtgtgagccactacccccggccaggatctccctcctttttaaaaatcttttccattgactcagacaaatcgtgactcaggttggtttctgaacagccaaagtgagaattctctggtatgttttaggcaggtaattcatggttcaggaaggaccaggcaggaatatgtggggtggggtggcaggggaacatatcttgaccttgtaggaaggggtacagtgagcctcgctgtcatctcctcgcagctgggggaggaaaagatggcatattaggggccgaggggggctgtcattcctggtgccctgaagaagatgccagtctgcaaaacctttctagtttcttttccagatggagtattttgtagggacaggctggggagcaatgcacagagagaaagacggaagtgttttctcgttatataaatcagatcggcagagaccagagccaaacccctgtttatcctagcctatgagctgcctgatttaaagtaacctctgttcccattccagaatcctagatttggagaaaaatctaagttga

SEQ ID NO: 22367 - DNA, 1279 bp, Homo sapiens
tcctgcctcttctgcctaggctgacttgggatgccccacccctccacaaagatgcctgtcccctctgcccagcctctgggtcattttggagaagaggctcttctggctagaaggtggtaggcaaatgactgcactgtcaggcctcccttgcctgtgtgcagttaggaagatgagctccatttccaagcacccttaagcccaaagactttttgaaactggcctctggctcctgctcaggtcggaagcaggaggtgtctgccatggtcacccctggacccctggtctgtctcctgtgtgtctccaggcagctgctggctctggaggcatccacccacccagtgggaatcgggatcgttcactgattcagcatatctgccctgggtgtccctgggtgtggcagtcgggaaggcaggctccggtcgggatggcagggtcggtggccctgaagaagcccccaccccagcagggaggcaggtatccagttagcaggagaaagcaaagtggatgatagatagcgaagggtgaggggatgtcaggtggagggcacagcaagtgcaaaggccctgatatgggaccaggaaaaggagctggggctgggcccaggtggaggaagaggcagcctgcaagagtgccagatgggccccagtgggttgtgtgtgcagaagtgcgctctggctcccaggtggagtggggcttataggggtcaggaacagaggctgggaggccctggggatgtggacacagttgtctgaaagagagctggggaggccgggcgtggtggctcacgcctataatcatcctagcactttgggaggccaaggtgggtggatcatttgaggtcaggagttcgagaccagcctggccaacatgatgaaaccctgtctctactaaaaatacaaaaattagccgggcatggtggcgggtgcctgtaatcccagctactctggaggctgaggtgaaaggatcgcttgaacctaggaggtagaggttgcagtgagctgagatcgtgccactgccctccagcctgggtgacagggcgagactccatctcaaaaagaacaaaaaagaaaaacagtgaaagagagctggtggcagcctggacccaagtaagaaggaagagatttcataggtttgagccgggggtggtagggtgagggggttagctgcattcctggcccccttcccatactgtcctcccactccccaacctgcccagcagaggtgctttggggacactggcctcgggactcaaggctctcggaagtccctcagctgccag

SEQ ID NO: 22368 - DNA, 2638 bp, Homo sapiens
aaaatgaggcgctgcatatccttccttctctctctggccccaatcctgagccccttctggctgcccttggagcctacaggccttcccggcttacactaggtctcggccagctggctccagaaagggaccgagcacctggtgggtgcctgccctcgggggctcgcagcagatggcagtgactgtggagtgcaggggcagcagagtgggctgagggaggctggggtctgagtgggccacttgcaagaagaggggcatgtgtatatccttcagcactcaagtgttgccaggcaggttgagaagaggtccatgaatcacagccatggttggtgttgcctggcagctcgtgggtttctcccgggcttgattttgagccggcacatggatgtcggtggcttgttcatcagcctggcaggtaagccagggatgggattcacgattggacgtggtcattttggcccctggctggaaatggctatgaggggcaggtgtggagggtagtaaggagaggccgccactttgccaagaagctgccagaggcctggcctttagggttggcagaggggagggaggacggcgagggttggagggtcaggagtgagacctggtgacggatggcaaggtgacacaaagccatgagtggcaggtgtctcctgccccagcagcatctgtgtctaggaaggcgctgagcagggagcatccattgcagccattctgggtaattatggtaactcgcgtcattacggtggtagctgtggtacatttcaggccaccaggcgctagcaccccatcctggctctgcttccctgcacagcctcatgctcgctccaggtccaggcgccccatgtcctccgagtcttgtgttccttctgcagggagagctgcctgctgctcttccgggtgcctccctgttttcctttctggccacctgcctgtgtgacacagggagccctcataggtgacaggccctgagaggttgtaccggcccagggcaggtggccggtggggggcagagggcatgggtgatttgcatccagagcccttccctataactgagctcagggccccaaccggtggcgcccccagacctggcccccggagcagtcctctgggaggggaggaccttgtaggtcccaaaactccctggccgaacagccaggcttcaaaacttttcacccaaaacaataacaacccacagttcttccctggagactgaatcctgtttaaaataaaaggaccaatgtggaagggaaatcagcaaaaccgaaaacttcctttggcctcccatcgctcccaggataaactcccaaatcctcagtatggacagaatagctgctgaccttcatcagtacttaccccatggttcgcctaatcctcccggcatcccaggagggggtccccgggccggtttgttcattcactggggtgactggggcccaggatgcccagctccattctaaggtcgttgcagtgagcagactccaagtccccgccccacgtcaagctacattccattgggggcccaagacagagactctcagatggaggagacggagcagggtgggggcttccatgtgacagtgaagccccgagaggtgacactggagtctctgggtggaagtgccccaggcagggaaacagtgcgcagaggccctggggtgacagggcagccagtgtgtgggtcggggcggggggcggcacaggagggtttgaacaaggaacatgggggtggggggagcagcacctggaggggactctgtcgtaatccaggtgggagacggtgggtggcctggcccaggtgtgcagtggaggtggggagaggggcccaagtcaggaaagagatttccttcggtgtttttttaaacgcagtgatgtttggggacagctgggtggatctcacacaggtgcacgcctgtgcgcacgccaccagaggctccttggacaggatgcatgtgtaaaggccaagctgacagtctctgagcagggagggggagaatggggaaggggtgggggctcagggtgtcgaggctgggcctctagatgtcaagtgaacagggaatcccaagtttggggaaggtcaggccatagcaccctctggacagcccctacttgaaggcatcatcaaaacaggacgggcggccacacagggagagcagaggagaagacagagctggtagccgggggcgggggctggaggcaggaggacagcaggagggggcggagagggcggggtgggctctagggggccacctcctgggttaggcacttatggggacagtcgaggaacaggagacaaggaaggcaggtagaacccttcgcagccccctccttcaggagtccccctgggccttttggacagccgtgccctgggtgtggggtacccagaatgcagcctcagcaggacctcccgctgcccccgccctcccggggccgctcaccagcgttcctgcaactctgtcttaccccactctggcctttcatgccccctgctctgacccctaagtggctggggtgggaactctcttccacacctggcaggtgggttggcactgggctccccaggctagtcggtctgcccctggaacctgctcaccctggccttgtgtgctccccttccactgatggacgcaggcctgtcagc

SEQ ID NO: 22369 - DNA, 1106 bp, Homo sapiens
catgaggcgcaacctaacccacccctacggccaatgcctggctaagacgtcactgttgttcccaggccacgcccacatcgcgctcagcactgcctctggcctgcctgctgtctcctttctgagagagcctctaaactgaatttcggactcttcctacacaaagcactgcccctcgtggttctacccgggcactgcctttctgggtgcctctgttttttcctgaacatccttggagggcagggggtgggttctgctcgtggagacatccttcgtgttgctcattcccccaccaggtggccctgctgcagttgatggagacgccagagctggcggggcaggaggacgctgtacggatgcagcagctgaaaatgaagtgagcgctgctgcccaagccgcctggctatgctcgatttgcaccagggttggcacggtcaggacgctgccagcagaggaaccctctgccagtgcacaatggtgttctcacctggtggccctcagatgtacacttccccagagggcacagccgtgaaacttcacatcagtttcgctgtgcattgctgggacactgctgtatacctcgacacatgccaatcctgcacacgtggctgtccgtggagcttggacatgccccactgagcacagaccttcagatgcctgtcctcagcccccaagcacacacactcatgtacacacacatttgacaaagtcacacttcataacctcctaatggtacacaccccaccaagatggccttttcttttcttttttttctgagatgcagtctcactctgtcaccaggctggagtgcagtggcgcgatctcagctcactgcaacctccgcctcccgggttcaagtgattcccctgcctcagcctcctgagtagctgggactacaggcgcgtgccaccacgcccagctaattttttgtattttagtagagatgggtttcaccatgttggccaggatggtctcgatctcctgacctcgtgatctgcccacctcagcctcccaaagtgctgggattacaggcgtaagccagcacgcctggtcctttattttcttttcttttttctttcttttttttgagatagagtcttgctctgtca

SEQ ID NO: 22370 - DNA, 1051 bp, Homo sapiens
cagagcccaggcggttggtggcctccacccagatctcatagggcgtaaagagagccaggtccttggggatgtggcaggagtggggccccactgtgtggtactcctcacatgtgttgtcctggccataccacctgcggggatgggagggcgacaggacgcatgagggttccttgtggcccccagacctcaccatggcagcctcagggtgcagacaacacatgggggctcagagagggtccgcgttggtcaaggtcacgcagccagcctgggacacacacatcgccctcaggccaccaccaacctaagcttgtacttgagggagtagttggtgtggaggaaggtctccccgtgggcccctggcgtccagcggcaggtcaagtccttcatgttcttggaccagcagctgatgttgacgggtttctctgggggcactgggagaaggggagggtgcaggaagcaggctgagggtctggactagctgagcctcggctgaggggttgctgcccacccaccaggcccccaccttggagtggaaggagggcagacaggacagtctcagccctgtgctgagaaatgccagcacagttggtgtgacaactgcaagggctcttgagaggctggtgactcgatctccgggttctttttcttttttcgaggcaaagtctcgctctgtcccccaggctggagtgcaatggtgccatctcagctcactgcaacttccgcctcctgggttcaagcaattctcctgtctcagcctcccaagtagctgggattacaggtgcctgtcagcacgcctggctaagtattgtatttttagtagagatggggtttcgccatgtaggccagcctggcctcgaactcctggcttcaagtgatccacccacctcagcctcccaaagtgctgggcttacagacatgagccaccttgcccgaccgggtctccaggttctcattcccacctgaaagacctgcatagccatgccagtgtgcccacagctcatccccaggccagaaggcccacaattcatgcctcactccagagggagatgcc

SEQ ID NO: 22371 - DNA, 1022 bp, Homo sapiens
cccaggtggggatcagggaggtggggtggctgatgagccgtagaccgaggctctcccagcgggacctggcaggcaccgccccttcatctgtagagtggggttccctctcttgcagggcggctggaggactagtggggtaaatccacattcttgcctggggccggccttgaaaagcccctgtcttgctcttcctgctgttcagctccatgtccatcctcccagctcaggcagagccttggcgagctgtctcagccctctgagcctcagtctccccatctgtgtgatggtcacgatcagaggcccacccacctgggaccggggagaggtcgaccagcacccgtgtgttggctgaggaaggcctcctttggccaagcctggtgtccccctgcctctgtttactgtataactttgggccagtggccgaacttctctgtgccttcatttccccatctgtaagatgggatggtagcagtgccccatcagagactgcctgccacaaggtgggccaggagccaagactgcacagactgggtgctccctcggtccgtgaagactgttctgatggagacgccccagcattgtcatctggacatggagagccaggatgggaggggtgctgtggaggcagagagcttgctgctggtcagggaggtggggtctgaacacccccttgtcttctgggcctttgtttggatggtggggcttcctcttgttggccttgagaagtggctggagtttggcaagtccgggatgggggcgctgtgcataatgtcttcctgtccattggccgcagtcagagccccacacatcctggactcctggtggcattggtcagaggctgggattagggcaggacatcacagcccggccttgagggcactgggcttatggtgacccctgaggagcaggtgaggggtggccacacgtatccatcatccacccacccatgcctccagcctccttcctcatctagaacacccccatgctcctgagatgacagcttgcaaaccactgcacctcta

SEQ ID NO: 22372 - DNA, 1059 bp, Homo sapiens
tggggccaaggagccttccgtctcctcccgctttcttggaaagatcagtgcccgcattcctggcctttgcttacaggcaggcgtgggtcccaggaatgggagagcaaattccagagggcagaggccaccaggacagagcagggtgcctcagcccggtgggggtgggggtcttagaggggactgatcctggaggtggcaccagggtccaccccctgttgtgttctgaggaagaagtggtgtgttaacggctcctaagctattaattcattgatccgttcaacagtttccccaaatgaaatagcaaaggggtggtggggctggagaagaggggatgagggggcagtaggggcagtgggggctggaccacagagggctcgtatactctggggtgcagggggctgtggcggggcttgcaggggacttgagaaggctcccgtgtgtcctttggtttttttattgaagtgaaattcacgtgacataaaactgtctgaaagtggacaattcagtggcatttagtagattcacagtggtatgcaaacaccacctctgtctagttccagaacattctcatccctccaaaaggagaccccaccccatcagcagtcactcccccctcccctcccccagcccttggtggcacccatctgcttcctgtctctgcggatttgcctgttctgggcatttcacgtcagtggagtcatacacagtgcggccttttgtgtctggcttcttgcactgagtgttgtgttcaaggtaatagtgtgtgtgtgaacctctgggccatgtccccacctctgctttccccgcagcacggccgacaagaacggggccctcaagtgcaccttctcggcacccagccacagcaccagcctcctgcagggcctggccaccctccgcgctcagggccagctcctcgatgttgtgctgactattaacagagaggcctttcctgcacacaaggtcgtcctggctgcctgcagcgactacttcaggtaagtgctggccccaggcagctggaaggggcggctgcctgttgggacagggacagggcagatggca

SEQ ID NO: 22373 - DNA, 1044 bp, Homo sapiens
aaacgtccgtaacacacggacctccaggagcagtgagaggtggcttagaagcccctggtttggggtgggtggaggaggagggcacgtgtctgcctcccctggggtgccctccttcccccatcccaagctgctgaggggaggccctggtcatgcctcagttcctgccttcatctgctttccggaggaaaaaccatatcaactcctagaaacgctccttaggggcttgggaccttccatttggcactgagcatcttgtggggccttaactggctgagacatcccggccctctacatttgccctgttggccaggcagtccccttcccgcaattggagggcgacgctaacttcagaatcccatagtggcgcttgccgcaggtctggtggggtgtcttttttctcctccctcctttccacccctccgcgccctgccactccctggcctgccctgtttttgggtcaacattgctacggagccagcagtgaggcctttcccttcaagggctctgtggtatctctggccacatttgttctaatgtctgaacctctaaatcttttctttttgattggttttactgtttttaagaagccagcactgctgtctcatagatgggatttgtactcttggggcaacttaaagtgtctctctcgctgctaacagacgattgatgtcttgtctctgtgacccactcaccatgtaaagaattaacctcctatcttagcagacatcgtctcctaatatttccctttatttaataaaaatgttatggtgaagagatggagccggcccagcactgagcttgtgcggcttgggtctgattggtcacagattcctcgtgtgtcctccgcgtgtctgggggctcctctcccccgcctcaaccttttccagcctttcagaggagtcggcagtgggctgggctttggctcaggggcgcagaggcagcaggaagcgtggccaggactttcaccctggcgttttttgttgttggtttttttgtttttttgagacggagcctcgctctgtcacccaggctggagtgcagtgg

SEQ ID NO: 22374 - DNA, 1027 bp, Homo sapiens
gccaggtgatgttcctcccagtggaacaggggatgctgaccacagcccctgccctctcaggaccagggtggagggccaggtctgcctcaggtggctgggcgcatttggtgtgcaggggcaggccaggttctgccaggctcctgtctggcagagcagataccctgcaaatctcacctgggaagttgctgtgggccaggagcaggggcttggggctggtgtctgagcacggcaaggcacccgagttcctcaggcctcagtttcttgtcaggcattctagcaagaccttcctcttggggcagggtggtgagcacactctgcaaaggtgatgctgaatctccactttgttcttgcagtgtggtgagacctctctcctgcatcctggggccttggggagggtttgggtgggctttgcagatgctcgtatccctggtttccagattcagccactgatgtgactggctcaggtagacttaacctcagtctctgattccttaggtagcactttcagtctgtgttactttgtaactagttgtttgtttctctgagagattgtgaccttatagactaggatttgtgtcttcatttctgtgttggtaatgattgggagctcactgtcacccaggtactgctttaggcatgctcggtgagtgtgccacatctgtcctcccagctccaagcagctacattcttgctcaggatgtagagaaagagatggctggtgaatgaatgaatgaaaaaaaaataagaaaatggccaggtgtggtggctcatgcctgtaatcccagcactttggaaggctgaggcagtggatcacctgaggttaggagttcgagaccagcctggccaacgtggtgaaaccctgtctgtactaaaaatataaaaattagccggacgtggtggtagctacctgtaatcccagctactggggaggttgaggtgggagaatcacttgaacctgggaggtggaggttgcagtgagccgagatcatgttactgtactccagcctgggtgacaagagtgaaactc

SEQ ID NO: 22375 - DNA, 1040 bp, Homo sapiens
ggctgcgaccagggtgggcaagcttattcccagtttgactggccactgcacagtccaagtggcatgtccgccgtgcctggagcaggtgaatgaacctatatgatgtgggcttccctcctgcagccatggcgcgctgcctcccatactgtagacagcaggggtttggccacacctgcagccaggtgaggcatgatcgggtcggcacctgctcctctcctttgaattccaaaggacagcatgtcactcatgcgtgtctgttcacagttgccggtggtgatggcacctgaggtgtcttgctgccgtggaaggccagtcagcagatgtttggctagaagacagggacctcaccagggcacaagcactgaagggttgggggacagggcgtaaagtcgggagactgtttgcaggtcttggggcggaggggtgggtgtgtgggcgttccctcccactcttaggcttgggtcagcgtgacaggcaggctgtctatggcgctctgctgtgtgacactgggtgggtttctcaacccctctgggccgtagaatcctgagttgtaaagttggggcagcgcgttcattccatcaaatgacaattttcattgtctggcatgtctcaagagcctggggtgctggggctcctgcagtgtacagggcatacggggctgtgttcttggggagccagcatagttttaggggggacaggagagcatcaatgcatccgaatgaagcagacgccctcagaaggtggcacacgctgggagagaagtggctcagccacgtgctaggagtggctgggacaggggtgacacagcatccccagagagcagggaagagcacttcagattggggacaggcacagtcagagccttgtggtgggaatgacttggcgagtttgagaatgggtggaaagcagggaggagggcaggtgaggctgcaagagcttggatctcccctgagggaggggtctgggaagcctccctgcttgttttgtttgtttgtttgtttgtttgtttttttgaggaggagccccccctgtcgcccagg

SEQ ID NO: 22376 - DNA, 1032 bp, Homo sapiens
cagtgcttcatttctttctttcttttctttttctttcttttttttttttttgagacagagtcttgctctgtctctcaggctggagtgcagtgagccaagattacgccactgcactccagcctgggcgacagagtgagactccatctcaaaaaaaaaaattgatggccatatatatatatatatatatatgtaatataacacttaccattttgacgttttttaagtataaaattcagtggcattaagtttattcccagtgtggtgcaccgtcaccggcatggctcagtaatagttcatgtcatattccatggtgtgggtctaccccgttttgtccattcatctggccatgaacacgggttgtttccacctttggctgtcgtgaatcatgctgctgttggcatctttgtccacgtttttgggtggatgtatatcttcatttctcagagcatgtgctggggagtagagttgccgggtcctctggtaactctccatttatccatttgaggacgtcgtgtgtctcaggaggatagctgtggctgtgagtgggatgggtgtggtgtgagcatccgctgcaggtgtccagatcagggggaatgatagctggagcaagggggtgacagagcgggtggatttggtggcatttctgcagcagagccacccagacgtgctggaggattggatgttgggggtgaggggaagggaaggggggagtgtcgtctgcttgccaggggttcaggacattggggattcctcgtatgactgatcattgatgacctcagacagcaacacctgggccagaaaaagtacccaggcaagacagtcatggtggcacggtcagggctgaaggagggcactctcctgctgttacctactgtgaagctggagtaaaacgggcccctgggctgcaggcacagcgcagtggtggctcaggttagctgagtgtggagcccgccccccagtcctggctttggcgctatttgtttctgtgccggctgcttcagctgtctgctgccatccgcagcctccatatac

SEQ ID NO: 22377 - DNA, 1034 bp, Homo sapiens
gggagaagaaaaagacagcagggcctgggcagccccgtcacggggctggctttgaatcttacttatctattgttgaggtgaacaccacataacataagattcaccatctgaaagtgaacagttccatggcgtttggcgcattcacagtattgtgcaggcatcacagctatctagttccagaacattctcatcatccaaaggagaccttgtccccattagcagtccctcccctcctctcctccccagcccctggcagttactaatctgcttcctgtctctgtggatttgcctgttctgagcatttcagatcgatggaatctcacaccctgtggccttctgtacctggcttctctcactcagcatcacatgttcagtttcatccacattgtagcatgggtcagtgcttccttccttttttgttgttcctcttgagacagggtctcactctgtcacccaggctggagtgcagtggtacgatcacagctcactgcagcctccacctcttgggctctgtccaacctcccacctctgcctctcgaatagctgaaattattggtgtgcaccaccatgcatgcctggctaattttttttttttttttttagaaacagggtttcaccatattggccaggctgctctcaaactcctggcctcaagggatcttccctcctccgcctcccaaagtgctgggattacaagtgtgagccaccgtgcccagccttcattccttttcatggctgaatcttattccactgtatggacagaccagtcttattcattcatcccttggcacacacgtgggttttcccaccttttggctgttgtccattgtgctggtacacacactcatgtatgattgtcttcatttcgtgggggcatccgtccaggagtgggattgcttggtcataacagcagctcagcatgtcacttgttgaggaaccgccatacagattgggggtttattttaaataggatggaagcctactggtgtgtttaaaacgggagcataacacgatttgaactgaatgaataaaga

SEQ ID NO: 22378 - DNA, 1048 bp, Homo sapiens
ccaggccaatctcaaactcctgccctcaggtgatccgcctgcctcagcctcccaaagtgctgggattacaggcgtgagccactgtgcctggccgacggtattcaggacggtcaccctgtacaggtttgtagcctgggaacaagggccctaccgtctggccgaggtgtgcagaggctctgccatccaggtttgtgtaagttgccctgtgatcctcatgcacagccatgaaatcgccggacaacgcgttttttcagaagtcacccccattgttaagtgatgcttgactgtacttagaatcaacattgaaaaaccaggggaatgcccgtagaacaccagatttctggctgctcttgaagaatcagacagcccagtggccatggccgatgtcttgcacctcgagacgggccacagtgctctggtttgcctcaggccccacccgcccctgtcgtcccacatccataccctcacacgctcctgacgtttgcccctactttgtaccgagcccgacctctgcttctgacctgggcactgagcatctctcggcctgctggacgcacgaagtggcggacactcaggagaagatgagggagtggcccagggtcgtgactctgagtgtgctctgagcaggcttcccccacatcctcccgtccaggcctctgttgatgcctccctggacgccagggcctgcaaagggcgcttgctgcctggggagcagtcaacagcaccaggcttcctcccacagtgcgcagccaagcagagctgccagggcatccgaggggaagtgcaggcgtgaccgagctcgccccggtgagcagctgccctgggcacggacaaggctgtcatctcccctcggcgcttgtcgggtgtgttcccatgggcccacgcacccgccgtctcatctgccggaacaaggttaatctggtgcccagatctcctggggtgagtcaggcggcttcacccccgccttgactgcaggccagatgctcttcagagactgctcctgacctcaccagggcctcactttgaaccggagagggcggctgttatc

SEQ ID NO: 22379 - DNA, 1035 bp, Homo sapiens
ccctaatggaagcaaaaaacatttgactcattctaaccccatattccttaaaatagaaggtggggtgtgaggagaacaggtgtgcacgtatgggtgtttttttcagttttgtttacattttgcgaagggagggagggagagaggagagttctcctgaagaagggagtctgagctgcggaggccccacctccttgtagttttcatgccctgtagacctttctgcttccgcagctgtgaaatgggggtggcagttagatttttattccttttaaacataaaggaaacctagatccatgtgtgagtcgactgtatacgctgtctgtaatctgacgtccagcctgtcggggagactcggtaaagatctctgtggagcagtgagccatgagcgtgacagcgcggatcggggggttggctgggtgtgaaaggtaatcattttcttgtgaatccttttaactgtagcgagcataaaacagcaaacctggggcagcctttagttctgcttttgtttctggcattccgtttgggattaattgtggggcatgtccttctctttcagttgaaacaattgattttttttcctgcacctgaacacactgggctgtacaaaaggagagcattaaaacgctcccctggaggtaaacattgcagttgagctcactagaattctgacgacatcagagggtttgtcctgtgctacttgtaattgacccagatgccccacccacctgttacctgtaatttggatttgtttgtggggaatgggagtggtacccctttgcatcacaaggggaagaacggaatttgggggcaaggaagtctatgaatatcattcaagggaaagcggaagaaagttatctcttgtgtgaattgaaggcagtgtctgctaagatatttgggaagactttccctgtttgtcctcaggagttggccgtgtaaccagctgttaagttgggggctcctggaaactctcattctgcttttttaatttttattttactggggaagtggctatcagctgtcaagtgccctgcagtc

SEQ ID NO: 22380 - DNA, 1525 bp, Homo sapiens
gagtctcgctctgttgcccaggctggggtgcagtggcgtgatcttggctcactgcaacctgtgcctcccaggttcaagcgattctcctgcctcagcctccccagtagctgggattacaggtgcacaccaccatgccccggctaatttttgtatttttagtagagacggggtttcaccatgttggccagatggtcttgatttcctgaccatgtggtccacttgcctcggcctcccaaagtgctgggattacaagcatgagccaccgcacctggccagcatttcattcctttttaaggctgagtaatattccatgggtggaatggtccagatggatggaccatgttttgtttatctcgtcatctgttgatggacatttgggttgtttccacctcttggcttttgtgaatagcactgctgtggccatgagtgtacaggtttctgcgtggatgtgtttatagacctgctgggccgcgtagtaaccttgggtttaatggtttcagtaactgcaagactgttttccagtgtgtagccactttccataccaaccctacctgaactggttttgcgcagttggttttcccttaatgtgtgttgaaagacagtgtgtccccaccgggatgggaaagtggcagcaggggtgactccctgcactcagagctggttcagataacactccttttcttgtttatgaaatgaaactgatatttatcaaagcccttgagatcctgggatgaaaagcgctgacacagtattgccaagtgtccttaagatacagggacagttttcgagcatctgaccttttcctgggcccttctctgctgccacttctcctgctcccaggacagtgaaggtaatttcagaagtcctttgcataatagctggtgttacaagccttttggtctgcctggttggaatatttcctcttgactgtagcttctgccctggatcctccaaacgggaactagagtgaaactcttaagagttggaaatactgctcagtattaagaaggaacaaactattgatacctgcaacaacatggatgtgtctcataataattacttttttgtatgtgtcattcatcatatgatttaattcataaaaaaattctagaaattgccagctagcctgcagcaatagaaagcagaccagtggtggctggacagaaaggtgggaaaggggaggcaggtgacaaagggcacaggaaacttgggggtaatggacgtttttattatcgtgattgtagtgatagttttatgggtgtttaagtacattgatgtatgtcagtttctaaaatggcacactaaacatttgcagcttatggtatgtcagttatgcctcaatgaaactggaaagaaaagtcagggagataccactatccacccatttttttttttttttttttttggagacggagtctcgctctgttgcctaggctggagtgcagtggcacaatcttggctcactgcaacctccacctcctgggttcaagcgattctcctgccctagcctctcgagtagctggga

SEQ ID NO: 22381 - DNA, 1065 bp, Homo sapiens
gtctctcaggaacctggaagggcatgattctccttggacacagaagtttggtaatcgtggtttttggagggtcttgtgcccccatcaataatgcctggtgtcgtacgagggaagctgagacccggagtctggagttggtcatttgaggcctatgaggaggagaaacaggggttctggattccaggccccgctgttcagtttcagtattaggggaactaaaagcagctcctgctttttctccatccactggtgacttctaccatccatcagtccatcctcttccgtcagagtgagtccctcccctgacccaacttgatttgtgtcatcttggtgcctcaaagaatgcgggagagtggctgtcattctgccctttagtaaactttctttttttttttttttttgagacggagtcttgctctgtcacccaggctggagtgcagtggtgccatcttggctcactgcaagttccgcctcccgggttcaggccattctcctgcctcagcctcctgagtagctgagactacaggcgcccgccaccacgcctgcctaattttttgtattttttagtagagatggggtttcaccgtgttagccagggtggtctccatctcctgacctcatgatctgcccacctcggcctcccacagtgctgggattacaggcttgagccaccgcgcccggcccctttaataaactttctagggccaggctcagtggcttatgtctgtaatcccagtattttgggaggcggaggcagacagattactagaccccaggagtttgagaccagcctgggcaacacagtgagatcccgtctctacaaaaaatacaaaaactagctgggcgtactgacgcgggcctgtagtcccatctactccagaggctgaggtgggaggatcagctaagccccgggaggtcgtggctgcagtgagcagtgatcacgccacttcactccagccttggtgacagtgaaaccctgtctcagaaaaaaaagataataaggaaaaaataataaaatttcaggctgtggagtcgtttttttctcacagcagcgctgtgatcctg

SEQ ID NO: 22382 - DNA, 1039 bp, Homo sapiens
ttaatctgaggtaaatccaagcccaccctcagctagtaacaacttgccttgaggaatagatcaaatctttgtttcacagactgaaaagttggaaggagactttattttattttattttatttatttgtttattttgagacggagtttcgctcttgttgccggggctgtagcgcaatggcaggatctcagcccactgcaacctccgtctcccgggttcaagtgattctcctgcctcagcctcccgagtagctgggactacaggtgtgcgccaccacacccagctaatttttgtatttttagtagagacgggttcacagtattggccaggctggtcttgaactcctgaccttgtgatccactcccctcggcctcccaaagtgctgagattacaggcatgagccactgcgcccagccccagataattttttttcttttttttttgagacagattctcgctttgtcaccaggctggagtgcagtggcgcggtcttggctcactgcaacttccgtctcgtgggttcaagcaattctcttgcctcagcctcccgagtagctgggattacaggcttgcaccacatcatctggctaatttttgtatttttagtagagacagagtttcaccatttggtcaggctggtttcgaactcctgacctcaagtgatccgcccatcttgtcctcccaaagtgctaggattataggtgtgagtcaccacatctggccagttttatttatttatttatttatttattttgagacagggtctcgctccatcaccccggctggggtgcactggcgtgatctcagctcactgcagccttgacctcctgggctcaagcagtcctcccatctcagcctcctgagtagttgggaccacaggtacgcaccaccacacccagctaatttttgtgttttttgtaaagacaagggcttgaactcctgagctcaagccatccacctgcctcagcctcccaaagtgctggaactacaggcttgagccattgtgcccagcgtggaaggcaactttagtcctcacttgat

SEQ ID NO: 22383 - DNA, 1080 bp, Homo sapiens
ctgtcacccagcctggagtgtagtggcacaatcttggctcactgcaacctctgcctcctgggttcaagccattcttctgcctcagcctccccagtagctaggattacaagtgtgcaccactgcgctcagctgatttttgtatttttagtagagacagggtttcaccatgttggccaggctggtcttgaactcctgaccttatgaactgcctgcctcggactgccaaagtgttgggattacaggcgtgagccaccgtgcctggccagtttattcttttaaattggcttataaggggccaggtgcggtggcttacgcctgtaaccctagcactttgggaggctgaggcaggggatcacttgagatcaggagtttgagaccagcctggccaaaatggcaaaaccctgtctactaaaaatccaaaaattagctgggcgtggtggcacatgcctgtaatcccagctactcgggaggctgaggcacaagaatggcttgaacctgagtgagaggcagagtttgcagtgagctgaggtcgggccactgcactccagcctgagtgacagagtgagattccgtgtaaaaaaaaaaaaattataagggacaagtgaacacttaagagctttacttgtgtggccataagatatggtgtatgtgtgttttctagtgcaatttacattacattaaaaattagaaagtgttaaatcttctggcccatgtaacttcctatgcgaacaaataattcaggaacaaacactttcatgcctaagataaaacattttcatgcttggtgatgggggtctggcagtgagcaggactgacacagctggccttccagaagcttacatcttagttgcagacaaataaacaagcaaatgaatgaaagaacattgtgaggtttcttgagaatatccctaagtgctgcagctaccctcattgggagcttcaggtggggtttcttggaggtgtagaagtgaaacctcactacctctttaatttcctcactgggctcctgtttcctgtctctaaaaggagacagaaattatggcattttcctacttgattgttggcgatagttgattcatg

SEQ ID NO: 22384 - DNA, 1024 bp, Homo sapiens
atagccactctaacccagggagagtttgctggtgtgtttggtgtttttgtttttgtttttttgagatggagtctcactctgtcgctcaggctggagtgcagtggcgcaatctcggctcactgcttgaacctccgcctcctgggttcaagcgattctcctgcctcagcctcccgagtagttaggattacagacacccataactttgcctggctaatttttgtatttttagtagagatggggtttcgtcatgttggtcaggctggtctcgaactcctgacctcagatgatccacccaccttggcctcccaaagtactgggattacaggtgtaaaccaccgtgcctggctgtgtttgatgtttttattaatacgttcgtttgatgaactgacctcggtagtttgtatgtgggccatctgtctcctgcctcccttccccaaacttttggtcaagtttttagtgttgagtctttttgttgttgtctcttttctgactgtacaagcaacatttcctgatgccgaagtctggggagggggtgggagcctcagatgttggtggtaggagttgcctggtctgcttttgaagttttcttgggcaagtatattaacatatactgagtataggttcaaatgtaattgcagtcttattgttagtttgtatctgtcaggttataggattagaaatataactatttttgggagttgggtagcagacaaactgaggattctacctgggactttcttctgtgtactgtgctctgctgaacccaacactgggcacaaacaggaaactgaggctcaagcggaggaggagtggcctgcccaaggttgacttgcagaaggaatgaggatatatccctgttttctcctggaattagactttcagatctctgttgttcttactgatgtctttgtggcttggtgaattttgttttagcttccttcttactttatttatgtaggtccattggtcagtttccttcctcagggccttgtctttttttttttttttttttttttttgaaaca

SEQ ID NO: 22385 - DNA, 1038 bp, Homo sapiens
tatccaagggaccatctccatacattggaaaagtttgttctgctctgttcctatgaatgaaatagcagcagatggatggaagttcgaggaacacagacttgacttagcctgagaaagatctttgtagcagttggaggtatcgggaagaggctcagtgtgaacccagagccctgggagctggttgggaacccacattttctagatttctgaggattttccagcttgaggttttggacacttttccagaaagacccagagcgattaagacacgtctctgaaacaaccacatgaattattctaacagctgctgcttgctggttttaggaagtttccttgtttcatgcactgctcaaatgttttcagattctagctcttttggcagagtttgggggagaagacaggtgggtgtcccgctgtgacactggttttgagagtggggaggggttgtggtcgccggaaggaaaagagccctggggatttgccacttgggtaaaaatgacttggtatctgactagtaatcaccaagacccaaacagggtcattttggggtggaagtgaagtatcagatgagttaggtgggagtgggctgggatgtactctggctactgcccactccaaaaggcctcctagctgggcctgggctgtctctcagggcctgtaccctccaccatccttgaattcagtggccagggaacccgtcccctccccctggtctgtgcctgctctgctcattgcctcacatgtgtgagcactcggtggaaggaggaagggatgtctgcacacactccctgtcgagggaccctggcttgctcctgtggtgccctaagcatgtagttggcatgcatgtgtgtcacaatgaaaatgaagatgagaattggtcctagtttatgacccaggccgggtagtatttgtcgatccttccagccccttcctgcatctcgtacactggcagacagggactcagaggccaggtggctgttcctgcccatggaactctgagggtttccatgccttctacagctgggctcagtcctggga

SEQ ID NO: 22386 - DNA, 1031 bp, Homo sapiens
tgagggtcaggtcctccccatcctgcctcagcaatgcccgacggacaatgggggaggcctggactgtgaggatgcacgagcagtcccattctggggacagagacaagcagggcctggcttggctgcatgttagtgctggcataggggttaggtagggtctggatctgcttgaggtggcttgagatagagggagggagggccagggaggtgagggcagtaggcctccttggaggaagagaaggctggcccagtgaaagccagttgaatggatgagtgaactaacgcccctgcccctatggccctgcccctcctcaccccttctggcctgtactgtcccttcgcctgtccataccagtttcccagggcatgtcttgcatgtaggttgggttgtctaggcagcgctgtgcttcagtgacactttgtggttgacttgggaccctgaccacactgagagcagcgcgcttctctgggttggatggctgggttctcaaggaccaacggcttagaattgtggagggtggagtgtgtcccggccctgtgtttgtttgcctgcctgctgacatgaagcctgatgtgtgcagccactctactgtgtgcgagggaagaaagacatcctagtccgtgttggacatgggctctgtgtggcagagttcagcctcttgtggggccccgtcttactctgggggtgatgcaggtaaagtctgctgaggacctagcctaaggctgtgtagtctgacagatttcttcagaccttctctctcttttttttttttcttcttttttgagacagagtctcactctgttgcccaggctgggagtgtgcagtggtgcaatcttggctcactgcaacctccaccccctgggttcaagcagttctcctgccccagcctcccacgtagctgggattacaggctcccaccaccatgcccagctaatttttgtatttttggtaaagactagggtttcaccatgttggctaggctgatttcgaactcctaacttcaggtgatctgtcctccttggcctcccaa

SEQ ID NO: 22387 - DNA, 1050 bp, Homo sapiens
ggtgaacggtgttgttgggtttcaccttggatgttgttggccatgtcatgttcccaggattggactggagccaagctgtgtttggatgcagaactagttgaaaaattctagagacagcacaagtttttggtgactacagatggtgataggtcagtgggtctgggcccagggaagggacaacggggcttcctaggggcacctggtagagcccatgcttccggatcaggtgctgacagctgcagagacaccatcactgtaccagccatgggtgccgcaaccccagcaaccccatggaaccggagttccccaggtagtggccagtgtcaggccatgtgtcctttcctcaaattaaaaggacctcgctagcctgagcttgagaggataaaatggcaagaaaggacttctgttgcccaaagtgcagtgacttgatttcatgtaaattgccatagctaccttctcaccaaggctgatcttccctcagtttgagaagtccttgtgtttgggtgggttgtatggtaggggtgtgtgtgtgtgtgtgtgtgtgtgtgtgtgtgtgtgtgtgtagtacccaggtgcaaggtcaaagccaaaccataatgatttatcaagggagcggaagagtctcttatgagctggtaattgtgcacttaagggttacttgatactgctttaaatgtatgggttggagataaaaacagtaaaagctctctgaactcagccagtacggggtggatggcaaaacagtccaaatgatagattagtggaaagcgattacagtgtattttcaagaaatgctgctagttgtgatcatgctgagtggtcttctgcttggtttcctcctctgtgaatcttgcactgattgtattgcagggctcctgcagtgggctcctcagatcggccccttctccttcagggttaaactatccctgctcgtccattcaataaatatttattaagcggctgggcgcggtggctcacacctgtaatcccagcacttcgggaggctgaggcaggtggaacacaacgtaaggagttcaagaccagtgtggc

SEQ ID NO: 22388 - DNA, 1053 bp, Homo sapiens
acacgcatgtagacggcctgctttccctctggctccaggagcgtgaagcagctgtctctttctttcctttcagtttgagtgcatgagggggcacatttgggcagggccttgcgctattgctcatttgtgaaattggctcctttaaggaagctgcagatgagtcagctctggagtgcgtcccatggatggcgacaggacccctgtgttgccttgtgctgcccccagcttccagacggtctgcctggctctacctgggacaggcttccccagggtgtttgccagtgaggaaactaaggctctggcaagatgagtgccctgcctgtgaggacacagataggaccagagggcttcagcatagagcatgccacaggtgtgaattggggttctctgtggggcccaagtgggcaccaactgtcccatggaaaactgtgacacttcgggaattccactagagctcagctgctaaatttctcttttgtcctctggtaaacactgggatgcttttttaagaacctgactctctctgtctcaattcctgtgccctgtcctgttgggacgtcgaggccgggattagagcagcccctttaagagtgccagtgtcccagaccctgctgtggaatgccagccgcctccctgcagacagacatcgctgtgctgtcgtcctgtctccgtgagggttaacaacacttcagcctgttgtctggaaccggttcagactggttttctggaaagtgctttgtctctccgactgaatcctgggaagggtcatgtggagccagtgatgtcatgggatcaaaaactgactcagctgtttttttcttctttttctttcttctttaaatcaagatatgtgtgtgctgcaggtacagggcagtggcacgttgatgggccaggcctcactctactcaaagtgtacctcactggcaaccaaagggttaaatgtgatccccagtccccactccccagaggtgagcagggagtgaggagacctcccttccctgaaggggagaagctggggttaactcgagtcaccacagcatagggctagtccca

SEQ ID NO: 22389 - DNA, 1787 bp, Homo sapiens
aagtatttatgcctgtaactgctgaatttcaggtgagaacagtgagactgtatggcatttggcctggagctattcctatgccctctcccatctgtttggtaaagaggttctgtccagccactgtcagctttgaggaccaacagcttcgctgtgtgggtgaaaaggaggactgttcattttagagtggtagcaaccctgcctgtggtcttgtagatgagagtgacagtcttggagatgggcaagtggggagacacagcggctctgttttagcccaaggttggggcaagatagaaaaactatttgaagaaataatgggcaaaaacatacttgaggagaaactcatccaggaatcccaacaaaccctaaatagcataagtacaaagagatcttgacctagatacatcatagtcaaactgtagaaagccaaagaaaagaagaaaatcttgaaagtagcaaaagaaaaacaactcagcacatctggggagcattaataagatgaacagctgacttctgactcgagacaatggaaacaaaaaggagttgaatgatgttaaaagtatccaaagaagaaaactgccaacccagaattctataccagtaaaaacagtccttcaaaaatgaaagcaaaaaagacattgtcaggtaaacaagactgaaggaatccattgctggtagacctgccagttcttcagcctgaaaataaatgacacgttggcagcttgagtctatgagaagaaataaagaacactggaaatggtaaatgcatgggttaactggaaagacttaactagttctgcagtctggaagccaaccaaaggctttgaatgatttgttgggtttataatatccacagataaaatatatgtcatattagtacaaaagatggggaattaaatggagcaatattggagcaaaatttctgtatcttactggaatcaagttagcatcagtcttatatagattgtgattaagatgcttactgtaatgcctagagcagctctgaacaaaataactttaaaatatagttttttaaaaaaatcagggctgggcacagtggctgactcctgtaattccagcactttgggaggctgaggcaggtggatcacaaggtcaggagaccaagaccatcctggctaacgcagtgaaaccccgtctctactaaaaatacaaaaaaattagcctggcatggtggtgggcacctgtagtcccagctacttgggaggctgaggcaggaaaatggtgtgaacctgggaggcggagcttgcagtgagccaagatcgcgccactgcactccaacctggatgaaagaacgagactccatctcaaaaaaaaagaaaaaaagatcatcagaattaaagttatacactaaaaaatatttaacacgaaagaaggcagtttctttattcactgagaaataaaggaacaaacaagaggacatgtagaaaacaaaatggcaaatgtcaatccagccatgtcaataatgcagtaactgtgaaggatctaaatacctcaatcaaaaggcaaggactatcagatagtgtaaagaagcaagattcaggctgggcgcagtggctcacgcctgtaatgccagcactttgggaggccaaagtgggcggatcacaaggtcaggagtttgatagcagcccctggccaatatggtgaaaccccgtctctactaaaaatacaaaaattagccaggcgtggtggcacgcacctatagtcccagctacttgggaggctgaggcaggagaatcacttgaatccgtgaagcggaggttgcagtaagc

SEQ ID NO: 22390 - DNA, 1049 bp, Homo sapiens
tccaccatagtgtaaagtcacagtgctgagaggaaggcagggtaacgcctgaagccaagctggatctgctgcctttggaaacactgagttacctgtggctgaggctcgggcagatgccaccgttctctctggagggtgggagacaagggaggggacgtctgatgggtggaaagatgggagacataccagatgttgctatgtgcctcccttgcttgggacctgtgccataggactgcggatttttagagcttatatctttaaaatagttgtgacgtcatcaaattgaaaagctttgggggttcatgcgactgagacttgatgccatgcagaattcctcaaggcagggccctgatagctttcgtacaaagagcattctaaagagagccatcagtccaggcctccaggagacttggcgtgtctgcaggcggtgtgggaagagtggtctgagggcactctctgggggactgcagcccagaaatcatggtgcaccgggtgcaggggtcagagtctgaaggtacacggtggtaggagcagagaccggaaaggtggtctgggatagattgttggatgcaggaagggtggaacatagagttgggactgggccttgggtttgggacccccctctggagaagggagagttgatgctctgagcctaggtggagcccaggatctctcaggcatttggacgggagagaggtggccaacttgctggagaaggaaggagattcctagtcccggagaccagcagtctaggggcagtggggcacaagattcagaatagcgtcctcacactgaggtcctgggtgacctggccagccatgttcctgtgtttgatccacagccatagggcgtcgcccgctttctgtgacttaggtaaacatagaggctgtacagttgccacataaggctgtaagaaccttaaggtgaccaaattttgttggctgatgattaaataggttttataagcaattatagtgtatctttggggtgaatcctattaaatttttagtacctctcacttttcaaaatacaactttggcagcaaaaag

SEQ ID NO: 22391 - DNA, 1103 bp, Homo sapiens
agctaaggtaggagaatcacctgggcctgggaggcagaggctgcagtcagttgagatggcaccactgtactccaggctggacaacctgagttgagaccttgtctcaaaaaaaaaaaacaaaaaaaaacctattattaattcatttaaagatgactatagtagacctgtgacatattagcataaataacttattattaaaaatctattttgcaaatctctttaatactcagcttactaagaaggcagctgctaggttcccgtggctatttctgtgtccatcctcttgcgttctttgtgagggtttgaagcatggtgaagaaaatgtaactagcatggagaagaggttggagagtggaggagcgtttccataggctttttggatcattgtgcgtttcctcctctaatgagaaaccaaaatccagagtggctagtctctactggtgagttggcccttagactctgaaacctcatcattgagctttttgtacatgggttacattaaaatccgtgggactcttttacactttgaacagaaaaatctgtttttaaaactaacttttaattttagaatagtcttagactcacagaaaagttgcaaagatcagtcctgcaaacctcatcccagtctccacattgttaacagactacagaacatgtgtcacaagtagtgagccagggtccatgtattattttaaccgagttcatactttattctgatttcctcagttttttccagctgtcctttttcccttacgttatatttaatccttgcgtctccctagattccttggactatgacagtttctcgtactttctttgttttgggttaccttgtcagttttgaggagcagaggtcaagtgttctgtagaatgtcagtgcattgggatttgtcagatgcttttctcacaggcaggtgatggatttgggggaggaagaccacagagggtgaagtgctcttctcgtcacatcatatcaaaggtactgctggtcttgaatgaacgatcgttttggtgaggtgccatttgtcaggtttttctactgtaaagttacccttccctccttcccctgctccaccatttccatactgtcctctttggaagga

SEQ ID NO: 22392 - DNA, 1044 bp, Homo sapiens
atgctactggctgtccaggatccttcagccataaataaaggttcactattccaaaaatgacatagtggggctcagtggctcacgcctgttacagcactttgggaggctgaggtggaaggatcacctgatcccaagaagttcaagaccaagcctgggcaatacatagtagttcccatatctaccaataaataacaaattaattcgctgggtgtggtggctcgtgcctgtagtcccagctactcaggaggctgaggtgggaggatcgcttgagcccaggaagtcgaggctgtagtgagctgtgattgtaccattgcactccagcctggtttacagaatgagaccctgtctcaaaaaaaataaaatatgaccgagcgcggtggctcatgcctgtatctcagcactttgggaggccgaggtgggcagatcacttgagcccaggagtttgagaccagcctgaccaacgtggtgaaaccctgtctctactaaaaatacaaaaattagccaggtgtggtagtgggcgcctgtagtcccagttactggagagactgaggccggagaatcacttgaacctgggaggcagagtttgcagtgagccaagatcgcgccactgcactccatcctgggcaatagagggagacgcttgtctccaaataaagatatttgatgacctgaattagcagctgccagtcacatggggcctatcctctctaaccccacacctcctctttagggttcccccagggtcctggcacagtgaggggtccacacaggagctcaggtgctgtaggagcccaggttgtctgcaggtcctggtgtgtgaccttaggaagtcatgtggccctcccttaagattgttccctgtactgggaactgggggtaatgatggagctgtggagaggattatgtggaagggtgaattttggtggttggcctaggaatggccatcataaaggctcagcaggtgtttactgggtttttgaaacctgaaaagttagcctttcatttcttcgattgtagtcatttctaatgcatgtgtcttcctgt

SEQ ID NO: 22393 - DNA, 1029 bp, Homo sapiens
ggcagagcagccctctcaggcagcttcagctgctaggtggtctggacccctcgcctaccctcttccttcaggcaggtttgaattttattagacatctcacctctggaagaagcacacgccctcaataagatgataagaagggttaagtcccttagagcttggctgtcatttcatttcagctcatgctagcccaggaattgtgtctgtaactctatacaagatgctgccttggccccctgctcccctgttcactttggaggccacctgggtggaggccagctgctgcacctctgtgctgaagccttgggactgcctgcctctgaggtgctcagtgtgtgtacacgtccagggaacctggaattagagccctgaggtcaccttgaaagtcgatcttgggcggcatggggccggcagcaaggagagacatgctggcggtttgctaagacctgagtgaggtgtcctgggttactttagaaacaaactacccggttctgggcttcagaatgtgggctgataaccccttgcctgggggattgtatacttcgaaatcgtacctttctgtccacgcccaggtctctggtgagaagctgcttcatcagggctaggaccagcgttcaggtacagccaccacgtagctgtggtgggtggaattaggagggaccagaggagagcaagtaaagcggttcctgagtccagcatctggcgagtccagggtagcattggtgaagccttaacctctggtgctctgtgtctacccttccctgaggacgcagctcatgggtgtggaggggacctcagaggtcccgagggctgctagagcagagtcaggttcttcatcctagcgactctcctcaaccctgccggggtctaattatcaactagaccctggcacagcaagagccaggacaactttgagctgcggcaaccagttaactttgtccgagtttgttctctgggtcacagtgccacctagaggacgtgtctgtccttggctggttttcctgctgacaaaaaaaatggacttgattc

SEQ ID NO: 22394 - DNA, 1131 bp, Homo sapiens
acttagcagaagaacaaactgaagaacagacccagccagagaagcagggattccagaagctgcccattaagggagaaggagaggatccggtcggcagcagccctgagcagaaagctggaggggggactgtcgcggggtttttctgttgtggtttattttattaaattttttccttttttctattcatttcgatggacgcaatcttaagccaccctggccttgctcctgggaggtgagcgtgcacaggtgtgtgcaggtcaggaggtgccgtccaggtgtgcggcgagccgctgcgcacagatgtcaggatttccgtttgggtctagtttagaacctgtccttaaacctaggggttgctgtcaggatttgctttcagactttttttttttttgtaattccctttagagtctacaaaaatgtttttaaaaggatcaggtctgcttttagtttcatttttgtttctttcccgtcccactctttaaaaactggttccgtgaggaaaggcagaagccgttccgtgtctcttgcaggctgggccggcttcatgccagtgcgagggcgtcccgtgcccacgtacatacgtatgtctccatgagttctgggctccactggttccaattgagctccagccctggttttcctacccatgcagttagggactttaatttaattttttttttgtagggccaccgccttcaaacacaactgctacaacattctaataaaggctcatttaacccccaggctcctgtcgtgtgaatatcctcagtctgtaggaaactttttttgacacagcatagaagacctagttttggaaaacattatctaattttttgttgtgcaaatccccaaatttctcactaatttttgtttttttgtgcataacttggatgggctgaaggaggtgaggacagattggggaagggtggctttcattccaagatccagggatttggggaaaaggaaggaatttgatgttttttggggtgggaggggagggtgtgttttttacaccaaaaaaaaaaaaaaaaatcaagagtatgcaagcatttctattcctcgcatttttctgtgtgcctggcaaataaatacctgtctcctacgaccctgagctgttagccctctctgttc

SEQ ID NO: 22395 - DNA, 1579 bp, Homo sapiens
ctcctgatgtgatccaccggtctcagcctcccaaagtactgggatgacaggcgtgagccactgcacccagccacttttttttttttttttttttgagataggctctctgttgcccaagctagagtgcctagaggctctctgttgcccaggctcaggcgatcctcccacctcagcctaccgtgtagctggggccagaggcttgctacaggcatttcttgcttggcctgagaaacattcctatggggtgctgtctcctgggcttggctcttggttcctcgtgaggctctgcttccctggattgggcacaggcttgtcagtgcagttggggcagattcaaggggcgggtcctgggtcatggtctcaaatagcctctccagctgagaaaatgggacactcccctcgtccctgacatcttgtccccgacatctcatcctctctgaattgagccttgggtctgtggccacatggcaggcagagaccctgaccccatctgctcccacagattcgtcggtggacagatggcatgcactatgccctgggccccggagatgtggcaggagctatccagacagaaacatatagcaccttgagaggagggcatggggtgacattttaggcaaggcttgaagaggggaaaagtgccaggagtgtgcaaaggcttggagataggagccagcatggcaggtcaagaacaaaaagggcaatgtggtgggactgggtgggaagacggggcaagggcgtgggttttagctaagtgcagtgggagtctagggaaggtcctgggcccagtactcaagctacgcccactctgaagccatgcccactaccccaaggatggggttttgcccattttccaagtggggagtctgaggcatggccccagtcaggagcagcacccttcgaataaaccagaggggctaggggctaggttttattttatttatttattttttcttttgaggcagagtcttgctctgctgcccaggctggagtgcattggtgggatcttggctcactgcatcctccattttccgggttcaagtgattctcctgactcaggctccccagtagctaggactacaggtgcaagccacccatgcccgactaaattttgtatttttagtagagatggggttttaccatgttagccaggctggtctcaaacgcctgacctcaagtgatccgcctcccaaagtgctgggattacaggtgtgagccaccatgcccggccccaggagctgggttttctacctccactctgatgtggtccagccaagactggaggctaggcactgcccctcttttagcctcggtttcctcatctgcaaaactgaaggggacagggccatgtatctatttggagggatgaagatagagctggcactgcatcaccagggcaccagaaagccattgagactgagtgagcaggggctgggcatggggagacccaccagaggagcagctatgtagggctcatatgcaggtaggcacgattaggatttcctaatatacctaatacatttccccatataccccaaatgggaaccactcccaggctctgtggggtcctctctcaatt

SEQ ID NO: 22396 - DNA, 1046 bp, Homo sapiens
caaccccaacgcaggccaggcaggactgggagatgggggtcattgcagggaacttggaaactgccagaaagcagggagaagaaaggaaagattgtggccccgcctgccccagcctcacacactgattattttgagatgaaggggacgtggttttgtgaggcccagagccccgtgatgaagtcaccccctcttcgtcgcgatcatcaggcagagttatttttaggataaaaaaagtttttaattgaaaagaaagtagaaagccaacagtcttgtgggcagtcacccgtgcagctgcctgcacccgccctcctctcaggctcctggtgggctctgcccacagcccttgcccttcccgcgaccctcgccctgccccctgcctgcctccccgcccccctccgcctcttcccccagcagcaccctggcccctgaggtctgtgctgcctgtgctcccccgacctagcctggtctgacctgagtgtgggtttcgggctttcacaggcgcctacaaatcgaggacttcgaggctcgcatcgcgctgttgccactgttacaggcagaaaccgaccggaggtagcaccgcaggggccaaggttgggaggtcactggccggaaggccccaggctgcagggcctgacctgcatccccgaaggtggccagaatgcacgtgggggccatcgccctgtgccgtcagctgcatcctcaggcgtggagacttagtggagacccaagggggcgaaccggaaggcttcctggaggaggaggcagcactggggttggggcaagagaaaagctaggagttggctgggggaaaaggagacagggtcggagggaggcttgaaggggtgctactaggggccctaggcaggggcccctcagggcactgaggccccacccccaccatcggccccatccccacaggaccttgcagatgcttcgggagaacctggaggaggaggccatcatcatgaaggacgtgcccgactggaaggtgggtcccggctgggagggcagaggtgccagccacggcagagacagggcctggggtt

SEQ ID NO: 22397 - DNA, 1007 bp, Homo sapiens
tagttacaaacttgtttcttcttggttttttgtttgtttaccttgttgaaaagtccctagttatataaggttgttggctacttctgattggttgagcttcatttctgtttttctttaaaataggcagctataagaaataattcaagttaagtttagccaggcatggtggcttacgcctgtaatcccaacaccttgggaggcggaggcaggtagatcacctgaggtcaggagttcgagaccagcatggccaacatggggaaaccctcatctctactaaaaatacaaaaaaattagctgagcatggtggcaggcgcctgtaatcccagctacttaggaggcccacagtctggttaaaactccaactgccattttttctctttctgacacataaagtgtaaagggttttgtcaggtcaggtagccccagggctggcgccgacatgagtttttcttttaactcacgaaaagctcgttgctgttggttgtaatagatgtagtttatccaatttacatttttattaactgtcacccaccaaaatattgactcgaatcctgcagctatttgatttcaagctttaaattgatttggtattccccatgggactccagttgcatctaaatagacgtgagagttgaaagacccataaggggcttctctcgctttacgatgtcttatttttcttccctctggttgatgaaatgccagggtgaaagggatagccaattggactaaagtacaagtgccactccagttattggcagaatgcccagtaaaggtctaccacaatatcaccacacattagctcggggatgaacaagggctgattgataagctcttgaaaattcttaagctcactgcatcccttcaggtctccaaggaacgctaagtttttctccctatcatgagagacacaaagtgaacttagtgttgggagatggaggctggatggccctcggggactgacctgcagggtgccggactttgggatatagcagggagagcttggc

SEQ ID NO: 22398 - DNA, 1046 bp, Homo sapiens
ctccatctcaaaaaaaaagaaaaaaagttagtggcataataatgcttcattaaacgcagaatagtcttaacatggtataaaaaatgaaattaagttcacacatcatctaacaatttttaaatatactgcattcgattacataaaagtacagttagtaaaataatattctcatttaatacttttaactgtaatttttctcactataatgtagaaaactattactctgaacccccactttttaaaaatctttattaataaagtaattcattataatttttgaaaaaaaaagttttaaaatggtctgccaacatgttaatgtaggttaggccatccaaaagacaaagcaaaacatcaacattaagtcataggctaggattatacaaatgagaacccccaccttatacattacttaatataagttaactacaaagagcctctccacttacatttttatcatgcatcttacattttaatgtccttattcttttatagaaaaggtcataatacccaataaaaaagaatctgtaatatccctgatgcagcaacaattgatcacatgctttcacatgtgaccacaataggaataaaataacagcgtaaagaaatttgaaagttgtattacatcattattcactgttcaaaaatttttttcaagaaacaagtacactttcaatgaaattacaatgcttcagaaaatctcccttttaaagttatatacaaaaacagctttagttgtggattcatttttatactcaatactctgatttagtgtaatgtctgaagtgtcagtgccttattctagtgtaaattctcatatttacgtaaaatcaattttgaattaaatatttttttcatatttacatctgcaaaaatatactttagtataaactctctgatgttttctaagctatagattttgaaaaaaaaagtctttccaaattcattatatttgcaggactcttctccaatataaattccatgttgttgaataaagctggagcaactgcttcaggttttcctctagtacacaatgtgtgcaacaagat

SEQ ID NO: 22399 - DNA, 1018 bp, Homo sapiens
atgactcatttctcttacactgagacagaagcagaattaactcctgtcagcctgacacaattctgcatgggacatctcaaatgcctcaaagacacctaggtgattttgaaggaattcccagtcaccctgggccgctggcccaatgataagccaggctggagagactcaggctgattctaaatagaaaatggaacttccctggtggaactccacaacctggatcacccattctgatttactagctcttgggtaagagaaagaacaaaaatactctactccagtatcacattttacaggtgaatatagttgtggttgtgatcatggctctggatactttgcagccttgatctctcactacagattatgccatcacattctatttcctcctggagcctctgacctcactgtagcaggtcaatgaacaagatgtgaaacatctcaaagagccacactcccaatgcagaaaatgccttttgttagttttctgtacattctctatccaaagtctggcccttttttatctgcagattctaggtaggatcaacttggctctgtatcctttggtgttacagtaagtggagtacaattaaaggagaaatcttaagaaaaagctcagattagatatgagattgatcaagtcagccagaaaatattcccctaaaagcaatttctctctcaacacccaaagtacacagctactctcagcatgagaaacatgaacattatggagaaagggggcagattttcagaatacttttataaagtttcttttccatctctgctgctctctcatctcctagccattgaataggggttctatatttaaatacatctgacaacttccaacaacactttttgatgaagaaatagaatctgactgtgttcatatagtggaatacattagagcttgcaatataactaactaaagagctatgttggtggtgtttgggtggccacatcacctgtctttatttgtcctgtaatagcagcattccaatttagtgaaataaaagatact

SEQ ID NO: 22400 - DNA, 1045 bp, Homo sapiens
acactcttgactacaacaataaaagccctcttcaaacaaaaaatcatttttaacacttattttaatgaaaatttaaccacaattgaataattggtatatttttattgttctgtgtgtgaatgtataaaacagtacataaagaagccagaaaaaaagatgttaatatttgtaatgaattaaactggaaagttattaattattatttgcaggtgatatctttgattatgtagataagaaaagcagcagaaagacttttaaaagtttattcaggtgggtaagcaatattctaagataataccctggattcccagtctgttgcacacctgcggtggaatactctcgagtgtaaaaatgtgactgtggtgggacatcactcatgaaattaggttacccatgtgttgactttgtgtttatcaaaatggagattatcctgactgtgctaaacttaatcagaggtgtttttaagagaaaaagacacattataggaaaacacccctgctggcctgaaagtgacttctataggtggaacatgttgtaagctgcttatggtggccacatggcaggaaacatgcttgtatattgtcatcatttctgcctcttgcatgttgttcccagtagggagaataagaggttcctatggcagatggaaaaaaggggaatctcattcatgcaagaaataatcacctctcatctgggatagcttaagagaaacaggagaccacaaaaagactacattaatgggaggaaaagggtaacctggctaaaagtgctcactggcattaaggaacaacatttagtaagctgtagtgaacgatcagcctctgggatactgatagtctaccaataaggttgaacttattctaattcagtcaacatctctgcaccattctggtgacccaggtttacactattcattacagaaatgccatgaaaaccagtgggtaatgtcctagaattgaacttacttcaaaaggcatacctttttgttttcacatttgaaaaacctcaaaaacagtgaatttataattaacttctaattatagag

SEQ ID NO: 22401 - DNA, 1033 bp, Homo sapiens
tgcttaatgttttttaaatataagattgtatgatctataaacagcaactttttacttattttactccatctccaaaaaaaaaaaaaagaaaccttaaagttgaaagtattttctaaatatttagaaatttgttatgaattagtattttggtattaatttactagaatattttattacattctttctgctgagcacattactagcttgtaattgagaaatataagcaagattaatgctatttatttttaatgaaacaggtattattgtctctaagccagacctgatcacctgtctggagcaaggaataaaacctctgactatgaagagacatgagatgattgccaaacccccaggtaggtgcgaatgaaaatgaacacaacagacaatgcagataagaggtcccaaggtcaaaaagaaagccagtccttaaaatgtgatctgggaagctgtgttccaaaggaaatagttcctgggcagctgttttatttatttatttatttatttaatttttctctcacaaagggacatctgtctcatgcttttaaattctctaaggattctactattctttcggtgagcttccttcaagttcacagtgagagcgaaattcctctttatggcatataagtgattgcacaatctggctgcttttccgttgccttggggacacacaaatatctgcgtgattttgagaaactaaaacccttttttaagttgtctttttgcttcagatctgaaatgtgtgacagtattagtttttgttgcattttttgttcattttttctgcacagtccattctgtttttattactatatagtcttgaaatatagtttgaaattataagtatgatatccttctgctttgatctttttcctcaagattgctttggctatcaaagttattttagtatcacgtaacttttagaaatgtattttccattactatgaaaaaaataccactgcaattttgataggaggtttattgaatctatagatcactctggttaatacggcaattttaaaatttatttgga

SEQ ID NO: 22402 - DNA, 1533 bp, Homo sapiens
tcttaaagcccctgcacctggaactgtttactttcctgtaaccatttaccttttaactttttgactacttaacttctgtaaaattgttctaactagacacccctccccttcctaaaccaaggtataaaagttaatcaagccccttcctctgggccgagagaactttgcacgttagccgtctctcggtcgccggctaataaaggactcttaattcatctcaaagtgtggcgttttcctaactcgctagggtacaacaatcagatcaaccaccaaagtgggaaacattgaaatcaaggatcttatggttggtgatgaggcaagtgaattacgatcaatgttagaagttaactaccctatggaaaatggcatagtacgaaattgggatgacacgaaacacctgtgggactacacatttggaccagagaaacctaatatagataccagaaattgtaaaatattactcacagaacctcttatgaacccaaccaaaaacagagagaagatggtagaggtaatgtttgaaacttaccagttttccggtgtatatgtagccatccaggcagttctgactttgtacgctcgaggtttattgactgctgtagtggtagactctggagatggcgtgactcacatttacccagtattagaaggcttttctctccctcatcttaccaggagactggatattgctgggagggatataactagatatcttatcaagctacttctgttgcaaggatacaccttcaaccactctgctgattttgaaacggttcgcatgattaaagaaaaactgtgttacgtgggatataatattgtgcaagagcagaaactggccttagaaaccacagtattagttgaatcttatacactcccagatggaggaatcatcaaagttgggggagagagatttgaaacaccagaagctttatttcagcctcacttgatcaatgttgaaggagttggtgttgctgaattgctttttaacacaattcaggcggctgacattgataccagatctgaattctacaaacacattgtgctttctggagggtctactatgtatcctggcctgtcatcacggttgaaacgagaacttaaacagctttacttagaaagagttttgaaggatgatgcggaaaaacttcctaaatttaagatctgcattgaagacccatcccgcagaaagcacatggtattcttgggtggtgcagttctagcggatatcatgaaagacaaagacaatttttggatgacccgacaggagtaccaagaaaagggtgtccttgtgctagagaaacttggtgtgactgttcgataaactccaaagcttgttcccatcacacccgtaatgctttcttttttcttttattgccaatctttgaactcattcaactccaggatatggaagaagcctttctctaccctttgactggaaaggtcaagttttattctggtgtcttgggggagctttgttaaatttttgttaatgtgggtaaatctgaatttaattcaactgcttccctacataga

SEQ ID NO: 22403 - DNA, 1049 bp, Homo sapiens
tgcattaacaagttctccagtttattgtacacattaaaatttaaaaagtaccttctaactcaacctgtcttttccatctgaaaaatatacacaactcattctgtagaatgtgtatatggcatccaaaaatacacatttttatgcccttaattttatactatatcatccagaaaagtatcatgtatacactggtattgtggatcttatgccactctcttttcttagagttaaaaaatatattagagaatatttctgtgttaaaaaaattattttattttataattttagtcactcctgtaagtcagaaacagttacctgtactctctcatttcaccttgagtaaaattaaaaatgcttttcataaccagttggtaattatgtgtgtgtgtgtgtgtgtgtgtgtgtgtgtgtgtgtgtgtatgtgtatgtgtgtgtatctttcagggaccattgacatttagggatgtggccatagaattctctctgaaggagtggcaatgcctggacactgcacagcggaatttatatagaaatgtgatgttagagaactacagaaacctggtcttcctgggtgaggataacttcaatacacaatttctaatatgccctaaaggttttatttcttttatttgtggaatgtttttctggtaaagtgtgctttgcataaattagtttcagatccctgttttcaagaaaatcttggggattaatacatgtagaaaagaatttctgcaagatgtttcattttgaccttaactttccaaatttctgagctgatctgtatccttcactgtagattactaaattccacaaatttaatggcataaaatttttgcccacaccttaaaatgtaattgccaacaccaatttttgattcaatagtactggatagtaaaattaagaaactgggccaggcttggtggctcacgcctgtaatcccagcacttcgggaggctgaggcggacggatcacgaggtcaggagatcgagaccatcctggctaacacggtgaaaccccgtctctactaaaaatacaaaaaattagctggg

SEQ ID NO: 22404 - DNA, 1048 bp, Homo sapiens
gataatgctaaggaattctaattttggatatgtgcatatctttcccagaaagttatgcatttttatgtaataatatgttgttttcttacattatgttatttttagcatctttgatatgtagggcatatgcagtgccaatacactttttttttttttttttttttttttttttactaatttcaggactattacaatatcacatagttcccttctcgcttgcaaaattttcatgacaaatttactagtaatctcataagactatgcttataaatgacacatcacttttatcttgcatctttgaggattttctactttgtgacttgaaattgcactcatgcatgtgtttgttataaatatctttgtgtgtattctagtttgttgagcttcttcatttttacatcattttttcttatattaaaatttttttgtatttttcacctccacaatttctgttttttgatatttttaatatttttgttgttatcctcattcttctaattttcaattgttgtctgtgtttctattttcctcactgaatattattcaagtttttcaaactaatttgtatatctttatttttaatgatagctttctgaaatttttatgtttctgatggggctatgttgccccaatatttttatatgttgtaatctttcattgaaatttagacattaaaaacaaaccacctgtaacaatctttataatatagctttgtcttggcatatctgaaaccaattgtcttggatagagattctgagagtttctctaacatgttcttaggatgtgtcttgtctgaaatgttttaggtcttttttagttaaaggagtttgttcatgtttcttcttaatagtcagtaatcatttgctacaactatttcctgcctataatattgcagtctctttgctgctgtagcatttacctttgatctcagcagactcaaactgccattccaatgtataccatttatttcaagacagaaaccagtgtctggaaaagtccctagaaaccagaaataaaaatgttttttgccgctatttttcttgtcttt

SEQ ID NO: 22405 - DNA, 1056 bp, Homo sapiens
gaagtagaactttttttgcagagttttaattacattcaaagtatacttttttccttaaaaaagttaggtttttttgaaaagaaaataatcatgtcattcaactttcaaattacttcatgctctttcttcttcattgctattatattcacatgtgaaagcatgtgatcagtggttgctacatcaaagataggagatttttttttcttaggtcattatttatgaccttttctattaaagaataagaacattaggctgggcgcagggctcatacgtataatcccagcactttgggaagctgagacaggcagatcatgaggtcaggagtttgagaccagcctggccaatatggtgaaaccccatctattaaaaactacaaaaattagctgtccactgtggcacgcacctgtaaccccagctactcgggaagctgaggcaggagaatcacttgaacccaaaaggcagaggttgcagtgagccgaggtcgcaccactccacactagcctgggcaacagagcaggactctatctcaaaaaaaaaaaagtatactattctttttttttctttatttattttattttttatttttttattgatcattcttgggtgtttctcgcagagggggatttggcagggtcataggacaatagtggagggaaggtcagcagataaacaagtgaacaaaggtctctggttttcctaggcagaggaccctgcggccttccgcagtgtttgtgtccctgggtacttgagattagggagtggtgatgactcttaacgagcatgctgccttcaagcatctgtttaacaaagcacatcttgcaccgcccttaatccatttaaccctgagtggacacagcacatgtttcagagagcacagggttgggggtaaggtcatagatcaacagcatcccaaggcagaagaatttttcttagtacagaacaaaatgaagtctcccatgtctacttctttctacatagacacagcaacaatctgatttctctatcttttccccacctttcccccttttctattcgacaaaaccgccatcgtcatca

SEQ ID NO: 22406 - DNA, 1050 bp, Homo sapiens
aaattaatcaaagagtgattaaaaaactgttgagcacccagctgtggtttgtaatttgttgttcatggcggggcttgaaggaaagacttttataaggtgcatgatgaagaaagccaaattcagtaattggttaggtaccgttatgtagtttcttagtttgtacaataaaggtgaaaattttctggttgtgtaatcagaccttaattggcagtatacagttgattaagcctgaattttgtgtctttcaatgtagtaattttcaaaacgatgcgcctgagttagattttttttttttttttttttttttttttttgagatggagtctcgctcttgtcgcccaggctggagtgcagtggcacaatctcggctcactacaacttctgccgctgcctgtgttcaagcttctcctgcctcagccttttgagtagctggaattacaagcgcctgccaccctgcccagctaatttttgtacttttagtagagacggggtttcaccatgttggcctggctggcctcgaactcttgacctcaggtgatccgcctgccttggcctcccaaaatgctgggattacaggcgtgagctatcacgcccagccacgttagatctttttaaaagtaggaacccagggtctagagacacctcagtctaattgcctgccactcaattattttcacactccacggggaactgattttctgctgcatttttcacctgtgtcccaagcagggtcttaagtctaacccccgtcccccatttctccagcctcactctggcttgcagtaagatactaaatttccagttctttctggcgttcccaaatgccaacttttcctacctaattcacattatcacctatttgtcctttagtgtacattttttacaccgtattttaattagttattttctgacaaagtattaaatggtgcttttaataagatttgttatctgtttgtaaatatttcccatgtgaagaaagcaaagaataatcccctgacactgtgttgtaaaaactctctgtgcttcttctccttgtatcttctctgggcac

SEQ ID NO: 22407 - DNA, 1481 bp, Homo sapiens
catgctcttattcttttttatggttgcatagtattccatagtgtatatgtaccacattttctttatccagtctattattgatgggcatgtgggttgattccatgtctttgctattgtaaatagtgctgcaatgaacatacacatccacatatctttataacagaattatttatattcctttgggtatatacccagtaatggggttgctgggtcaaatggtatttctgtttctaggtccttgaggaattcccatagtgtcttccacaatgattgaactaatttacattctcaccgacagtgtaaaagtatttctatttctccacagcctcatcagcatctgttgtttcttgactttttaataatcacgattcttggccgggcacggtggctcacacctgtaatcccagcactttgggggtgccgaggcaggaggatcacaaggtcaggaaattgacaccatcctggctaacacggtgaaaccccgtccctgctaaaaatataaaaaattagctgggcgtggtggcggacgcctgtggtccccgctacttgggaggctgaggtaggagaatggcgtgaacctgggaggcagagcttgcagtgagccgagatcgcgccactgcactctagcctgggcaaagagtgagactccatctaaaaaaaaaaaaaaatttagaaaaaaataaccactattcttactggcataagatggtatgtaattctggttttgatttgcatttctctaacgatccctgatgttgagctttgtttgtttcttggccacataaatttattcttttgagaagtgtccatgttctttgcccactttttaatggggttgttttattcttgtaaatttgcttaagttccttttagactctggatattaacgtttgtcagatgaataggttgcaaaaatgttctccgattcttaggttgtctgttcactctgatgatagtttttttgttgttgtgcggaaggtttttagtttaattagattctatttgtcaagttttgcttttgttgcagttgcttttgacgttttcatgatgaaatctttgtccatgcctatgtcctgaatggtattgcctagattttcttctaacgtttttatagtttttggtttcatatttaagtctttaatccatcttgagttaacttttgtacaggtgtaaggaagggttccagtttcagttttctgcatagggctagccaattctcccagcaccattcattaaatagggagtttgttcctcattgcttgtttttgtcagatttttcaaagatcagatggttgtagataagcagtcttatttctgagttctgcattctttttcattggtctatgtgtatgtttttataccagtaccaggatgttttggttactatagccttgtggtgtagtttgaagtcagatagcatgatgcttccagctttgttctttttgcttagaattttcttggctatatggggtcttttgggt

SEQ ID NO: 22408 - DNA, 1091 bp, Homo sapiens
ggtaggaaattttttttttttttttttttgagacagtttcactcttgttgcccaggctggagtgcagtggtatgatctcggctcactgcaacctccacctcctgggttcaagtgattttcctgcctcagctggccaggctggtctcaaactcctgacctcagatgatctgccctccttggcctcccaaagtgctgggataacaggtgtgagccaccacgcccggccagcaggaaaatatttacaaagggcataaaagagatgggttttagaaaaagaaattaatgcttaattatatattccatttgttaaaaattctcatttacctttttctttcccagagtgagtttaaaaggtttctcaggtgtgtttgttttttatggctaggtgaattcaaacagaatttcaaggctcagcttttagaatgctagctaccgaggaaaagaatagggaaaatctctattctattttggctgtagaaaatgaatacatgtccataagaaaatgtggtagataattggtgagtaaacatagattcatgaaaacatcagttgctctatctgcaggataggatttttgacagtgaatatctgtgttcacatcctgttatcttgatttctgagtttcatgctacattttatgagatgaaacttggtaccacctagaagtgttcccatatgactaattgtttactacatgatttttaatgaaaacaatacaataatagatatattttcataaaggagtagatacttttgctttttttattgaggtataaaatgtaagtaccttaaaatttccttcccttatatgaacactgtgtttgagtaattttgctggatttttcaaacacgtagtttcaaaaaccaagtgagtaactctaacatggaaactaaagcttgagcccagtgtctcagagctaaggctaatattgagcctacaaaaggaggttattaaaggaccagctagtttatttatgggggatgctcccctgcagatgtccagtctgctcaccccagccatggaagaagcctttctgctgacagagccctggaaagctgaggacccacaggcaaatgcagttaaggttaag

SEQ ID NO: 22409 - DNA, 1053 bp, Homo sapiens
tctccatgaatactgaaagttttttctgtattctaatgtcacaatttctaaagttacaacaaacttgcatttgagaacatctgtcaaagtcttaagttaactataaatcatcttttgaagaggatcaacacaacttgattgtctgcatgggaaagtcttagggcagtctcagcaaaaaaaaaaaaaaaaaaaaaaaacatgatcgacaaggaaatttggttagctctgtggcataaaataattttatgtaacaattgtgattattaatgatatacacttagtcattagaattacaggagtttcccataattttggaacacataccaataacatatttacaaaaacagtccaaaaatagtcaaacatgatttcacatttgacatgttttctatgtgattttttatactaaatgagccaaattttactattatatttgtgtattattaatgtcaaacccaattcttaatctttatagacaaacctatccaattttagtatttgaccgtaaggtaatattcttataaaccttttataactctttacaaagtccttgttgtttaagagtagatcagtgctttaagagaaacctgttgtttttatctcaatgttcaatttatagaaaaactgaataatacccatttaactttatatgttcacacacagaaactcttttgcaattaaattttagcaaatctttcacaatttgtttaaaccttcagttttattctaatttaaaacaatcctttaaccttttaatccaggcaaaaaagtccacatttccatgtcttcttataatcttttatcaaaaacacatttcactttctctgcataccttgcatgtaaaactgttttttagtagtcaaagttacatgttacaatgttaactcttagcaacttttacttttgatgaaacccttggtaagtaaaggattttaattacgtactaggcgtggagtccaggacacagacacaagtttatataaggtctgactccagtgtattaatagttagggggtgtggctaacttgatgtgtcccaggccttacctagccg

SEQ ID NO: 22410 - DNA, 1044 bp, Homo sapiens
ggttcatgcttttctcctgcttcaacctcccaagtagctgggactacaggcgcccaccaccacacccggctaattttttgtatttttaatagagacggggtttcactgtgttagccaggatggtcttgatctcctgacatcatgatccgcctgcctcagcctcccaaagtgctgggattacaggtgtgagccaccacgcccggcctgttcaggatagcatttattacccaggaagttctggagaaaattattcagagatacctgctttctaggatgctaaagaaaggactacttaaaatcattactaaaaattatagaacatgggagatatcttgaccttcgcatgaaactgattttttctttatggttaaattcagtctataattgactttttgaggggcaatatctcagcagtgatgttgtgttcttctttgtgcatcagcacatcataaaaatttattctagtgttgttgatgttaataatttgcttggttaaagagctctctgactttttttcactatagagttaattgtttttctctttattgttaagtatctttatgtagctaataaactatcacatttaatctggcacctgcccttttttcttaggtttttttgtttgttttttgcacatatgtgtctttggaaaatgaaggctcttatctttgtttacagaccaaaaaagttgggaaaaacacaatctctttcacttactgaatgtctgacaaaatagtcttctggggtcaaaaacattggcattgctagtaaccttgttagaattttaaaaactcagactttattccagatcttctggggaaaaaaaaaaaaagcttcacaacaggatctccagtttattgtacatatttaaatttgagaggtaccatctaactcaacatgtctttttttgtctgaaaaatatacacaactcattatgatgtaaatatagcactcaaaaatgtatacgtttgtgtccttaattatattctttatcatccagaaaagtattatatatgcactggtgttgtggatcttatgccattc

SEQ ID NO: 22411 - DNA, 1066 bp, Homo sapiens
aagactgtgcttgtaaatgacatgccatttttatcttgcagctccattctcttcttgtctgtggtttttgaaattgtgcttatatatgtgtttgttataaatatctttgtgtgtatcctaattgtttgttgagcttcttcattttgacaatattttttctttcagaatttttgagttatattttcttttgatattttttacctttacaatttctgttttttggatattttaaatatttttttcttatcagttttttctggttttctatagttctctgtattcctattttactcattgagtattcaatttatttttaatttttaaaattaatatatacatcttttttatggtttctttctgaaaattttataatatttttgatagaaccattttgccctattttgtattcattgtaatctttgattaaaatttagacattaaataaagctacctgacacagtttttatcttgtagctttctcctggcatagtctgaaaacaattatcttggttagagatcctggtagactctcaaacatgttcttagaatgtatcttgtctaaaattttgtgtttactttttagttaaaggagtttatttctgcttcatcttaatcagtaaccatttgctctgttttctgtctgttgtactgcagtctctctgctgctgtaacaattacctttggtctcaagacccaaactataactccaaaatataccaccatttttttcagcactttatgttacgggagaccagtttctggaaaggcccctagaagcaagtaatatagatgtatgtgccagtattttacttgtttattaaaaaagaaaccaaaagttagcaatttactttgaaaggcagtatgttatattgttgagtaggaagaactgtgttgggcaaaggtaatggacttttctttttcttctgtgtctttgcattcctgtgtactcatctgtgtactcacctggggaactttacatgcttatttataagttttccttatgtattttggtcagtatgcttttattacatttatatgtctatgaaggatttagggcctgtggtat

SEQ ID NO: 22412 - DNA, 1504 bp, Homo sapiens
aaattatactggtgagaaatcttagaaatctgaagaatgagacaaagcctttaaatggttgtcacacttgattgtaggtaagataattcatactggagaaaacacctacatgtgtgaacaatgtggcaaaacttaaccagtgctcacaccttattgcacaggaaagcatttgtacttgagataaattatacaaatataaagactgaaaaagccattaatatatgttcatatctcaacaccagatagttcatacttaataaaagcattataagtacaattactgtcaaaagacctttcagaaaatacaagcttttgaccaggcgtggtggctcaggcctataatcccagcactttggtaggccaaggcaggtggatcatgaggtcaggagtttgagaccagcctatccaagatggtgaaaccccatctctactaaaaatacaacaattagccggttgcggtggtggtgcctgtaatcccagctactcaagaggctgaggcaggagaatcacttgaacttggggagggagaggttgcagtgagctgagattgcactctagcctgggccacagagcaagactccatctaaaaagtaaaaaaaaaagaaaatatgaactttacagtgaagaatatttattttgaagatgaatgttacaaatataaagtgggtagtagtgcctttacttgtatcacagatcttattgtagacattttttgtagaggaaaaactctgaagcactttcacactttgttcaatatcagggaatttatattgaagaaaaatcatgcaaatgtagtaaatttggaaaaacactttttcaaaaactacagcttagaaaacagagttcatactagaatatatttttgcagatgcagtaaaagttaaaaaaaatttaatccataagtaagtctgtgtaaatatcagaatttatggtagaaatacataaggcactgacaacatcagatatactaaatcagagggctgagtatagaaaattaaagttggtagaaaaattatttgtatataactttaagaggatcagaaggttttttgcagttataattacattcaaagtatactttatttcttgaaaaatattacagattttttgaaaagtgaataatgatgtcattcaactctgaaattcctgccgtttcttcattcctattggattcacatgtgaaagcatgggatcaattattgctgtatcaaagatatgaaagattctttctttgttttgttctgtttttttgagatggagttttgctctttcgtccaggctggagcacagtggcatgatctcggctcactgcaaccttcaatttccagtttcaagcgattctcctccctcagcctcctgagtagctgggattacaggcgcatatcaccacgcccagctaatttttatgtttctagtacagacaggatttcatcatgttggccaggctggtctcaaactcctcaccttgtgatccacccaccttggcctccaaaggtgctgggat

SEQ ID NO: 22413 - DNA, 1031 bp, Homo sapiens
ccggcctcttaatgaatctttatagacaaatctatccaattttaatgtttgaccataaggtagtattctcataaaccttttataactcttcacaaagtccttgttgttagagtagatcagtgctttaagagaagtctgtcatttttatctcaatgttcaatttctagaaaaaataatacctatttaactttagtcagtatgttgacacacagaatctcttttgcaattaaattttagcaaatcttccacaatttgtttaaaccttcagttttattctatctaatctaaaacattcctttaaccttttaatctaggcaaaaaaatccacatttccatgtcttcttatataaccttttatcaaaaacatatttcactttctctgaattccttgcatgtaaaactgttttttagtagtcaaaattagatgttacaatgttaactcttagcaacttttacttttgatgaaaaccttggtaagtaaggaattttaattacatactaggagtgaagtctaggacacagacacaagtgtatataaggtctgactccagtgtattaatagttagggggtgtggctaacttgatgtgtcccaggccttacttagctgtaaaacaggcaagttgtacagtgaacagtcatagtggcattttgagaagtcttaatttaagaggcctaatgacctttaaattgtacaacatttcttgcataaatttccttcagtgaattatttcatgacttatacagaccatctacaatatgtttgggctttctgatttgtcctaaacatccctctttttaaataaccagtcattttactttaggataagaatttactatacaacatcttttcttatataaagtctcttttctttataacctttgtatatgtaggggacatggctaattccatatgtctcaaggccttatttagaatctactggcttcaagataggtaaattgaacaatttttaaaagtcaaagagccaatttatgaccttgaaatatttggtaaatctaatatgtgacctat

SEQ ID NO: 22414 - DNA, 1025 bp, Homo sapiens
attccaatggcttttaaaaaatgttcttgactaattcttgtgccacatactttcagtgctaccttaaaatagaagcattgacaatgggcgcaatatagttttatattggtatctgtgaatttgaaggagcaaacaactccttagcttttataaacaggtttcaggaggtaaagatctttttctgttgtgtccctagggtgatggaatgccctctgggtttgtagtgaagaggggttgtagctttgtcacaaggctgctgggtctgcactagagtccacctttagatggcttgtcacaagggcttgggtaattgtaattcccattttatttttggacagattgtatatattctttaagactttgatctgtagggcagataccagggcagatttctgcagttggctccttatataatggccctatcaggatgtgaatgggtttgcctttcactgaataccagagaggatttcttcaggtcactgtgtgggtttctgtttaggaaaaactgatcatgatctgcggctcagagagctggaactgagtcaataaactgcttcagggaccacagtaaaaaccaaggtctgtaaacctgtctgcatggctgcaaataggtgtcttcctccaggtctctggaagggcaggacctctcttagactgtaactgggaggagtttgggatggttacagagttaatttcagaattctctgttggaccaagttgggtggaccatttcttgatctgtagccaaaaccaagggtcctgtaatttcccacacgaataagtgcctgtcctctgaaaaaacactcctcaatcttgggctttagcagagtttcacaactccctccctgcatctcaaagctctcttaaaggcacttactttggagatgggatcttgtttatcatctggtctggaaatccaggcctgcagcaattctccaacctcaatgtaccatgtagctgccattaaagatgtgagccatgatggctggctgtctcatgaaggcattttttgtcagggatgactg

SEQ ID NO: 22415 - DNA, 1073 bp, Homo sapiens
ctttaagaagccctcaattcttaacagacataagataatttatactggagagaaactctacaaatcagaaagatgtgactacttttgacaacgcctcaaacttttctaaccataaaagtaattatactggtgagaaatcctagaaatctgaagagtgagataaagcctttaaatggttgtcacacttcattgtaggtaagataattcatactggagaaaacgcctacatgtgtgaacaatatggcaaaacttaatgctcacactttattgctaggaaagcatttatacttgagataaattatacaaatataaagactgtgaaaaagccatcattatctgctcacattttactcaacacagagagttcctgcttaataaaagcattataagtgcaattactgtcaaaagatctttcagaaaatataagcttttttagtgaagagtatttattttgaagttgaacatcacaaatataaaaagggttgtagtgcctttacttgtatcacagatctttttgtagacattttcttctagaggaaaactctgaagcagttgatcaaactttgttcaacatcagggaatttatattgaaaaattgtgcaaatataataaatttggaaaaacaatttttcaaaaactacagcttagaaatcaacagttatactagaatatattttttccagatgcagtaaaagtaaaatatttaatccataattaagtctatgcaaatatcagagaatttatggtagaaatatataaggtactgacacttcagatatactaaatcagagtgctaagtatagaaaatctgaaactaaagttggtagaaaagttatttgtatagaactttaagaggatcagaaggttttttgcagagttataattacattcaaagtatactttatttcttgaaaaatattacagattttttgaaaattgaataatgtcatcattcaactctgaaattatttcctgttgtttcttcattcctattggattcacatgtgaaagcatggggttaattgttgctacatcaaagagagagattcttttgtttgtttgttcgtttgttt

SEQ ID NO: 22416 - DNA, 1098 bp, Homo sapiens
ggaaatccatagctaagatgccaggaccccctgaaagcctagacatggtgagagtgctgggtccgacatcacgagagaggggaaggagttgctcggaaccggtgggaagtggctgtggcgggactcaggcctccccgcagtcagctccacaatctgctccctgagttctccttgcccagctcggcctcagtctccttcagccgtaagttggcggctgcgccaacagccggggccccgggcgtcctgtctcttccctgcactgtgactgtgccctgcctggagtcctctctggcagttctgcacccgcagcgccgcgtctttctcagattgtgcggggaccacgggagggtcatcaggggagaatcctgacttggggtgcgggttcatgaatgggaagagctttggtccgtggggttcccagttgctattttctcctattaaaaatttatgggcgtcactgcaaaaatattaaagaatgtaatcaaagagtggttctagaattgtagagcacccagctatggtttgtagtttgtggtctgtgggagaggcttgaaggaaagtcttttataaaatgcatgatgaagaaaccaaatttactaattggttaggtacagttacatggtttcttaatatgtgcgttaaaggtgaaaatttcctggttatgtaatcagagcttaattggcagtttacagttgctgaagcctgaattttgtttctctgaatgtagtaattaaaaataatgcacctgagttagattttttttttaaagtaagaattcagggactagaaatacctcagtctaattgcctgccacttaattattttcacactccacagggaactgattttctgctgtatttttcacctgtgtcccaagcagagtcttggaaccaatcccccatttctccggcctcactctggcttgcagtaagataatttccagtttcctctgacgttcctaaatgccaccttttcctccctaattcacattatcgcctatttgtcttttactgtacttttttataccatattttaattatttttttggcaaagcattaaatggttaaatggtgcatttaaagagatttgttatctgtt

SEQ ID NO: 22417 - DNA, 1605 bp, Homo sapiens
tggtggcacgcacctgtagtcccagctacttgggaggctgaggcaggagaatggcttaaacctaagaggttgaggttgtagtgagccaagattgtaccactgtactctggcctggtgacagagagagactccatctcaaaaaaaaaaatgtaagcaccttaaaattttttttcccgtatgtgaacactgtgtttcagtaattttgctgaattttttaaatacttaatttcaaaaaccaagtgagtaactctaacgtgaaaattaaaggttgagcccagtgactcagagctaaggctaatactgagcctgcaaaaggagtttattaaaggcctagttagttttttttctggagagcctcccctgcagatgttccagcctgctcactccagccatggaagaagcctttctgctgacagaagctacagagtcctggaaagctacaggcagatgcagttaaggttaagataaaaggggacagggagggtcatactgaccatgtagttgttattgtacatcagggatgctatgatttagtatcctgaaactttgctgaagttgtttattagtttaaagagcttttctactgagactgtagggttttgaagatacagaatcctgtcatctgcacacaggaatagtttgacttcctctcttcctgtctgaatgccttttatttctctctcttccctgattgttctggccgagactttgaattctatgttgaacaagagttttgagaaaaagcattcttttcttgtgccagttttcatgaaggaatgcttccagcttgtgttcattttgtatgttggctgtaagtttgtcatacttagataactcagtattttgatgtatgtacctccaatgcctagttttttgaaagttttaaacatgaaggatggtaaatttcattgcaagcttttttaacatctactgaaataaccctgtggtttttgtctttagttctgtttacttgaggagtaacatttattaattgcatgttgaaccaaccttttatttcagagatacagccaagttgatcgtagtggattagctttttgatgttctcctggatttggttttccagtattttcttgaggatattttcatcaatgttcattaaaaatattggcctcaaggtttctatttttttgttttatatttgccaaattttcatattagaataatgctgtttttacataatgggttggaaagaagtccctttttctcagtattttgaaataatcttagtaggagtggtaccagctcttactttacatctggtagaattcagctgtaaatttgtgtggttctttgttttatttttggtgggcaggctatttatttatttatttattttattttattttattttttgagacagtctcactctgtcgcccaggctggagtgcagtggcacagtctcagctcactgcaacctccacctcctgagtttaagcaatgctctgcttcagccacctgagtagctggaattacaagtgtgcaccaccacacccagctaatttttgtatttttagtagagatggggtttcaccatgttggccaggctgttcgctgttcttgaacttctgacctcgtgatccactc

SEQ ID NO: 22418 - DNA, 1035 bp, Homo sapiens
ggagtctcgctctgtcacccaggctggagtgcagtggcacgatctcggctcactgcaacctccacctcatgggttcatgccattctcctgcctcagcctcccgagtagctgggactacaggcacccgccatcacgaccggctaattttttgtatttttagtagagatggggtttcgctgtgttagccaggctggtctcgatctcctgaccttgtgatccacctgccttggcctcccaaagtgctggggttacaggcatgagccaccatgcctggccctggccagctatttattactaattcaattttggagcttgttactggtctattcagggattcaatttcttatttgttcagtctttgcaggatgtatcattgttccaaggttataatcctcaagcttggccctgacgaactctctaattatattcatgtttcctcagttttttccttttaggtagacatattaatagaatgggctagaggagcctctatgaagggatctctcctttgattgtactctgcttgctgtaacacccaagaatgcagagtcaggctaaccccacttagaatctgcacatagggtcaggcctctgcctgggatttacaagacagggccagactttcaattgtgaatgtaatgaaaaccaacaaaatgcattttctgcattgtgagatgtcaacatagacatcttaaagcccccctttgagagtgtggctttttaagcttttcagatcttgtttagtgacctgctacagttatatgagaggctccaggtataaatagaatctgatgacagaatctataagtgtaaacaagcatcttaagagtgagggataaggccacaaagtatccagagctatgaccacaactatacctacctgtaaattgtaataatggagtagagtattcttgtccttcttacccaaaagctagcacatcaggataggtgatccaggttctggagttccaccaaagcagttccattttctatttagaatcagcatgaatctctctcagcctggcttatcactgg

SEQ ID NO: 22419 - DNA, 1094 bp, Homo sapiens
atgaagagctgtgtccactctgcctcctggattgccatgcgtttagtccttgcaaacctttacttccctacttgtgtttctttcccctaatgagtttgttttaactactttagaaaattcttgtgatagtcaagggtctctgcaaaatatctctctcctatatcccagaaccttctctacactctctaaatcatggcttcttatacgccatgcagaattcttaaaatgaatttataatctgcactacttaaaatgttccctttgttgccattgaacgtgggaaaatgtagatattcaagattcccattggcggaaagctggggtccttagtaaagataaataacatgtaatgttgtggtttcatctgttttctccattaattctatgcagaacaggattaataaaatgcttatttaaacaggatggtgtttattaccctgaaagttctgaaaaaaagttattgagagatacctgctctctcaggtgctaaagaaagactactttaaaatgttattaaaaattgcagaacatagaagatatctgcattttgaactctgcataaaactgatttttctgtatggttaacctcagactataatttactttttgaggggcaatatctcagcagtgatgatgtcttcttctgtgtgcatcagcacatcataaacatttgtcctaatgcagttgattttaaaatttacttaaaagagctctctgaaatatttatttcactatagagttaattatttttctcttcattattaagtatctttatgtagctaaggaagagctgtgcataaaccatcacatttaatctggcagctgcctttctttgttaggttttccttgcatttatctgtctttggaaaatgaagactcttatctttgtttacagggcagaaaaattgagtaaaacacaggatcttccacttactggatattgacaaaatattctttctgggccaaacacattggcattactagtgaacttgttagaaattcagaaactcagagtttatttcagatcttctgggaaaaaagaatctgcacaagatctccagtttactgttcacattaaaacttgagaggtgcct

SEQ ID NO: 22420 - DNA, 1050 bp, Homo sapiens
catttcaaatgctctttttctatatgtgtatcttttctgatgaaaattttgttcaattatttgctcatctataaattaatttagctttattgttcagttttaagagttcatatgttatgaatattaactactatcacatatgatttttgaattttcttaatgtgcggaaattttcaagtatagtgtagttacatttttctgtttttttctttgttgttcatgcatttaatatcatatctaagaaaatggtgccaagactcatattatttcttttttctaagagatttattactttttcatgtctaagtttttttgtttttgtttttgtttttgttttttgagatggagtttcactcttgttgcctaggctggagtgcaatgggatgatgttgggtcacggcaacttctgtcttccaagttcaagcagttctcctccctcagcctcccaagtagctgggattacaggcatgcatcaccatacccagctaattttgtattttttgtagagacggtttctccatgttggtcaggctggtctggaactcctgacctcaggtgatccacctgccttggcctcccaaagtgctaggattacagacatgagccaccacccctggcctcatgtctacggaatttttttgtaaattttgtgaatatagtttttaaaaatgatgtaactgtatttcatcagtgttgatgtttttaacattattttttgagaaaattatcttttctgtatcgtgtgctcatggcaactttgcaaaagatcatgtaatcatatacagaaggcttcatttctgggctctctgttctgttctttcatctttttatctttgtgtaagtatcacactttttgttattgtagcttttaatgtgttttgaaatcagaaagtataatgtctctctgttcttttttatgagtgttttgctagttatagtttataatcaaattataaaatgttaagcaggttgggtgcgctgtctcacacctgtaatcccaacagtttgggaggctgaggcgagcagattgcctgagctcaggagtttgca

SEQ ID NO: 22421 - DNA, 1050 bp, Homo sapiens
acacaagataattcatactgataagaaaccctacaaatgtgaagaatgtggcaaagcttttaaccgatcttcaatccttagtatacataagaaaattcatactggagaaaaaccctacaaatgtgaagaatgtggcaaagcttttaagcggtcctcacacctcgctgggcacaagcaaattcatagtgtacaaaaaccctacaaatgtgaagaatgtggcaaagcctttagtatattctcaacccttactaaacataagataattcatactgaagagaaaccctacaaatgtgaaaaatgtggcaaaactttctaccgattctcaaaccttaatacgcataagataattcatactggagagaaaccttgcaaatgtgaagaatgtggcaaagcttttaaccattcctcaaaccttattaaacataagctaattcatactggagacaaaccctacaaatgtgaagcatgtggcaaagcttttaggcggtcttcacatcttagtagacataagataattcatattggaattcatactgaagagactgtacaaaagtgaagaatgtggcaaaggcctttactgctcctattcccttactaaagaatgtggcaaagcttttcaccagtactttacccttaatacacataagataattaatgctggagagaaaccctacaaatgtgaagaatgtggcaaagatttctattgattctcataccttactaaatataagataattcatattggagagaaattctacagatgtgaagaatgtggcaaaggctttaattagttctcatcccttactaaacataagagaattcataccatagagaaatcctacaaatatgaagaatgtgacaaagcttttaaccacttctcaaccctgcctacacgtaagataattcatactggaaggaaaccctacaaatatgaggaatgtctcaaagctttttactgattcttataccttactaaacataaaataattcataaaggagataaattatacaaatgtgaagaatgtggcaaagcttttaacaaatcctcat

SEQ ID NO: 22422 - DNA, 1055 bp, Homo sapiens
gcaggatggacatctttacagtattacctttttcagcctttcacaagagcatgctcaagagtgtgttgtttaatttctatatatttgttaatttttcagattttttttctcgttgtatactcatttcattttggtgatagaaagtaatttataaaatttcagttttaaaaaaactggtaagacttaattttcttctttttgtaataagaggaggtctatcaaggaaaatgttgtattagctattgagaaccatgtgtgtcctggtgttgaggggtgttttctatacctctgttagaaataattgtcttacactgcctggaagtcctctattcccttactaatattctcatttaatttttattacggaaaatgcagtgtcaaaatatcctactataattatgttgctctctatgtgtctctgttattctgtcaatgtttgctttatatgtttggagccctaatgtgagatacacacacacacacacacacacacacacacagagagagagagagacgtgtatacagatttgtcataggttcccagtgagtaaatctgaagtggtttttttttgttgttttttttttttttttgagacagagtctcactctgtgtcccaggctggagtgcagtggtgtgatctcggctcactgcaacctctgcctcctaggttcaagcgattctcctgcctcagcctcccgagtagctaggattacaggtgcccaccaccatgcccggctaatttttgtatttttagtagagtcagggtttcaccatgttggccaggccagtctcgaactcttgacctcaagtgatccacctgcctcaacctcccaaagtgctgggattacaggcgtgagccaccatgcccagcctaaatctgtaagttttaatgtccttttttgtctccttggagttttaacttcaagtacattttgtaaaatatgatagtttttgacttaagatgtagcttgcataatactatcttgatttcttctgctctcatttgattaatatttgcatgaaatgtattcttccatcttgccccttttagtgt

SEQ ID NO: 22423 - DNA, 1046 bp, Homo sapiens
ctaaaaaaaaccaaaaaacaaaaattagcccggtgtggctgtgtgcacctgtagtcccagctactatggaggctgaggcaggagaatcgcttgatcccggaaggcgaaggttgcagtgagccgagatcgcgccattgcactccagcctggacaacaagagcgaaactttgtctaaaaaaaaaattattcacatatttaatacgttgaaaaaaagacagcaaagaagagagaaaatttttccgtgttctgagatgggcctcgttcagctccgggaggaagccccgcctgaaaaggctgaggcttaggctgtcaatctttcttcattcagcccaacgtctgatgacatcttctgtcactcagggccttagaaagcggggttcttaaacgttatccaatcagagacgctgtcctgggaactgtccaatcaggcacgcagctggagcgaacagggcggcttccgggatttggcggggcctttgtctctatctgcggccggagctccaggtctcgtcctcactactctgtgtcttctgcttttaggggcgcagcctctgtggccctgtgacctgccccctggaagcctagaaatggtgagagtgccgggtgcgacatcccaagagagggaacggggctggctggaaccggtgggaagcggcagtggcgggactcaggcctcctcgctgtcagttttacaatctgcgcccgagttgttgcccagctcggcctcagtcccttcagccttaagatggcggctgcgctgacagccgggctcccgggcgttctgtctcttcactgcgcagtgactgtgccctggcctggagccctctttgggcagctctgcaccagtagccccgcgtctctcccagattgtgcagggaccatgggaggaacgtcagggcagaatcctgactccgggtgcgggctcatgaatgggaagagctttggtccgtggggttttcaggccattttttcctattaaaaatttatgggcctcactgcaaaaacattaaataatttaaagtgtgattcaaaaattttagagcacc

SEQ ID NO: 22424 - DNA, 1029 bp, Homo sapiens
cattatttaacttgagaagattatgagagcccccagtttataggaactggctcagaagtatagatgagaccctaggaattgtgactgggatctgcagtggtggcagtgttgtgggactgagccctgaacttgtagggtctatgctgactcaaggaggtatcagaattgagttattggacaaccagttggtgttggagaattggttgctgttcagcaaactccacacatttgttgtcagaaaaagaatatcacagatatttgagctggagggagactcttggtttctctgggaaggggaactctgttctgcacacaggctgtcacaatgcacattgtcctgtgattccagatctcttcccagggtgaaaggggactgagggcttggaagaaagaagttctgaaaacagactccctgccctcaacctgctaccaccaatgatttccgcctactaatgaacatacccactaggaatgggtgtggccagaatcttcacaaaacaagaagacttgatctgaggaattactctatagtggctttacctctaaaatttctcaccaaagaattacacaagtgcctagaggactcctggattatccctaccacaaaccctgaacctgaagcagcaacctggtctctctatcaccctgggcttgtggactaccaatcataatctcatccacctgcatggacacaggaatatgtcagaacataaccctgcctgaatcagtatctgtagcataaaccagtctttccagctaccatgcactgtcccccactcacgggtccttgatagcacctttccctcttctgtcttttgcttttctacaaaccctttctgatgtgcacagtgtgcctcaggtgcctgaatccagcacctactgggagtcagatgtccatgagttcaagattatagccctagacctggctgtcataagaacagacaaaaattagaaatacagtcttcatccttgaaaataaaagatttttctctttccttttcttaaagcatttactttagaaaacttttg

SEQ ID NO: 22425 - DNA, 1037 bp, Homo sapiens
cccagtgctgatttcttctctgcctctccttttttaggttctatttttttcatctttcatctttcctttttttttttttttcccttgagatagagtcttgctctgttgcccaggctggagtgcaatggtgcaatcttggctcactgcaacctctgaatcctgagttcaagtgattctcatccttcagcctctgaatagctgggattacagttgtgcgccacgatgcctggctaattctttgtatttttttttagtagagacagggttttgccatgttggccagtctggtctcgaactcctgacctcaagtgatcctcatgcctcggcttcccaaagtgctggaattacaggtgtgagccactgtgcctggcctcctttcctattttcctatttttttctccctttttgtctctctctttctatgtgtctttccctctgtttctctcttccttttttttgttttgtatttctctcttcctccttctctctttccctttgtttctttttaattttttttccttgtagaacttggtttattttttccttccttcctacctttctttcttcttttcttccctcctttcctcccgcctgttttctttcctactacatgagcatgccatcatgcctggctaaattttttatttcttgtagtagagacgaggcctcgctatgttcccagggctggcgtcaagctcctgtgctcaactagttcttccatttcagtttccccaagtgttgggattataggtttgaggcaccatgttctgccctctttttattttctttttcattcttcctttttttttttttttttttgctctctctcttgcttgcttgcttctttccttcatttctttctttattctacatttttctttttttcttttttcttttctttttttttggagatggagtttcactcttgttgcccagcctggagtgcaatggcgtgatcttggctcaccacaacctctacctccctggtttaagtaattctcctgcctcagcctcccaagtagctgggattatagaca

SEQ ID NO: 22426 - DNA, 1046 bp, Homo sapiens
ccgcctgagcccagcccccagaaaggattgtgacatatcgttggacccagaattgaggtaatgtaactattccactgccttggcactgcccacagaagacattgtgacatattgctgggtcttgtacccaggtggtgtgaatcttctctcctgccttggctcttccacagggggcattgtgtcatatcgctgggccccacacataggttatgtgactcttctgcctgtgccctgcccatgtggcccattgtgacatactgttgggtcccaaacctaggtgatgtaactctactgcttaggccctgcctacagaggacattgtgacatatccctgcatccatcacacaggtaatgcagctctcttctgcttggcccctactcacagaaaggattgtgatgtatcacagggctcagcacctagctaacatgacttttctcctcttctaggtttttgcccacaggggatattgtgacatgtcactgggcctaatactagggtgacagtactcttgtgtcatggcactgccctcagcaggtgtggtgatatattactgggcccagaacaaatgtgatatgagtctcctgcctggaccctgcctacaaggtgcattgtaacatatctggggccctttgactattttattttatttattgtattatattttatttattttaattttatttttgagacagaatctcactctgtcacctaggatggagtgcagtggcgtgatctctgctcacttcaacctttgcctcctgggttcaagtgattctcctgcctcagcctcctgagtagctgagactacaggtgtgtgccgccacgtctggctgatttttgtgttttcagtagagacaagatatcaccctgttggccaggccgatatcaaactcctgacctcagccagtccacccgccttgacctcccaatgtgctgagattacaggtgtgaaccattgctcttggcaccctttgactattttatgtgactcttctctcttacctggacattgaccaaatgggcccagcaccaaggtgatatgact

SEQ ID NO: 22427 - DNA, 1031 bp, Homo sapiens
gggaccttgtgacatatatctgcgtccatgacctaaaaggtgacacttcttgcctgcactgtgccctgaacaggaaatattgtgacatatccctggaaccagacaccaggtgatatggctcttctgcccctgtcttgcccccagggagcattgtgacatagtgcttagctcagcacccaggtgatgtgactctgttgcctgtgctgtgctttcaggagagaattgtaacatatccctggctgagcacccaggtgatatgacactcctgcttgtttccttccctcggggaagattgtgagataccttggctgaaatcccaggtgatgtaactctcttgctaactccctacctacaggttaaatggtgacatatactatagtcagcttataagtggaatgatgactctcatacctctagtcagctattggaagaaatactgtctctcatagctcgacttagataaatgagtcacttccttggtcttctctttttatgaaggtcataaagaattgccacactctaacatattgtataatgccctcgagtgttacaaacgtgttatcccagggcacacagcacaaaggtgagattgtttcttatatgcacacctcaccaattattaggattatcaccctcacacagggaaagagcctatggctgaagtcttgaatctcaaatgcaaacagaatctcaaatgcaaacactgtccacagttggaattgtgactcatgtatgagcctccaaccacagttgagatggtgacacatttctaaactcagaacatagcagatgaggactctactctcttaaacccaacaaattaagagagatgttgactaatacctgggcttagggccacaagtatggtcatgggtgcttacaaacatgattttagagtaaattgtgcctctcatttatactggataaagcctttgagtagtatagtgtactaaccaggcgcagtggctcacgcctgtaatcccagcactttgggaggccgaggtgggtgaaacgaggtcaggagttcaaga

SEQ ID NO: 22428 - DNA, 1024 bp, Homo sapiens
tgggcccagcacgtagctgatgtgacaatttttttttgggttctgctcacaaaagagattatgacatgtgattgtgcctaacactaaggtgatgttactttttttttttttttgctttggctctgcccttagaaggcattgagacatggctgggctcagcactaagaagatgtgagtcctctgcctgaagcctgaccacagggagcattgtgacacatttcttgacccattacaatctcttctacgggcaaagctgaggtaaatgcccgttttacctatgtgatgtgacattcctcttctgcctgggccatgcccacagaatagagtgacgtattggtggggcaagcaaaacagtggtgtaattattctgcctggtccctgtacacaggagtcactgtgatacatgtttgggcctcccacctagatgatgtgacttttttcttctggagtttgtccacagtgggaattgtgatatgccacgtgacatagctcctatgtgatgtgactctttctcattcttggcctctttccactggggttactggaacataaagctgagcccagctcctaggctgtgtctctcctttctaagccctacccacaaaggacattgtgacgtatctctaggcttctcacctaggtaatattacttttttacctaggcccacccctcaggggtattgtgaaatactgctggaccaacatgctagatgataggagtctctgctactgcttggggtgtgattaagaggaaattgtgatgtgcatttgggtgcatccagcacctaagtgatgttaactctcctcttgtgcctgagacctgcatgcaatatgtgtttttgtgttttttgtttgtttttgagatggagttttgctccttttgcccaggctggattgcaatggtgcaatctcagctcaccacaaccttcatctcccaggttcaagcaattcttcagcctcagccccctgagtatctgggattacaggcatgtgccaccaagcccggttaatttttctaattgta

SEQ ID NO: 22429 - DNA, 1024 bp, Homo sapiens
aaatgtctttgcaccaatcctacaggtgatgtgactctcttgtgttacctggtctctgcccccaggaagaattgtgacctttcacagcgtatagctaatttttttcttttatttcttagtttttctcctgcaggaaagattgtgaaatattactgaactaagcaccaaagggatatattttttttcttggacctgcccatgtaagaccttgtgacatattgctgggccctacacctagatgatgtgagttttctgcccgtcaactattttatgtgactctcctctcttatcttcactttgtccataggttagcttttaatatacctttgggcctgggtcatgctaatagaagcaagagtgacttattgttgggcccagcacacaggggatgtgattcttctgcttggttcctgccgaaatggtcattgtgacatatctatgggtcagttggctaaatgacaggactctttttatctttctggagcagtccacagtaggaaatttgacatatcgctgggcccagcacatatctgatgtgactctcctctcatgccaaggccttgcctactgtagtgattgtgccatatagctgggcccagctcctacgttatctgactcctgttttcttcctgagccctatgaaaagattgcattattaaatatttctgggtcttttacctaggtgatgtgacttttctttctggcttgtcctctcagagggtattgtgacatgttgctgaatgcagcatttaggtgatacgacccttcctctactgcttggactctgaccaaaaagggattgtgatgcatcactgggcccagcacctacgtaatgggactcttttctcttgcctggaccctacaaatattttgcattgtgacgtgtagctgggtctgccacccaggtaatgtgagtcttccacataagccctggccacaagagtattatgaaataactttttattcatcacctaggtagtgatgtgactcttcatcagcctgtaccctgccacaagggaattgt

SEQ ID NO: 22430 - DNA, 1018 bp, Homo sapiens
ttctattgagaaccatttgtccctcctccctacccttctagtcccactctgtacccaccactccctgaagaacttagcccagtgagtactactcatagtggagctgcctatcaacctccaaggggaaatctttgtccacctacagaggttgcaaatggggaagaaggcctgtgagaggaggtgtccccttttctctgtctggtttggctctataataagacaagtttggtcatttctctgaagatgcaggaaaattcataggtgagtttgagaagttaactctgacctacagtttaacatggcaggatctgtacattttgttgtctctgtgttatacagtggaagaaaaacaatgcattttggggacagctaggactcatgcagatgaggtattggcttgcaacccgaaccataatatatatcagacaggaggtatagcagttccagatcaagatctagagtggaactatcaaagggggtgtgaggacttggaagaagagatcatatggtcacttgtttgttgaaagagatgaagaaatgtatgaaaaaacctgttaacaatgaaaaggttaagcaactttctcagggcaaagatgacaatccagctttgttttaatagtgtttagttgaggcaatcagaaaatatactaacactgatcttgcctcaatgaaaagatagacccttctgggagtacattttataacccagtctgcccctgatatccatagaaaactactaaaagcagctatgggtccccaaacttctctggaacagctttggatatggcatttttagtttttaataacagggacaaagcggaggtagcggaaagaggaagaaggacctcccacaagttgcaggtcttggttgcaaccttaagctaacctcccacatggggttgccctcctgggtcttgggttgaacaagggaagctgaaaggtgggaagcctaaacctgggtgtccgagtcactgtgccttgggcataaatcaggttgcacactgtaagaaaactgacc

SEQ ID NO: 22431 - DNA, 1096 bp, Homo sapiens
agtaaaaatacaaaattagctgggcgtggtggcacatgcttgtaatcccagctactcaggaggcttaggcaagagattcacataaacccgggaggccgaagttgcagtgagctgagatcatgccactgcactccagcctgggcgacagagtgagactccttctcaaaaaaaaaaaaaaaagaatattaactttcttctggactgcttactctgttttgacccattataatgggtctgtttcacccccaaactgtatggtcacggggatagattgacaagcccatagatgccattttacataatctctaagctgtttttcagtgacttcggttttcttacataacttccttatcatgcccggatgcctcagggaagtcgtagcaatttctctttcagtagataaagccaataaactggctttagaacaacattctgaggtttaagcccacaccaagtatgaggagttctataagccaaaagacaccagtggatgacaggggacacttattgaaatagcagacattttgctagacactccaattaacctgatatgaggtgctaatcaataaaaaatagttaaacatttgcatgactctactcatttgggaataaattccctgtttaatatctcggctttttatagaaaaataattacttaaaagagtaaaccaggtaacccaggcctgtgaactatatgcctggaacaacccaaatgaccaatgtttacctcctcctttagtaaggcctgttcagcatagaggagcataccctggtgaagactggcaaatagactatactcagatgcccccgtgtaaagggtttaaatattgattagtattcattgacacctttaccgtttggattgaggcttttcctaccaagtctgaaaaggcaatcaaggtttctaaactactaaaagaaataattccgatgggtacagtatctcacgcctgtaatccctgcacattgggaggccaaggcaggtggatcacctgaggtcaggagttcgagaccagcctggctaacatggcgaaaccccgtctctactaaaaatacaaaaattagctgggtgtggtggtgtgcacctgtagtccta

SEQ ID NO: 22432 - DNA, 1047 bp, Homo sapiens
cttggccatcgaaagtgctgggattacaggcgtgagccaccgcgcccagctgatggatttacttataacggtttatcaaattagctttagtgctgataatacattattactaaagtaaaagttgattttctcttgaacaaaaattatatgtattattaatatacataaaatatgtttgttcacattttgaatacattgaaaaagagagagagcaaaaaagatatagaattttcccatgctctggggtgggcctggctcagctcagggaggaagccctgcccgataaggctgcagcttaggctgtcactctttcttcagcctagggtgtgatcacatcttctatcactcagggtctgagtaggcggggccttaaacgttatccaactagggacgttgggctgggaactgtccaatcaggcacacagctggactggacaaagcggcttccgggatatggcggggcctttgtctctcgctgtcgccggagtcccaggtctgtcttcactgctctgtgtcctctgctcctagaggcccagcctctgtggcgctgttaccagcaggtattggagatccacagctaagatgccaggaccccctagaagcctagaaatggtgagaatgccagtccgacatcccgagagaggggagggggctggttggaactggtgggaagcggctgtggcgggactcaggcctccccccagtcagctccacaatctgcgcccagctcgacctcagtccccttcagaaataagatggcggctgcgctgacagccagacccccaggagtcctgtttcttccctgcgcagtgactgtgccctgtcctggagccctctctgggcagctgtggacccgcagccccgcgtctctcccagattgttcagggacccggggagggtcgtcaggggagaatcctgactcgggttgcgggttcatgaacgggaagagctttggtctgtggggttcccaggccctcttttttcccattaaaaatttatgggcgtcactgcaaaaatattaaatactttaataaaagaatgattcaa

SEQ ID NO: 22433 - DNA, 1056 bp, Homo sapiens
ctttcagtgctatgttaaaatagaagctagttttgcattagtgtctgtaaatttgaaggagcaaacacctcttcaagtttctataaactggtttcagaaagtaaaaatgtgtttttgttgggcccccagagtgatagaatgtcctctgggtttgtagtgaagaggggttgtagcttggccttaaggctgctgggtttgcacaagggtccaccttcagttgtcttcttaaaaggagcttggatagttgtaattctcatttaatttttggacagattgaatatccttcaggactttgctgtgcagggcagacccaagggcaggtttctgcactcaggcctgcatatggtgagttttatatcaggatgtggatgagcatggctttcactgagtacaggagaggattttccgaggtaactttgggtttctacataggcaaaaccggccatgaactatggctcagggagctggaactgagtcatggaactgcttcagggaccacagtaaaggtcaaggtctgcaggcctgccagcatggctctaaatgggtgtatttctccaggcctctggaaaggcaggacccccccagactgtgactgggaagagtttgggatgtttacagagtaagtttaaaattctcaggggaaccaagttaggtggaacaatttcttgtctttagccaaaaacagtagttctgtagtttgccacctgaatgaggacctgccttctgaaaagggttaccttcagtcttgggctttagcagagtttcacaactcctttcctggatctcagagttcttttaaaggcatttatttttgatctggggtattgtaacataacccaggcaggtcttaatattttgatcaaaagcaattctccaactttcatgtaccatgtagctgtcattacaggtgtgaaccatgatgcctggttctctcataaaggcatttttgtcagcaatggctgacaaattttcttgctgacagaggataagcaaataaggcacctttaattttttatcttattaatgccactctccatataaattttaactgttttc

SEQ ID NO: 22434 - DNA, 1045 bp, Homo sapiens
gtgggatggggggatgggggagggatagcattgggagatatacctagtgctagatgacgagttaatgggtgcagcacaccagcatggcacatgtatacatatgtaactaacctgcacattgtgcacatgtaccgtaaaacttaaagtataataataataaaaaaagaaaaataaataaagttaatattgttatgtgtgaatttgatcctgtcgttaggatgctggctggttattttgctcgttagttgatgcagtgtctttctagcctcgacggtttctacaatttggcatgattttgcagtggctggtaccggttgttcctttctgtgtttagtacttccttcaggagctcttttagggcaggcctggtggtgacaaagtctctcagcatttgcttgtctgtaaagtattttatttctccttcacttatgaagcttagtttggctggatatgaaattctgtgttgaaaattcttttctttaagaatgttgaatattggcccccactctcttctggcttgtagagtttctgccgagaggtccactcttagtccgatgggcttccctttgtgggtagtccgacctttctctctggctgcccttaacattttttccttcgtttcaactttggtcaatatgacaattatgtgtcttggagttgctcttctcgagaagtatctttgtggcgttctctgtatttcctgaatctgaatgttggcctgccttgctagattagggaagttctcctggataatatcctgcagagtgttttccaacttggttccattctctccgtcactttcaggtacaccaatcagatgtggatttggtcttttcacatagtcccatatttcttggaggcttttttcaattctttttattcttttttctctaaacttcccttctcgcttcatttcattcatttcatcttctgtcactgataccctttcttccaggtgattgcatcagctcctgaggcttctgcattcttcatgtagttctcaagccttggctttcagctccatcagctcctttaagcacttctc

SEQ ID NO: 22435 - DNA, 1036 bp, Homo sapiens
gctgggattacaggcatgcaccaccatgcctggctaatttttatagttttagtagagacggggttttgccatgttggtcaggttggtcttgaactcctgacctcaggtgatcggcccaccttggcctcccaaagtgcctggattacaggtgtgagccactgtgcctgacctggcacatcagttttatctggcagcttcaaaggtaatctttttgtctgtgacttttgaaattgtgcttatgtatgtgtttgttataaatatctttttgttattctagtttgtttgttgagcttttttatttttacatctttttttttttttttacttttaggatctgtcagtttttttgtgtatattttatctccacaatttgttttttgatatcttaactattttttattcttgtcctcatttttctgattttccatagttgtttctgttcccattttaatcagtattattcagtttattaccaattattaaaattaatgtatacatcttttttatgatttctttcagaaaattttgtgatatttttggtgggattgtattgccctattttgtatatattataatccttgattaagatttagacattaaaaaaagctacttgtcaaaatcttataatgtagctttgtcatggcatattctgaaaacaattgtctttgctggtgattatgagagtttcttaaacatattcttaggatatgtgttgtctgaaattttatttttattatttaattaggagagattactcgttaatttgtagcgtcatcacttgctacaccttttccatttctgtggtactgcagtctctctgctgctgtaacatttttctttggtctcagcagactcaaactctcattccaaaatataccaccatttctttcagtactttatgtcatgagagacagaaaccagtgtcaggaaaaaaccctaaaagccagaaatggcaatgattgtgccggtattttacctttcttttaaaacagaaaccaagagttggcaatttacttgtaaagacactatggtatag

SEQ ID NO: 22436 - DNA, 1024 bp, Homo sapiens
tgatctagcagatagactctttattcagtatgtgagagtcatttacagactggggacataaattagaaatgatgagctggatgtcttttagggtgaaaaattactaaatttctaatctatgttactttttctatttattctctctgttacataacctatgatacagacagaataataatataattctgatacatggttaatgaataattccacatatatatgtgatttatatccaaatattgctttacttgtagtggtttgttaaccttctaatgtggagatcattgagcctttccgtgagtattctcctggtgtttctcctgagtgccacatggcaacagattttaactgagctgagggcccaaatgtgcattgttgagaactatcaattgcttggttctggaagttgaaataaatatgtccctttattagattaagtgcttgaagaaaaagtaaataagatactgcaatttctccctataaactcatacatatcaggtatgcagtttcttctgtataaactcatacatatcagatatgcactttctcctttataaactcatacgtatcaggtgggtttagagcaatattctacctcagccattattctctgagtacaagccaagaatgcaaactgtcacatgatctgtattgccttgcatatttatgcttacgggccagagtagttttaactgacgttgaaaacagttgaacactcttacatctcacgggaggaatagagtgaatataaaagatttttctcagcattttacagctgaattgttctacatccagtattaaattgatttaataaaataatactgccagcatccaaagaagataccatgagaacaatttctgaattattcagtacaatttcataataatattttcatacggagatctctcaattaacatatgagagaaattgtctttattatttgagagcaaagtatttttgaagacatgagtgggtatctttatattaagtgaagtcttaagaaaaagatccccgtgtgagcat

SEQ ID NO: 22437 - DNA, 1052 bp, Homo sapiens
gggtctgggaatatatcagtgagggaggtggaacacaggttctagctgggtcttgggaaagtgaggaggaagcacgtggacaaggcagggctccagaggcaccagagggctcatggcttctctttgttctcgccaccactttcactggggcccaggagctgagttccaagacttggggaatagtggacttctggggcaaagtggctgatgcaccaaaacatcttttaaagaacagataaagaacagaagcgtacctgggagagctggctgaaaccaggacacggtgggaccattggaaaggactctaaaccacagcagcagaaggagagctagacttgcagggacccaggctccacactagggacctcgaccttgtcctgcagggagtggagacccatgaatggatgttaggtgggtttggtttgcacatagccttggtgtatgttgatagtgttgtaactgatgactaaccaggcctcacatttgcagcccacagtgccttgcatacaggagatcatcattcttctggtcctatgccatgtgattgttactgaggaggatggagatgacatcatctaccacgcctcctccccaggtgagggctgtggtgagatgcatcctgccagaccctcctcaggagacaagggtattggcagttattcgtgaatgatgcaatggtgccacctctgccacagactcagctgtctgcccctgccctcataccatgaccaggctgtgactacaggtgttagagctgtagagaactgggactgtgctctcccgactctcctaacgctgacaacagagggaggacccaggctgtcttgcatttcccagcagtggctattgggctaagtaagtctctgaagagagagcagggcaagcttctgtcatcccctagcccccaggagttttccaactgctgtggaagctgtgtatgaagcactctccccactttgtgtggctctggcagtcccacagcacacgactaaacatggccttgctcagaggtgacatttggtcagaaagttgtgggaatactacttaggtta

SEQ ID NO: 22438 - DNA, 1211 bp, Homo sapiens
aggcggaaaagaccccaggaagcgagcccactcctccccactgctcagcaacaccgcctacgacgttctcagtagccgaatccctttccaggcgcatgcgcccccgaggtgggcgagcgccggtgatgtcacgcatagcgccatctccgagctccgagagtctgcgacagcagctgccagtgcgtcatcagagagcgccggaagcggtccgagaatgaagagtaagcggggccgcgaagttggagagggttggggacgttaagggtcggggtcttggtactggtgggtgaaatgggtccgggctacctgttgctgcggagtcctaacagaaccgctacaggaatgggcccaccctacctaagaaaaactgagggctggagcacgggttagcctggctcgacctctgagctagggagggatgtcagggctggaggcaggttctcccggaggctgctcagtggtgtgcgatgctagaggagggttccaggccttggctcaacttggccactatctcccggggtgaccgcggtcaagatcctgctcctttctgcgagctggtttcacactcttaacctgatgcaaagcgccgagagctgctggggaatgatatcactaacccaaagctttggtccttaggggtagaagacatgtgccaaggaggggcgtgtagacaccgttaagactgggccttcaatcagaatttttatttttcatctctgccactttctacctatatgatcaagtagattgtctcggcatgtctgagcttcagtttgctcatgcacataagtgtaatgagaaaaaatatgtgtaccttgtaatgaggtttctggcaagtaatggatgttcagtaattgttagatgtgtattgttgcagaaagacttccaagtctgttactaagcacctgtaacagatgaagcaaagttatcaggccccgcaagttgctctctacagtttataatccccatcttccatttgagggagaactagatgctatatataaaacttgcaaccacattggtttgcttgatcaaacaaacatacctggctgggtgtggtgggacacgcctgtggtcccagcactttgggaggctgaggcagggggatcacttgaggccaagagttgaagaccaacttgggcaacaacatagcgagaccctgtctctacaaaaactggaaaaaaaaaaaaagaattagccaggtgtggtgg

SEQ ID NO: 22439 - DNA, 1063 bp, Homo sapiens
attactcagttatttacactggttgttcagaccaaaaacctaaacagtgtctatgtttcttctttcctaatctcctcgaatccttcggaacatcctactacttaaattcagccactgtcattccccagattacctcagacacagctcctcaccgcaccaggcagccagagtgccggttacgtagaaatcagagcacgttccttccctgcttcaagtcttctggcagcgtcccatcgtatgggagtaaacctgcctccttgctgtggtctaaggcctccccgctccctggggcagcaggcctcccacactgccttcctcctgccctgcctcagggcttcgcctctgctccttacctctacccgggagttctcctgtgtgtgcacagtccagcttctcattgttcagccctgctccaatgccactcccctcagggtctaccattgcaaaccatgaccctccacacattgccctgtccctactcttcatagcactcgttgctgtcagaaagtagaatggtgtggttcaccgtgcatcaccctgccttgctagaacccgggctccgtgagagtaggatccaggaccgcctctttccgtgctgtgtccctggcatctcctgaggatggtgcaggcattccacagctgcttggtgactctgtccgctacactgaggctcgggtcaggacgagggaggggctgctgcttgtgatggtggctcatctcgcagtgctggctgctgggcagctctgcagccacactcacgttccagccagcatcctgggcagtgcatggtggtgtttgtgcagatcctgcaagggagacctggctgcatcagagcagccagcccgtgggccctgatggtgctgggcacatatgtgacctttaattccagaatcctgcccaagacccctgtggccacagaccctccgaaggacacctcataggaacagtccagaggctgcaaagccccaggggaagcctggattcttgttggttacatcagggcccagctgttgagcccccaccccctgggtgctctgttctttcatctgctagctcagagggt

SEQ ID NO: 22440 - DNA, 1066 bp, Homo sapiens
aaggtcgtgagtctggtgggctggtgtgtgtgtggaccaagcagggggcgcccggcatgagctctgagttagtgcttagtgcttagggcaccaacagaggggcctgtgtggcctcacactccactcgggacggcagcatagtgcgagctccagggcccctgcctcctagcatcgcctcagttcccctcctgtaaagtggggattctgccttctggggttgggtgggaactaaatgagatagtcacgcttggctgacaggaagcactcggcgcctgtgcttgtgatggtggtggtgactgctgcacttcctgggtggttgcgtgggttgcagggcctgtgacagcttggtttggtggatggcagagtcagggttgggttgggggtagagacacccaggtctcctggcacagaccgttctgatgtcccgttgaggcctgttccgccctgtttttcaaggctccccagcggggctgaacctctgccctctgctgcccacagtagtagccggctcagtagcactttttttttttaagagatagaatccactcagtcacctagctagagtgtagtggcatgatcatagctcactgtagcctcaaactcctgggctcgagcctcctcttgcctcagccttccaaaacgctggaaccacaggcatgaaccgctgcacctggcctaagtagcacactttatcactgccttcccatccctgtctggcctccacatcccctttactgggaaatcccccttccctccccgtagttccctgtactcccgtctaagggtcagcttccgaggtgatgcttctcagtgctgggcaggcctgcgggttactgtgcgtagtcagtgggctgcctggcatggtgggttagtcagttgggggtgggcagcgtggttctgacacccccatgcctgagcctggacatactccttgtctgtctcctcctgcagccgccagctggagacgatggtggaccacttggccaacacggagatcaacagccagcgcatcgcggcagtggagagctgcttcggggcctcggggcagccgctggcgctgccaggc

SEQ ID NO: 22441 - DNA, 1065 bp, Homo sapiens
gtgattcaccaaccctggagaccctgaactgtggttgagcagaccatatcctcatatcccgcctcagctcacagaattcacttgcggccaggcacagtggcttatgcctctagtcccagcactttgggaggccaaggtgggcagattgcctgagctcaggagttcaagaccggcctgggcaatatggcaaaactccatctctacaaaaaatttaaaaatttaaatttttttgtggtggcgcatgcctgtagtaccagctacccaggaggctgagatgggagaatcacctgagcctgggaggccgaggctgcagtgagccatgactgtgccactgcactccagcctaagcgtcagagtgagaccctgtctcccaaaaaagaattcacttgctagagtccgccagagttgttgtcatttctctgcccactgtgcctgacgacaacaacaacaaaaaaaccctggtcctcaggtggtgggagtcaagggttttccaatgccgtcttccctgtgtggaacacggacagcttactctttcatgatggttatttggtaccatgtgataaatacatgatgcagaggttcacactgacttttagtttctaaggcaggtagagccatggagccctttaagattcagagcatggcacccaatacgtgtccatcctctaactcagacacaaacgagattggagtttatttgggcaaaattaggctctagctctgagcagggctagagagagaaatcaaatctgataatgtctagtcatatttacccaaccgtgcattttcctaccacatgttccacattttgaaattcaaatcacatttataccttggacattgttagaagactatttttatccctgctgtaatcatctaatttgctgattacaggtctcaaattgccacagagaactcaatttttgaaagaattgtcctgtttgatcaaatatgttattcaagcaatgcagtcatttgttccacaagtttacctgccaggtagagttaaccaggagtaatagcattagaagcctatacttaaaatcaagcattagctaatccgcc

SEQ ID NO: 22442 - DNA, 1051 bp, Homo sapiens
gtgcctgagggcgggcgcgcgggcgctgggcaactgccggccgcgccgcctgcgcaggcgctggttcaggactcacacgccgcgctgaggcccgcgggcccgtcatggaggcgcccaccgtggagacgccccccgacccctcgcccccttcggccccggcccctgccctggttccgttgcgcgccccggatgtggcgcggctgcgcgaggagcaggaaaaggtaactagcagccccgcgccgcttccgcctccgcccgccgggctgcccctgcctgtgctctgggccgccgccccgcgtggcctaggcccagctgcccgggcccccggagggaacggggataaacttttgtcacgtgcttctgttgtctttgtctgcagccctttgacttcgcagcggagtgaggggtgtgcagcccgttcgcctgcccaggaaagggggcttctgagctgaaggcgtgcggcagcgcgtgggaatttgggggcgggggcagcacgctgtcaacggaagcgttcgccttaatatttgtagcttgtaatgacctaaacattgcttaaaatgtgtactgtttgttgctctttgattgcacggaaaagttttaccgcgtttgtcatgataatgcttcctgtgcaatatttggttatttaatatttgtcacaatataatgccatttaaacattaaaaaaaaaagagagtctcactatgttgcccaggctaatctcgaacttctggcctcaagcgatcctccccctcctacccttccccacctcgcctcccaaagtgttgggattataggcctgagtcaccgcacccggctcatttttacaaattttaatttcatcgtataataaatgagttttaaactactggtgaaaagggtacaaagttttgtgtttcctagtgggactttatataaagaagtattcccaatttaagaaatagttttattgttaaatctgatttttctgtggattctgtggtctttcagattgattctgtcccctcaagtgtcttgaaattgttactttgaaaagcagtatttaatttgctta

SEQ ID NO: 22443 - DNA, 1050 bp, Homo sapiens
cttgggaggctgaggtgagaggatcacttgagctcaggcgtttgaggctgcagtgggccatggtcatgcaactgcacttcaccctgggcgacagagtgagaccctgtcattcatatatatatatatatatatatatatatatatatatatatatatatatatataaaacttaactagtttggcgtctttaaattagaagacattaatgtatttttttaaaagagaaagatagaaaaagaagaaagaaaaaacagcccctcatgaaatcttactccttttgccaaaacttggcattttttattctttcagagaatgtgacacagaccctcagaggatggtgtttctattgcctttcctctgctgcagtgggttaatttcacctccttcagtgtataatacgtgcataatgctgacttgatatgttttctgccatttggcatattaaaaagatatccttagttttattctgatgttagtgtgactgaaatgcaaaggatactttttggggtgctctgaacagctttctggtatcgtgttgagttacattggaagagagagtaactgctttttcagttacagtcttgtggcaaactgaatgactgttttctgtagacattgactgtgctaccaaattatttttctgtgttgtgttaatgttaattcggcacacaaaataaccacgtatatctgtcatgggtgtgtaaaattatccccagttcaggaaaaagcgcgtcagtatttaatctatctttatttaatagaagcatttgcttcagtggacaggagacccacaaggccacaaaataaactgattagatagctgcactgtaattatagtgtagtacaggaaaactacccagtaaatcggcagtgaaaattttttgtgaagcaatttatttaggctttaaagctggcccagttgtgggagtacagtgagttctagtaaagtagaagcgtagtgacatcctgagtgtagaaggggaaaatgtcatagtagcttcatatgtggcacttagtattcctttatgaaagatgaatcaaacatgcttt

SEQ ID NO: 22444 - DNA, 1052 bp, Homo sapiens
atctacattctacctggaattggctttgtatatgggggagattgaggtcaggtttcatttttactgtatggatacctagttgtcccatcagcatttattggaaagagtgtcatgtctccaccgcattgtcatctttgtcataaatcaggtgactgtgtaagtagatcagtttcttgactgttctgttggcttgtctgttcttgcagcaaacctacactgtctaaatcattatgactttgtgttatcttggtacctggtacatggtggtgtagttttagttgtggttcctcaagattgcctttattttctcctttccagtccgtatgctgtttctttctttttcttgcttttgatactggccagttcaagtgctggtagtgggcatcaggggtcaacttttaaacatttaccattaagtgtggtatttactgtgagtaatttttgtatttgcttttatcagattaaggaaatttccttatattccaagtttgctatgagtttttatgagtgggtgttgaattttagaaatgctttttctaaattgatttaattatggtaatttattgaaaagagtatatttgttctgtaagttctgtaacttcaataagtaatgttgaagttacttttttttgccttcaagcatctgtttaacaaagcacatcttgcaccacccttaatccatttaaccctgagtggacacagcacatgtttcagagagcacggggctgggggtaaggttatagattaacagcatcccaaggcagaagaatttttcttagtacagaacaaaatgtagtctcctatgtctacttctttccacacagacagcaacaatccgattcctttatcttttccccacatttcccccttttctattcgacaaaaccgccatcgtcatcatggcctgttctcagtgagctgttgggtacacctgccacacggggtggcggccaggcagagggagtcctcacttcccagaaggggcggccgggcagaggcaccccccacctcccagacgggaccgcggccgggcggaggcgccccccacctcc

SEQ ID NO: 22445 - DNA, 1712 bp, Homo sapiens
ctctctacccattaagcaataacgctgtcattctcccctcccccaaaccccaagtcatttatgactatacattttgttgcttgtgttttttggtgtcatatctaagaatccattgccagatccaaggtcttgaagatttatacctatgtttccttctagggatttcatgattttagcgcttatatttaggtcattgatccgttttgagttaatttctgtatattcattgattgttgattttgagaaaattcatctaggatattttcatctgaaggctcataatctgagatttaatttatgctctcatttcaccatcacgagtgtctttctgcgctaaccaatgtggtagccattaaccacatgtggctattatacttaaattcaaaattcaaattaattaaaattaagtaaaataaaaattcagttttttggttacaatggccacatctcaagtgctcattagtcacatttggctattgactgttgtattggtctgtgctgatgaagattcccttcatcaaaaaaaaaatttattggacttcattggtcaagagtgctactagctctttatattcataatctgattcatttaataattgtgaagtatctttccatcacttttttcctctttccattataggcagaaagtaaaaacaatctgaattctcaactgtgtttattgaaagcgaaaagcagagtacaaagatggtgtctgttatcatttatactgtcttgaaagatgatgcaatatcctaggcaatgcagtagacaatggaaggatgatattttgctgttgattgcattatccttctgagtgattccataattcttccattttctcattttcttattagttttttttttttagagcgtagttaggaatagttgatcataaaataattactaaggtgatgatgaaatggcaagatgcaggaaaaacataatcactaggatcctgtagtgtatcttagacttacaaagccactgtattcatatggtaattgcagaataaaatgagttttttttttcttaataggaaaattttcttttgattccttggaaggcctctaagagaagataaaaggcatgaaatattaatccttgcaaatagttagaactactcaagaaagaaactaaaaaaataaaactgggttcaatggaccctgactgtataccctgatactttgaattcaaatccattaccacaaggttcttcttaaattttccccagtctatatttgaaactccccttctttcatagtgaaaaccttggttctcaacatctgcatttattcatttgctctatcctacaatatatacaaaatagcttcagaattactgcattaataccactgccaatggcaaacctgaagtaaagttcaaaatgtctttgcagtttcattggcttttgtgtaattaatgcttttggggtgtacagttagggtactgatcccaaaagtcacttgaattactttttttctgtgcagttataccttggatttttatttatattgaatcttagtatttgttttttatctttttcacttaattgcattttatgaatacatgaaaacatttgcatggttcaaaatcacaactaaatcaaaagttatccctactgaggtaattctgattcattcccattcctgctcttacttacccctacagataaacttttttttttttttttttttgagacagagtttcactct

SEQ ID NO: 22446 - DNA, 1024 bp, Homo sapiens
tattcatttttttttttttttttgctggtaacatacttgatttttacatattgactttgttctaaaattttttgttgttgttaaaaaatagagatgagtttgctgtgttggccagactagtctccaactccaggcctcaagtgatccacccgcctctgcttcccaaagtgctgggaccacaacaagtgtgagccaccatgcctggcctaaatttatttgaattctaattacttgcctgtacattctgatagtatctgtgtagttacatacaggcatgttgtttgtaaatactgacagttttattcattccagttcttaagtttttttttatggttgtttgttttgttttgttttttgccctattgtatgggctagaacctttaatataatgtaaaataaaagttaggacattgggctttacataccaggagggcagttttaagtatttcaccatacagatgttcgtagttggctttttgtagctactcgttatgaaaataaggacattttctcctgttgctaattttatcattaatggatgctgaattttatcaaatgtattttctatgtttcttgagataacaatatggtaaattactttgattctttaaaaatattcaaatgccattgcattcctgcagcaaacccatttgtagaggatgtgtttaccttgttgtatattgctagattaaatttgataatattttattaaggtattttgttctgttacatgaggcaaaattctgtaattctttcttttcttttcttttttctttttttttgattaactctaccagggtgctgcggctcacacctgtaatcccagcactttgggaagctgaggtgggcggatcacgtgaggtcaggggtttgagatcagcctggccaacatggtgaaaccccatctctacaaaaaatacaaaaataagctgggtgtggtggcgggggcctgtaatcccagctactcggaaggttgaggcatgagaattgcttgaacccgggaggtggaggttgcagtgagttg

SEQ ID NO: 22447 - DNA, 1044 bp, Homo sapiens
agctctgcctcccaggttcatgccattctcctacctcagcctcccgagtagccaggactacaggcacctgccaccatgcccggccatttttttgtatttttagtagagatggggtttcactgtgttagccaggatggtctcgatctcctgacctcgtgatccacccacctcagcctcccaaagtgctgggattacaggcgtgagccaccgcgtctgaccaaaatttactaattttttcttttgaataacttgctgtgaaatagaagacaactaaaaaaaaaaccctctaaatataatagaactgcttgggcttaaatcttttctgcaagtaggtggaccataaatcatataaacaaagataacctagacatgccatcagaaggctagtctatatatttttatatctacctctttcatctttccccttatttctgatttcccaaatgtcacttctttagtttacatttggatagtgcttatttgaagtctctgatattctacacactatatgtaactaataaagactttaaaatgtaaggcagcattttggtagtgaaaatttctcttgtacattgtgaaatggattttgttgttcgtctatcttcctagggagactgtttaagggaagtaaaaggaacagggcaagaatggccggaacgaagtggagggtagactatggggagtgatggcaagaacacatgccattctaccagtgacttgtttcttaaacataaaaagcatatgtgccaaatttgcatatttactaattaaaaaggcttcctggaaacattaggtagactatcttctataacctttaacaccgtcactaatggatatagcttagaagatttcctcgaaggtcctttaaataatgtaaatgattatgaatgtgtaactagttaatatgcagctacgaaaggattatcatgtagaggttaatgaacattctgctcttatggtttgcagggctttgctttctgtgcttttggctctcttcatgcttggaaacacatgcattgggattggaaaacatcctgactgttc

SEQ ID NO: 22448 - DNA, 1080 bp, Homo sapiens
acttgcacatgattcagtgggtgtgcatattaagctgggctcacctgtgtggttcttctgctagtcttgtgtgggctcactgctttggttgcagccagttggtggctgggtcagctttgttgtccagaatgacctcaccctcaagtctggtggttagtgctgttggttgagcctctgcctccatgtgctcttttgtccagcttactttctatgggcatctcagcagcaagaatggaagctgcaaggccacgttatgttggtcaaaggaagggccagcgcagattcacaaggtgggaagataacacccacctgttgagaggaggcgtgaaaaagaattaatggtcatttttaatgcactgcaatgactttattgaataggtcctacacacacaaaaaggaagtctccgtcctttatgttgactggtgagaatgaaatgaaatagtacatgtgatgcctggcagttcatctttatgttaggcattacttacaatcgtaaatcgtatgcatgtgagttgtaaaaaatttattgccttgcttcctttattttaaaaggatttttggtaaaggtatctttgaaattacatgaaacagacttaaatatagaagaagatactttgttcaggtgtttaattttggaaagaatactttaaatttagacataaaagttctaaaacactttggcatgtgagttttgagagagtctaaagcaaatactcaacatttttttatttttcaaaggaaactggacaaaaataattgttcagaggaaaagagtaactagcttccattagaatttatagttaaagtatatagtaggaaataaccaagaaagcatacctgtatagctaaaaatctcaggtgaagatttgattttctctctctcttttttttttttcctgttggagctactctttcctatcagtcgggatggagatacctgctttatgcacacattgtatatctgtctatatgtctcatgtttttgaggcattccttgtgcacagaagcactgaactatatcattgtaacaatgccatggtttacagtatatttcatatgaatacctgaaactgttttct

SEQ ID NO: 22449 - DNA, 2051 bp, Homo sapiens
tactgaatattttgccatgaccatttagaaaaaaagtgtaatgctattgatttaattcaagtacatttaaattttccatgaggagtgttccttttcccaccaaattgcataaagcataacagtatagatccctttttcaagaatttttaaataaaatgtaacttttatcaatttgtttagattgtttaaaaggatactttgaaaaaaatcattatttcttgctttagtaactggaggacatctctttatctatatagaatccatgcccaaacttaatattcctctattttcttgattttagaggtgaaaagccaggcatccttcaagctagtggatctttgacaaagatgcattgcaaaacaatcaacaaacaatcagaaaggcatgctatgtgtgagtgatgatccctgcagcatatgccataggcttgttgtagaggagctgctcagtaaatggtggattcaattgaaacaagtcttttttggatgcttaatgggaagttgtagggtgggtatgatggactaaaaattatttctaaagaaggttatatattgtatatattccagaatcttccgtttttatcgtttcttaaattaaaaaataaaaatttaactctgtcccaggttaactcagatgttaacacttatatagaaatttttttcctctttccccgttaggcatctcacagtattttctgcttgtctgtttaggatgttaggtagaggaaaagagagtgatagaagattttttttcttaaaaaaaaaaaaaaaaaaaaaaaaaaactgggccaggcatggtggctcacacctgtaatcccagcactctgggaggccgaagcgggtagatcacaaggtcagggttcgagaccagcctgaccaacatggtgaaaccccgtctctactaaaaatacaaaaattagccgggtgcggtggcgcgtgcctataatctcagctactcaggaggctgaggcaggagaatcgcttgaacctgggaggtggaggttgcagtgagccgagatcacgccacggcactccaggctgggtgaaagagtgagactccatctccaaaaaaaaaaaaaaaaaaaaaagttcaatgttagtatttgctgtctattttaacttcttactttaaagtaaaattagcaaagtcttattgtttcaacctgatttaaattttatctcccttttttattatttaaaggttggagtctttatcactggcctcaaaggatgtagactttttttttttaatagagatttttatttttgtcagtcacttttaagaggattaaaaatgttgatccctttcatatttcctcgtccctttaaaaatattctattatgacaaatttcaaacatatggaagagtgaatcttgatcacctatctgtctgtaccctaatccgttaatccatttttttctgatgaatttcaaattaagttgtggacatctgtgtatttcacccctaaatacttgagcatatccctcatttaacttgatttctctcttactttctacaattttatgcaaatgagctgtttcccataggttctgtcttgatcttaatcctttaagggtaagggctaacttgtggttgtgttaatggtcttcatcgctgctgcctattttttttttttaatttccttaaaacaaaaggtactctcaaaaggcatattgcacatgattagcaagattcagaaggaagtggttaaagtttcttacatgccttatacctatgcttttagttcttgttttgtataaggaatgttgcatgaggatattggaaaaaaatttaaaattaagagttgaaggcggaacctgatctataaggatccattatgttgaagccaaagaagcaggtctagctattctaagtaagtaggctggagaggtgtttcttaactctatctgggttttgttttccatttgaagaaaaattattttaagcaattaccatttttgattactgtaatgactcctgtgtccaaaaattaattacgtttctaattattaaaatagaaaaaaaaatctgttcaaattttgttataaata

SEQ ID NO: 22450 - DNA, 1002 bp, Homo sapiens
tttcacttctttttaaaatataggtattttctttgtggttaccatggcgattacatagaacatcctaaggttataaaatgtattttgaatttataccaacttaacttcaatcacatacagaggctttattcctgttcagctccttcacctctttatattatttgtgtcacaaattatatctttatatattgtgtctccattaatatagatgtccagtgatgtgtattcatttttctttatcacatagaaaagaaaaaagtggagttacaaaccaaaatgacagtaatacttatttttgcctatgtgtttacctttatcagagatctgtgttttcatatagctttgagttactgtcttttcatttctacccgaagaacttcctttagcatttcttggattgcaggtctagtggtgaggaatgccctcaactcttgtttatctgggaatatcttaaatttcccctcatttttaaaagactgttgttttgctaaacatagaattcttggatgaagtattttgtttctctctcagcactttttaaatatatgtcatcccataaccttctgtgcttcagggtttctgctgagaaatctgataatcttgttgaagatttcttgtttgtgatgagtggtttttctcttgatgctttcaagattctctctttgttgttgttcaacagtttgattatagtgtgtcttggtgtgggtctgggtttatcctacttggatttcgttgagcttcttggatttgtagattcgtaccttatcaagcaatgtgtatgctcttgagtatctccaataaggcatttcaaaatacaaatttatgattttagtttatgatagatgtatatagctttaaataaccacaaaccatcttaagacgttatttaaaaaaaagagcagcattcacttatcccttttggctcacagttcccattcctcagatgtaattactttctgtttttggctatttttactctgctctttttattcatattttcca

SEQ ID NO: 22451 - DNA, 1044 bp, Homo sapiens
taatttaagaggaccatgtagcatttttacatgtcctccctgtctctgcttctctaatctttttgctattgttgtatcacaatttttgttgaatcagtattcatgcttagatattatgtaattccattttgttcttgtacaggcttttagttgaatttaactgctttttttgttgcatagttttctatgtgtctgtcattaattcagtcagatactttttttgttgttaaaaattttactgctggagtctttcattgtcttgcttcaatttggactggcttctctcctgatcaaaggagagccgtcttcctggtgtcttcttaccctgtttttgccttttatttatttcctgttttctgtttcccaaagcacccttttttcaggttctatttagtttgttggaatattgctttaagtaacttttgggaacctgctcggaggtacttctttgaatttttatgtatctgaataactcttatattccttatactcctgcttcttattgttaagtagactgtttagaattctaggtcttaagtaactgttgccctcagaattttggatacattattctgttacctcctgtctttaagtgttgctattgaaaatcttgatgctattttcgttttctttgtatataacttgtttttttgtttttaaagctttgagattcctttttggtccttattccccatgatctggaatacaacagtggtacaccttgaagccgtgctatggatcctttaaaatttgtttgctagtgcttagtaggccttttttgagtggaggcttaagtcctccagccgtgggaaatttatattagtaatttgaaaatttccttttcttgttgcctatttgtttgtccttgttgtaatttttgaagtgatttcttctgcatactcttttaaatcatgtattgactttaaaattttcctgtacatagtttcatttctggaagcactttttttttgttctttggctgtttctttgttacagcatcctgttcttgtttcatggatggagggtctttttttaaggagtatt

SEQ ID NO: 22452 - DNA, 1694 bp, Homo sapiens
ttataaactttggagcaggtaatttgtaatctggtcagatagctatatgtatgagaaactttacgaaattgctgtttgaaatacacattagcacacacttagaattgttaaaatgctaaatgaaatctgctactcgagaagttctatattattttgcttaaatgatgtaccatatgcaataattagtttctgtgaaaaatagggcaggaagcataaaagtttctttttcctagtgtttcacctataaattcttaggtctttttgattaactaatactattcattttttaaaaccagttttggatcttgtgatttttcttggtcatgattctctttctattttttgtatgatgttatttcagttctgttgcattttcaattttgttatttttgtaaggtcctcacatcttttatagaatcaagtatgataaatgttcactcatgcatatagatatattcgtgtgcatatgtataaatcctttatttttaaaaattacaataatacatgctcattgtaaaatattctgagtataggagtagaaaataagtgtgtattatgtggtttcaatttctggtctttagagataaatgttctctgaatttcttacaactttattattattgatactatatttatattgcatatggccaatatctttcttgcaaagataaaaaaattatcttctatattctacttatgtctgaataacctcaatatatagaagcagcataggaactgttttttgttaatttatttcaaaacatttttttgtttttgaacttagaattctagttttaaaaatactttattcaagatcttagtatttacccatggaaactaactggaaatttaaataatgtaaaattctagtatgtttgtttgatcttgttaattttcttccttgctagtaagcctgatactgtgattgcaaatggagaagatacgacatcttctgaagaggaaaaggaagatcgtaacacaaatgtgaatgcgatgcatcaagtaacagactctcatactccttgtcataaggatgttgcaagttcagaaccattcagtggtcaagtgaatagtcagttgaactgttcagtgaatggttccagttcttaccacagtgatgatgatgatgatgatgatgatgacgacgacgacgacaacattgacgacgatgatggtgataacgaccatgaggctttaggggttggagataattctataccaacaatatatttttcacatactgttgagcctaagagggtttgtatacttttaactttactaattttgcatataatttgaacattaagcattatgatattttttagaagagcaatattaacaatcattatcattgtggatagtgccagacaggaaaatcatcttttgcctcttgttctgaccaatttaagaagaaaaagggaaaaaaaatttagttagctggtattggtccattgttctctgaaacaatgcattgtttggggtctggaaggggatcagatttgagtggcaactactgtaacttcacctgtccttcattcagagagttttcttaagaatcctggagttaattatattgtggacattttggtgtgcttaggatgttgaaagtgactgcattagttaaatttttaattatgccaggttgttttctatggacataaaatgaatacttcataggcacaaagggaaaatgt

SEQ ID NO: 22453 - DNA, 1493 bp, Homo sapiens
gagcattttggaagaggaaccacaagaaaatcaaaagaaacttttgcccttatcagtaacacctgaggtgtgtgtgtgtatcttttaattctttatttcatatagtatctttgaccagttttagctatttaatctgaaaagtcataagattaaattaattctaggttttatactttcttggtactaattaataaaaaattaatagtcacaaacagtacaaatattgtgataatcaaatagtttattttttgataaacacattacttgtcttaacgttctatttcagcaaaatgggaaatttaaaatgtcttacttggcattatgtattacatttgtagctaggaaattatttcgcagtttattttaaataaattaccagtaggtcattttctgatagtgtaaggagcagattacattattctcttttaaataccttggctaagttaaagaaaaataatgcatgcatagcagataattacctaaagtctaatattttaccttgtaccagtgaaacttaactcttgggggattatggaattgttttataatctgatgaaagctgtagaccctgtccatagaaaaaatagtgcacactcaatacactttcacccaccacacttcttacagtttttggtggtggtgcaggggaggttaggaaatccccaaataaggatgtctgtgaaatataaggctattgatttcttcattcttgtgttttggtgcgtatttgaagttttcaatttaaaaagtatttaggaagattggggaacccatgcctggatcaaaccagtgtacacatttgtatatacaataagatacatgcatatatataaccttatctaaaaattccattgcttttactaaatggtattatactcagtgtattaaatggtaattggggatggagattggtagcatttagggacagtacatatgactagaatgttttcttcccctcttcttagtataatgatcttaggtgacctggaaagtatcttaccttatttgatagtcttccatactgttagaaaacaggtaatggatgttatcaggtaattgctgataaatgtttgaaaattagttttttgtaaggacttagtgtatcatggtacagctagagtgtggaacctattttttatttcacccttagtagctttgcattttgtatggaaatgtttaatagtagttgctatacattttttaacatcaaagaaatagttcatgattatggtaagtactttggaagatatccttttcagtatctttttaaatgctaaaatacctctttttcaaaggcattttaaatagaagaaggagaagaaggctctatgctcatcgtgataaagtggagtttttaggaaagtaagctttaagctgcttttaccagttgaactccaaaaataatgtaggagagagatggctttctttgtttttgtttcagtggtggggcaaggtagaagaaggtggctttttaaattatttaggtgttacgt

SEQ ID NO: 22454 - DNA, 1468 bp, Homo sapiens
aaatttacattttacattttgttttcttgcatgtatactgtaaaaattacttctgtttggtggtgaaattaaaacttaatggtgttggtttctctgaacaattagtattttggtgtagtagtgttgtctagccaaaaatctcgtgaatttacttttaatgaaaagaattgccaaatgagtgaatgggaagattttgtgggtgtcttatttgcattttattaccataacctgacttttgttttctaggctttttctggaactgttatagaaaaagaatttgtatcaccttccttaacaccacccccagccattgctcatcccgcactacccactattccagaacgaaaggaagttctgttggaagcatctgaagaaactggaaagagggtttcaaagtttaaagctgccagattgcaacagaaagactaggccctgtctaggaaatgggaatttacatcctaaaacctagttgttcatttgtttagagtatctatagcaaaataggttacatgtagtttgaaataaggtatcctgagttactttggcaacaagttcttttacccttacccgtggtatttgaaaaaaatcaaggtaactgtctgaatactttaatatcagcttgttttgtgaattctctgaatactgtcaacactcttatctaagtttgcctttatgatgcagtggcagcattttgaattacttttcaaagaatactgttcatatgcattgtttttgtgtttcaaactaaatacaggcagttttgtgccagctgtgatattgtgcataccatatggaccattttaaagaaaattttaaaatttcaaatagattcaacaattacattacttgctttcacattttaaaggcactttaaaaaaatctacttctcttgtaggttttgcggctagttggctattcaagaaacctcgcccctctgaatgtcatactgtaatctttaaggaagaaagctacatgaattaattgtactctatgggaaaatttctttggaaagatattttgtaaaacttttttttccaagtaaaaactttatgaaacttggtctcaaaaatgttgtgaactttatgattcaaaattgagtacagatatgtccttgattcatatgtatgctacatgtatcacacaacagatctggaattctttcagttcctcagatacttctcccttagtttttgcagtttcactgggattatgttttgggaaacaaggaaaggtctagatgcttaaacattttaaataaaaattccttacagtttcatcttcccaacattttcattctttaaggctactttcctactaactgaaataacacatttacttttaccacaattcctcaaaataaatttattctaacattgaaaataacattacaagttaatcattagcttgatgcatgctaaaatgtagcttttaaaaagcattctgcattagtactaaaataagccatcaa

SEQ ID NO: 22455 - DNA, 1036 bp, Homo sapiens
atagcactcgccttggcctcccaaagtgcagggattacaggcatgagccactgtgcccagccctaattaggttctatttattcatttttgtttttgttgcatttacttttggggtcttagtcataaattgtttgcctaggccaatgtctgggaaagtttttctaggttttcttctagaatttttatggtttcaggatttatatttgtttttaatccatcttcaattgatttgtgtatatcgtgagagatgaggatccagtttcattcttctacatgtggctatccagttttcccagcaccatttattgcatttattgactagggtgtccttttccccagttgatgtttttgtatgctttgttgaagatcagctggttctaagtatttgactttattcctgggttctctattctgttccattgttctatgtatctatttttataccagtgccatgctgttttggttactatagccttgtattataatttgaaggcaggtaatgtgatgcctccagatttattatttttgcttaggattactttggttatttgggctcttttttggttccatatgaacttcagaatttttttctaattttgtgaaaaatattgttagtattttgataggaattgtattacgtctgtgaattgctttgagcagtatgatatcgattcttccaatctgtgagtatgggatatatttccatttgtgtcatctgtgacgatttctttcagcagtgtttagtagcccaccttgttgtgatctttcacctccttggttaagtatattcctaagtattttattttattcttgtttttagcagttgtaaaagggattggattttttatttgattcacagcttggatgttggtgtacagcattgctactgatttgtgtagatttattatgtaacctgagactttactgaatttatttatcaaatttagaagtgttttggaggagtctttagggtcttccaggtgtaagattgtatcaatggtgaacagagataatttgacttcctcttttccaattt

SEQ ID NO: 22456 - DNA, 1030 bp, Homo sapiens
cctactctgacagtgtcttaaaactgtcaagtatagtctgtattttattgtaattactcttactgggaggactttactaatttgctttgggcattttatttaccctgcttgttgattgcctttccttttcttttttttttttttttaactgttgctcagacttaagtacttccctcttcctctactgatggggaagttacatatttgctatattttaatgttttggcacttgaaaagtatgtactattatcactttattgtagcgtttatagtacttggtttcatttgtgtctaacagctttattgaggtataatttacattctgtaacatccactttacagtatgcactttggggttttttagtagattttgagttgtgccatgttgaccacaactcagttgtagaacatttccattgttttaaaaacatcccttttgcctatttacagtaaattcctgttcctatccccaaccccgggacaccttaactaatatgctttctctatagagttctcttttctggacaattaatagaatcatacagtatgtagtgttttgcatttacctttcgatataaggtttttgaggttcatccattttttaaaaatcatgcatcagtaacttgttttttcttattgctgcatggtattacattgtatggatataccacattttgcttattcattcacaagttgatagaccctgaattgttcaggctataatcaataatgttgctatgaacattcatatatcagcccttgtgtgaatatgtgtttttatttatttagggtaaatacctaggagtggaattgttgggttggatggtgaattcaggtttaactttttaagaaattgcacagtttttcaaagaggctgtataattttatattcccatcagcaatgtttgagatttccagtttctccacatctttggcagcactgttactattttgtcttttttattatagcctttatagtggctgtggaatataataattgtattaatttacatttctgtagcgactaatg

SEQ ID NO: 22457 - DNA, 1005 bp, Homo sapiens
taccttgttgatgtgatagattacattgattttcaaatgttgaaccacccttgcatacctagaataaatctcacttggtcatggtgtataatataatcctttgcatacatttttggattcagtttaataatattttcttgagttttgcatctgtgtttattagcaatatttgtctgtagtttcttgtaatgtctttgcctgattttcatatggtaatgctgaactcatagaagtagggagtactccctgtgcttctatcatctgaaagagataggagagaattggtgtattttttttttttccttaaatgtttcatagaattcataagtgtatctgtctgggcctgcgctttgtgttttggaaagttattaattatttaatagagatagtcttattccgattgtctgtttcttctcgtgtgagttttggtagattgtgctcttcaaggaattggtccattttttctaggagtaccatatttgtgtgcatagacgtgttcatagtatttcttggttatccttttaatctccctgggatctgtaatgacattctctttttttatttctgaaatcagcaatttgtgtcctctctcttttttcttagttagcttgtcttactgattttatttatctaagaaccagcttttggtttggttgattttctctactgattttatgttttcaatttcattgatttctgctttaaatttttattcttctccttactttggaattaatttcctctcctttttctattcttataaggtgaaggcttagatgattaattttagatctctcttttctgatatatgcattcagtgttaaaaattttcctttaagcactgttttcactgcatcccacaaattttgataagttgtattttttatttttgttcaaaatattttaaaatttcttttgagactttctttgatccatgtgttacttagaagtgtgttgtttaatctccaagtatttgggagattttccagctatatttgttattga

SEQ ID NO: 22458 - DNA, 1046 bp, Homo sapiens
agaaaataatttttaaaaatgttcctattgcatactactctgtggcataaattatttaaatgcagtgcttagccaaactaatgttacagattagatgatgaactgataacgtcatatacagtaagttaaagacatgcaatgaagtcgttatttacttatggacaactacccttgcaaaacaaagtcaggaaaagtgggtgatgttcaaatgaggccatttgaactgtagcttcaaaataatcccctttaatttcattctctgcatctctaaattctggagaaagaaggaatgtcttcatcatcagaaggaccagtctcctgtttataaaatgataaagaaagttgggcagctcctccatcataagcttgctcttctggtttttttttttttcctttaaataattgaactgttacaggaaacattgttaaaatcttaaggttagggcatgctttcatttttttttgtctaaagattactctgcaccctagacaaaggaaatatttaaactgttaaatttgaacaaagatacagtctgcatatgacttctctgaagccctataaaaattctttaaaattgcctattcactcaaatttactgagtgtagcaaaaatgtcaaaggcataaagtcagagaagattgaataaaataatgcagaaagacagattagtcatgcacagacccacacagcctttcagagcacacaataccgctctttattaccgttctatctttacaaagactacgttcaatacatagaagatgatacatggccagccatgtcatctgcctgtgattccagaactcatctatctgggcccttttcacaatgacattgatgagagatcgcagtgttttcagagcattgttttatttatcatatataatggctggtgaaagaaataggaattatgtcaccgatagcacataaaagagttgcatagaagattctgtgacaaagtttggtaaaacccagaacaaggaagctcatggaaatgttcttttctctgtcttcccccactgctgtgtcttctccccctccgttca

SEQ ID NO: 22459 - DNA, 1098 bp, Homo sapiens
cctggggcccttccagggccggtctgggtctctgtggaatgtgcgggctcaggaatcattgttcctggggctgttgtcacagtgtgtcaatgatattcattgaagaacatctctttgaatgagctaagaatgcttaaagagaacagtagccggccgggcgtggtggctcacgtctgtaatcccaacactttgggaggctgaggtgggcagatcacatgaggttgagagtttgagaccagcctgaccaacgtgaagaaaccccgcctctactaaaaatacaacattagctgggtgtggtgtggtgcttgcctgtaatcccagctactcgggaggctgaggcaggagaatcacttgaacccaggacacggaggttgtagtgagccaaggttgcgccactacactccagtctgggcaacaagagcgaaactctgtctcaaaaaaaaaaaaaaaaaaaaaaaagaggacagtagccatcggttaaagacatgcacctcttggttgaaacagactgatcagtcccagaaaatccctgctaagcagtcagctgccgaaagcacctgcctggggcctggaccctcgccaaatgtcaacatgatgttggggaccaacaggaacactggaagcacagtgttgaggagactggacatggagattgcctcaagctgggtttctcttggaatgcagagcctgaggtcaggcctgagggcgtatagcttactggggacatcatcccagttgatgggggccgagggaggtgggcagaattgtctaaggagtcatataaaatgcagctctcaagtgtccatctggagaaacaaagtggggactcatttacccattggtgccgtccccctaggtcgaggtgacccccgagggcatggattcctctccatactcaggttgcccacatgtgctctgcaagagatctgggcatgggctgggtgagtgggtgagagggtctctcactgcccctggcccacgaggggtatccactgcagggggatgcggggtgatagtccatggagggtgagaagcagtgctgcttctgcctgctcaggggctcaggtgattttggaggagacgagacattccaggcag

SEQ ID NO: 22460 - DNA, 1027 bp, Homo sapiens
ttttgatctttgagcctcagttttctcatcagtagaactggactaattctttctccctcataaggtcatcaggattaaaagagaaaatgattaaggagcccagagaccagctattcaatgaatggccagctactcttattacttgtgtaatacatgttgttgaatattttagaaatagaagccccaccaaaggctgtgggcttcagtcatctgcagagccgggtgaagaagtgccattcctccttccttcctggctggtctttggggtgatgtacctgggaatccaataactattggctgattgatttcctatgtatctgaagatgcattttaaagggtcagctgagttatggaggggtctggggtctaagtcttcactaaacaaatattctcactccaatccatcaaatgttagtaccatgtatctaggccacacacacacacacacacacacacacaatcacacatgaaaacacatacatgcacacaagtgtactggttggttgctggattcctggtagggacattataaactgtgctttccatcttttccctacagccaaagctaaagatcacaaggaggtcccttcattcctttctttcttccgtcttttcctccctccctccctttctcccttcttcctccttccttcctatctgtctctctatctatctgtctgtctgtctgtctgtctagatatataaagtgtatcctaggtaggatcggcactgtgaatgagaacagaaatgctttgaaaccattgcatcaacacaatagcaaaatgaaagcagtgatgttctcctagtttccatgttccaaattaaaaaaaaaatatatatatacacacacatacacatatacataccagagactcccctaatttgcatactggtgtatattcaagtgttgatttcaaagcagcctaacacttaagcatgaagtataaaattaatgagttgaacctgtgaccactgcattcaagaagagtcacccaagagagaggtggggagtcgaacagagctcctt

SEQ ID NO: 22461 - DNA, 1046 bp, Homo sapiens
agaattgcttgtgaattgtgtttctgccttgttttgatttgtttttcccagccaaaatgtggggctggaggcaggagactgtgtcattcagaatctgtgcctgcttccccacccatgggctgtatctgtgtgtgccccggctgggcgggtggacgggaggagtcgcgggggaggcttggttcctggggacatgtggggtggcgccgacagctccagccgggctcaggtgagtcacggctgcgctttgagatgggtaattggtggcatgtggtccgtgagccatgtgtgagagcccttccttagtcataggaaagggaacaagcgtcgcaaataaaagcctcatcagattagtgagtcagaaaagacgctaatcccaacccgatgcttcatttctactttttttttccccttccaaaagcagaagctgttcctgttctttaagaaaaaaaaattaaaatcagttttctaaaagactgatttaaccacaatcaaaagtggaggggggtgtgggccgtgtcactattgctgtatgacgattagcatgaagatgagttgcactttagccgggctgaaacttgttcctaacagaatgttaaatacttagtgaaaagaaagattatgtctatctagttacaccattccttgatatatgctccatgtcagaatgccattgtctcctgggtaaagacggagagttcaaatacccactatctctcccctggtgctccgaatgctcttctttgaagtttttataatccatctgtcatcttctagcaaggagggcacatgttctgtaccactcaattacagaattctcctttgccagctccaatgagacaggaaagaatgttatgggtggttgagagaaactgtcagatatactaaattcctaggattcatacgcacggtgtttttccagggtaggaacacagcccgccttattgttcaagtgcattagagatacagttggcattggggtagagaacctttgattttttttttttttttaaagtctcttccagagagttgtcttaaatttgattgtt

SEQ ID NO: 22462 - DNA, 1044 bp, Homo sapiens
gccagtgtttcctgaacctccttggccatcccctggggagggctcctgcacccagcagaagtgtggctggtccatcctggtgagtgttttattgagaggagtcccaccccctcttcacatctcaggctgctggtgggtgcacttctgcgtctcattggcaatgcaattactggcaccatgggaggtctgcaggttcaaagctagtgatgagaaatctagttcaccgctttcagaaatacgggtttggtttaggtggcgatggtggtgcttcatcaaagaaaaactccaccaacccataaaagacaaataagaacacagagtctggtgctcctctgttagcaggagactccaggtgagaggctgagcctgcctggctggtctcctcattgtcctctcttcctccttttccatggcggctgcccaggacataggtcctccaggtgcaggtgggaagggacagtcatggagctgtaccactgagtttccctgaggcatccacatgacaagtgcttgtaccttgtaactctgggctgatgcacgggtcaaagcatggggcttgtgctgactcagaggccatcttccttggtgcctgatggcagtctttgctcctgtatttcaaggctgcgggttttggggactgacagatgggcagcaaggcagtcctgtgcttcctgaagtcagttatgccactgcctctgcgtgtgctgccccaggaagggagggctcatccgtggttggaggcttggagatgcaatgtggacttgtcttgctggtgttcgtggaatgctatggcatccttgggtggccaggtggtcagagggacctgggtggctggtggaaagtgaggggcaacagtgtcgcctccctgcaatggtggggacatagggggacctcaccctcagggaggtactgcctgactctgcgatgcccacactgcctccttgtttgtgtcccagtggcagatgggggctggtttcctcaatatttgggactttctgaggacgcctccaaggaggatgagatataatttctgccctcgtggaa

SEQ ID NO: 22463 - DNA, 1041 bp, Homo sapiens
gggttgtcacatgcagaatcctataggatttgcacgaagacccgggtggtcctcagacaggggaagtcaggtgtctgggtccatgcggccactgaacagcagacacaggacaagaactcagttctagaatgcagtctgtggggcactctcaagagaaagtgtcctctttgggagtctacaatgctacagggccaagggtgagcccacgagcctctggcgtctgtgccctgttagctggtctcacggactccagacacctccaccttccacgcattttctcttgttgggccctctatatagaatgtcagccccatcccaatcctccagataaacccctcaactgcccccagggcctgcaagcagagagcaatcagtatgtcctgaatgggtgcagcagacgcagtgcaccagatttgactggcaagggaggggaagacgaccctttcagactggtggtggccttacgtccttcatccctttttaccccctgctgaactataaactctctggtggcagggacatttttcttgtttttacataatttttcctgacattgggagctagaatatcaatgtaagaaaaccttcatagacaggggtgctcaaagcattggtggttctggctcaatggattttaggcacacacgttttcatctccatttggcattttgaagctcccaggagctcctagatgggtgatgggtttctgaggctcggctggtgtccagggtctcctgggatggggacagagcacaccaccttgtgtctccactgctatacacctgctccatctcccagagatgaccccagcttctggagggcaggcgccttccttgtcaccccaccagttagctcggtggctggtgcatctgtggccatggcaggctctatgtgatggcgagagaggcagggcaagagaggcagtgcgggaggtgcagggcaggggccttggcgctgcctccaggtttctgtgatcagctaggttcctagcttctctggagagcagacagcctggggggttgtttcctgaaagggaatcagg

SEQ ID NO: 22464 - DNA, 1416 bp, Homo sapiens
taaacacagtaattggcatggaggtctgaagctttattttatgatattaaatcattcttttctggaacagaaatctgcaaagtataccattcattatgctaaggcctgtattaacaagggctctggctgatggctggtgacatcttggagaacttatgtagcacatctcaagggaggtgtcagccctcacctgtggaggtgagcattagaaccaagagcagaatccaggattccatctgctgtgtttcagggacagaagtgtatggtttgtcattgtgagcttggtgcataaagggtaacattaccctaaaaatactcacaatgtggactgagatgaacttgattgctgtggcattattttagggggacttggcgctttctccatgtaatcttgtgaacattttttttttcatgtgaaccatgattttcttgaaacaaagaggattatcagtcataagttctgaagactgaaatggggtgggagaaaggtttagaaggagaagattttttaaaggacttgcaaagctggcactcaactctagctggagagaaattcttgagttgggcgccatcttggttttgttgctccagggcagtgagggaggggatgggagattttcaggtcctcagagtcctcatgtgttccataaaaatgggttcctgtagcccatagacagctactagagggagttaaggcctgctaggaaagccagtgagagttctctaaggctccaagttctaagggttgctcctctccagacagcttgggaactgcaagccactggaagtcactctgtggtcgcacagagctctgcttcgagtccagcagtctgtgttttgtgcggtctcactctaggctatgttcccaagtggagcaccatgatttcctgtgaagggtccatgagatagatctttggtgatgaggccagcttggagaaaatggcgcttgagaatttcttatgatgctattcaatgacagtgtgattcgtggcgtccccccagccctgtcccctgcccaacttaaccacacttggcaagatctctgaggagtcctgagaagaagagtcctcaggcaacagcaagactttcccaccctggtctaggaaaaaagttctggaaaagacaagaagtccatcagacacaaaagaagacatgtaaggggaatcaaaacaaacaaaaaagctatgaaaatgcagagactcaagaggtcgccaagcgaatgaaatgacttaaggagtgatatgtttgcttcatctttctggttgctctctgaatggtctctgataacacattttagctgtagaaatggggaaagggggcaaagacaaagttccgggaaggttgcaagagataactggttatctaactggtatcccgggggccagtgtggactcgcttctatgtctaaaaatgatt

SEQ ID NO: 22465 - DNA, 1023 bp, Homo sapiens
ctgtgcccagaactgtgtatgacagccttcaaggagcttacaatgcatgaagatggggtgatatcaaacctcatatcagttacatttatatttaactggtgtaatatccaagaacaaggaaggaaccgggcaaaccacacgtaggtctgaaaagagccaatgaaatgatgcagaccaaggctagggcgggcagatgcctttgcaatggaattagagtagttttaaatatgggctaatttcaagcaattttaaatatcacaagattccactagagcgaaagactgcagagaggccttggagtttgagaaaacagggtttgctgagcttcagtctttgtatccacctctgactctgtgtgcaggctacagcatggggcattgggctaacaagaggcacattaggtgtgtgtgtgtgcgcatgagtctgtgcatacacgtgtgtttgcatgtgtgtgcatggcgcacatgtgtgcgcttgcatgtatatgtctctcttctcttagggtgaggatctgtagaaaattcactgcaatgtacccgcagccctgggtcgtcgtgtcctgttctctgtgggccagtaagcttctcttctaaggtcagctttcttcacccagggccactccattttcagatagactggatttggagagtgcctttggggcagtttgctcccttcttttatatttgatattattacagtttttgtaacccaaatggcattggttttaacaaataaacaaatgctaactgccaacttctttggctggatggacatgaatcggctttagcaagtgaatagatgacatatcaaagaatatgttgactaatcccttccctgtctgagagcgttttccagatcgtagacaaatacactgcaggcatttaaaatagaagtccgggcatggccacaagtgtattctgggagttacagggtccgcacgctctacgcaggtgagtatttctaggagatgccgggaagttggggacacccggaggcaccctccgatgttcagatgatcgtggc

SEQ ID NO: 22466 - DNA, 1051 bp, Homo sapiens
gagggcagtttaaagaatgaagtcctaagggttttatctatatttatatctcttgttaaaccaaactcttatgtaaatgttacaatctgtaaataactagcagggctgccttcttaaaggcaagattgcatctccatttttgagatttagcaaaattattaaatggcagaattgactaagatgcaagtatatttggaacgagctaataaacattaatcaatatcatcagctgtatttgtgtagctatttcagggtttaaaagtaaaggtttttgttgaatttctcataaattaaaacaattaaaatataaaagtcattacccttagtgatgttttggggaaaaaaatggagatagctttgtgtgctcttactttttatagccattaatgtttcagtaaaccttgcatgactgtatgcaatttagattattttttcatccttttgccattggacaggaaggaaattactggctcccatcagtgttactggcaatccccatgttctgacatctgttcctctctaaacattttaccaaccttgatgaaatgtagtttggtgtcagaagctgacttgaagaaaaaaatcacatgattaaaaaaaacattgattaaacaccagaagtcacttcccaataactgtcaatattttgatggtcactgtcatttatttttttcttaaatcctgataaatcgtatagaaatgttaatcatgtttaatatttgaattaaactgaattaatggcatgtcatttttaaatagaagtgtagtggattcattctagtccattttaatcagggtctttgggctacgattcatcaggaatgttttcagtctttctcagagaaaccatgtaacgcactttctttgagcaaattagacttcctcaattctttgtcctctttatctcctggttttcagggaaaaacacacagcatcttgggggtcaggacctgccagaatgaggaactggggtggagcagaggggcaaggggttctctgggctggatgtccacgcagcccacggagcccccgtcagagagccctctgggag

SEQ ID NO: 22467 - DNA, 1032 bp, Homo sapiens
aatggtgatcgtgatggtgatgattgtgattatgatgatgatgatgatggtgattgtgatgatgatgatggtggtggattatgatgacagtggtgatgatggtggtgatgatggtgatgataatgatgatatgatgataatggtgatcgtgatggtgattgtgattatgatgatgatgatggtgatgatggtgatgattgtgatgattgtgatgatgatgatagtggtgatgatggtgatggtggtgatgatgttgatggtggtggtgattataacaatgttaatggtgattatgacaatgatgatgataaagatgattgatgatgatggtgatgacaatgataatatgatgatgacaatgataatatgatgatgatgatgacaatgttgatagtaatgatggtggtgatggcgatgatggtgataataatggtggtgatgatggtggtgatgatgacagtaatgatgatgaagatgatttgatgatgatggcgatgacaatgatgatatggtgatgatgatgacaatgatgatagtgatgatgatgatgatgatgatgatgatgatggtgctgctactgctgatgatggtgatagaccttgtggtatagtggctaaaagaatggagccaggtagtctgggactggatcctagtgctatcacttcctggttacttaacctgggagaaactacttgacctccttttgccccagttccctcatatctgcaggggggcaatgctaatagcatttcacagggttgttgtaaggatttgaacttggaccccaccaaggaggggctggcatatggtaagcatgattaacatgctaactagtgagtattagttcttattggttattatatgattgttgtcttattattttagtagctgtgcaatcttgggcatgctagttaacctctttgagcatcagtttccctatggatgaagtggggacacagtgcctgctgcagaaggccattctgttgctggtggcatgtgtgagagtgcagcacctgccagcccaggttgcct

SEQ ID NO: 22468 - DNA, 1035 bp, Homo sapiens
aaaataaacctcacttttaagatttgaccaataaaaatcattagcatatttggatcagatgactttatgtatacattgaacttctccatgcaaattgtccttggaaaagcctggaaacagatttcagtttaaagtcaaaactcctcttctgtcttctctttgtgtttccagtacagtgatatgatgatttattctggtttcatctgttatacctgcaattgatctactggtgatgggattaaatttatcattttagatgtataagtcatagttagatagccagaaaaatgtttagttgcataaaaattcccattgtttgctttcgacacacagtgtttgatttttgccgtagtcaaattgctgtagtgcattatttttactccaagatgtttatttatttatatatttatttattttgctatcttaaatggaatcattttggcccattcacaactgctatctttaaaaagatattttcttgagatcatgtattcaaacaaatgtggacttggggttgtggactctgctatgtgctgaggttctgctgaattagacatcacataattttctaagtctaattacagtatggaagattccagttttatgttacgctttttgtacaggaaaagacaaactgctacaaagacctcttcagtatgaagctaacagtaaaaccaaactcattttaaaagaactgaaattgaaattcataaactcagtggaagttaagttgtaactacccagcctgggaaattctgaacctaagataatgctgcattttgaatccttatgaaaataaaaacaacccaacaacaattattgaggaaaaaaactctagcatgagtttaattttatccaactttattggcagcttattttgaactaatgtgcaataaagttgccaagcacagcaattgaaagaagtaagaaaaaaacatttttggttgttttcttacactggtttgttctaataaaggcggtagagaggtcaacacctgaacagataatttgggtgtctgtctcaatcatgcctgg

SEQ ID NO: 22469 - DNA, 1117 bp, Homo sapiens
tgggggagaagaacaaagggacttcccgctcctgccaatataatcatatcaatccctgtttctttaacaaaacaggacctcttaatggaattgtgtcttcaggtgtaaatagcattaaaagctgcttctcctctcctctttgccctgatagagcacaaggagtgagaaaataaagtggaggttgtcagaagtggcagctgcttggaatcctgataaatataagcttttattgatctgatgaaaatgaaagatcccagtgctaggcagtatttagcttcttgtctacagcacgtcaccggtggccttgcatggggatagatttccattctcatacaccggatttgatttcatctttaaccttttccgttgaatttccttgacctctgcatattgctgtgatttggtgaatttgttacatttcactttacatcatttctttctatatttccttttgtgatagggaacggggacgccccctcttgcaatctgtcagtgcctgcaccaactttatcctttctggggcattttctcaccagactgacagtccttaagacaagtatgcagttaagctgctaaggtaagtcttacgatattagaactccttcttcttcccagacatacctcatttccttctgccttgttgcgttgaccaaacacaaatctaaaccaaatagctcctctgtctcctgcccccggccaggggcttccttgtaccctctccccaacccagataggagtcccgtacctgcccagtaagctctcggtgagtggtggctggcagggcctttccccatgggggaggtattcctttgtggtttgggtgtgtttggggatgggtggggaagaggcacaaagagatcgtgaaaaaatgttattttctcctctgtggcttaaggcctttctgaagttttcttctgagataaagatggggcttcattgcaaaatcctgaggtgctgctaacatattctggttccaagaaagtgctgctgttattttgagtagttttgatacaaccaaatcaaagtgaagatttgaaatagcttttctgaaagcccaagctgaagtcataaattattctgcaccatgattcattctgatagtaaaaccatacttctt

SEQ ID NO: 22470 - DNA, 1086 bp, Homo sapiens
acggtggaaggtgaaggagaagcaggagcatcacagggtgagagaggcggcgagggaaggggtgggggaggtcccagactcttttaaacaaccagatcttgtgtgaaccaactgagtgagaactcactcatcaccaatgggatggtgttaaaccactcacgaggcagggtctcgttgttttattttattttactttttcatttggagacagggtctcactgtgtcactcagttggagtgcagtggcgtgattttggctcactgcaacctcgacctcctgggctcatgcgatccccgtgccttagcctcccaagtaactaggactacaagtgcctcccaccgtgcctcgctaatttttgtattttttttgtatagatgtggttttgccatttttcccaggctggtcttgaactcctgggcttaaaccaggggtccccagcctctgggccatgggctggtactgtctgtggcctgttggtaattgggctgtcaagcaggagctgagctgcaggtgattgagtgttactgcctgagctccacctcctgtcagtggctgcattagattttcataggatcccaggccctattgtgaactgcgaatgtgagggatctaggttgcgtgctccttatgagaatctaatgcctgatgatctaaagtggcacagtttcacccgaaactctcaccgcctcccaatccatggaaaagttgtcttccacaaaactggtccctgatgccaaaaagcctgcggacagctggcttaagcatctacctgcctctgcctcccaaagtgcagagattacacatgtaagccactgtgcctggcccagagtgccactcttaagcactgattacataaacattgaggcaaccgttggtaactaaataaatcacacacatcagacaatgatttcatgtcccaccacaatgtagatttccagagagctctttgcaaagattggaggcagaatttcagggcatggttgtccagccttctatagctttatcctttagaaagacctcatgttcaggttgggaggcccagtgacttccagaaggaaaggcactcagagcctatagaaccctcct

SEQ ID NO: 22471 - DNA, 1032 bp, Homo sapiens
ctgttgcctttctctcgattgaggcttatagtgactgcaggaagaaagatggaaattgggacaagctaagtttggggtgtccagaaagtgtccagcctgcacagggtgcattgcaggcagtcccagcacgctctcaggccagggcatgaactgtatacaagcaacttggccttaaggtaacagcaaaaagtgatgactctttagaaaagaaaaacaccctttatattcatcagggtcatatgcgtttttcttttcatatgtatacaaaagaggtactttgggtgatacaaggggtatatgccaatgtcaagagcaggcaagaacaatggaaaaattagcagattcatcagttctcctgcttatacttcagttccaagagtaaaatgttagtttgttcaactctgcgctttacgccttgatcacagtgtgaaaagtgttgactaagcttagcttcctggtcagagggtcaagacccgtggcttttaaacatgcttatatgaaatccaaacattcatggtcactagtgatctgaaatcaaggcacaacttatgaaatgaacacgtaattatcttgtttactcagggtataaatagagttcatgcattttaaaatttttcttcctgaaaaggacttgcgccagcatttggtctttagataggcatgtgctctctctctctctctgtctctctgatgctcttgttctttctcttcttcatctttttcctcctgtccctgttcctccccaaactttccttctcccctcccctctctgttgtctttctctcttccctctctcttcctccccctctctctcctttagaagggaagggacttgctagtgcttgttgcccctgcaagaggcaggaacagccattgcagttctttctaggagtatttcctgcttcccacacagctttggtggggggaagatgctgcccagggaatccctggtgtgcttgaacatagcattgccacttctatgaatgcaggcaagggccacgaagcccacgtctgcttcagacaacccagctg

SEQ ID NO: 22472 - DNA, 1050 bp, Homo sapiens
aaactaaagtgagctgctatccgctttattgaagttggtgaaatgcatacctcctgcaaacttgcagctctagaaagaagacccacttgctgtcttccacagcctccctgtctgctgctgcactcggctgcagttttattgccagagtctccaagtgcaaggtccagctgctctttgtccctgggcatgctgtccccctcgttcttcctgtgctcttgacaacggtgtctgcaccaggcttttgatgggaggctgctgttgccttcagggatgggatggtcacatagtaggctctcagtgaacatctggtgatgaccgtaaatgtaatctccacttggccgaagaactcatgggaattgaagggtggattcaggcaatttaagcccttcagcattcccctctacatttttttctttcctttcctttcctcttttttttttttttttttttctgctgttcatttagaatctcctcatcacggtgcactatttgttccatcccacgtttcttattgctagtcttgcaagggaagatggtaggtagaagaactgtagcgtaaggccagcgttgcccacgcagggcctgcctaccttgtgctcagacctgggttgggcacaaagggggccatcctgccttcaagaggcttctagtctgggcgcagagcccagactccccaaggaaatgtggagacagccttggtgtagattctgtatttggggcaggccagagggggacactgttttctggcaccccagcatccctggaactccagcatcctcaactgcaggccacttgaggtagtgatggcttagcagtgaggcgcatggcatgtggagacaggcagtctggggttcagtcccagcaatctagtgatcagatgtgaaactttaggcaagttatttaacctctctgtgcctcagtttcctcaaccataaaacgaatatgatagtagtaaaactcactgatagagtttgagaattatgtgaaggcacttagaacaggactgagtgcccaggaagtaccacgttagttaccattgctgtttgtttc

SEQ ID NO: 22473 - DNA, 1045 bp, Homo sapiens
ctgggatttaggactcttaaccaaatctggttagtcctccctcttatttccaacaagtttgacttgtatagaagtgcgattaaaataagcatttaaataaaaatctggatacaatgggtattttattattacctgttaaagagaaacctgcaaggtgaaggagagagagagaaaaaatctttaagcccttaagtaaagaaagaagtacttattaaggcttctattaagaaataactgcaaaacacggttttacaaatttctcagactgcataacaatgtcgcaaaacttaatttgcatcacttgattcttttttttgttgaaaactgggtcagtagggcctgagaaactattttttcagatcttaaccaatgaattcttctttataaatcgctgctcttaacatgatagtagttctgaattcatcataaaaaacctttttacagagcctcttagaacagatctctagaagaaggcttacaatgagtggcagagacgtcctttgttatctgatgtaattctttgcaaagaaggattgggaacggagtggctgtttaaaaatgtcttgctcagaccgagatgaagaaggggtcaagtttgcaatcaaacagttattgccgagatgggcgactgtcactggctaggctaatgtgggatgcagctgtttgttatgtgagcaaaagaatgtttgaatcagtgaacatgtgaaaatgattccagtgaaccagaaaatgtgtttgttctttggctctccaaactgctgagaaccaagcttaagatcaactgcgaaaactaggacctctgacaaattgagaggtcatattttctaacagaaaatggacaaaactagtcacacagatcacttccccatcttccccctttgttttatttttgttttgttgttgtttatttgacttaccagtaatttcacaccgtggtcaatgtcattcaatgtagcctccgtgtacaatgcaaagagaaactgtttggaaagcagcagcttattaattttacttttatggcatttagaaagcggggtggctgttt

SEQ ID NO: 22474 - DNA, 1013 bp, Homo sapiens
gtcagaggcccccgtgtcttcccctggcggccacctttccgctggggcccaagggtggtctgtccacttgggacgccctgctcgtgccgggatcgccgttgctctcagatgctggttcatgtgcggctgtcacatcatcctcctccttccccggagccggatgcctaccagcagtttctttttataaacttcccattcacttggtagacttgtatcatctcgtgcttaggagcgatgatttgggaacaatcagtaacacttcggggcttttaccatctttctgacccctttacatggagccataaatcccgcttctccggggctgcttgatgccagtccaccgtcacttggcatttcagaaagagggtacttgcacaggctctgaaagtcttcagactaggagtgtaacatcagagatgtgtggcataaaattgcagaggcagagcaccctctctgctccagcacttaacaggcaggacatggttttgcttgtgagggattagattcgaggccgcggagtcactcaaatgtgtttctctggcggcctcacttggcccatctgtgggatggacaccgctgttgcctgggctgcccttctgtttccaacactcctgcccacggagcttctgaggagctccatgaagctctcctccctatgcatgttagcgcaagggacggaacagttcatttaaacctaaatttaatggaaataaggaaaacatagattagctaaggacaggttacaatgaggcaaggaattaagcggtcaattttcaaaacagagcttgaagcattagctgcgtgatttccattgactcgaatgggaggttccaggctcaggtcttgaccaccaccttgggtgtgttggggtgggagttagtaatttgctttgcagacagccacaaggtgtcccttgattgatggtttggccagaagcaggtatcacgagcttccaggatctgactcttacccactcccatgcttaccatgcactcaggtagctgggaaatgat

SEQ ID NO: 22475 - DNA, 1012 bp, Homo sapiens
gggaggaggaggttgcggtgagccgagatcaagccattgcactccagcctgggcaacaagagcaaaactccatctcaaaaacaaacaaacaaacaaacaaacaaacaaacaaagtttctacttggtctcgtccacgagtcccgttcactgactttatgatgctgttgttgttcaatgacttcactattctttttttcttactataaagtaattcttgttcatcttggacatttaagagatacagataaataaaaaataaaaaaaattaaatgtgtatgcctaccaccactcaggaataatcactgtgaacactttttttttcactaaactagtaaatattttgttatcgatgcatagtttatgtatagattttagggtacctgtgctaatttgatacattcatataatgtgtaaagatcgaatcagggtaattgggaccttcatcaccttaaatatttatcttggctggatccagtggctcatgcctgtattccaacactttgggaggccgaggtgggcagatcacttgaacccagcagtttgagaccagcctgggcaatatagcgaaaccctgtctctacaaaaaatacaaaaattagccagagcggtggcatatgcctgtagtcccagctacttgggagggtgaggtgagaagatcgcttacgcccaagaggcagaggttgcagtgagatgagattgtgtcactgcactccagcctgggcaacagagcaagaccctgtctcaaaaagtattatcttttctctattctagaaacatttgaattattctcttttggctattttgaaatgtacaatagattattgttaactctcgtcaccctactgatctatcaaactcgaggtgaacatttttaattcatacttttccagtcctttttatgcaactaaaaatgtagttagccaaaaagtacatacttctgtgtaagttcttactgaaatgtatgtcatattttttcttgtcattgaacatttcccaccaggatcagcaaagt

SEQ ID NO: 22476 - DNA, 1045 bp, Homo sapiens
aaatcttaggcttctgtccaccttgctgcctatctgtaagtaacaaatctgcttcacataacctgttgcatgtattctgtgtcattgaacttggacaggctggcacccatcctcacacatgcctccaggcctttacacatgcaatttgttcactcatatccttggagccgctacaatgtatcctgaagttattactcacctactaaatgtcctttgagtcacagctcaagtgccacctgctcagaggagacgtcccgcccatcctgtctggaaaattaaccccctgcccttctggcccatccttccttgatgatgcttacctttctgttttagctgtctctcctccagggatgaatgttcgtgaaatcaaactgaccagggtccagatctcagttccaccaggcaccagcttgtgtggccttcagcaagatactttctgaacctcaaatgtgctgtctgtacaatgggaaaacactagtttctagtttgtaaagctgttaggatgagatgatgtgcctggcccatagtagctgctcagtgaatatttgttccgacatggatgaaggaagtgagacttttgtgatgtctgactatttttagactggagaggaagagggaggcatatgggaaagaaggcatggcagagacaaaggtgaagcacattggtgagctaggtgtgtttagtggatgttgacgccatgtggttgggaatgtgctgggaaccctggaaaaggagactagggccagactgtggaaggccttggacgccaggcaaggatgacatcctgcaagctgggaccagctagaggctcataaaccctctttctctctctctctctctctgtgtgtgtgtgtgtgaaatgattagggggtttatagcatggctaccctgtgagcactgtgtagggctccatattgttatctgggtcttgttcctcacgttttccactccctcagacacccgcccttttccccacctcctccagcagacatttgtggacctcctgggtcccagacagcagtgtggccgggtcctgtgtgaact

SEQ ID NO: 22477 - DNA, 1039 bp, Homo sapiens
gttgcaaaagacatttgttccttttgatgactgagtagtattccatggtgtatatgtaccacattacctttatactttcgttgatcagtgggtacttaggttgattccatatctttgcaattgcaaattgtgctgctataaatgtgtgtgaatgtgtgtgtgtgtgtgtattgtgtgtctttttcatgtaatgacgtcttttcctttgggtagatatccagtattgggactgctaggtcgaatggtagatccactttcagttctttaaggaatcttctgttttccacagtggttgtactagttctcgtaacaggtaacagctttctgaggtagatactgattttatcctgcagtagaaaatggggatctgaggttctgaaatgttaagtaacttccccaatgtcacacaggaagtgctggagtctggatttgagccggtctgttttattccttctctgtgctcctaaccattgtcccatcactgtgaccccaacctacctagcctcacacacctaggattttgagaactctaagacaaacataattgtagttgtccaagattcttgcttttttttttctgccttaactaattcctccctattagttagaactaaatctagagttttaaaaatattccttcattatattctctacggtctggaaaatgaagttatcatcaagataggtcaaggtcttgtcagatgaatgaaaacaacagtaatgatgtattttcctccccattaggtctgatgcctcgctttccagccagctcaaagttctaatggacggtcagagtgaaatgttctatcagtcccttgtccagccccccagctggttgaattgggagttttgtgtttgcaggggaccctctatttccccatctgtctgggtgggcttcagcaagcttctagtatcagcatctccatagcgccctcctctgggtccaccccttgcttggtgctgtatgcttcttgctttgggcagacaggagcctggggacaccactccttcaccatttctgttaggtctggcctttggg

SEQ ID NO: 22478 - DNA, 1067 bp, Homo sapiens
gtgccctagaaaatgcgttcactgacagcagtgagggtaccttcaaaattcaagtcctatctgccctacctcaccacaccaaccaggaaattaaacaaccatggtgcccttccttagtgactacatttgtgggtgtgggcaccgtggttcttttctcttttctttctttctttctttttttttttttttttttttttttgcgtcagggtcttgctctgtcacccaggctggagtacagtggcatgatcatggctcactgcagccttgacctcctgggctcaagcaatcctcccaccttaacctcccaagtatctgggagcacagttgtgtgccaggcaacacaggtgactaatttttaaaaaatttcttgttgagatggggtctcattgtgttgcccatgctggtctggggctcccgggcttgagtgatcatcctgccttgacttcccaaaatgctgggattacaggcatgagccaccatgcctggcctcaactgtgattttaaatggtgggattgagattttttccaaaagtaactgaaccaagaaggccagagggacaaaacttgcaaatcgagttatataatgtatacaatatgtataatatatataatatgtaatgtatatattatgtataatatacaatatgtaacatatattatacatacatatataactacgtatgtataagatatgattataattacatatgtattacacatacatatatgatatatattatatcttatacatacataattatatgtataacatattataatatataatgtatgcatagtatataatttatatataatatctgtataatttatgtataatatatagctatataatatatattatttgtgcataatttatatatagtaacatatatttatatataattttactgtgtatatttaaggcacacaacatgacattatgggacatatatagatagtaaaaaggttactgtagtgaagcaaattattatatccatcatctcaaatagttatcctttttttgtggcaagagcagctaaaatctaaaatctaaaattcatttagca

SEQ ID NO: 22479 - DNA, 1046 bp, Homo sapiens
attgcctctgtactttgtcttttgctctgctgttggatgtttgggacatcacagcacaacccaaacatccttgtggcttactcatggaccacccagaagtagtcgatgcaagccctgaaaactctttcctgaatgttccagtctgcatcaaacaacctggtatcagctccagatctgttgtgttgacactgcttctggtctctgggaaacactaaggtcaaacttgatgaaagggcagaaagccaggccagggtggctggtctttctcaacccagacctctgatccattttagcatgtctcttccatcagtcgtaaggacttttaaggtcttaacatctcacactgctgtgttagtctgttctagatttgctataagtacctaagactgggtaatttataatgaaaagagtttgaattggctcacagtcctgtaggctgtacaggaagcatgatgttgcatctgctcagcttctggggaggcctcaggaaacttacagtcatggtggaaggtgaagtgggagccagcacttcacatggcctgagcaggaggaagcgtgagaggggggaagtgctatacacttttaaacaaccagatctcaggataacttactcactgtcacaagaacattaccaaggcaggtagtgctaaaaaccattcaagagaaatcttcccccatgatccagtgacttcccaccaggccccacctccaacattttacaattctctacatcagatttgggtggggacagagacccaaaccatatcaactgtttagtcttctgactcactggggagaatttgtctgggcttctgaggggattgtaaggtagtcatgggccagattaggacaagagcaaaactttatatatctttgcagtcaagaacaggacacattgctgtattatgcaaatggaatcttcttccagctaactctttcttgaagtatttcaaaactgtctagctctgaatttcagatattgtactcttagtctcacaatttccagttgatttcttttggcgattcccattttctacctaaactcc

SEQ ID NO: 22480 - DNA, 1054 bp, Homo sapiens
cacaggtaccggaagcggggctgctttggacaaaggcgagggaggtgcctgtatttcctagaaccaggtagcaaatgttgcctgtgtgtttcatcagaaagcgccccagttgggcactgtgcctcttggatgctgacaagaagatttgacgttacttctctggtccttaactttgtttacccagctgctattcttcccatacttaactctttcaccgtgcagaaagcaagggggagggaggaagggaagctccaggtgtgatttttcagaacaaaatataatgctgtgatttatttttaaaaaagagaataagcacgaggaaattgaatagcatccatttcatgcttaaccgtggttcacaaatgatagtttgtaattaaaattctgtctgcaaacctattctgcagaccccaaaagaaaacttcctcagaatgttatcaactctccaatttctgtaaagatgccatattttcagatttcaaagagaggatctccttttgaaaataaagaattgttgggtatcgtatgagcctgctaagtacagcattttaaacccacactgtgttgaaaaattcaagaatttggcagtgaccttaaggccacagataggataatgaaaaatgaggcgatgagggcagtgtctaaaggaactactcttttgttctaacagaagctttgtgtgtgtgtggcttaagcaagtggttcaatagaatttctttgaaacagaaacaaaaatgctaagagctggttacaagtactctggtcttcttttctccttaaaatgcaggaagaatttttacctcttctcatgaatcttgtctgctgaaatgtctcagtcttcatgttatgtttaccaaggccaggccagaggatctgataatttataaccattcctattgggttttatgtaataactttggaactcatataaagtaatgatccacaaactcttttaatgttcattataaaatatgaaatatttctcagaaccattgcaattatgtgaccagacataactgtttcacacatgagtaaatacagggaggtttaacat

SEQ ID NO: 22481 - DNA, 1571 bp, Homo sapiens
agcagctgctgcgcctggtggggtcgatgcagtcgtcattgctattggagagagtgaactgagtatccacaatgggccatcagtgcaagtgcagatttgcagctcagaacagttatcatcttcatctcctttagaacagagtgcagaaagaggagtacacctaagtcagtcagttaccctggaccccaatgaggaagaaatgctagaagtgatttctgatgcagaggagaatctgattcctgatagcctgcttacatcagcacagaaaatcatcagcagcagccccaataaaaaagggcatgttaacgtgatagtggagcgattgccaagtgctgaagaaaccctttcacagaagcgcttcctcatgaacactgaaatggaagaagggaaggacctgagcctgacagaagctcagattgggcgcgaaggaatggatgatgtttatcgtgctgataaatgtactgttgatattgggggattgatcataggctggagcagttcagagaaaaaagacgagttaatgaataaaggcctggctactgatgagaatgccccaccaggccggagaaggacaaattctgagtctcttcgattacactcattagctgcagaagcccttgtcacaatgcctataagagctgcagagttgacaagagccaacctggggcactatggagatataaaccttttagatccagatactagtcaaaggcaagtagatagtacattggcagcgtactcaaaaatgatgtcgccacttaaaaactcttcagatggattaactagtcttaaccaaagcaactccaccttggtagcactcccagagggtaggcaggaattgtcagatgggcaggttaagacaggcatcagcatgtccttactcaccgtcattgaaaaattgagagaaaggacagaccaaaacgcttcagacgatgacattttgaaagagttgcaggacaacgcccagtgccaacccaacagcgatacaagtttgtccggaaacaatgtggtggaatacatcccgaatgctgaacgaccctaccgttgccgcctgtgtcactacacaagtggcaacaagggctacatcaagcagcacttacgagtccatcgacagagacagccttatcagtgtcctatctgcgagcacatagcggacaacagcaaagatttggagagtcacatgatccaccactgtaagacaagaatataccagtgcaagcagtgtgaagaatccttccattataaggtaagcattggttcaggaagtctttcagaggaccttcgcatcttagagtgagaagggaactttgtagatctaatccaatcacctcattttatagataaggaaactgggtcccagaaaagtttgataagttgcccaaggggatcccaacttaccagtattaaagttgggactgttcagaatttctgctgtagaatccttttccctgcctgctgcctccttgacagcctctgtgttttagtgtgtatagtttaaagtgttgattttctgttgcaagagaattgtagggagtgtatagtggattgacatacgtttgacttaacgtatt

SEQ ID NO: 22482 - DNA, 1023 bp, Homo sapiens
gagaacagagcttttgcagatggtaggcccccaccccaaactttaactggggctccccgctgtgatcttattcttacccaagtatgactgccagatttcatctgcattattaaaaaaaaaaaagcacacacacagacacacaagatctttttatgtactagttaagtagcagtcaaccgagtttctggtaataagaatattagaatcaaaagatttaattagagctccatgaaaaggcggatgccacatccggagaattaaggataaagtgtactaagctgtgccgctttggttcagctcacttaaattgatatactttaaatgtctccagtgtggcacataatgtttatgggagataagacatattggggtgactttcccttttagatttgctaagaattaaagttagaaacgactacagagtgaaatgttttaccataatgtttcattaaattataccccagaaagcataactgattctagaatgcttctgaaagaactgattttgacaccactgtagcaccaaaattctcatgtcaaacagatgtcatccctgtaaaactctctgaaacaaaaggagtttatgatatagcatctgtttttgcagtagatggctgagctaaaacagttttgtttcctttttacaaaatagccctaaatgcctccttttattttaattcattatgtttccatatcccctttaaaggagacattaaaacgtctgatatgattggaccataaatccctaatgaaaggatgaagtaaatactactcagtagcaccacctgcagttaatatcagtgttggaagatgtcttttttagcaccgtcctaaaaagcaaacatttcaaactgtccaaatgagttaacattaaaattcacaattttaataaaaagattaaagtgtcagctcaaaattaaaataaccacttcagactttacagtattaatgaatgtttactagattttatgttgcagcatcttttctttgtggctcatgctttttttttagggttacatgcat

SEQ ID NO: 22483 - DNA, 1029 bp, Homo sapiens
gaactcctggcctcaagggatcctcccacatcagcctcccaaagtgctgggattgcaggcgtgagccactgcacctggctggtattatgtcttgtttgatttgttaagatgtgaactttaagcttgaatcttaggacagtaggcattttgtctagttgatacataggaaattgtctttatctgtcaattttatgttttcatttcatatgggtataaatttcatagcaattttcaatgccttagagttcatttcagtaatttggcagtaaggtactcagtattcagcaaaagatccttaaaacttaaaggcaataaaattttctatgaaagagtccatttttcaaaattaagctagtatgtgtagaataagtcatttaatttcattacttgatttttcccaaaagcaaattcagatatatatttcagaaaatataggcattctcagtgatagtgctaggcaatgcgcatgaactttcacccccttgtcaaaacttagcaggtttaactctctccccagattctgtagatatgatacaagtgagtgtgggaaagttattgtattaatctcaatgaaaacctgacagattgtgccataaaaggtcattgtttaatcccaaagtgtggtgatctgtgtatggtttcgaatatttaatatgtgcttaatttgcaaaccagcagacttacttataatcactcttcagaaagtacatctgtttgcagagtcttaaaactctgtggaaggtgtttgaccttgcctcagtcctcctcagtgtcttccttccttccttctttccttccttccttcttttcttccttccttcctttccttccttcctttccttcctttccttccttcctttcctttcttcctttccttcctttcctttccttcctttccttttcttccctccctccctctctccctccctccttccttcctttccttccttcgtttccttccttcctttcctttcttcctttcctttcttcctttccttccttcctttccttcctttcctttccctcccc

SEQ ID NO: 22484 - DNA, 1050 bp, Homo sapiens
gtatagcagtgtattactgtgcttttgtttgcatttccctgataatttctgagtttgagcatcttttcatttgtttatgggctattattgcccacttcttttttgcattgtctattgtattagtttggcattgttataagggaatacctgaggctgggtaatttataaagaagaggtttatttggcttatggttctgcaggctgtcctctgcttctggtgagggtctcaggaggcttccagtcatgacagaggtgaagcgggagcagatatgtcacattgtgagacatggagcaagagagaggggaggaggtacaggctcttcttaacagtcagatcttgcagtaacagacagagaactcattattcatgaatggctacaccaagccattcgtaagggatccatccccatgacccagtcgcctctgcccaggctttacctccaacattggggatcaaatttcgacatgagatttgaaaggacaaatatccaaactgtatcatcggctgttttcttactgatttgcaggagctcttcatgtattctgagtacaaggcctttgtggggcgtattgcagatgtcatctaactgtggcttgcctttctactttcttaatgatgtcttttgatgaacagacatttccagtttaatatagtcaaatgtattaatctttttctttgtgtttaggacttttgtgttcttatattctgaaactagttttgattttttgaaatagtctgttgagtaaggtagacgatgatacagaaataaaaatgtgtgctgattttcagggatggcacatcaactatgcgtgcttaggtattactgagcctcatttactaatatggcactaaagctaaaaaaatctaaacagaaaacattccagaaaggctttcagcagggggaatgacagtttggaatggaaatgataaggttgtctctcagtgtagtcagttattgtatgggatttgtataaatagaagtatattagaaatgatgataatagctgatatttttgagaagattgtttgtgggccagacccggtgtgct

SEQ ID NO: 22485 - DNA, 1023 bp, Homo sapiens
cactcatattgtaagtcagttttttcattgctggtacaatgactcagtatttctttataaaaatctgttgttctgaaaatcaacaaccttagaaggattttgtcttagaaaatttccttggctttagttttatatcatatttagaaaataataatgaaaagcatccccaaaatttcaatgatgtgaatttttaaattacctttatttctttaaactaattccattgattgttacttaaattttccacctggaatcatggatttaaaatttccccacctcatggggaaaaaactaacccagaagttcaaagcctttaaagtttcatctgattctggccttagaattgtccttaaaagctttctcctggccgataggaggaagcatatatcaaggaggttctttcccttcccattatcattttgtggcaagccttaagttaacaatgtgtctaccaagaacaattgagttttctaaaagtaataatgaagattatgcaattctaactgtagaagagatagctattaaaataatcagtagcctgggcatagtggctcacacctgtaatcccaatactttagaaggccaaggctggaggactgcttgagtccagaagtttaagaccagcctgggcaacacggggagaccctgtctctacaagaaattaaaaattagccaggcatagttggcacgtgcctgtagcaccagctacttgggaggttaaggtgggaggatcacttgagcctgggagatagaggcttgcagtgagccgtgatggcaccattgcactccaaccggggtgacagatgaggtcctctgtttacctccccccccaaaaaaaaaattcagtaggaattccttcatagaataacatgttatttattggtattgacttcttattagacagagctcatagtatttgttttctgctccgaacacttaaaaaatactaagacgtgatagtgaaaatagctttgaaaagaaactacatatggcaaaggtggggaggggggaagatgatgcatt

SEQ ID NO: 22486 - DNA, 1054 bp, Homo sapiens
ccacattctgacataactgataaggaaggaactgggacaagattgtccggtgatactgcaacaaaaaagggaagagaacaacaagcagacatcattggtgaagaacagtcaccagaataattttacagtggagatgtggaggttgtaaccacacgtgtcacattaaaagataatcctttgccactgtggaagatgaatacaaagcagaaacataagaaggtatgtgccttcttcaaggggaaacaggaagagaacaaaaggaagtgaaatatgaactggcagactttagacaagaaatagaattacaaagtagaatcattatagaaattatgaccgtctcagatgcaacatacaggagactggaatccgtagaatgtacagaaagagcaatgttggacaggactgagagaggtcaacaaaatgaaaggagattgaataaagtgacagtatgagaaagcaagtgacaattgaggacaaagagcagcaagcatgcatcatttgtgtcccaaaaaaagagaacgagaacaataaatcaggaaaaacacacacacacacacacacacacacacacacgtttaaagatgtaattcaaggaaactttccaaaagtaaaaggaaatttgaatctactaattgaaggggcagagcagtttccaggataaattggcctagaaaaatcattagcaggatagagttctctgaagttgctgaacttaaatatgtaaagaaacctttggacattctagacgaaaagatcaagttaccaataaggagaaacaaaagtcaacctagcattcagtttctccacagtaatgtctaatggtcaaagaccatgaatgatgcctagaaaatgctcaagtaaaagaaagtgatttacacattttaacccagtcattccattgcatataaagatggcatacaaacttttttgttcctagaaatatgtacttttaagaatacctgaagaaattggaagaggaaaaacttcatccatccatgagatacatggaaaaacaatgacagaaagatgctcagtggggctcaaatttatttaa

SEQ ID NO: 22487 - DNA, 1051 bp, Homo sapiens
tcataggcctaaatgtctaaaactataaaacatttagaagaaaatatgcaaatgaatcttttataactgtggagtaggccaaaacttcatagagaccacactaaaaacacatgattaaaaataaataaataaattggtgttcatcaaaattagacatttttgtactccaaagtacaccatcagaccaggtgctgtggctcatgcctgtaatctcagcagtttggaggccaaggcaggcagatcacttgaggtcaggagttcaagaccagccgggccaaaatagtaaaaccctgtatctattaaaaatacaaaaattagccaggcgtgatggcacacatctgtagtcccagctactagggaggctgagacagaaggatcacttgaacccgggaggcagaggttgcagtgagctgagatggcgccactgtgctccatcgtgggtaacagagcgagactctgtctcaaaaaaaaaaaagaaaaaaattaagactcaaaagtcaaaattattccttgatccatgggctgtagaatagattttgtgttagcaggcatgaaaataacacagataaccagatgcattatcaatgagcagtagtattttgaaaagaattttttttttctgtgtagtagatctcaacagtgggcctaaaatagtaaatcgtgctgtcaacacatgggctgtcatccaggttttgttgtccatctttagtgcacaagcagagtagatttcacatcattcttaataaggaccctaggattttcagaatggtaagtgaacattggcttcaacttaaagccaccagctgtattagcccctaacgagagtcagcctatgctctgaagctttgaagtcaggcattgacttctcctgagctgtaaaagtccgagatggcatcttcttccaatagaaggctgtttcatctacattgagtatctgttgtttaatgtaggcaccttcatcagggatcttagctggatcttctggatgacttgctgcagcttttccatcagcactttcagcttcaccttgcacttgtatgttagggagatg

SEQ ID NO: 22488 - DNA, 1047 bp, Homo sapiens
aatacaaaaattaactggctgtggtggcatgtgcctgtaatcacagctattcaggaggctgaggcaggagaatagcttgagcgagccaagatggggccactgcattccagcctgggcaacggagcaagactctgtctcaaaaaaaaaaaaaagaaaaaaaaattcttatattaagaattaggaaaatctctcttgagtgaaaagagacaatcaatagatgctaacactgagatacacagaaattggaattatcttacaaggaatttaaggcagccatcataaaaaaaaagcttcattgagcaattacgaacacacttgaaacaaatgaaaatacaaactctaagcaaagaagtagaagatacaaagaagaagcaagtggaaattttagaacagaaaaattccagtaatcgaagtttaaaactcagtggatggactcaacagcaaaatgaagtagtcagaggaaagaatcagtgaacttgaagatagaacaatttagaaattacctaatctgaacaacaagaaaaaatagaatgaaacaaaaatgaacagagcctcaaggacctgtgagactataatgaaaagtctaacattcaggtaatcagaatcccagaagaagacaagaaaagagtttactgaagctgaaaaaagtatgcaaagaaatactttcggaaaaaatagttgaaatttcctcaaatttggcaaaagctataaaccttcagaatcagcaagctgaactaatatcaaacaggataaatccaaatagagccacactaagacacattataatcaaacttttggagactaaagataaattttaaaaaattgaaagtagtcagaaaaatactgtacctataggggaaaaccaatttaaatgacagtgaattcctcatcaaaatcaaggaggggctgggcacagtgactcacgcctgtaatcccagcacttttggaggctgaggctggtggattgcttgagcccaggagtttgagaccagcctgggcaacatgatgcaaccccatctctataaataataataataataaaatgat

SEQ ID NO: 22489 - DNA, 1039 bp, Homo sapiens
ttcatacctaacccaagataaaatttagccctgtgaaaatagatggaaattattctggacagtgtgatttaatatcattccagacatagcaagtgtcaacaggactctggactgcatacaaagcaggaagttcagtgggcctgcagtatcttcctgaaaatgtctgccatgctctgtgtgaatctatgagccatctctggaggctgattgggtatatgatcatagataaaagattttagagcatcttcatctgccagatagggatattaggactttattagaggaaaagcactacatgaaagtaattaaagaatcatagtccagtcatgtcacttaacaagggggatatgttctgagaaatgcatattaggcgattttatcattgtgcgaatatcatacagtatacttacacaaacatagatagtatggcctactacacacctaggttatgtggtataacctactgcatctaggctgcaaacctggacagcaagttactatgtttaatactgtaggcagttgtaacacaatggtaagtatttgtgtaactaaatatatctaaacatagaataggtacagtaaaaatataaaggccaggtatggtgggcctgtaatcccagtgctttgggaggttgagaaggattgcttaaggctaggagttctagaccagcctgggcaacatagcaagaccgcatctctacggaaaaaaaaaagaaaaagaaaaattagccaggcacgatggtgcaaacctgtagtgctaacaagtcgggaggctaaggcgggaggatcacttgagcccaggcgtttgaggtttcagtgaactataattgcaccattgcactctaccctgggtaacagagtgagaccctatctctatttttaaaaaatactgtaataaaagattaaacattgtatacctatatagggcagttttcataaatggagcttgcaggactggaagtttttctgtgtgagcctgtgagtgaatgtgaaggcctaggatgttaccatacactattgtagactttataaacactgt

SEQ ID NO: 22490 - DNA, 1046 bp, Homo sapiens
cgccaataacataaggggaattaaaacctgtccatcagactgaatcaggttcaacatttgagcacatctaatattctaagatgtagattctgaaagcaggtaagctctttctcttcctgcagatactacttccacttaatgtaagaaaattcctagctttgccaggcacagtggctaacacctgtgatcccagcactttgggaggctgaggctggcaggtcatttgaggtcgggagtttgagaccagcctggccaacatggtgaaaccctgtctctactaaaaatataaaaattagctgggcgtggtggcacacacctgtaatcccagctacttgggaggctcgaacctggtaggcagaggttgcagtgagctgagatcaggccattgcactccaacctgggtgattccatctcaaagaaaaaaaaaagctagctttgatctcatttataattgtttttcagaggtactgatattaacaaataccactccctccaaaataactagagtgataatgactgaaaaagaaaatgaccaaaatagacatgttggtaatgctactacagtaataaacatgtttgtaagagaaatgacttctaatgatttcaaatccagttgagacacttcagcatttaaacattttggtaacatatcactgataatgttgcaggtgacttaaatgttctctcttttgttgtgctttctttccactaggttatgaaaacctgcactcataagttacggttttcagagacggagacttgctgtgttgctgaggctggcctcaaactcctgagtttaactgatcttcccacctcagcctccctcgtagctgagactgtaggtgcaagccactgctcatatatttaaatcataaacttaaccatcaaccagctgtttggtgtaaccttttaaatgtcgtagtcctgtgagacctagcacaggattaaattcataaatttaacaaggtgaataggattagtaaaaaaatgaagggaaatgtggtttgcaaaccccagtctctgcgttagccagcatactactgata

SEQ ID NO: 22491 - DNA, 2055 bp, Homo sapiens
gcctggccaagatggtgaaatgccatctctactaaagatacaaaaattaggccgggcgcggtggctcacgcctgtaatcccagcactttgagaggccgaggcgggtggatcacaaagtcaggagatcgagaccatcctggtgaacacggtgaaaccccgtctctactaaaaatacaaaaaattagccgggcgtggtggcaggcacctgtagtcccagctactcgggaggctgaggcaggagaatggcatgaacccaggaggcagagcttgcagtgagctgagatcacaccactgcagtccagcctgggagacagagcaagactccgtttcaaaaaaaaaaaaaagatacaaaaattagccacgatggtggcgggtgcctgtagttccagctacttgggaggctgaggcagagaattgcttgaacccgggaagtagaggttgcagtgagccaagattgcgctactgcactccagcctgggcgacagagagtactcggtcaaaaaaaaaaaaaaaatcacgactgtaatcccagcactttgggaggccgaggcgggtggatcatggggtcaggagatcgagaccatcctggctaacacagtgagaccccgtctctactgaaaatacaaaaaattagccgggtgtggtggtgggcgcctgtagtcccagttacttgggaggctgaggcaggagaatggcgtgaacccaggaggtggagcttgcagtgagccgagatcgggccactgcactccagcctgggtgacagagcgagactccgtctcaaaaaaaaaaaaaaagaacaacctttgaggttattccatatccattgaatcagctctttttatctaaatgtctatggaaagaaggctcaggaaggagaggaggttgtagaatgaagccactgaagttttccgggcaaatactgcctggctgaaaccctaccaagttattactctcttgactgtaggctgagtcatgccaggtgacttcctgaaagctgctgttgctcctgatgcttcaccgccgttgtaccatgtggcacacatcaccacatcacaaagcattttggttgctgaagtccccatagggcctaggagagctttgtggtgtccatcattatatcctcaggatctagccaagtacccatttcccagaggaatgaacaggcaccaaattctccatctactgtgatgagtttacccttcagagtctttcttctttcagcagggaccggaaccaccttaccctctctgcatctcccacctcttatgctgaacagctctcccaggtcaagcctcaggggtctgccctggtttatttactagttctgaggatcagtgtcctaataagcaacctcttaagaggatcaacccagctttcttcactgaatcttttcatgttgtctttgagggatctcacagggcgcattaatgaattcattttacacattcagttctaccttaggtactggtctgactgtctcaagtctcacattgtctatggcataaaccttaagaaaccctgcctttgtctttcacagtggtcatctccatcagaggcaactgaaagtttcttatcaaaagaaatttggttgccacccccacagttctacgaagtgagaagacttgcaaactttgcctctctctctgacttgcacaaattttgtttgggtcgtgcattagaaggactggaaaggtggctgccgatcatcttgttaactgctgatgggatggtccatcttttaccaggtaaaccagtgaagcatcggtgcttttgttagtattcacattcagtgccctgggctgcatggctgtattgcccaacgtagagacaggaattacagtctgtgttttgtaatctacagggtattagctaagtaagatcaaagcctataaaatatccatattattataaccagaaattctgcataatgtcatatacatacacatacatttatattaatatatttcctagacattgacaaaggtctttctcatataatttctcactttttttttttttttctgagacagtttccctctgtcacccaggctggag

SEQ ID NO: 22492 - DNA, 1018 bp, Homo sapiens
aacaaaaaccatcattgtttgtattccacactgttaatgaatgtaaagaggttagaaatgtagtgtttgattaatgatgtttatttttactgtatttaatatgagtaatttttcatcatctttcaagaggaataatgtttattgattaaaggtgagaaatgatagttaagacaccaattccatgtccagatctttgactgtatcatgcattgtacaattgatttcatattttatgaaatgccttaattttcctactataacataaagacaatgatgaataaagtttatgtgtatgattaaatccagattagagaactatatctagcacagcagtcctcagcctgggcacttttgccctagggaacatttggctatgtctggaaacatttttggttgttgaaactgtgggcagagtgggtgggtgggggagtatgctactaccatctagtagtagggagaggccagggatgcaactgaacagcctgcaatgcgcagtctcacccatagcaaagaattacctgaccaaggatgagacacccaatctaaagtaaaatctttttttttttaaataaatggttccaatatgtaaattttgagaaccacagatactattattctgtctgccttttgaatctacaaaaatgggaaattacgtccaattggaaaaaaaaaaaaagttggctgggctgggcgcagtggcttatgcctataatcccagcattttgggaggctgaggtgggcggatcacctgaggtcaggagttcaagaccaggctggttaatgtggtgaaaccccatctactaacaatacacaaaaattagccaggcatggtggcctgtaattccagctactcaggaggctgaggcaggagaatcgcttgaacctggaggtggaggttgcagtgagcccagattgcactccagcctgggtgacaagaggaaaactgtctcaaaaaaacaaaaacaaaaacaaagtgtacaaaaatttttgttgtcttttgatttttttgagatagagt

SEQ ID NO: 22493 - DNA, 1047 bp, Homo sapiens
aggcgtgagctaccatggctggccatggttgatttttaaattctcattttttttttccatgatcaatagggctataatgaatatttttctgattctgtctttatgtacatttgtttatttcttcagaattcttcagaatgaactcataaacatgaaatttctgggttttgagataatacaagttccaagaatgtgaaattgaatcccacattacctgaagaaattttagtaagttctagaagctttaaaaaaagcccaacatgccaggtgcattggcttacacctgtaatcccagcactttgggaggctgaggcaggcagatcacgaggtcaggagatcgagaccatcctggccaacatggtaaaacctcgtctctactaaaaatacaaaaattagctgggtgtggtggcacatgcctgtaatgccagctactcgggaggctgaggcacgagaatcacttgaacccaggaggcagaggttgcagtgagccaagattgtgccactgtactctagcctggtgacagagcgagactccatctcaaaaaaaaaaaaaaaaaaaaaaagcccaacaggagtcaaagcacaaagaatggttttgtggggaggggagagatgtggtggtgctgaatgatgagtggctaaaagccttagctcatctgcactgcttgctgttcctgcttcaggcctgagctcctagcctgtgaaagagcttttgatggtcatgtagaaggggctttttttttttttcagaaggggcttttgagtgcagagaatacagttcatttatacggacttttggcgtaaccagtacgtgcaggaaaaccttgagaatcaaatcaaagagcttttgttggtggggttgtctctatgaccagaagacgatccccacctccaggtcagagggcattggtcattcagtttcctatgtctgtgatctttatgtcttgttaaagattacaggctgacctggtggcattgcctttcatccctatttggattgttgctaaggagatggccaggtagtcaccctgtagttcttcacctagt

SEQ ID NO: 22494 - DNA, 1052 bp, Homo sapiens
ttgtacacaagcaccctggggtctcacttctctccccccactccattctgggaacccatttccagagaagcaggggaccagagcctttttgcttcatctgccctgcagtggcaacagctgcccctagagctgggagttgtcatgaggatggggccgggccatggggacgctgggtctcatccgtggtgactattttgctcacgcctcaccctcttcctgtccagcaaggcctctggaggacctgggttgggtggctcctgccaaaccctcatgcccctggccaggcaggcgccctttgccctccctgaaggtccaatctcctgggcaccgtggaagggctggggtgtgtgcctgctgtacatgaagcccctggagttccctgcaggcctcaaagcccccaggacatgctgctctgtgctttctggggacagagaggccgaggcaccaacagcagtggccacgtctgttccatcctatctcagggcctcggtttccccacctgtaagccagggtgagactgtgggctctgaagtcctgaccttcactctgtggtgatttacgggaagaaagacaatcccagcctggagcccctgagctctcctgggtggccgagctcagactggcatcgaggggcctggggtaggggcggactgagctgctaccccatcctcgacatccctttagggcagggggactctgggtgccatggtagggagcgcctgtgtcaagcagcaaagccccctaatgtcaagagcctcctccagggcctgccacggcatcttcctggccagcaacatgtgtgcacccaccgaggtacgccccagccactcccatctgtgcccatcagggactccccatagcacgagcgaacagccagccctgtttatttataggccttttcaggaagagctagcagggcagtgctaagacaggaaacccagtccacattttagggcttccttaaacaggcttctgagagtcgtatcttttttcttttttttccagaaaaaaacaaaacaaaacttttttgccaaaacacctcctcaataaac

SEQ ID NO: 22495 - DNA, 1097 bp, Homo sapiens
tgtaggaaagtgtcttactattccacatccctcatttgcatgtggggaacagacagccatggaagaaaagagatttgcccaaactaaaatagggggagccacagccaagacaagaactggcctggtcactggtctctaccgctttggatcattgctatctctgagcatggacaagttgactgtagagagctttaaaggctaaaaatataattggtatattaaaaaaaaagtagagaaataaggtgaacatgattatgattgttaagacagtctcaggggaggtgttaaacaagttcttaaaaattgagtaaagcacctctcacttgacaccaaatggataataataatgttaggtggcactaaatgtggctcagattaatactaaacagccacttttctactggaagaaaaatgaggcaacctaatgatgaccaagggaaattgtgaactgtccattactgaagataggcttggagtggatcgccctcatggtttggagggatgctttttgtcttgccttagtgttggcgtgagaacagatgacctactagctcagagtcggctgtgtggctttgaaaacaatggaaagtaatgacacatggacttttcaaagcaaagatgttttttaaaaagagaccaataaacagtgtacagaattgcctggctgaaggtttgggtgtagctactggtgtttgctaactgagctttccctcattgtgggatcactgcataaatctgactccagattttttccactgatgtgattttagcagttttgtgaaaagagaacaggatagttttatgttcctaacactgctttctaaatttctaagagtgccctgattccttggtggacaccgttcactgaacttagtttgtcttgaagtggcctcatgttgataggatagtcacacttttacacttcttggggcagctgtagggacttaattggattcagagtaatccacatgtgactgcttttcgaaaccgtgccttcatttctgcaggcagcagcacagggatgcttcagagctggtgcgtcctccgagctcacacgagctcatttggtagcacgaagtggccacaggcacggcagc

SEQ ID NO: 22496 - DNA, 1065 bp, Homo sapiens
aggaggtacaatatgcgattacgttcatcagctatttttggctgaggaataaacaaaatggcccaaactgctgccattcgagattctagcaggggagtggcatgtagaaaagattaatgtacagttaaaacccgtgtacgggtaaattacagggtgacagctatctaatgcaaacactgcagacgtgtaattaagaggagttacagcgctcgaggatgaatttgctgagggaagtgctagggtgctgtctggagcccaggggcaggggcatggcactgggatggtgtgggggctgcagaggtggccaggaggagcctctcagcatcggggcagccttgtaaccataacaggtccattgcctgatgcacgcagcaagtcaatgtgctaagatgccaggttgcggcagaaaaagaggattaatggtaaggtcatggaacgaggagatggcagacaacctcaaatccatctccctggggaatgtggggttaggatttgtaagttttggagtgggtgaagtgtggagatcgttgatgggtggaagagtgcagggtaaagtcttgggaccgggagaggaagaagctgtgttctcaggctgatccccctcctctgtagggggtcctcaaactgttgggggcaatttggggtcttttcaacatcttaagtgaacaaaaaccttatgattctaaaatcaggggtcctgtctatagggacaatggagaagcaaatcaaatttttttttttttttttgagacagagtctcactctgtctcccaggctggagtgcagtggcgcgatctcggcttactgcaacctccacctcccaggttcaagtgattctctggcctcagcctcccaagtagctgggactacaggcatgcgccaccatgcctggctaatttttttttgtagttttagtagagacagggtttcaccatgctggccaggctagtctcgaactcctgacctcgtgatccgcccacctcggcttcccaaagtgctggaattacaggcgtaagccactgcgcccagcaaagcaaatcaattcttacaccattttatgaccct

SEQ ID NO: 22497 - DNA, 1032 bp, Homo sapiens
ttgttcatgtctttctagggctttgttcatttcattcaagttgtctcatttgtttagcataacagtgttcatagtattctcttataatcactagtgatgtcctcattttcattcatgatgttagtagtttgtattgtctctctgttttctttcaaagtctagctaaaggtttgtcaattttgttgatcttttcaaagaaccaacttttagtttcattgtttttgtctgttgttttcctgctttgtattttattatttccttgctttagtttgcttcaggtttagtttgtccttttttcctctcttttgtttgctttatttgttacttcctctcttttgtttgcttcagatctagtttgttcttcttttttcatttcttaaggtggaagattaggctattgatttgagattcttcttttctaatatagacattactgctataaattttcctctaagcactgtgttagctttagtcaactttaattgtctgatttccagatcttcttattaaatttctgtctgatctgctgatctattggttctaccaattttatcacaaccttgggctagctaagatttttgaattattttcagcaacactcttgggcatggaattttccaatcaatcaatgttcatgcctgattccccttggtagaatgtaagcccccagggaactgggcaaggtgatgaaagcagccccaggctacaatgccataacctcacactgttcagtagattttcttgaataaacgcttcttgatatgttgtatgcttttggtcaatttctggagtttttttttttttttttaaggggtagggtctcactctgtcacccagactggagtgcagaggtatgatcatagctcactgcagcctcaagctcctgagctcaggcgatcctccctcagccccccaagtagctggaactacaagcatatatgaccatgtccagctaatttctttattttttgttgagagaggcatctcactatattatctaggctggtcttgaactcctgatatcaagcaatc

SEQ ID NO: 22498 - DNA, 1046 bp, Homo sapiens
cttgggggcatgggggtgggtatttaatcctattttctattccacccctgggaaattcacaaggggagggaagaggagctgtggtgagctgcagtgtgccatctttgtcattttccgtggccactgctgggccctagaggctagcagcaggcttcccttggagctggtgctgcagtgactagctaggaatgaatcacatacctcatcagtggataaagggtctctggccaggaccctggttgggggctcacaggcaccctccatgctgctgaacttataggctgcccaggcccttgggcctgcgagaggtttggggtgctgggtgctgccagctctcctgctcttccttgcagggtgtttctctcctgggtgagggacctgctttccccgttggcacggcagcagggctgacccgagtagggtgggtcttgagcagcttgctcagccgaggatgtttgctcctggcacagagaggcggtcatcgctcccctggggctgctgaaggctgagcgtgggagggccaaggctgtgggcatcacccctgtgttatgcatttgaaataacaggaggagttaattaatcccccagatactgagggatcatctctggggagcatacacggcaggctgcattgtcaccggtgtggttcctcagagcagggaggatggtagtgcgcagaggtggctttccaagcctgttggggctgcaggggagcctgtgcaggtgcaggcatggtcccttgaggaggaaaaactggaaatgggtgcagtgtctagttccaaatttggagagtctagggtacagatggtgactggtgttccagtaccccaggtggacagagactcagcctggggccctgtggccttggggcttgtggggtggggacaagagccacggggccaggtcagcagtgttggcctgtgtgctcactcacagagccctgtctaggatgggagatagattctgcttatttaatttccattttgccttctgcggcatttctgagttgtttgagatagatcatcccttaatcggttgacgacgtt

SEQ ID NO: 22499 - DNA, 1050 bp, Homo sapiens
aagagatggtggaggctgagggacagatgttttcattcagtgcagtaatatttgctaacaggaagaaagtagtgtgggtaagggtgaagaaggggccagagaagagagtgcagatgtgcaaaaagtgagagtttgtggaagcaggccgtgatgtggttccaagagctggactgtcgaatcttatttttgtaaagctctgctcttaagtaaaaaacccagagtcacctttctaccatgctaccttcagggcctgagcaagagtactgcgttgtagaagaggtggtgctttttagtatttaagtaattaaaccttccttgttgtattaaatccatatataataccttattccaacatatctcagatagtttctgtatctcagatagtttcagcaagagtttgtgtatggcaccgaatggacaagagctgtacatatatataaatgtcagaaagagaagaaaaatactaactgtaactttttggtttcctggtttgctgcttttgcatgtagactgttcttaaatatgctgaggttgggtttgtttttcccactttcccattctatcaacatcagttgttatttactctaaacaatcattctttcattttatcctaagtgagtttcttttataatttaattcagttcccttggtattaaacactgttcagtactttggaagtagcttacttaatagctttttctgctgtgtgatttattcaagaaatattcaaatgtcagctatatgtagagcactgtgttagattctgtgggagttgcaaagatgatctagatacagatctttctccagatctttaaattctagaagggtagtatagacagaatgatagaatgctgtgtggttttcaaaggaagaacagattatttcagcccaggtggagttgggtgatggctaattttatgtgccaacttgactgggccacagtgcctagatatttgatcaaatattttcgatgtttctgtttaagtattttttgtatgagattaacatttaagttggtagattgtgagtagcctccatctgtgggtgggc

SEQ ID NO: 22500 - DNA, 1068 bp, Homo sapiens
ctactcaagagactgaggtgggaggatagcttgagcttgggaggtaaaagttgcagtgagccgagatggcaccactgccctccaacctggactggatgacagagaagggacgctgtctcaaaaaaagaaagaaaaaattattagggcaatgtagcagcatgatgaagtttaaaatgtagaggacaaccacccctagtttccccattctccccaactacttttgtcattctctgtattctcttgtaggctgtatttgtaggtgtgtgcgcacatgtgtgtttgaagttgaaaattcacattacatgcaattaaccattatattgtgtacaattcagtggcacttagtgtagtcacagtgttgtgcaactaccacctctccttagtttcaaaactttccatcatcctactaaaatacccctaggcattaagtaatccctcttcatttcccccataccctgttgaccactaacctgctttctgtctccatggtttttcctatttcggatatattatgtaaaaggaatcatacactgtgtgacgttttgtgtctagcttcttttactcagcataatgctttcacgcttcactcttgatgtaacatgtatcagcattgtggtttttttatggctgaataatatttcattacatgtatttttaaatatatatatcatatatataagatatatagagatcataatttgtcttttgttgatgggcatttgggttgtttctaccatttggctgttttgaataatgctgatataaacatttgtatacaagtttctgtgtgaacataatataatctctggtactttgttttggcagccctagcaaactatattgtgtgctttatttccagtgtagtgcttagcccacttgctggactgtaacttccctgagggtggggacataaatataatgcctgcctaatattacttaaatattctaagcctgctgaatcactacattttcgttaattcatgataatccccaaaatatcccagaatcagatcagtatctattcagctacataatactacttaatagtagtagtatggcttactttga

SEQ ID NO: 22501 - DNA, 1050 bp, Homo sapiens
ttaggcctttcatcccagcacattgagaggctaaagcaggaagatcacttgaggccaggagttcaagaccagcctgtgcaaaatagcaagacctcatctctactaaaaaataaaaaaagttagctgggcttagtggcacatgcctgtggtcccagctacgtgggaggttgagatagaaggatcgcctgagcccgggaagctgaggctgcaggaagccatgaccacaccactgcactccagcctaggggacagagacccagtctcatcaataaataaataatgaaaggacattttaacaccccactacaaccactaaagatacaaataaataaaaatataagaggaacacaacctcataatacagatagtcttttatattgcatatatttaacttcgggcaaaagccactctattttcctctttaaaaaaacttttttagctatagattaatgaatactttctcagacatttcagaactactgcttagtacttgaaatacaacatttagaatctggggtactacctgaatgtgatgagtagtcacacatctcatatcctttgttttcttgccagttcgatcctttggtacagaagacagaccgacagatcgtccaataccacctcgagatgaagtctttgaatacattatattccgtgggagtgacattaaagaccttactgtttgtgagccaccaaaaccacagtgttctttgcctcaagacccagctattgttcaggtaactgatggtaaatttgtcttggagtacaggtaaactccgcacagggttagccttggcttttttctctctagttgaatgttcatgtagcttatcatttccaagttactgggatacctgaaattactggataatgttctcatctaggtttttctctttgtatcataaattagaactaaggtaagaaacagctgaggaatttattatgaaatattttctaatttcaacaacaattaccatagctaacattgaaggctactctgtagaagtgctgtgcatataagataccctctgaggttggtactataattat

SEQ ID NO: 22502 - DNA, 1031 bp, Homo sapiens
ttagcgaggattatcattagatgctgaagtcattgggtgaaaggtgttaggacagcatattaaggtggtcttaaagtatcatcccacaatttacaaagggggaaaaatgtacccttgtaacacagacatctggtggttaccaacttcgttgagtgctcaagtttagcattgccatgaacaattatgtgtctcctgttgtgatgattggggtggggggcaaaacataatatcacctttgtggggttcttgctgaaaatacagaatctaattttgaagaaatgggcttatatatccagaaggtgggttgttttgcgagacagttatccacactcttcaaaagattcaatattacaaagaatggagagaggcagcagaactgctttaggctggcaaagactgaagagacataacatccaaatgtaatatagaatcgaatactgggcttttaaaaagttggcgtgtttgtttcctgcaggggagaaaaagaaaacttaaaaagttggtgtgaagaacattttagggactactaaggaacttttgagtatggactaattgttggattttgttattattgttaattttctggttaatcatatgggaaagtgtttttgtttgggggaggtggttttgaagtatttaaaagtaaaagggccaaattgattttagcctctctaaacaaaagaaaaatgtgtatattaaggtataaagatggagaaacagagtgggtttggttagatgttaacagttgatgagtctaggtgaggaatatattgatattctgtgtactccttcaattttaacataggtttgacatttttcataattaaaaattaattccttttagacttactttaggtgaaatagtgtaactttggtccataaatttccaaatccagtagtaagatcaatgttatttattcatgttaaatcaagatatactgtatgttaactgtaacttagaatcctttcctggggattcaagtaaggaatgattgcaaattgtattatcctttttgaggctcctttgacta

SEQ ID NO: 22503 - DNA, 1052 bp, Homo sapiens
tttaaaatcacccagaaagaaaattctagactgtttttactgttacattctaccaaacatttagggaagaaataattttcactaatcttacacaaactctttcagatagctatgcaccatgatgcatgcctgtagtcccagtaactcaggaggctgatgcagaaggatctcttgagcccaggagttcaaggctgcagtgagccatgattgtgccactgcactccagccaaggcaacagagcaaaaccctgtctcttaaaaagtaaaaaaagactgggtacggtggctcaaacctgtaatcccagcactttgggaggccgaggcgggcagatcacgaggtcaggagatcgagaccagcccagccaacatggtgaaaccctgtctctactaaaaatacaaaaaaaaaaaaattagttgggcatggtggcgcgcgcctgtagtcccagctgctcgggaggctgaggcaggagaatcgcttgagcccaggaggcggaggttacagttagctgagatcgcgccactgcactccagcctgacgacagagcaagactccatctcaaaaagaaaaaaagaaaattcagagaatacaggaagaggaaatatttgctgaccctataaccaaggccaaataactgaaataccaactgtgactggatcgttacaagaaaattatagatcattgtcccccatgaacataaacgtagtaatgtttattagatgtagaagccagcacttcagaagaaggattgtatatgatgacaaagatttatctcaggactgcgaagctgcaacatttgaaaatcagttgtaacttaccacgttaacagaccaggaataaagaatagagaatccagaaatagacccactcagatacttaaaacagagtaccaagacagttcaatggagagaaaagacattgttttaacaagaggtgttgcagcagctgtttatctgtggaaaaaataaaacttgacccctggcttaaactataaattaaaaataatttggaatagattatagacataaattggtagtagaattggagtagagcga

SEQ ID NO: 22504 - DNA, 1029 bp, Homo sapiens
aaaaggcaggagagaatcaggagcacaggcgaggtagaactttagctgtttactgttccttaattgactgatcaatgttttccactcactttattttcattagaaggatttacttcatgtgaatgatcccagaaaattaaactgaatatgatagaatgtttggtctttcaaatttgactcaaagtggtggtggtgtgggtatagttttttgggcattgcacaggctttgttttgggttttttggtttgtttgtttgcatttctaactatggaagtttttgatgatgtaccctgagttgatttggcactttgcatgtcttcttctgtagctgaagtacacaaagtttcaaggccagaaaatgagcaactcagaaatgataacaagagacaagtaggtaagttcttggatctaaaagtcatattctatgcttctcaacagggagaatattttaaatatatgatacataattactataaaaaaatgaaaggcgggggttgtgactgtaaaggaggagcacaggggagtgtcactgtggtgacagaacagtcctttatcttgattgtggtggtagttttgcaaatctatatatggtagaacatcatagaactatgcataaagacataccaaaaaatgagtacatgtacaaactggtgacatctgagcaaggtctgtagtttagttaattagattgtgcctgtgtcggtttcttggtttcgataatgtaccataattatataagatgtgactgttggagtttgggaagttgggtgatgggcacaagggacgactctgaactagtttttcaatttttcttttctataattactttaaaataaaaagattttttaaaattttacttttctgggcccggcacagtggctcacgcctgtaattccagcactttgggaggccggggcgggcggatcacgaggtcaggagctcgagaccagcctggctaacatggtgaaaccccgtctccactaaaaatacaaaaaattagccgggcgcagtggcgggcgcctgtagtcc

SEQ ID NO: 22505 - DNA, 1027 bp, Homo sapiens
aggtcaggagtttgagatcagcctggccatacggtgaaaccctgtctctactaaaaatagaaaaattagctgggtgtggtggcacacgcctgtagtcccagctgctcgggaggctgaggcaggagaatcacttgaacccgggaggcgaggttgtagtgagccaagatcgtaccactgcactccagcctgggcaacagagcgagagtctgtcaaaaaaaaaaaaaaaaaaaaattgagcccagatcctgtttttgaatcagttgtttaagagctgtagttttcttttatgattattgatttaataaggttttatattttctttatctgttttgtaatatataacattctaaaatcattcattttattaatattttcaaatttattaatggaaaataaattataattttacaactcttctaaattaaaaagggaatgtataatctaccttatttagaaaatgattgaaaaatgatctttcacttaattttagaaatctagatatgatatttttagatgtatatgtactcttctctacatttatatatatatatatttttatatcccccccccccgtgttttttttttttttttttttttttttgagacagagtcaacctctgtcacccaggctggagtgcagtggggcacgatctcagctcactgcaacctccaccgcccgggttcatgccattctcctgcctcaccctcctgagtagctgggactacatatgccatggaatacagaattttgtttaatttgactcattatattttaccctttttattcagaaaaagagagagctcccctcccaaaataaaataactgccatactatctttcattgcccttcaaaactcaccccaccaaagaggttcattaacagaacagtgcatattcttcccgattttttttgtagattttacagacacagacatctatacccaaaacctttttttttttttttttttttccccctggagatagaatctcgctctgtcacccaggctggagtgtagtggtgcgatct

SEQ ID NO: 22506 - DNA, 1051 bp, Homo sapiens
ccttttgtaagcctgtcctggaccctatgtgtttctgcaccgcatctctatctgcactgtttgctgtcagcttaaccttcctcagactgatctcatcatcttccttctctcctgtcatctcagctctgcctcctcccagtgttccatgttggctcatggtatactgcccaggcactagaggtatccatgattgtggcctgttgccatttattcctttgagatgtccctgtcaactaccatggtaacccaccagttgggcttcagaccttcgtctctctttaccccactttaaggcagatcagctacattttgaacaacctgtgacaactccttgttgaagaccacattgagtcagcttggtctgagaaaaagtacatttaaattagacttggatccagatgagaataatagcagtagttactagtatgacctttcagacccttggttttgacatttgtgaataaagagttgcaccatttattctgaaataacaccttttaaagatcattaaactttcagagttggaaaacatctgagaggtctgacctggttaaaacataaacctcttctgcagtatctcttataggggctgggagcttactcttcccaagggcatccatcccaccccagggatgttctaactgttacaatctcagctgggcgtggtggctcacacctataatcccagcactttgggaggctgaggtgggcggatcacctgaggtcaggagttcgagaccagcctggctaacatggtgaaaccccgtctctaccaaaaacataaaaaaaattagccgggcgtggtggcacacacctgtaatcccagctactcgggaggctgaggcaggagaatcattgaacctgggaggcagaggttgcagtgagccgagatcacgccactgtactccagcctgggcgacagagcaagactccgtctcaaaaaaaggaaaaaacaaaccttccatgcagtaactgtgtgtgctccatgtggttactaatacaaacatttttttgacaccatgtcacactgtttatcattttgagccttttg

SEQ ID NO: 22507 - DNA, 1006 bp, Homo sapiens
ccaggttcaagcaattctcctgcctcagcctcctgagtagctgggattacaggcacctgccaccatacctggctaatttttgtatttttagtagagacggggtttcaccatgttggccaggctggtctcgaactcttgacctcgtgatccacccgccttggcctcccaaagtgctgggattagaggcgtgaaccactgcacgtggtgctttgtgtttttttttttttaaatctacttagaaataaattattttcaccccctgatttacacttgaatttccactagcaacacaatttgttgtcacaaatgttttcatagtacttgggcacatttgatgcagaaatttttaatggtccaagactattttagttgatagatgaaaccttccttttacctgaacaaactttttcggaagtttaggagccagctttgttcatcctttggtgataggtggtggtttgtatgtgtttgtagacaaaactttccttggcggggatttgccccttttttcgttgtttcttcttcctttgaagatctctgtttaacaaagattttttttttggctcacagtgttcctgtaatagaattccttcaagagttctaatactagttttgttttgttttgatggcagcaggttttgagagtgagcttttgacttcataagaagactaaaacaacagtcttagagtacagttaagtccatttgttaccagaaaatcagacagacagctaggtctgtcctcatcaggaccaagtaatactggatttttttttttcattaaatgttcactatttttctttgtatgaaattgaggccaggtatagtgactcacacctgtaatcccagcactttgggaggtcgaggtgggagggttgcttgagtccaggagtttgagactggcctgggcaacacagtgagactccgtctcttaaaagaagaaagaaaaaagaaattgaatatgtggtgattactacccgtttcatttacttttttacttattaacg

SEQ ID NO: 22508 - DNA, 1064 bp, Homo sapiens
gctacttgggaggctgaggcaggagaatggcgtgaacccgggaggcggagcttgcagtgagccgagatcccgccactgcactccagcctgggcgacagagcgagactccgtctcaaaaaaaaaaaaaaaaaaaaaaagtggtttaattggctgtacaggaagtatggcagcatctgctcctggggaggccttagggagcttttattggtggcagaaggcaaagcggagcaggcatcttaaatggcaggagccaggaccgagagagagaagggaggtgctgcccacttttaaacaaccaggtctcatgagaacccactcactattgagtacaaaggggaaaatccaccacatgatccagtcacctcctcccaggctccacctccaacattgggaattactattcaacatgagatttgtgtggggacacagatttaagctatatcactagtgattagtgatgttgagcatcttttcatgtgcttattagctgttcgcatatttcttggggcaaaagtctattcaagtcctttgcccatttaaaaattggatttttgtgtttgagttgtaggagttctttatatattctggatattaattccttttcccatatgtgatttataaatattttcatctatggattgctttttgcttgtaatgtcctttgatgcctaaaagttttgattttgaagtccagtttatctgttttttgttgcctgtgcttttcgtgtcctatccaagaaattattgctaagtctgaactcagtaatttttatatatttaatgattttcacccctaaatggttattctttttgatgcttaagttgtcccattattgatcgttaatggcacttatttttcgggttttctaggtgcttttgacatgagcctagtagtgttatatgagttccctgctttctggctttacaagaagtccggggcttatcggaaaaatttctgatcccagatccagaatcagccatttctttaactagttctgattctttttggtgggaaatggtattaagggcattcattacaattaagatgtaaattccagtaggtt

SEQ ID NO: 22509 - DNA, 1071 bp, Homo sapiens
tttatgtagtagagaattttggtcagggaaagtccttattctgccatttttgatgatactctttccctcccctttttaggcttttattttcatgaatcttgtatctcttggtgttttgttttgttttgttttgttttgttttcgagacagggtcttgttttgtcacccaggctagagtgcagtggtgtaatcatggcccactgcagcttaaaactcctgggctcaagtgatactgctccctcagcctcccaagtagcagagactacaggtgcacaccaccatgaccagctaattttttaaattttttgtagagatggggtcttgctctgttgttcagactagtctcaaattcctggcctcaagcgatcctcttgtctcagcctttcaaagtgctgggattacaggcttgagccactacacccagcctaatttttgtatatgatgtgaggtcggggtccagattcattttttcatgtggatatttagttgtcccatcaccatttattgaagagactgttctttccccactggatgtttttggcatcctggtctaaaatcagttgactgtagatgtatgggtttatttctggacttctaattctactccattgatttatacatctttccttatgccagtatttcactgctttggttactatagctttatagtagattttgaaatcaggaaatattacttttacaacattttttctttcagtatttgttttagtcatcctggatccctcgctttttttttttcttgcgtcagtttgtttgtacaaatagcacaggaggatccccgccccatgcagacggcagcccgagggggtcgcagcagtccttctgttctcacatttgtagacagagatatctactctgaagcctttgtaggggcctgggcacctttgggagcttgagctggaactgaagctggagctgcagtctgggcgctgatttgatccttggccttggcctttagccggcacagcctgagtcccttggcagtgcgggcacgagcacacttcccaagcttggggtgggcaatgtaggcaagtcgatcgagcttgtggc

SEQ ID NO: 22510 - DNA, 1057 bp, Homo sapiens
gagagaattgggtgcactgaaccttgggcaggctcagctgccaagattctctctgaggagtccaaggtctagctgggcactagcagagcttgcgttgttgttcaccctttccaggcttctgagcctggccggctctcatttcattctctgatatatttcttcccaagtcaaagtcatgttagggagtactgctacctccttgagtgactttgtaagtgttgagttcaccatttagcttccagagtgcccaggatctggcagacatcatcttcctagtagacctatgctgctcagactgttttccctctcagaaaagggctcttggccagaccaagtggctcacacccgtaatcctagcactttgggaggctgaggcaggaggatcacctgagctcaggagtttaggaccagcctgggcaacatagcgagaccccatctctacaaaaaaattaaaacattagccaggtgcggtggcacacgcctgtagttccagctacttaggaggctgacatgggaagatcgcttgagcccaggaggtcgaggataacagtgagctttgatcacaccactgcactccagccttgaggatagagtaggactctgtctcgaaaaaaggttggggggctcttggtgtaggtaccctgaatggacggtggagacccaaatgatgagaagcagttggccataccaaaatctcaggaaagagaaattcgggcaaaggcagcagcaagagcaaaggtcctgaggtgtggacaaacccatccagggaggaagagaaggcctcacagctgggacaaggttgaggggctgggcacagagggctttgagggctgtggtgagggtttagattttatttcaatcacgatgatatcccattgaagagttttaagcaggggagtgatgtgctctgattggcactacaggaagctcactctggcccctatatgaaggatgggctttggaggtacaggagtagagaaaaagaggccaggtgagagcttggtcctgagacccaggagtggtggtttcctgaagcagggggttcataaacaaggtg

SEQ ID NO: 22511 - DNA, 1094 bp, Homo sapiens
tgtcctaggcatatatgggtcccctcctctcctcctgactgtctgcagcacataagtccttggggagctcctactcctctaagcatacagtgggttcttggaacaaggttatggtgctaacagagacctcagggcctgcctgtctagtggatagagggccgagctatggcaccatgcccagctgggagcatggctgcctggggttggggggggcagtctttatatcctgaccgtaatccccagggtcgagccgtgctgcacgtggctctgcggaaccggtcaaacacacccatcctggtagacggcaaggatgtgatgccagaggtcaacaaggttctggacaagatgaagtctttctgccaggtaagtggctactgggccggactcacccttggccgtgtgtgtgagttatttgggaatctgggagccctaaggggcagctcttccctcttcttgtaggcaggactcaggttctcactgcagcttaagggaggggttgcctgtgtgatcgctgaccctggagtctctgctgaggcctgaatttctcctggctctgctctgaaggaatctgctgctggcagaagtggggccagtttctttcctgaattgtagacacctatggactcatggtgacaaaccacagaggcttcaaatgaaaagtggggcccctgagagacaggacagtcaggaaaggaaggagctttttcttttttctttttttttttttgagatggagtctcactctctcgcccagagtggactgcagtcgtgctatctcagctcactgcaacttccgcctcctggattcaagctattctcctacctcagcctcccgagtagctggaattacaattatgcgccaccctgctcagctaatttttgtatttttagtagagacgggatttcaccatgttggccaggctggtctcaaacccctgacctcaggtgatctgcctgcctcacctgggattacaggcatgagccactgcgcctggccggaaggagctttttctaatctcttttgtcatacgcccttatcacccagtctagaaacagataaaacattgtaaaatttcctcaaccctggctgggcg

SEQ ID NO: 22512 - DNA, 1070 bp, Homo sapiens
acacctgtagtcctagcactttgggaggccgaggtgggcggatcacttcaggtcaggagtttgagaccagcctggcctacatggcaaaacccgtctctactaaaaatacaaacaaaattagccaggagtagtggcaggcgcccataattccagctactcaggagactgaggcagcagtatcatttgaacccatgaggtggaggttactgagagctgagatggcgccactgcactccagcctgggtgacagagcgagactctgtctcaaaaaaaaaaaaaaaatttataactgggcatggtggtgcatgccggtagtcccagttacttgggaggctgaggcaggagaatcgcttgaacccgggaggtggaggtttcagtaagctgagatagcaccactgcatgccagcctgggtgacagagcaagattccatctccaaaaaaaaaaaaaaaaaaattaaaagaaaattgctggatcttattagtgtatagtaattttttattgatgtgtgggaaattattccaaaatttagcaactagaagcaacaatcaccgtctctttatgtggggaatttgcagtggctgtgtttggtgtagtggctctgatattctaaggttgcagtcaagatgttggctaaggatgtggtcatttgaaggcttcatgggggttggagggtctgctttgaagatggctcactagcagtgctgcctttgggaggcacagacagttcgagtgtcctcatgacaaggcagcttatttctcccagagtgagtgatccaatagagagtaaggcagatgcctggaggtcttttgtgacctaatatcaggattcacattctttcttttttttatttttatttttttgagacagagtttcactcttgtcacccaggccagagtacaatggcgtgatcttggctcactgcaacctccggtccccggctcaagcgattctcctgccttagcctcctgagtagctgggattacaggtgcccgccaccatgcccgcctttttttttttttttttttttttaaatttttttagtagagatggggtttcaccattttggcc

SEQ ID NO: 22513 - DNA, 2537 bp, Homo sapiens
ggtatgaggatatgggtcttccatgtctgaggaggtagcacctggcacagatatgaggatctgcgtcttccagtgtttgaggaggtgagtttggactcaggtttgaggcccttgggcttccagtgcctgaggagatagcatctggcacaggtatgaagccctgagtcttctagtgtctggggaagtgaggctgggtacaagtatgaggatctgtgtccatcagtatctgaggaggtgggatcgggtcctggtatgaggatctgggtctgtccatgtctaaggaggtaagatctggccctggtatgaggatctaggactgtccatgtctgaggagttaccatctggtacaggaatgaggatctgggtctgtcaatatcagaggaggtaggaatctggtacaggtatgaggatctgcgtctgtcaaagtctgaggagttaccatctggtacaggaatgaggagatgtgtcttccagtgacttaggaggtacgatctcttataggtatgaggatctgggtctgtcaatgtctgaggaggtaggatctggccctggtatgagaatccgggtctgtccatgtctgagcaggtaggatgtgtccctggtatgaggatccgggtctgtcaatttctgaagaggtgggaatttggtacatgtatgaggatctgggtctgtcagtatctgaggaggtaggatctggtacagttgtgaggatctgggtcttcgggtgtctgaggaggtggcatttggcacaggtatgagaatctggatcttctagtgtctgaggaggtgggatctggtattaattatgagaatctggttctgtcagtgactgaggaggtaggatctggcataagcatgaggatctgggtctgtcaatgtctgaggaggcagtatctggtacaggtatgaggatctgggtctgtcatgtctggaggtaagatctggcatgagtatgaggatttggttctgttcatgtctgaggaggtaggatctggtgcaggtataaggatctgggtctttcaatgtctgagaaggtaggatctggtacaggtgtgaggatctgggtctgttaatgtctgaggaggtaggatctggcactggtaagaggatctgcatctgtcagtttctgaggaggtaggatctggccctagtaagaagatctcagtctgtcaatttctgaggaggttggatctggcccccttatgaggatctgagtctgtcaatatctgaagaggtaggaatctggtacaggtatgaggatctgtgtgtgtgtcagtgtctgaggaattaggaatctggtacaggtgtgaggatcttcatgtctctgtatctgaggaagtaggatctgatacaggtattaggatctgggtctatgtctgaggaggtagcatctgatacaggtatgaagacctgagtctgtcagtgtctgaagtggttggatctggccctggtatgaggatctgggtttgtcagtatttgaggaggtaggatctgtccctggtaggagggtctgtgtcttctagtgtctgaagaagtaggatctggccctggtatgaggatctgggtctgtcagtatctgaggaggtaggatctcatacaggtatgaggatctgggtttttcaatgtctgaggaggtaggatctggcacaggcatgagcatctgggtctgaccatgtctaaagagttgaagctgtgtgcaggtatgaggccttgggtctgccagtgtctggggaggtgaggctgggcatgggtgtgagaccctgggtctgtccatatctgaggaggtaggatctggtatgagtatgaggatctgggtgtgtccgtgtctgaggaggtgggccctggcacaggtatgaggcctggggtctgtccgtgtctgaggaggtgggccctggcgcaggtatgaggccctgggtgtgtccgtgtctgaggaggtgggccctggcacaggtatgaggtcctgggtctgctggtgtctgcagagacagggcccgacatctcagggaagaccacggtaagctcttcagtttgtcttgtggctgtggtcagtcatctgtagtctgccctgttggtcttcccatgtgttgccagcacctgcctgctgccttgcttcctggaggtgggttgggccagggccctccgagacgcccctgtgcaagaccagggacagggtttccggcaggaggtggggggcggggtgtgccggccctccctcagcaccttgtcctgtctctcctagtgggtgggaggacgctactcgctgtggtcggccatcggactctccattgccctgcacgtgggtgagtgtgtttctgtgtcttgcagcccctgtgggagacagtgttgcagtctaaggtcggggtagggggcttgtgtccctgaacatcatgctgtcctcacaggctgctggcctctctgcagctggctgggatatttatttcatgtccagaaggaaggtctgggtttttttgcgtgtgcaagttggcccccgtctttgcccctcacaactgcagtcctgtttctctcctatcctaggc

SEQ ID NO: 22514 - DNA, 1043 bp, Homo sapiens
gagacgggtcttttttttttttgagacggagtctcgctctgtcgcccaagctggagtgcagtagcacggtctcagctcattgcaagctccgcctcccaggttcacgccattctcctgcctcagactcctgtgtagctgggagtacaggcacctgccaccatgcccggctaattttttatatatttttttagcagagacagtgtctcactgtgttagtcaggatggtctcgatctcctgacctcgtgatccgcccgcctcagcctcccaaagtgctgggattacaggcgtgagccaccgcgcccagcaaggcgggtcttgctgtgtttcccagactagactggtcttgaattccagggctcaagagatctcccacctcagcctcccacagtgctgggattacaggcgtgagccgccacacccagcctattcaaaatttttttttcttagagacagggtctttgttgcccaggctggactgcagtgatacaatcatagctgactgaagcctcaaattcccaggctaaggtgatcttctcacctcagccttccaagtagctgggtccgcagatgcatgccagtacacccagctcatttaaaaaaaaatttttttcttttttgagagtcttgctttgttgcccaggctggagtgcagtggtgtgatctcggctcactgcaagctccacctcccggcttcacgccattctcctgcctcagcctcccgagtagctgggactacaggtgcccgccaccacacccggctaattttttgtatttttagtagagacggggtttcaccgtgttagccaggatggtcttgatctcctgacctcatgatccgcctgctttggcctcccaaagtgctgggattacaggcgtgagtcaccgcgcccggctcattttaaaatttttgtagatcagtgtactgttgtaaaaaaaaaaaaataagaaaaataaaaaataaatttttgtagtgataggatcccactgaggccagagaatagggtctggagacaaaggagcattcacttcagcctctgactgg

SEQ ID NO: 22515 - DNA, 1050 bp, Homo sapiens
ctgtactgataatgatgaaaatgctataccagaatgtattgaatgtggtggttggcaaaaagttacagatttacatacatgaagaaaggctgaacattaattactaaatctttactaagaatccaatttaagttagaaaatgaaccacagaatacactttaagaaatgagaatggtgtgggcatggtggctcatgcctctaatcccagcactgtgggagggtgagatgggaggatcccttgagcccaggagtttgagaccagcctgggaaacatggcaaaaccgtgtctctacaaaaaatagaaaaatgagccaggtgtacctgtactcccagctacttgggaggccgaggtaggaggatcagttgagcctgggaggttgaggctgcagtgaaccgagatagtgccactgcactccagcctgggtgatagtgagatcctgtcttaaaatgaagaaagaaagaaaaaaagaatgagaaggaaggatattaattgaagtaagagcacatttgattacaaaatagaagaggagtaagtgagaactaaacggggaatacagatagcagagattaaataggctataagaaaaaaaagggatgataataagaccatggtagtacataaaaaatttaaatgatctgggtaaatacatttttaaaaacttactaagtgcccagtgcggtggctcaggcctgcaatcccagcactttgggaggctgaggtgggtgggtcacttgaggccaggagtttgagaacagcctggccaacatggcgaaaccccgtctctactataaatacaaaaattaaccaggcgtggtggtgggcatctgtagtcccagctacttgggagactgagccatgagaatcacttgaacccagtgggtggagattgggccactgcactccagcctgggggacagcatgagatgatgtttcaaaaaaaaaaaaaaaatgaaaggaaaatagaatgcctgaatttagcagtataccttagagcaatgtaagtagtttaaattattctaaataatgcaccgaacctatgttatttttac

SEQ ID NO: 22516 - DNA, 1032 bp, Homo sapiens
aaataagcaataagcaagttatgttttaatcataagacttacttggaaaattaagtataagaccatagtaagctacagatgcttctcagatacttcccgataaactcatcataaataaaaaataccattaagtaaaaaatgatgctttttttgttgttgtttttttgagatggagtttcgctcttgttgcccaggctggagtgcagtgcaactgcaatctctgcctcctgggttcaagcgattctcctgctcagcctctcgagtggctgggattacaggcgtctgccaccacgcccagctaatatttgtattttagtagatacagggtttcaccttgttggccaggctggtctcaaactcctgacttcggttgatccacccgcctcggcctcccaaagtgttgggattacacatgtgagccaccacgcccagccaaaaatgcattttaatataacctcaataaacctgttgtaaaggtgaaaaatcattggtggaccattttaaattagcggctgtctactattttgcactcactagttggcaaagcgttaattttaggaagtgttaacatgccattgttgggagtgactatcagagctttgaaattatagttgggtggggggttgtacaaaggatttctgtaagataactttcattaatcatatacttgaggaaatactggaaacttttatatccatgagttattaaacagtttttaggataactttattaataaaagagaatctcagcttaatactttcaaattgtttgttaacactctgttcagcagtaaagagccattctaccatgaaaaaaagttaatcttgttcattgctgaatttctatcccctagatggggactctgcacctgaggtatataataatgtttgttgaacaggtagctgcaggtgtaaacacaaacattattctggtgttagaatgttatccaggttgtaagtgaaaaccactcacctgtttcttgagcagaggttttaacattgaaatgtgcagagcctcgctgataggaatgga

SEQ ID NO: 22517 - DNA, 1054 bp, Homo sapiens
ttataggcgtgagccactgctcctggcttcatgttcacttttatttcttgctcatatctgctattagcagtttgactgacatgtgtcctaaattgcccttgaaccccataagcccctttttcttggtgaaatccctcttcatcagtagtatatactatttgcctgttaaatatttctagagaaatctgtgaaattgtttttattgggtctacctaattattgttcatctagacccgtaggtccgtgttttaaaagtttttttgttctgtcttgactccctagcaagttgtacgtgtgtggggtttttttgactctttttttcctttttgtggagaatggggtctcaccatgttgcccaggcagatctcaaactcctggtttcaagtctcaaactcctgggttcaagcgatcctccagcctctgcctccctaagtgctgggattacaggcatgaaccactgagcctagcccctagcaagtttatcacagagcttaaaactttctcagctcttatcaaactgcctcagtattcttgcaactctcactaagcagatgaccttaaggatataataacaggtttgaaaccattggacataatttacctgttgagagactgttccacataaccgaaaactctttttctttctgctggagagaatccactttcggtaaaggctaacttttgcatgtggtgttttgctttccttttgtaccattcttcagacaggattttcgtctctgtcctgtgtctcggatcttttttttcttggtttcttttgtctgctttccaacacgcacaggttctgctgtcttaatcaaatgacatactgctctccccagcttgtatttcgtcttatttcctcagtggtaacagatgtcacatgttgacttttttttttctttctttttttttttttttgagagagaatcctgctctgtcgcccaggctagagtgcagtggcatgatctcagcttgctgcaacctctgcctcctggttcaggctattctcctgcctcagcctcctgagtagctgggattacaggtccgccactat

SEQ ID NO: 22518 - DNA, 1088 bp, Homo sapiens
ttaggtgtgcgccaccatgcctggctaattttttgtgtttttggtggagatggggttttgccacgttgcccgggctggtcacaaactcctgagctcaggcaatctgcttgcctcaacctactaaattgcttgagactacaggcatgagccaccatgcccagcctaaaacagttttcttaaattgctcgtcttttggcctggattctgtgtttgtccagcaaccttctctttactgatgaatggaaccaggaaagggttgccattgtcagtgagtggaattgagattccggtgtatacaactgagtctccggtgcctttgtttaggctggagtgagttcctagaagctggtgattcttggtgttcttgtcagactcattactggaccagaggagctgatgatgagaccccaccccctacttaacccacctccatgctactgtgaggtcctagctgactggtctttccctcagcaacctcttgttctagtcgaaagtctatagtattataaacacgtgaaagtattgttctgaaagtaatgcttcaaaatagtcaatttgtggagaaacttgttaaattgtttaaattattggcaggatgacccatctgcaatggattttgtcacctctgctgcaaacctcaggatgcatattttcagtatgaatatgaagagtagatttgatatcaaatgtaagttatttgtactaaagttgtatcactaaaaccttgaagttgttttttaaacagtgaaacatactcatccttttttttttttcccagcaatggcagggaacattattcctgctattgctactactaatgcagtaattgctgggttgatagtattggaaggattgaagattttatcaggaaaaatagaccagtgcagaacagtgagtatttctgtttgcatttttatgcaaccccccttaaaaaaatcattaattaaaagtacattaaacagataatttttaaaatgaaaacaataaaattggtttaaagcaatggaaaagtaatttttctggttaccaagtgagtgtgtgtttaagcttcctggaaattgcaacaaaaaggaaaaattaagaagttg

SEQ ID NO: 22519 - DNA, 1049 bp, Homo sapiens
tattttaggagtctacttgagtattcaagcctcattctagccagctgacttttaaaaaaatgtttgtttgtgattatatgctgtcccttagttgtagccagctctttcaaatgctagcttaaaaatggaaactggtcaggaatttcagtggcttcagcgtgacccttctgtacggaatacatgtggtatggagggtgagacagcacttaccagaatatgtgtggagtcctgtatgacaggcatagttttgggtattcataagtcaaggatgaataagacaacagaccttggcttgaagtgccttgcagcctggaagaagggagattgtcaacagctggattgagcatcgtccaaggaaaactagaaagagtgtgtacacagtatgaatctaaggaaagtatattcagctttgtgaaacggagggggagtaataggagagggagtactcttgggtcagtttttgaagtagtagtgaggactccctggacaaagaagagagcatttagacagaatgaacatctgtctacaaaggtgtgaacttgtgaaacaacctaaactgccttgggagtggcccattatttggtttcgctggaagttggggtgctgaggggttggcagcagtggtgaggttgaagtctttcttgtcacatgtgcagtgtgtgtcttcctcctctcccttgacccctaccctccagaggaaggggcagtatttcactgccacctgccaccagggtttaaacaggggagtagcagggagctattagggaggaggggattgagggatttttactaaggcagaggcaggtgatagatttgagatttgcaaagtcagaacttggagcccagttgaggaatagcattacaatgttagcagcgttgttaggcgagcacaagacttcacaggtgatgctagttcaccaaaatgtgaacccacattaactggttttccttttgaatgtgatggttccaagaggtttgcagtcagtggagatgtgtgaaagggcttggaggtggaaatctgggtaagaatgccaagggcattcctggta

SEQ ID NO: 22520 - DNA, 1021 bp, Homo sapiens
atggtggaactgtgcctgacttgagatttatgggtagcatctaacaaacataaagggtttagtggtgctgccacctgcgtccagttattttgtcaatattttcatgagtatacaaacatgcatagtgttggtgtggttatttggagagaactacatttcatactttgtttataaaaagcataaaatgacaggaaggaggccaggtgcgatggctcatgtctgtgatcccagcactttgggaggctgaggcgggtggatcacgaggtcaggagttcaagaccagcctgaccaacatggtgaaaccccgtctctactaaaaatacaaaaattagctgggtgtggtggcatgtgcctgcagtcccagctactcaggaggctgaggcgggagaattgtttgaaccggggagccgagtttgcagtgagccgagattgcgccattgcactccagcctgggcgacagagggggactccatgtcagaaaaaaaaaaaaaaatgacaggaaggactgaatgtgagttattagtaagtagtgtatttcacagttagataatggagtcaaagtggtcctgcttcagttggacactagatataagtggcatgcttgttttcacttgtgaaagaaaagacagtggaaggacatgtacaataaagtggaaataccacaaggtatctaaaagaggaggcataattagggtttttaatcatattttttagctctctgggaacagaaccccaccccttaaaacgtgtgtcttttgtttgacttaaatgtttctgatgtttttgggagttcatgtacagaagcatggtgtagcttgtaaagatggggggacccagaaatcatgtagttctgcccataagacaccacattactatagttaagatcacattgtaggccaggcgtgacggctcacacctgtaatcccagcactttgggaggctgaggcgggcggatcacaggctcaggggttcaaaaccagcctagccaatatggtgaaaccctgtctctactaaaaataca

SEQ ID NO: 22521 - DNA, 1599 bp, Homo sapiens
aaaaattagccaggtgtggtggcgcgcctatagtcccagctgcttgggaggctgaggcagaagaatagcttgaaaacctgggaggtagaggttgcagtgaaccgagatcacgctactgcactctagcctgggtgacagagtgagactccgtctcgaaaaaaagaaaaagatcacattgtaagtagaggatgtagaaatctttttttggcattgtagctaaagaaataatgtccaagagttgctttaggccaccaagctttggacccagttttatgcttcagcaataaaagttatttactgttttaaagaaacaaaaaaccaaaaccttgccctgatttgaaagtgcatgtagagtttttgattatcacagaaatttgttgtgtaccgtcttttttattataagttcagtgctttgaaaattagaatccaaggtgggtatggttggctcacgcctgtaatcccagcactttaggagaccaaggtgggaggatggcttgagcccaagatttcaagaccagcctgggcaacattatgagaccctatctctcatttttttttaaataaaaattaaaaaaaaaattagaatccacatatttggtgtatacatagtgtatgctttgaggaacaacaggatttctctggtgctcctttgctttctaaatagtcatagcagtgacctgtgtgattctcctacagtgaagacctaggaaaggacgttgaatttgaagttgttggtgatgccccggaaaaagtggggcccaaacaagctgaagatgctgccaaaagcataaccaatggcagtgatgatggagctcagccctccacctccacaggtgagtatggccccagccagcaggttgttaaatacccacaaagcagaagtaaaaacaaactgattattaggaacattgaccataaatccataaaactactagaggtgtgtattggtttggtattgattgttgtaatggagctttgaatttatgaaccatgaagacatttaaggctgggtgtggtggcttacacctgtaatcccagcactttgagaggccaagatgggagtattacttgaggccaggagttggagaacagcctgggcaacacaatgagagacccccatctctacaaagaaaaaaaaaaattaaccacgcatggtagcgtgtacctgtagtctccgctactcaggaggctgaagtggttcacttgaacccaggagttcgacactgcagtgagccatgattgcaccactgcactgcagcctgggcaacagcaagaccatgtctcaaaaaaaaaaaaaaaaaagtcatttaaggcctggcatggtggctcacacctgtaaccccaacgctttgggaggccgaggcgggcagatcgcctgagctcaggagtttgacactaacctgggcaacacagggaaatcccatctgtactaaaaatacaaaaaattagctgggcgtggcagcatgcgtctgtagtcccagctactcgggaggctgaggcaggaggcggaggttgcagtgagctgggatcgcgccactgcactccatccagcctgggtgacagagcgaggcttccggctccaaacaaacaagtcattta

SEQ ID NO: 22522 - DNA, 1023 bp, Homo sapiens
tactcaggaggctgaggcaggaggatggctggagcccagaagttcaaggccagcctgggtaacatagcaagaccctgtctctaaaaaataagtaaataaaataaagcttttaatggcagtgggttttttgttcgtttttgagatgaagcctcacactgtcatctggcctggagtgcagtggcgcgatcctggctcactgcagcctccgccttccaggtgcaagcgattctcctgtctcagcctcccctgtagctgggattacaggcgccctccaccacgctcagctaattttttgtatttttagtagagatggggtttcactatgttggccaggctggtctggaactcctgacctcgtgatccacctgcctcagcctcccaaagtgctgggattacaggcgtgagccactgcgcctggcctaatggcagtgtttttaaaatttggattgtcagcagttggcctttgttgagaaaatgtgtgactttgcccaagcccagtaacttggagccttgaatttgagatgctggaaagggagtccttcctcctttctgcagtgtttgtctgggttgtcccctagtttaccaaagtccattttgaatgtaccatccccagcccaactccagcctacagatagtgccagaccgccagtaggtggagtagcactgtcttcctggtcccggacctcagagggctttgcctgttagggtactcttatcactcagagatgggccttgagttttcagagaacagaaagccattaagctgtttcccctattgtattcatgtgccctttgtgtttctggcaataatttattttatatttcaactaaattttaaatttctaattcatgtattgttccttgtgtaatttgtactgtaccattcagcttattaaccattactccttgttttccaccatttgtaaattcagcatgtaatcagagctttcagaaaaaccatgtagaagactgggtgtggtggctcacacccataagccttgcactttgagaggctgaggcagg

SEQ ID NO: 22523 - DNA, 1053 bp, Homo sapiens
catccttggccgggcatagcagtacctgcctgtggacccagcttcttgggaggccgaggtgggaggattgcttgagcccaggatgtcaaggctgcagtgagctatgattacaccactggactccagcctgggcaacagagcgagactctcctaaaaaaaaaaaaaaaggccgggagcagtggctcacacctgtaatcccagcactttgggaggccaaagtgggtgaatcacctgaggtcaggaatccatgaccagcctggccaacatggtgaaaccctatctctactaaaaatacaaaaaattagccaggtgtggtggcacatgcctgtaatcccagctactcgggaggctgaggcaggagaatctcttgaacctgggtggtggaggttgcagtgagtcgagatcacgccactgcactccaacctgggcgacagagcgagactctatctaaaaaaaaaaaaaaaaaaaaaaaatcctgcatctaacgccgtagcactcgtctctgcctgacgttatttgactgctgttctctgccaccttccactcgatgcaagcttcttgaaggtggggacctgggtgcattgcagactgagtggtgcctgaccttaggggcatgtgactcatctgtgtgctgactgaccaagagaataagtggaccctggcatacagaggaggacagagtgggtacagaggaggacagagtgggtacagaggaggacagagtggctgcagaggggtggtgactgcccctgagtgcccatgtggtcttcattctttgtgtctgggtcacaaaacatgttgaagaacaggatttggttcacaaacagcatgaaggattttccctcagtccaagagcaggccatggatgaaagggcttaaagcaactgtcttggtataaagataccatgataggctgggtgtggtgactccacgcctgtaattgcagcacttggggaagcccaggcaggaggattgtttgagcccaccctgggcaactgggcaacacagcaataccctgtctctacaaaagaaaaaatcagccgtgcgtgatgg

SEQ ID NO: 22524 - DNA, 1022 bp, Homo sapiens
gtgggtggatcgcttgaacccaggaatttgagaccagcctgggcaacatagtgagaccccatttctattaaaaaaaaaaaaagaagaggccagtacaggaaggcatggcagaagctgttccctgtctgccccgaggtgtgcacacagggagagagggcctgatacttgggctacgtcagtgggttcctgtgggtgcccctgtgcttgtgcccttggcctctggtcactcagctgatcacttctggtttcctttatttctctagggtttttgcaccaaaatgcgcctcctgtgcccgtcctatcctccctgcacaggtaggagccactcacccagagatgatcaggtgcctggcccagccggctgctgtcctgtctagcctgggtctagcccaggtcttgggcgacagtgggagggatgagcaggtgcttctccgcagatctttcagggctgagggatgtgtgttgtgcttgtgtacgtggggtacagctgtcccctggcacaaggtcgagggaagtggtggcccctgccgctcagctgccccactgccagcctctgctccattctccattgatggaagggccgttccctgggtcttctcagctctgcaggctgaggtgggggtgctgggggagcagatgagagatggacgtggtctgtgcgggagccacccatgggtgctacagctctcctggcctggggtcttcccacagtgctggctctgtcccaggctggtgtgcctggcaaagcagaactggcagtgcccttttgagactccaaggaagtgaaaacaggccgggcacaggggcccacgcctgtaatcccagcactttgggaggccaaggtgggatgattgcttgaagccaggagtttgagaccagcctgggccgcctagtgagaccccatttctacaaaaaaaataaaaaattagctgggtgtggttgtgcatgcctgtagtcccagctacttgggaggctaaggcaggaggattgcttgagcccaggagtttgaggccgcagtgagc

SEQ ID NO: 22525 - DNA, 1030 bp, Homo sapiens
gagcacagggccgctccctcctccacccacttgcttcactttgccctcggggctgccaggttgtggttgtcttcactttcgtttctccttgagtctcttctgcccaggcctgttctcttcccacctcctcatggaaggttctgctgtttgccgtcttctcttttctagtgatctgcaccccctggaagaggtggtctcctgttttgtctttaaaaaccatcacgtgaccgggcgcggtggctcacgcctgtaatcccagcactttgggaggccgaggcgggcggatcacgaggtcaggagatcgagaccatcctggctaacacggtgaaaccccgtctctgctaaagatacaaaaaattagctgggcgtggtggcgggcgcctgtagtcccagctactcgggaggctgaggcaggagaatggcgtgaacccgggaggcggagcttgcagtgagctgagatcatgccactgcactccagtctgggcgagactctgtctcaaaaaaaacaaaaacaaaaaaccccatcacgtttggctgggtgcggtggctcacgcctacaatcccagcactttgggaggccgaggtgggaggatggttgtgaagccaggggttcaagatcagcctgatcagcatagcaagacgccatgtctacaaaatacaaggggaaaaaaattagccgggcatggtggcacatgtctgtagtcccagctgcttgggaggctgaggtgggaggactgcttgagcccaggagtttgaggctgcagtgagctgagatcgcaccactgcattccagcctgggcgacagagtgagaccctgtctaataaacaaaaaacaggccaggcacggtggctcatgcctgtaatcccagcattttgggaggccgaggtgaaggatcacttgaggtcaggagttctagaccagcctgagcaacatgaaaccccatcactacaaaaaataaacaaaattcacagggcgtggcagggtgcgccagtggtcccagctactcaggaggctgaggtgggaggatca

SEQ ID NO: 22526 - DNA, 1032 bp, Homo sapiens
gagaattatgggagtacaattcaagatgagatttcggtggggacacagagccaaaccgtatcagaccccgtctctacaaaaacaaaaacaaaataaaaaaaagtagctacgtgtttgggcctggctttcattatttaccaaggatcaagacctgaacatgaaaatggcaggccaagggttcctgcctttggatgcacatggccaccttgcccactagaacatctgtgccaagcagtgttcccatcaatcataggaaaataccatttcccgcatccttaccaaccctaggtattgccaataagaaaacaaagtctgtatcaatttgatgaaaataatttgaatgtgtgcatttgatgagctgtgagaatgagaatcttttgcatgcattggccatgggcttcccttttgtgagttgcctgtgaatgtccttttcccagtttactagtttgggattgaatattcttacacatttatttggtgaagaacttttatttcaaattatgaaagaaaaaaatacttgctagaattctgatttgaagtgctttcaaattctgtgttaatttggagctgacaccctttaatattgagtcctggctttgagggtctggtgcgtttcctccattcactgaagttttattttacatctctcagtaaagctttatggattagggtcttcagaagccttacttgtttttctggctctattttcttgtccagaaactccaccactgtgctaaagagacagtggtggaggtgctgggcgtgctgcttttctcctggctctaatgggaaggccaagaggcaggtcagggtcagactccaccttgagtctggcattggctgttggcatcatgaggaccccacgtattgtactttgataaagttaataaatggaattctcctttacctcaagaatgccttatgtgttgtgtgtagcatgcaccttcttgtggaaacagcttcacatgtgagagccctagcacgcaggtgatttcaggaccacccccagcccatcccgtggcgcaggatcca

SEQ ID NO: 22527 - DNA, 1031 bp, Homo sapiens
tttgatttgggataaagggaattaactaacacagtggcaactccaattaacaggtgaatttaggataaattatgtgtagcaaattgaactgtaaggtcttacttgattatttggaaaatgtatgtattggattgtatctgcttggctataaaaaagagatttcttcctgtccttttaatctcattagtggattgcctgtgaagtgcatcacagttgatttagtgattattaagtaataaaactgtgttctttttttctacatttgtggagaggattttctgccattggcaggagatttgaattttaattattttcccaacacctggcaaaaataaattctgcctttaaaaccaaagacgagtatcactggtgaacatgcatgcaaaatatccaaataatgtaatacaatgctgaattaactctcagagctaaaaaattaccacaggcaagcagtctgtttcacaaatcaaagacagtaataatgctgtattaaatagatgtattttttgtacatattataatttgactagccaataaactattattgaatatttaagcttccaaagttttactaaaaagtaatattgtgaaatgagtactattgaaaggaatttctaagccacatctgtgaacatttccttattttctttgaaacgtacccctttatttttttccctttactttcaggtcttatttaaggactatctaaggcagtggtgcccaacctttttggcaccagggatcggttttgtggaagacagtttttccacagaagcaggaggtggtggtttgggggtgaaactgtttcacctcagatcatcaggcattagttcaattcacataaggggcgtgcaaccttaatcccttgcatgcgcacttcacagtagggattgcgctcctatgagagtctaatgccatagctgatctgacaggaggcagggctcaggtgataaaagtcatttgcctgccactcatctcctgctctgtggcctgatttctaacaggccacagactggtaccagtggttatgt

SEQ ID NO: 22528 - DNA, 1049 bp, Homo sapiens
accatgctcatccacttgccacatcataagcttccagcctatgtgattgttatgttattgctcccttactacactgaaacgttttattccctctcctttcaccttgaaagcattttctttgattttaccagaaatatgtgggtttgcagtatcacggatcagtgacatttgaggatgtggccatagccttctcccagcaggagtgggagagtctggactcttcccagaggggcttgtacagagatgtgatgttggagaactacaggaacttggtgtcaatgggtaagtgtacttctctcaaataattgagaatctgctccctgttatactttctcctttgcagattttagggctagcttaagaactgaacacgatttcttcttgttgccagagaaatgatttgagctttgttaggttggaaatgatccagtggcaggattagaattctggattgtctattgcaaaacattgacaaaagaggccaggttttctattatgtttttgctctaaattgctctaaatgctctgtgaaaatctgacccaccttgcaggcagaacagctagacaaagggtcttgatttgttctatctgaagacctatacaacttatatgccggcggattggataaacaaatcatttaaaactgaagttacctcattttatttcatataaaataatctgattttgtggttaaaattcatcatctctgaactttgcatttaagagtaaatgcaaattaaatctatatcctatagatatagatgtctaagcagactttgtttttgtcttagcaaaataacaataataatgttattaacacacagcgtgcttactgtgtgctgtttcactgttctctgctctttatattaatatacatttgtattaactgatttttaaccttacaagcactctataggtgctaaccattttaggtgagaatgctaaataaagcacagtgtgtttaagtgagttacgcaagatcacacagcccataggtgacggtagcagaaacttgaacccaggcacttaggttccacaatccgcgttct

SEQ ID NO: 22529 - DNA, 1030 bp, Homo sapiens
gtccagatctgttatcgggattacaatgctaatatggttctccccattttgagggtcctcttgtgtagcgtgacattaaaaggcttggaggtagaaggaaacagtccaaagttctgtttcagtggtgactgaagttttgttttgttttgttttgagatggagtctcactctgttgcccaggctggagtgcaatggcgcgatcttggcttactgcagcctctgcctcccaggttcaagtgattctcctgcctcagcctcccaagtagctgggattacaagtgcccgccaccatgcccagctaatttttgtatttttagtagagacagggttttgccatgttggccaggctggtcttgaactcctgacttcatgatctgcccactggtttcccaaagtgctgggattacaggcgtgagccactgcacccagcctgactgaagttttttgacacaaactcaggtccagtttctctcctctttgaattaagttatctaaaggtctctttttctgacaagggggatgaatgggccacagtgatcctaggagataacaggaaccatcctaaaggcaggtattgagttcagtgagttaacatatctaatccagttttgcagttggtttttgtgtacaaacccagtgctttagtggccaccccagtgatctcgtcctatgggcttatcaaataatatggcaatattttaaaaggtggtaaacagttttgtctcaatatatcaaaggaggcaatgtgtatcttatcagcagatatctaatgtctggccgtgctcctcattaaaagactgtttactagattacagtgataatggtccaaccccacattattgagtatgtttctccttgtgactaaacaataatctgtgtgatcttagtttattctcaagaagtacacgtttattcagtttagcagtatatcttgtcatggttttaacaacaaatgataattctcattggaattataaaatatcattctttgtatggagatattttattacgattatttcttttgtataga

SEQ ID NO: 22530 - DNA, 1048 bp, Homo sapiens
ccgctgcagaggtcgggggcctctgcacatggctctggccggggcgatcggggtgggggcggggcagggggcccccgggcgaggggtgcagctggggagtggggcgcggacgcagggcagggcccggggtctgggtcgccactgccggcccgcgacgcactgggttgcggggtttggctgggggcccgcgggttcatctggcggggagggccctcaggcctggcaaccccctgcctggtaagccaggggtgagcgcgaggccgaactggggctccggcctgggatggagacaggatcgggaccagcccaggcccacaggccgcggagccctgggcgcgccgggagtaggcagccccctcctgcctgggccccctcccaccgtccttggctgttgcgggtctcggggctgccgggggtgggggcttcctgcgtctctccaggaccgcgtgcttgaggtcatggagggcggggggtcctgtgtgctcggaattgacttcttactccccttccggtccaggtgggcgcatgtgcttccgactgtgaattgtcttgcaagtgtgtgtacgtgtgtctggggctgctagcctgcagcagctttgggcctctgatagagttcctgcgtgtaacttaaccactaattctgaccgcggctctgtgtgtcactgtaagttacctgtgtgtgtctggggctccaaatctgtggctgtgagcagctggttgtgtgcgtgttgtgtctcattccatctgtagctccctgtgcaaatataaattacccctgtgtgtctgagtgtgacgttggagtgtttgtacatgtgtctggagttaccgtgtgtagcagctctgatccttcttgggctgtgtgtgttttaccattaattctatctgtagctccaagcgttgctgtaagttaccagtgtgcgtcccattgtgacttagtggtgtgtgtacaagtgtgcctggggctctgggttctaccatgaccctctgtgcctgcatatgcctgtaatttagctctgaaacgctcttctttttttttttttcttttgaa

SEQ ID NO: 22531 - DNA, 1059 bp, Homo sapiens
gtcaccaggcctgtgcacctccgctactccctcagccccactggccacctcactcacactcagacctgccaggctcagtcctgtccctgagcttgatgttctccacctggagtcttctcccagcctttgccacatgtgttctttgtcctcaggtgaacaagtgggctttgttcaggaaggcttttgctgactgttactaaagaaattggttgggcacagtggctcatgcctgtaatcccagcactttgggaggccaaggtgggaggatcacttgaggtcaggagtttgagaccagcctgggcaacatagcaagaccccatcactacaaaaaaactttaaaaatcagctaggcatggtggtgtgagactgtagtcccagctatcagggaagctaaggctggaggatcgcttgagcccaagagttcgggcctggagtgacctgggaggctgaggattgagaattccttgagcccaggagttcggagctgccgttaaccatgattttgccactgtactgcagcctgggtgacagagtgtgaccgtgtctctaaaaaaaatttaaaaagcatctctgcccccctagttgtcccatcccttatctctgtggtcctcaaacttgaatgtgcgtcggaatctctggccccaccccagttctgattcagaaggttgggagtgggtcctggactctgccttttgaacactttccaagtcctgcctgctgctctctggggctcatactgagcagcattgctttatggcgttcaccagtgtctgaggtcgccatccctgctcacttgttttcttactgacggtctatgtttccctgtttcagcgtcaggtccttgcaggcaggggcttgtatgggctttgctcacttccttgtggcgggtgcagggtatttagaggtgaaaggctggagttgagggtcagtcatggaggcgcctaacatcaggcgtagtgcttgtgaggtccctgtcagggtcagcagagcgtcatgggcagtggtgcactgggctggcagccgcgctgtacactccatcttagtccgccagtccctgtg

SEQ ID NO: 22532 - DNA, 1035 bp, Homo sapiens
ccctgggccccttggatctgctgcccagtgaggagctattgacagacacaagtaactcctcttcatccactggggaggaaggtgaggcaggcgggcccaattcattcgcctccggtacttgcaagcctcgctcagtcttaagcaagaggggatggattcgcccgcagcactgagaatccaggggcaggcgggatggcgttcaggcgctgttgctagaaatctctgtctttactctgttttgaaggcagcatggcagggtgaacacaagcacagactgaaggcagcttgccgcggttcacatcctggtcacaccacttcctgaccatgtcacgtgggcaaattatgtaacttctctgagcttgctttcctcctctgaaaatggggttaacaatgataatacccacttcataggattgttgttaagagactataaatgaggctgggtgtgatggctcacacctgtaatcccagcactttgggaggccaaggtaggaaggattgctagaggccaagagttggagaacagcctgggcagcaaagcaagaccccgttttgtacaaaaaagaaaaaaaagaaaaaactaggtgtggtggtgcacacctatagtaccagctacttggcagaccaaggcaagaggatcacatgaggccaagagtttgagacaagcctgggcaacatagtgagacccctgtctttacaaaaaatttaaaaattagccaggcatggggtcatgcaccctatgtagtctcagctactggggaggctgaggcaggaggatcgcttgagcccaggagttggaggctgcagtgagctatgattgcaccactgcacttcggcctgagcaacagagcgagaccctgtctctaaaacgaacaaagggagagaattaagtgatttcatacatttaaagcacttgggccagttagtaagcattgactattagtatttctattatcattattgtattcattttctctctccactaattttcagctagcctctattcttgtctcttatggggcagagatggcctca

SEQ ID NO: 22533 - DNA, 1052 bp, Homo sapiens
atcctcggctctcctctgtctccagcggacttggctgccctgcttcccgacctctccggccgcctcctcatcaactctgtcttccatgtgggcgctgagcggctccagcagatgctcttctcggactcgcccttcctccagggcttcctacagcagtgcaagttcacaggtcagcgggcgcatgaaggagaggctgaggttacccaggtgcaggggaggggtgaggaagggtagcccaggacaggggaaggcactgctagccagtggggcaaggcgaggtggtgaaaagcaatgtctgtcagaccagaagcagctctgccacttactagctgggtaggcttgggcagagttctgagatgctctgtgcctcagtttctccttctgtataatgggggtatgataatagtacctggcttattggttatcatgagaactaagtgagttcatactagaaaagttcctagagcaataccatatagtaagcgtttaataaatacaagttaagaggctgaggcggggctggtgcggtggttcacacctgtaatcccagcactttgggaggccgaggtgggcagatcactagaggtcaggagtgtgagaccagccagggcaacatggtgaaacctcatctctactaaaaatacaaaaatcagctaggtgtggtggcacacacctatagtcccagctacttgggaggctgaagtgggagaattgcttgaacctcggaggcggaggttgcagtgagctgagatcacactgcactccagcctgggtgacacagccaaactctgtctcaaaaaaacaggggcggggggtggggtgctgggcacagtggctcacgcttataatcccagcgctttgggaggccgaggcaggtggatcacctgaggtcaggagtttgagaccagcctggccaacatggtgaaaccccatctccactaaaaatacaaaaatattttagccaggcatggtggcgagcacctgtaatcccagctactcaggaggctaaggcaggagaatcacttgaactcgggaagcagaggttgcagtga

SEQ ID NO: 22534 - DNA, 1033 bp, Homo sapiens
ggaaagggcggggcaggatggggtggggaggagatgaaggctgaggccccatcactcatagagagggtaggcagggccccccatcctgcgttattttattttattcttttgagacaggatctcattctgttgcccaggctggagtgcagtggcacgatcatggctcatcgctgcctcgaactcctgactcaagtgatcctcctgcctcagcatcctgagtagctgggactataggcaggcaccaccacacctggccaattttaaaattttttgtagagaccagagtctcaccatgttgcccaggctggtctcaaactcctggcctcaggcaatcctcccgcctcggcctcccaaagtcctgggattgcaggtgtgatccaccacgcctggccctgagttaaatttttatcattttcctctctgtcaaactgctaagggtgcagagttgacgtcacagattggtgctcacagtagatgtagactgagcacttacctgcagctgggctgttctaggttttaagcatgactgctttatccccacagccagcctttgagaagatgctcttgttatcccagtttttttgagacagtctcgatctgtcacccaggctggcgtgcagtggtgcgacctctgccttccaggttaaagcgattctcgtgcctcagcttcccaggtagctgggattacaggcacccgccaccacgcctggctaatttttgtatttttagtagagacgggctttcaccatgttggccaggctggtcttgaactcctgaccttaagtgatccaccggtctcagcctcccaaagtgctgagattacacgcatgaggcactgtgcccggccgttatcccggttttatacataggtaggcgatatgaggcatccagaggttcgaggagctcaggagcttgcccgaggtcacagagtgggtaatggtgacagctaacatgtgctgagcacttagtgtacaccaggttctcagtgctcttcagaaccctgaaataatcctgtggagcagatgtgttatag

SEQ ID NO: 22535 - DNA, 1051 bp, Homo sapiens
cggtccggaggaaccccagtggaagtggagaagtcaggcgccaccaacaagcctctcccagccaggactttgcttagactcgctcctcccggcagggcgcacctaggcgggtccatcgccagccggggagaggggtttgggcagggagggaacaggtgcgcggcgggacccgccctatctcaacaggtgaatcgctccaagtgggtctcggttgcatggatctcggtgcgcttggtttggccggagcagatgggggccggaagggacctgtggtccgcaggcgccctcccagcgggccagtcacttggttcgggccctgggggacggagcgcacctgggtcagcccacttccggggagggaggcagaggaacccctccccgccgctcacccctaagcccagccctcggctcccacccttgtgtacctgggccgaaccattcaccggagcgcgcagcgggtggagtgtggctcggaggaccgcggcgggtcaagcacctttctcccccatatctgaaagcatgccctttgtccacgtcgtttacgctcattaaaacttccagaatgcaacaggacggacttggagtagggacaaggaacggaagtgggaaggggaggagcgtgcacccctcctggccttggtgcgcgccgcgccccctaaggtactttggaagggacgcgcgggccagacgcgcccagacggccgcgatggcgctgttggccggcgggctctccagagggctgggctcccacccggccgccgcaggccgggacgcggtcgtcttcgtgtggcttctgcttagcacctggtgcacaggtacggggcacggggcctctgacgctgcggaacgccggagggaactgtagagggggatggatggagttggaggcggcgggaagcgggaagcgggggtctcagaggctgggaccttccgatcccctgggtcttgggcgatctgttgcgcgcgggagtgagaggaattccccatttgtgccggggagcgctccccgcgcccttatctggaagatagcaggaagtgaaactccctggac

SEQ ID NO: 22536 - DNA, 1025 bp, Homo sapiens
ggagccccgggggtggggcaggtgtcgcccagcggatgctgccttcaggcctcaggctgcatggggccagatccctgttgtgcaccgtgaaacctggggacagtgctcttggaatttttttttcccgcaaaatgggaatgatgtgtcttaagaggaaagtttcttagagtgcgaaacggatttgctcagcaagtgatcgctgacctcccgccatgttccagggctgtttgaaacacaggacagaatgctacacgcagaaggagtccccactcctgttaattgcagagaatgcagtaaaccccaagcacagcaatgaggggacgggatggaggaacagagaaagctaagggtagcctctgccctcctactccccaggctgtgatccaaaatcccttcagcaatggtggcagtccggcggccgaggctgtcagcggggaggcacgatttgcctatttcccagcgtccagtgtgggagatactacggctgtgtccgtacagaccacagaccagagcttgcaggctggaggtgaggagtagaagtcagattggcaggtgggggaggcaacgggcccagcagggagggaagcccccccagccagttctgacttcaccctgccttgccactaaccccccactctccctgcaggccagttctacgtcatgatgacgccccaggatgtgcttcagacaggaacacagaggacgatcgccccccggacacacccttactctccgtatgtgcaggggacacctggagggcctggtgttgaaatggaaggaagaggggtttctggagtagaagctgggcagttagcatgaagtgggcacatggtgtaatgttttttttctttgcctgtttctgctgctctagtgcacataaagtatcatgtcttttgtttttgcagatggatttaccttgcaaagataattttcaaatctaatacttagcagatgcttgggcaaacagctctgcgataatacatgccccctttttttttcctcctcttgtagaaaaattgatggaa

SEQ ID NO: 22537 - DNA, 1051 bp, Homo sapiens
gagttgggggtagctgagcgttctttcctgtccccacggtgcctggtgctggggcttggcagccagggttgggacagcctggctttagcaggtcctgagtcaggggtctcaggctccgcagcacacagtccccaggcaggtgtcaggatgggatgtggccagagaaaggcatgtgctctgtctggggatagctgccacccagctgacacagttggcatgagattgtggagttttatggagtaaaatcacaaatctgggttttttaagtaaaaccttctatgagttgccatctctggccttcaacataggatttgggtctttcctgggtgagctggtgctttgtgggccaggccctgggagctgcaagtaccagttgggatctgccattgccctgtggaaggattttaagcaggggtgaaacatggtcagacttggatttagagatgaggaaaaaaaacaaaatcacggtgccagagtctctggggagactggagaatgcagtgcaggggccgcaggagccaaaaaggggcactggtcctgcgaagagtggctctgtccatccctgccttccagtatgtgcccactgtgaccagagctccatttctcaaaagaagccagtgatgccaattaccatgagaaatttccttatttttaactgtcgattaaaatttgtacaagtatggtggggcaggcctgcaaaatgatctccaagtgcctggcctttgatgcccgtcctaaaagcatgtgtggcactggagggcccacgtttctttgttcctcttgagaagctggggtgggggccggctgggctcagggtgcggcccctcacttcccagggctgtggtctcggtggggcctgcactgttcctgggtgtccttgggctgagcctctgccctgtgaggacggccgctcaggcatgatccgtcagcgaagccgtggctgtgactctgttttccgcagtggagcggaggcggagggacaagatcaacaactggatcgtccagctttcgaaaatcattccagactgtaacgcagacaacagcaagacgg

SEQ ID NO: 22538 - DNA, 1062 bp, Homo sapiens
gtgaataagtatcaactgttacatgaacatatgataatcttccgaatgaaggtacatgtgtgacatccatttgccataacacattaggacacagacctctgggattaactcctgcctcttgagtgggcaggtgtaggacttgacactgggtgcaatgtggtacagtatcttttgcctgtttccatgtgacatcaaatttgttttttaatcctgctgcatttacatgagttaaagcatgaagttcttgtgcttttatgaatgcagatgataccagtaagtcagcttgttaatttgctttagtcaaaggccctagtaaattagtgtgtgctcgaatatgagtaacataaaatgggaaatttctttttcttacagtttgttgtaataaattgaatagctggtttaactgatcatccatgctatatttgattagagctgtctcaacatcccttgtagcctgtactacatatgcagaatctgatacaatattgataggttgatcaaaatcttgtaacactgtaatgactgcaaccaactctgctctttgagtcaattgatattgagttttgattactcgctcatcagaccccagaaaaggtgttggttgatatagacagcaggacggtggccatggaagtcagaatccactaaggagtgtgtaacaactcacctgccgaatcaactagccctgaaaatggatggcactggagcatcaggcccatacccggccatcgccagcagtcaatggaatgtgagtgccttagaggtcttggggccgaaacgatctcaacctattctcaaactttaaatgggcaagaagcccagctagctcagtcggtagagcataagactcttaatctcagggttgtggattcgtgccccatgctgggtgccagatgaagaggtgagttgcccctaaaaaggataccctattccttctctttcttaatttcttttagtctcaattgggactttaatgccattttcattttttcctagtccctttcctggtatatatcccatctcagtcatgattttttgatttgcggggctgtataatggagc

SEQ ID NO: 22539 - DNA, 1050 bp, Homo sapiens
tccagcctgggcgacagagcgagactccgtctcaaaaaaaaaaaaatagttcttatctgttaaggagacataatggcgcatttatgactgagttgatgtctggaatttgctttaacatactccagcaaaaaaatataaaaataagaaaagtataaggccatgcgcagtggctcatgcctgtaatcccagcactctgggaggccgaggcgagtggatcacttgagatcagaagtttgctaccagcctggccaacatggtgaaaccccgcctctactaaaaatacaaaaattagccgggtgtggtagtacacacctgtaatcccagctactagggaagctgaggcaggagaatcccttgagtccaggaggtggaggttgcagtgagccgaggtcacactactgcaatccagcctgggcgacagagcgagactccgtctcaaaaaaaaaaaaaaaaaaaagaagaaggtactttgtaacattctccccgcccttgagaatgtactttataagcctatcccaaacctgtaagaactaatgataatcccaccaccctttgctgactcctttttcggactcagcccgcctgcacccaggtgaaataaacagccttgttgctcacacaaagcctgcttggtggtctcttcacacggacgcgcgtgacaaagaagtatagatcaagtgaaatccagaagtgttgaatattggtagcgtttgagatgtacttaagagtgcgttatactattccccttaatgtgcatgtttgaaaatactcagaataaaacacttgtgagggctacgggaaaaaaaaaagggtcagctgtggcccaagaaaggacagggaccaagcccacggacgtgctcctctgagttgcactagtctctgggccttggctcccaccctgaacagctctcatctttaaatgtcttcagctgtcctcctccaggaagccgggtcaggcgcttcctcccgggcgtctccggtcttcctggaaaccacaggtcgggtgtcaacctactccaggataggggccccgaggggccagccaggcct

SEQ ID NO: 22540 - DNA, 1027 bp, Homo sapiens
gaccaggcttgattttgctgaggagttgtaccccaaccctgccgcgacctcgacactcagatgtgtggattcgccctgcccctcatctctgtgtatgttgagaggcaggaacttgttcacacccagcccattgttccgtgcctgccctcttccattgatcctgggtagtctggcttgctcagggcccctggggcccctgctgacacccactcctttcgcctccaggattcagcaccatggcggaagacatggagaccaaaatcaagaactacaagaccgccccttttgacagccgcttccccaaccagaaccagactagaaactgctggcagaactacctgggtaagcaggacctttccctggccacatacctcgagtcactcaccgcttgcctcttcctaggggacccatccaccccagcctcctcccttttattctgaacatccttactctggaaggcccatgcctctcatcacctgctgttcaggtccaggctagggttacaaactttagttcctgcaatgattttttttttaatttaaattttttattattattatggtttggttttgtttttttccagagatggggtctcactttgtcacctaggctggagtgcagtggtgcaatcatagctcactgcagcctcaacctcctgggctcaagaggtccccctacctcagcctctcgagtagctgggaccacaggcccacactactgtacttggctaatttttttgtagagaagaggtctcagtttgttgcccaggctggtctcaaactcttggcttcatgcgctcttcctgcctcagcttctcaaagtgttgggattataggtgtgagccaccgtgcctggcccctacaatgatttttttttaagctgtatgtgtgtgcgtactgtaacatgtacagaaagcacataacaaacatgtacagctaaatgaataattctaaagtgaaccccttgtgcaaccataacctggagagaaaagcagacattgcccacactctcatctccctgccttctt

SEQ ID NO: 22541 - DNA, 1062 bp, Homo sapiens
tgggattacaggcatgagccaccgcgcctggcctccccaccttctttatgtcctgtctggaacacagcaccccgctctccccagtagagaagtgacgccactaactgggggttatcacatctttgtttttggttttggtttttgtttttgagactgagttttttgttttcgttgcccaggctggagtgcaatgtcacgatctcggctcactgcaacctcttctgcctgctgggttcaagcaattctcctgtctcagcctcactagtagctgggattacaggcacccgccaccatgcccagctaattttttgtatttttttttttttttagtaaagacaaggtttcaccatgttgatcaggctgatcttgaactcctgacctcaggtgatccacccacctcagcctcccaaagtgctggaattacaggcgtgagccactgtgcccggcctcacatctttgttttttaccaccatgtttattattttattttattttatatatgttatgttgttatgttattgatggagtctgtttcttgttgcccaagttggagtgcaatggcacgatctcagctcattgcaacctctgcctcccgggttcaagtgattctcctgcctcagcctcctgagtagctgggaatacaggcgctcgccaccacacccagctaatttttttttttttttttttttgagacggagtctcgctttgtcgcccaggttggagtgcagtggtgcaatctcgactcactgcaacctccgcctcccagcttcaagcacttctctgcctcagcctgccgagtagctgggattacagtcgcctgccaccatgcctggctaattttttttttttgtatttttagtagagacagggttttaccatcttggccaggctggtcttaaactcctgacctcgtgatccacccccctcagcctcccaaagtgctgagattacaggtgtaagccaccatgcctggccaattttatttatttatttgagacagagtctcgctctgttgcccaggctggagtgcagtggtacaaccttggctcactgcaacctccg

SEQ ID NO: 22542 - DNA, 1059 bp, Homo sapiens
ggcctcatcctaaggccgagcacagtggctcacgcctgtaatcctaacactttggaaggctgaggcaggtggatcacctgaggtgaggagtttgagatcagcctggccaacatggtgaaaccccatctgtactacaaatacaaaaattagccgggcatgatggcgggcacctgtaatctcagctactcgggaggctgaggcaggagaatcgcttgaacccgggaggcggaggttgcagtgagcggagatcttgccactgcactctagcctgggtgacagagcaagacactgtctcaaaaaaaaaaaaaaaaaaaaagcctcatcctcaaggagcttttagggactagtaggggcccaaaacaggggcatagtggaggcagctaaggtactgctaatccttgaacagagacactcagggctgagtgggaactccagcacctctgactccttctcttccctttctctaggaaactactgcccgatctgtacacgctgctatgaagacaacgactatgagagcaagatgatgcagtgcgcacagtgcgatcactgggtgcatgccaagtgcgaggggctctcaggtgagtcagtggagcacctgggctgcagcctcaaccctgtggggacccctgcccccaccacaggccccaagaggactggtgggctaagggtccttgctggcctaggggctgctgggagccctcacatcctctgaaaccacttttccctttcccacttggctatcctagatgaagactacgagatcctttcaggactgccagactcggtgctgtacacctgcggaccgtgtgctggggcagcgcagccccgctggcgagaggccctgagcggggccctccaggggggcctgcgccaggtgctccagggcctgctgagctccaaggtggtgggcccactgctgctctgcacccaggtctggagggccctggaggcaggatgggccggggctaggcccacccccagccctgctaacttccccgctttgcagtgtgggccagatgggaagcaactgcacccaggaccctgcggcctgcaagc

SEQ ID NO: 22543 - DNA, 1052 bp, Homo sapiens
caggtctttccccaaaaccaccccaggaacccgcccagcttttcttttgtttattcatcgaatacgtgtctatcaaatacctcccatggacctggccccgtccctagcactggggacccagcactgagcatggccctgtcctcctgggactcatgttctcatggaggagatggaccatgaacatcaacaggaaaaatacagagtaaagtctgatggtgatgagtgctgaggaggagagaggaggagggaagggcagtgtgcagggtcagggcagtgtgaagtttttagcgagagtggcaagggaggctttggcaggtcttctgtggccagcagcagaataagcctggaggatttgatggtgaacgagacaggcatgatctctcccctgccggagttcacagtcttctgggggcacagatacataaacaagtaaaacaggtggtatgtcagaggacgggcgtaagatgtacggagaaaaataaacgagaaaggccaggggtacagagaagggagtgtacagttttgaataaagtgggtgaggaagactgcactaagaaggcaatatttgagtcaagacctgcagaggatgagggagggccccaggtgcgcacgtggggagtgacaggctgagggaacggcaggtgcagacatctgggcctgggccggtgcctggtgtgttggaggagctgcagggaggccggtgtggctggagctgagtgagtgaggggctgagggagaggagatgatgaggtcagagaggtgacggggaccagacagaggggtgactcacaggtcatgggtcacagtgaggactttgctcttgcctggagcgaggtgcagccagggcagggctctgagccaggcgggccctgatggaactcaggtggtctcaggctccctctggctgcaggtgggagcatactttagggtggggaccggaaggaggctctgggatgtccaggctgggggagatggaggctgggccagatggggggcagtggagggggtgacagattgattgtgggagttaaagaggggggctcagggcaacc

SEQ ID NO: 22544 - DNA, 1047 bp, Homo sapiens
tgtatccagggattctctttcccagcagcgccagtgcgactccatgggaggtggggccggggcgcgtctttgagagaaggggcgggtgcctacgcctttaagcgcgggtgcgcgcggagcctgcgcctttaagcgccggtgcgcgcgctgccctgggttgccggcgaggaggccgcgggagcgcctggacccggcccgcccagcccggcccccgcccggcccccgcctcggccccggcgggggaggggtctctgagcgcggcccctcccccctgcgcccccgcctgcgctgcggtgcccccatcccgcgtgtcccagtctgtctgaccgtccctccgctcccaggcctcgccccacccggccctggggctgcccggtcgcccccctccccaccgcagccggtcccctccctcccagtcagcctccgccgcagcccaggaagccagccgggacgccgccgccccggaccccgcgccctaacctccacctcgggggcctgcacccccagattgaatcgggaattccggaaacccgagcctggaaccctgatctgggaccagcaccccgagatccggccgtggaaccccaagatctggagcctgaaccccagtatatggggctggaatctcaacatcggtcactgggacctcaatatttggagccggaaccccacaatttggaacacagaccccaatatttggagcagaaccccaagatttgacatctaaaacctcaagcctggagctgaactctgaattctgggcctgggaccttgaaatctgggactggatttccagtactgtaccctggaacccactcttggggacctgaaccctgggattcaggcctcaaattccaagatctggactgtgggattccaaggggcctgaacccgagtttgggcctgaagtccttgctgcagacctgagtgcttaaatctggggcttgagacctcccaatcttgactcagcaccccaatatctgaatgcagaaccccgggatcggatctcagactctaaaccccaccgtttggctgcttagcatccca

SEQ ID NO: 22545 - DNA, 1034 bp, Homo sapiens
gtgggccatgtggggtgggcttcatacaaggcactgggggtttcttgagggtgcagagggtaggaagacttggggggtcctgtaattagcacttccaggactgttttggtgtctgtaaattaggggtgacagtgggctggttatggtgggtttcttcttgagggataagaacaagggtctttgttaatgaaggaagtctctgattgaggggttggaatctaagggcttcagggtgaccatggggtcacgacatcttgagaggactgatgttaaatggggaacaatgacatgaatgtctgttactcttttgctttgggggtgtgacctatgtttatttcaagaggacttaaggggcagtgtttgttaatggggaggtttctgatccagggttgggtgattcaagaatgttctgttgtaatgcattatgtggagagggtcaccatcatttggggtgatatggaaatctgttaatctgggaatctgctctgaggggttggggatagggactagcctgaaggtgctactcagggaatctctttctgggtgacatggggtctgtatttgggggttattatgggagtatctgttaataatggggcctcaatgatcgagggctggctaacaggggtctctactctggatgtgttactgggaatctctatctcagggtgactcagggctcctcgggtgtcaggagatgctagtggggactctgtctctttgtcaggtgtccagggcctctaagactgcatctccgccctcagcatccaggggaaccagcagcagaacagcaacctggaaaggaggatgacagggtcacgcccttaggcaggcagcggggacatctgcacccatcacccccagcctttcccccagtgtttgctatcaggcctttctggattctgcctctacctctctggctgtggtttgtttgtttgtttgttttctgagatggagtctcactctgtcacccaggctggagtgccatggcacgatctcggctcactgcaacctctgcctcccaggttcaagca

SEQ ID NO: 22546 - DNA, 1025 bp, Homo sapiens
agccactgagcccgggaaagccagaaatttggaaacacggctgaatgttctgatttttgaataggggatcctagacaaaatgaaaacacactgcaggccaggccaccacccatggatggggctgccaggctggggtgccactcaccaggcgctgcagaccccggcgtgcccgtgccagcaggctctccccgtgtagctgctgtgccagccgttccagggcctgcagctgcgcctggtgccgctcctggcaccgttgcagcctccgcacccggcgttgcagtgctcccagcactgggcccagcccggtctgggcctgttgggcagggacttcaggttgtgaccgctcaggagttggcgcaggggccaggggggtcaggagcatggtggccacagtcttggggctccccgatgtggggcccagcaccactaggcgcactgggccagagactgggatggcagggctctggggcaggggtgtattcttctgtaggggaggcggcggcgagactggcttctgggtgcttcgggtcctccgctgactctggaagacaaggcatggggtgcaggggtgccgtggtcagacttcgactcaggaggaaagggatggagggtctgtttccaagggggacttgcctaggtaaggccagacctcagggaggaagtgtcgtcaggaggggagggccaaagttcagactcaaggagggacttcccttaggcagggaggtctgggggttggattccagcagcaggacctcccagcgctcaccttggcaggtggtccccgggagaagatggagggcactgcatcaggccgcaggtagcgcacaccccagcgccactggaagcaggagggtgtgaagtgctcgctgcacaagtgctggtggcagctgggcacccagtgctcacagcccatgtgctgcagccaggcctgcagccggggaccatccttcagtgggaacctgcatgggtggttggggggctgggtcagtgctacgaggttcagacttatccctcccagaggatac

SEQ ID NO: 22547 - DNA, 1049 bp, Homo sapiens
cgatcttggctcactacaacctccgcctcctgggttcaaacgattcttctgcttcagcctcctgagtagctgggactacaggcgcacgccaccacgcccggctaatttttgtatttttagtagagacgaggttgcaccatgttggccaggctggtcttgaactcctgacctcaggtgatccacccaccttggcctcccaaagtgctaggattataggcatgagccaccaagcctggcatttcttcttattattattaatttgaaagctccaccttttaaacacccagcatcagcccacctctgccccctccactgcccctccttccagcctccttcctggtcttcctgcccacagtcccgcccctccactcccaatttgttcttccacatcaacttgttggagcagtttataaaatcagacagttacgatgtgggagatcgtgcagccaagcgaaaacgtttcttccacaccatataaatgggggtgtggggtttctggattaagagagatttaagaaacatcagcacaaacgcaggatgtggaccttgcctacaacaaacaattcagtaaaaagacattttaagacaattggggaaaactgaacatgaactggttataagataattgtaagaaactggtcaggcatggcggttcatgcctgtaatcctagcactttgggaagacgacaaggtgggaggatcgcttgagcccaggagttcgagaccagcctgggcaacatagggagacctcgactctacaaaaaaaaaaaaaaattagccatgtatggtggtacatgcctgtagtcccagctactcgggaggctgaagtgggagggtcacctgagcctgggaggcagaggttgcagtgagccgagattgcgcaactgtactccagcctgggtgacagagccagaccctgtctttaaaaaaaaaaaaaaaaaattcattttgctaggtgtgataactgtattggtttatacttctgaaacagtcttctgttagaaatcagtctgaaataattacggataaaagatctgatgtctgggatt

SEQ ID NO: 22548 - DNA, 1028 bp, Homo sapiens
cccaggccaagggacagctccccagcctccttaggacacagaggctttttgatcatgcgttggtgaggccaagaagaggtgggacctgagatacatgcctattatctttctatgctcagagagagagcaggagcttgggttgggtgaaatgatgggcgataaatgttcataggaatcaaaaactcaattgctctcggggccaggcaaaaatttccggtttgtagcctctatatgaaaagcaaagcagaggaagagggaagagggaaaagtagaattggagcaggagagatggatggccacaaataccatgagggatggcattgccggggaggcatctccactgtcactagaggtggctgtcactactcagtgacattgatggtgattgattacccatgtggccttgttagcttcctcttccacaggaaggcggaagcagtctacccagatacagtggcactgaccttcgaccccatccaccagtggctgtcctgcgtgtataaggaccacagcatctacatctgggatgtcaaggacatcaacagagtgggcaaggtgtggtcagagctcttccacagctcctacgtttggaacgtggaggtgagccccccccccacccccttgcccctgcttggcctctgcacagttccccacagtttgggaacccattcagtaattccttcagaagatactcattgactccctcctatgcatcaggccctgtcctaggtgctgaggacacagacacaaaatccctgcccttaacaagctcacatttggatgggaaaggaaacctggaaacatcatcagtgaataacacgccaagcagcagtaaccctctgaagaaaaatgaggcggggaaggggaaggggaatgcaggtggtattctagagaggagaggggtcagggaaggcctccctgaggacatatgagcagagacctgcaggaaatcggggagtgagacctgcaactgctggggagaaccacaagcacagaggccctgcggcaggaacatgcactccacagag

SEQ ID NO: 22549 - DNA, 1028 bp, Homo sapiens
gtgatcctcccatcttggccttccaaagtgttgggattataggtgtgagccaccacgcccagcctgtgcctcattttaaaatgacacttatctcacagagttggattaaatcagccaatacctggaaagcactttaccccatgcttggcacacagtaaatactcagtgaagtgccagctgctatgattgtcatcccatgtatttgtgtaatgttattatgccaaaaaccagtctccttccttccctgccgccaaacctctgcatctcctcctccaggtgccttcaaatctcttgacaaagatggcactggacaaatccaggtgaacatccaggaggtaaggacccccatattggggtatgggtgcctgggaggaccccacccctcagcccttcataccagctctgagctgcagtccccttcctcctattttgccagccgtccctgggtgagggcaaaggggctggtgctcttggggttccctgtcctcactctccaccctcctctccccagtggctgcagctgactatgtattcctgaactggagccccagacccgccccctcactgccttgctataggagtcacctggagcctcggtctctcccagggccgatcctgtctgcagtcacatctttgtggggcctgctgacccacaagcttttgttctctcagtacttgttacccagcttctcaacatccagggcccaatttgccctgcctggagttccccctggctctaggacactctaacaagctctgtccacgggtctccccattcccaccaggccctgcacacacccactccgtaacctctcccctgtacctgtgccaagcctagcacttgtgatgcctccatgccccgagggccctctctcagttctgggaggatgactccagtccctgcacgccctggcacacccttcacggttgctacccaggcggccaagctccagaccgtgccagacccaggtgccccagtgcctttgtctatattctgctcccagcctgccaggcccaggaggaaataa

SEQ ID NO: 22550 - DNA, 1024 bp, Homo sapiens
cacagaaggaggcggccaagttcgcggggggaggggaggagacagagagtcgaccagtaaagcctcaagggaaatgtagtccaaggcctgagaagcgacgttgctggtaatagaaggtaattcagtaccagcctgggcctggccgcggtgaccgaggcgggccgcgtcgcggagacttctgggagtgcttcctcgctctccgagtgcgcaagcgcagcgcaccgagtggacattttggtctttgtccgcgggtcagtacggcccctgggtccacgtggcgcgaaagtaggaggtgggatctgggcgtctcgggtcggtcggaccggggaggttaaaggggaggattcctgatctttaggggcgcggcgcgagggcagggagtgggtgtaagagcttctggcctacgtgcggggcggagatgggggcctctgaggcgggtttgagcgagtgtgaccgagtttgtcctcaaagtttgacctgatgtttgggattgttgagtgaatgtgaaactgggtgcgggattgtgtgtgattgtgcctaagagggagatgtaggagaccagcattgaggtataacgtttgagctgcacttcccttgtcgaaagtgctgataattataacggtgccatcttcctggagcgtcttttttacttgaaaattgaaggggtggaaaagctaagtggtgaataattttaaaacgagtttttatataaaagcatttctttttaattggagtggcatgcaaatcaccgtgacttttttttttaattaaacgagagtgtttcgaaggaactttagtttcggggtgcctacttcagactattcaaatccccatctttggggtacttaaatagggctgttaagcaaagccctagactaaacagcattgtacgctttgagaagcaatcccatataacggcgcccaggatgagggagtcaacggttttaggttaggcacagttatcctcattttttgaagaaagcttaattgttgcagtgtttatctatgagtctggactaaatcc

SEQ ID NO: 22551 - DNA, 1019 bp, Homo sapiens
tttgtatttttagtagagacggggtttcaccatggtgaccaggctggtctcgaactcctgacctcatgtgatctgcctgcctcagcctcccaaagtactgggattacaggcatgagctaatttttttttttttttttttaaattaaaggaagacataggccaaggagccagacttcctgtgttaactccttcctctgccactttttaccttggggacctcaggtaggtacttaaaccttgggcctcagttgctcatttcatagtatagaaataatagcaatatttgattcaaagggtggttgtgtagctccagaagttaatacatgtaaagttctaagaatagtccccagtgtgtagtaagtacttgattaatgttaaatactagtactttttattactagctgcaaaaaaaatgcttcctcagaaaatattatagtcctgtgtctggtaggaatttctgaaagaataagatatgtagatgcacttttgttattaatatttcttttttttttttgatggagtctcactgtcgcccaggctgcagtgcagtggcctgatctcggctcactgcaggctctgcctccctggttcatgccattctcccgcctcagcctcctgagtagctgggactacaggtgccagccaccacgcctggctaattttgtttttgtatttttagtagagatggggtttcaccgcgttagccaggatggtctggatctcctgaccttgtgatccacctgcctcagcctcccaaagtcctggcattacaggcgtgagccactgcgcccggcctaatatttctatattttaatttttttacttaaaattttctttttttttggtggagggggggacagagtctcggtttgtcgcccaggctggagtgcagtggtgctatcttggctcactgcaagcttcacctcccaggttcacgccattctccagccttagcctcccaagtagctgggactacgggcgcccaccaccacgtccggctaattttttgtatttttagt

SEQ ID NO: 22552 - DNA, 1050 bp, Homo sapiens
cccgcatcagcctcccaaagtactgggattacaggcttgagccaccgtgcctggccaaggcactactttttaaaaaatgaatttgattactattgaagtaagtaatgcatttctgtgattcaacaaagatctatctcacagagatatctcattctgctcccttcccccagtcacattcttctttgtcttatgtaaacatgtcttgtttttttttgtttgcttcttgtttatccttcaagtgggttttttgttttttgttctgtcactattatatatttctcttcactcctgtttccctccaccttacataaaagatagcataccacatgcacctccctatatctcactttctttaataacagtatgtcctagagatagcccttccttttttctttcttttttttttttttttttttttgaaatagtctcgctctgtcacccaagctggtgtgcaatggtgttaacatggcatactgcagcctccaactgctgggctgaagtgatcttcctgcctcagccgcctgtgtagctgggaccacaggcacactccaccacacctggcttttttactttttgtagagatgaggtctcactgtttcccagattggtctcgaactcctgagctcaagcagtcctcctctcttggcttcccaaagtgttgggattacaagtgtgagccactgcacccagccaaggtgttccttcttaatcataatctttaaaagaaatttttttttcagctgctgtataaataagatgtcattatttggatgcaccatggttgattcagttaatcccgttgttgagcatttggattgtttccagtcttctgctgttgctaacaatgcagtaatgaataatttttttatgtgcgccattttatactgacacaggagtagctctaaactagactgctattaatacaaatggcgctgcccagtgggtaagtacttacactcccacaagccatgtgcgagagcgtcttccccttaaactcaccatgagtgtagtgtcgaatatttggtatttcgctagggacataagagacaa

SEQ ID NO: 22553 - DNA, 1088 bp, Homo sapiens
gcagtaggcatccttgtctgtttagaatctaatagaaatgccttcagtgtttttctattacttttattatcatgatttgcttttcagtgtttttacattagataagatactggcttttgtggtcagatacagattatgattatataaatatagattacccatgctgcctgggtcagtgggagtgtgagcagaaagactgaggacactgctaatagccaaggtgcaacaaccagggaaaatctgttgattgaggaaacaacaatccctcaaaatttcgttattgcatccttaaacaaaaaatcaaatgggacaaaaataagatgtctattcctattcttctgttttctgtcgattcccttcttttgggtgactgtttctttactcatttcctctgtttatcttttgtggtctatttatagctttgcttccttcttaaaagttttgtgtcttaagttcattttgttatgtttcagttttcatctgctttgtgattcttacttttttttttctggctcactgcaacctcaacctcctaggctcaagcagtccttttgtctcagcctgtcaagtagctgggactacaggtgcataccaccatacctggctagtttttttgtatttttttttagtgctaagcacgctggtcttgaactcctgggctcaagcagtctacccacctcagtgtctcaaagtgctgggattacaggcatgagccaccaagccctgcccctgctttgtgattcttttttttttttttttttttttttttgagacagggtcttgctttgtcacccaggctggagcacagtggcatgatcacggctcactgcaacgtccacctcccaggcttaagcagtcctcctgcttcaggctcccaagtagctgggactacaggcatgtaccaccccacaccctgctaatttttggatttgaattttttgcagagatggggtcttgccatgttgcctaggctggtcttgaacttctgagctcaagtgatcctgcccacctcagcttcccaaagtgctgggattagtggcatgagccactgcgtccagcccacggtaacatttctccctgtgtcttca

SEQ ID NO: 22554 - DNA, 1071 bp, Homo sapiens
tcacattgtgcccatgtgctttagttctgatgggaacgtgttaaagtcagacatgggtgttgaattcatccacgaataagggctgtagttaaaatcctctcaggaccctgagtgggagtgtggtgctagagaaaaacagcaatcactcacacaaggtgtgaacagctctcctgtgtaagtaaaattctgaaaggtaattctccctttctcccatttctggatgtgtgtagactttaaatggtttaatgagcatggctttgaagtttaggattctaatggccctagtccctttgcccacatgattgtgtgtgctttagtcactaaggcagaaggtcattactttgttctgtgcatctttggaagttgcaccctcattcttcagaaggccaggagaccccagggctcagcctgagttctaggatggtactttggacccagcattaacattgtaatactgtgtcattttcccaatagttaatatgatcctctgttgaagcaagaagacaaactgtatggtggagaaagaagtgggaaggatctgcgcgggtgagtaaatgacaggcaggccacagtttttcagtcagcattgagtcctctgaagtgcttcaaaggatgttttcttccaggctgtagacatatagagtattgcttggtatgagatttttagattcctgaatgacgcttccagtcatcatttttgtgtgtttcattattcttcttctttcaccagattctagaggggccaggcgcccctcctgttgctgttctgatgtcagccttcctgcttcgtctgtgccgccactgtggtggctgttctccttcatccacataccttttcctgtcctcacacattgtcctttatactttgtaaaaccttacatattgtctgatattcaggttcctttttgttactaccttctctcatcctttctagtggctgaatgcctcagaattatattttacacctgttctcacacttcccgttgtcttctcactcatctctgccatcgtagatccatggactcctctgcctacctttcttctgctcccatgtacctctgtcataagttg

SEQ ID NO: 22555 - DNA, 1074 bp, Homo sapiens
aaattccgtctcaaaaaaaaaaaaagaagaaagaaagatgaacattatttttcttccttagcatcccaggtagactttctaattttcatctttttcttctatttggcaattcttcattatttgttatacaacttgctaaattctgaaatggaaaggttatttttcaagagtactttcagctttgtggacccatgaatgttaattttctacctagatcacctcaagtagggttcccttctcataatttagttggaagcattaataatatagattattttcatattgggagatgggctaccagagttaatctcaaaaaattttattgctagtaatgggaaaattaacaaataaaagtgatagtaatataaaggtaaaatgaagggcttaccatatggcagccatggttctgggcactttatgaatttaactcctttgtgctatggttctttgtactccattttagaagaagcctgagaagatgatgcacagatagagaggcaccaggacttgagaggcaccaggacttgggaggcatgttgatccatctccaggaaagactgagaaaaagagcgttgaatataagaaaaaatacttcctctgttctcagatcgtatttgttttaaggccacacctttttgaagttttcagtttgaaacacaacctggactgaaatcatgagggaggttgtgtaggaaagaatcatcaagggacttagttgggagcttctctaccacagcttactccttatggtattaaccccctttaagtgtaaatgtctttggtttaaaacgtttgtacctcatctgttaccagagtgttcatactggagagaaaccctatgaatttactgaatgtgggggaactgttactcatatgttgcatttcgtcgaacgtgcaagtcatgctgaagagaaaccctgtgcttctaaggagtattgacaagcccttagctagatgacaatctcattgagaagcagaaaattcatgctggagagaaactagtgaaggtagcaatacttcattgaatattagaaaatttttctagagagaaagcattgaatatactgagtatga

SEQ ID NO: 22556 - DNA, 1653 bp, Homo sapiens
ggatcaagttgcagaatgatacagatagtacaatgacttttttgtaaatttgaattaaaagtttcctcataaaactcagtactatctattggtaatggatgcatatatgtatgtacatgtttttgaaacggattggaaggatacagaccaaactcttgatagtggtcacctgtgaagagtggagaagggaaaataatgagtgtgggaggtgggatgggtattggttaaaggggacttcagctttttatataaacatccacttctctttcaaaagacttcaagtaaatataagaagatactgattgattctggattgtggtatagggatatcttgtcttattttttgtacttttctgtatttttaaaatttctcaaaataggaatgggagtgaggatgggaatgctgtatctgtggaagtcatgttatactggattcatttccaattaaatactaaacattttatagaaaatatttctaaaattttatcacggatgaatggatggacttgctctctatgtaatatgaaattaatctattttattaaaatttaaaaggacagcacaatccaaatctgttttaattattttaacatggcatacacactatatcggggtccccagctccccccagctgcatggcaggaggtgagtggcgggtgagcgagcattgccacctgagctccacctcctgccagatcagcggtggcattagttctcataggagcgcgaaccctattgggaactgtgcatgtgaggaatccaggttgtgcgcttcttatgagaatgtaacgcctgatgatctgaggtggaacagtttcatcctgaaaacatcccatccccattcttctacccccacaaaccgtccgtggaaaaattgtcttccatgaaacaggtccctggtaccaaaaaggttggggaccgctgcactatatgatctctgtcttcgtatttctaacattttgcagaatgagcttagaaaactttaactttttctttgttcatacatgcacaggcttcatataattggtctttttcagttaggctgattttggaatgtcagttttcctctcctgcatatttccatgggaaacgtgtgcattaaatattaaatttttgataatatctttttttttttttttcccatcttgctctgttgcccaggccagaataccatggcaggatcttggctcactgcaatctcctctgcttactgggctcaagcagtcctccgacctcagcctcccaagtagctgggactacaggcacgcaccactatgctgtgccaattaaaaaaaaaaaattgtagcgatggggtctccgtatattgcccagattagtcccaaactcctggggtgaagtgattctccatggcctgttcaagtgctgccattacattacaggtatgagtcaccatgcccagctaattttatttttaaaaagagaaaacaacttcccataacttccacagttcagtgcattagataccaacacctgcgtgtctgtcttaacctgcgagctctgtcactcctcccactgctgttacagagagagaatgggacgggtatgagaaaaatggctcagaccctagacagagttctattttgtaaaccagcccttcatgaaaatttttttattctttgatcacattataat

SEQ ID NO: 22557 - DNA, 1053 bp, Homo sapiens
gcggaacccgaccgggatcgccccgcgagatgcagtcgttgagggagtcaggagcccgggtctgggcggggaccccaaggctgctggagccggagctggcgcgggggagacgtgtgtgtgcgcgcgtgtgtctctctgtgcgcgcgtcagtgtgtgcacgcgtgtgtctgtgtttgcatctctgtgtgtgcacacgtgtgcctgtgtgtgcgtctctgcacgtgtctgtttgcctgtggtgcacacgcgtgtctgtgtgcgtctctgcgcgtgcctgtttgcctgtgtgcacacgtgtgtctgtgtgcgtctctgtgcgcacgtgtctgcgtgcgcgtgtctctgcacaagtgggtgtgcgcgcacgtctccgtgtgtgcgtgtgtgtgtgtgtggcgctagccctagccagctgtttgacgtgcatgattgtgacagcagcatgcatgattgtgacagcagcattaggtgtgtggccacttgtaaccacgtgaatggcttttcttgactgtgtgtaactcttgcttatgttattgactgtatgtgaatagttacagagggagtgtctgtattgccgaagtagtgagagcatgatggtgtgtcatgagcagttttagtgaaaggtaggaagcaaccagggtgtttttctttctacatttacacacaccactcaccaatgtgtggagtttttttctcccacactaaacagttcttcagcggacaccaactgggtgtgctacagttcagtgcaattccaactgtacctggagatagcagcagaacccatcggttaagggcttagtcccaaaatactgcccccgcttcagatgccaattgcaggtcccaggatgtgacctgtgcttctgacctactggctataaatcaaggttgccatgacccctcaagtttgagtattttgctagagtggttcacagaactctgagaaacactttatttatgtttacccatttattataaaggatattgacaaggatacagattaacagccagaaggaagagatgcatagggcaagatatgggggaggggtgcag

SEQ ID NO: 22558 - DNA, 1032 bp, Homo sapiens
agaatcagtgagcacagtaaaatcattgtattatactactgagtttggagtggtgtattatacagcatcagtaactggtgaacaatgactgatatacccacacttgtttatgtcatattacacacacacacacacacacacacacacacttttttttctttagaggtggggtcttgctgtgttgtgcaggctggtcttgaactcctgaactcaagtgatcctcctatctcagcctcccaaagtgctgggattacagatgtgagccactgcacctggcctatactgacatattttattttacttaaaaaatttttggctgggcgcggtggctcacgcctgtaatcccagcactttggaaggctgaggtgggtggatcatgaggtcaagagatcatcctggccaacatggtgaaacctcatctctactaaaaatacaaaaattagctgggtgtggtggtacacgcctgtattcccagctacttgggaggctgagtcaggagaatcgcttgaacgcaagagtcggaggttgcagtgagctgatatggcagcattgcactccagcctggcaacagaatgagactctgtctcaaaataataataataataatatgagcaagaacaactgcacctaacaaataaaaactgatggtaatacataaggttacacaaatattcaaagacatatcatgattcgaaaaccacattaactgttctcttggctatcccataccaagtggagccaaaggctctgcacaggtttccaaacccgaatcatagccatgatagcaactgtggtcctctccctcctggttacctgctcacctgaagcaggtaagagcctgcttggcttcctagagaggcacttctgaggcaggagaataggaaattagtataaccaagccaggcgcagtggctcacgcctgtaatcccaacactttcagagtccgaggcaggcagatcatgaggtcaggagttccagactatcctggctaacagggtaaaaccccgtctcaactaaaaatacaaaaaataa

SEQ ID NO: 22559 - DNA, 1024 bp, Homo sapiens
gggtgcgtgcgtgtgttgggatgcatgggcaatgaagggcggtttcttgtaccttggcctttcttctggtgagtctctcctcgcatctctgtctgggtcatgtggccgggtgtcattcgttttccaggcggttacagtttgggttcgtgaccggtgggcaacgtggggagctacatgagacacggcggggattaaatcagctcccaatcatgagcggcctcattgctagaatcaagacaactacaccccagcaaaggaaaaaattctcacaaaagctcatcataaacctgcttatgcaggtcgaggtgcccatcgacctcactcctctcaatcctctcgcgtgtgccctcactgagaaatctagccacagctcgatacagggacggaaaaggaagccggcaacgggatggggcaaacatctctgtggctccaacgctggccttcgtggccaagtcacccgtttggcactcctccccggatggccgtggtggtggcattgccgccaatcctgcctgggctctggcctctgctctgtcctccctcttgctctgtctgccctgtttctgagaggcctaggggcttgttagtctggctcaatgtcttcaacccagaagacttcccagtccatccgggagaaagttcctgggggtcggtgtcatgattgtttccttctccaaacctctttcagcatgattgggcaggtgtggtgatcctggagctctgggctttcatagctgtctgggacagggaagctttctgggtctctgtggccccgtggtcggtccaggaagagcgggaggcaacccgaccgttcctgacatttgccttctaggaaaggcggtgtggcatgccacctgcacttcctctctgattcttgagggccatcgggttcctctgctcctggggaaagagacttctagcactgaatcttctggctgccacggatgtcagggagccaaagggactgggttttgctgggtgcaggggaggtcgcgtcgggggtacctacccggtcgcggggtgg

SEQ ID NO: 22560 - DNA, 1024 bp, Homo sapiens
tatgttgcatgacaacgtccacaagtgataggaatttttcagctccattgtaatcttatgggaccaccattgtatatgtgtccatcattgagtaaaatgttattacatgacacatgactgtgttcatcaggaatatgtatgctagtatgaacctataatgagagtgttaaattttatgaagcaaaaactaacagaacaaaagaaatagatccacaagcataattggaaatccacaattatatctcagtaattgatagcacttgtaggcaagaaattcagtagtatatgtaatcagctcttcatatatgcagattcaaccaatagcaatgcacaaatattcagaaaaaacacaatgacagtaaaaaaatacaaattttaaaatacagtataaaattatttacatagcatttacattgtattaagtattataaaaaatctagagatggtttaaaatatacagaaggttgtgcataggttatatgcaactactacaccattttatataacaaacttgggcatctgtaggttttggtatccacaaggtgtcctggaaccagtcccctgtggatagcaagggacaactgtatagaagatatgaaccacaccagtcaacatgacctaattgttgtttacagaacaccatacccacaattgaaaaattacattcttttcatgtacctgaacagtccccatgatagactattggctggaccataagtcacaataaacttcaaaagattgccacattacagggaatgtgcattagaaaccaataataagaaacctatacagtccttcaatacatggaaattaaataacacacttctagatctacagatcattgaataaataaggggaaaatgttttgaaatatgaaaaagtgacaacagcatatcaaaattggaaggatacagctaaagcagagttgagaggaatgttaagtacttaaataaaaaaaggagaaattcatagcagcattattcacaataaccaagaaatacgtacaacccagatgttcatcagt

SEQ ID NO: 22561 - DNA, 1078 bp, Homo sapiens
attacttcctttggtccagcttacattttcttccgtttcccattttcactttctagtcccagcagccatgcatttgcctatgcagataaaatgcctgtatcttttccactctacagccaatttacgaccatctctgttgtaatggtggtcatgtaggagcagttgtcctctgtcagcccgctgacacttccttaatctaggagacatttctaaccatggttacttaattgtcatttccacctaacatgtgataagccttttccagtcttcaggagtattacctcaaaacttttatcacataacgtgtgtcaacttatgtttattgatgttctttacattccttaaagcaacagacccaaagtagggcatgcctcacagtagaatgtataagacggtctattggaaggaaataaaatactaacaatttacattcgagagcagtattcattaacaatgtagattttcataaatgcctattgatggtttataaatagctacaatgttgggaatgtgttcagtatatctttaagaccactgttctgtaggaaaaaaaaatctagtatcatgtcataatatccccattgcctatctccatataccttttccttcttagagctcaaagactgtttcctaacatactgtgccttttgctatttcctgatttactaactggtttttttctccccatgaatttttaaaagctgatgccctgtattcctacaaaacaaattcgttgtgagtacaaaacttttatgtcctcaatgaagcctcggagtacaaaatgaaatttttccttgttttgtgacactttaccttgtacgtatttctgtcattgcatctgtaaaacctactaagtgcatgtatttacatgtatgcccctctcttagcctataacttctcatgagcagggtcagggttttattcattttggtctaccaggcaaccagtcacattcaggacaaatagtgtgatctcagtatgtttagcatgagattataagtaaatacaaatggatgtattttcagagagaattttatgcaatataaaacataaataaggaaactagtctgaccagtaa

SEQ ID NO: 22562 - DNA, 1096 bp, Homo sapiens
gagtgtctcctgtgttagtcatgttagtcaatttcaggtataataggacctacctcactcagggtttttgtgagggtcattggatctacatcacagggaattattttggaaagtgtaaagaaataattgaattccaaatatccaagagaaggaaactggttggattaaccaagtacagtgccactgaggagtattatgcagccatgaaaagggatcagttgcatggatttatggagaagggcctccaggatactttggatttttttgttttcttgttttgtttgtttgtttctgagacaaggtctccctccgttgcccaggctggagtgcagtggcttgatcatggctcactgcagcctcgatctccctgggctcaggtgatcctcccacctcagcctcccaagtagctgggactacaggcatgtacaaccatacctggctaattttattttattttatttttgtacagttgggggtcttgctatgtttcctaggctgttcttgaactcctaggctcaagtgatctgcccaccttggcctcctcaggtgctgggattataggtgtgagctaccttgcctggcctccaggatactttgttagtgacaaaagcaaccgaatattatattctatcttttatctaagctttcagcttatcctttcattattttaatataagcaaatgtatatatttggatttttttaaactcatgtcaccaccatcacccaaatttaaaaagaaaacaaaaacagaacacttctagcccccatccaatcaccctggcacagaagtaacctctgttgtaatttcatctcatataaaaggagtcatgcagaatgtagccttttgagtctggcttcattcagtaaggatgttgcaattagtaaactgtagctgggactacaagtacatgccatcatgctggctaatttgtgtatttttattttgcagagacagagtctcactatgttgcccaggctggtctcgaactcctgagctcatgcaatcctcctgccttgtcttcccaaagtgctgggattacaggcatgagctcagttcagttgcatgttgcaattcactcatattattgcatgtat

SEQ ID NO: 22563 - DNA, 1015 bp, Homo sapiens
agggcaggcgaatcacttgagccaggagttcaagactggcctgggcaacatacaaaaatacaaaaaaaattatctggatgtggtgggcgcctgtaatcctagttgctcaggaggctgagacaggagaatcgcttgaacccaggaggtggaggttgcagtgagccaaggtggtgccactgcactccagcctgggcaacaaagagtaaaactccatctcaaaacaaaacaaaaaacaaaaaaagtgtttcttcatctattggtttttcacattatatggcttttttctttttttaatattactataatgaattatgttgattgatttttgaaaaatttagttgtcctgggataaactccacttggtcatgatataatacttttgtatatattgttttatatattaaatatgatgaatttgctaatatgttgttactgatttttcttgtctgtggttcataatggatctaatgtatagtttttctgtttgatgtcagggtaatgctatctcataaatgaattgggttgtattctctcctcttattattttctgaaagaatttatatagaattggtattatttcttaaacgtttgttagaattcactgtgaagccatctatctgacttggagatttctttgtggaaagttgtttaaccagtagttcaattttggtaatagaatgaagactgttcaggttatcagtttttcttttaattcaatgagcttttgtagtttgtgactgtctaggaatttgttcagttcatctaagttgtaaaatgtattggcataaagttgttgccctttttatccttttgatgtttgtataatctgtaacaataccccttttttattcttgttattgatgatttgtatgtctcactttttcccctggttctttggctacaggtatatcaatgtagttgatcttttcaaagtaccacagcagcttttagtttcatggatttcttctagtatttttgttacctcatttctcctcttttattttgtatttccttt

SEQ ID NO: 22564 - DNA, 1035 bp, Homo sapiens
gattacaggcgcacaccactatgcccagctaattttttgtatttttagtagacatggggtttcaccatcttggccagggtggtttttaactcatgacctcaagtgatccacctacctcagcctcccaaagtgctgggattacaggcatgaaccactgtacctggctaagtccacctgttctgattacagttccatccattctagggatcagtgtctttcaatgatgtgactgtggacttcactcaggaggagtggcagcacctggatcatgctcagaagactctatatatggatgtgatgttggaaaactattgccacctcatctctgtgggtaagaaaaatcctctttgaaactttagtagcatgcacttcctctcaaagtgcctaattgtgtataatcttgaatttcaggaataagaggtgatgaattccttttcgttagcagaatgaatgattgtgtcttcacttacccagtgcaaggtgctacctatattgttacacaaatgggtgtcttaatttgcagtactgaacatgcccctttcctcatttttcagtggtattatagcccaatcaacttaagtctttttttcacttttcagggtgtcacatgaccaaacctgatgtgatcctcaagttggaacgaggagaagagccatggacatcatttgcaggtcatacctgcttgggtgagtttctggctcttaggcagacacagtctagcagaatgtaaatttaaaagggtcaagtgggggtgatacctttgaaatgtttcaggagtatctttttttaaaggctcttgacctctgaaaaccttcatgcctataaaactcaaaaccagacctttaggctaggtatggtggctcatgcctataatctgacactttgggaggccaaggtgagaggatcacttgaggccacgagttcagagccagcctggacagcatagcaagaccccatcactacaaaaagataaaaataaaaaattagccaaggttgggtgtggtggctcacacctttcatcccagcactttggga

SEQ ID NO: 22565 - DNA, 1291 bp, Homo sapiens
tttaaagatcaccaataaagtatttatttctatgaagaaggatcactatcgagtctgcatttttcatgaaatatttatgtcaaagtgtaaggttgttaaaagatttgttaacagagttttcctaggcaataattatattgcaaattttaaagaagtagagcttaaaatggtaggggaaacatatgaagggtttatgagatcatggaatggtatgatttctttgaagattctctaaagataaatagaaataaacctggaaggcaagctaattaattaaaagaatgtgtgcacaagtgtgttattaggaataagtaaggtatatatagggcagtaagtatcaggcctgactgaggcaaaaactacctgttataaacaggtgagatctgtcaggtatgtggacaaccctgaaaacttgtgagaatataaaaaatgaatctagacaatatagttttgtttacaggagaaattccttgtatatgttagaattgaagttcttggactcaatgaagaaatagatttttgagcatagctttaacattgcttcatcagatatagatgattgcaaggtaagtaaagttagaaatagctatacttttataagagaaatgaaggttaaagttactctgatttaggaccagattgttcaatctaccatttgaaattggtattctgatctaccatatgaaaaactggaataaaggaatgttactgcattggggaaggatgtaagccagtcttaaacctggaaaagtgagtcagtaactgaaaagaggactaggcatgagagctttgttattgaacaattctgaaagaagtgatttagcagcagtctgaatatagcaattgaatatattctgatcttttttaaagttgctatcggaagtattttcctaattttccattcataagagaaaataatacataattatgtagaggattagagcatagactgtagaaaatgaattgataatttaaaagctaaattaatcaatgttgactacatagaaagaggaggtgggttgaacagctggaagtgttttaccacagtcatctagggatgtgtgtataaaagtattggtgatcagccgggcacagtggctcatacctgtaatcccagcattttgggaggccaaggtgggcagatcatgaggtcaggagttcgagaccaacctggccagcatggtgaaaccccgtctctactaaaaatacaaaaaattagctaggcgtggtggcacatgcctgtaatcccagctattcaggaggctgaggcaggagaatcgcttgaacccag

SEQ ID NO: 22566 - DNA, 1055 bp, Homo sapiens
aaatttaacaaagaaattgaaaaaaataaaaaaacggaaatcaaatcttgcaactaaaaaatgaaatttctaaacagaattcattataggctctcaatggcagaatgggtccaatagaagaaagaatccatgagctccaaaataagttatttgaaaacacaaagtcagaggggaaaaaaaagaacacagaatgaaaaggaacaaagatcatctacaagatgtagaacattacctcaatagaccaaatttaagaatcattgatgttgaggaaagagttgaataagagacaggggtacaaagattatttttaaaaatattaataactttccagtcttctttggaaagaaaactttccaaaacttgagaaagatatacatttccaggtacaggaaggtcagagaacaacaaacagagttgacccaaatatgattaccccaagtcatataataaactctcaaaggtcaaggaaaaagagaggatcctgaaagcagtaagagaaaataaacaaatggcatttaaaggagctctaattcatctggcaacagacttatcaatggaaaccatacaggacaggagggagtcaaatgacattttagaagtgccataagaataaacattgccatccaagaataccctatccagcaaagttagctttcaaatatgaaagagaaagtttttcccagacaaacaaatgctaagagaattcaccaccaccatacccctgttacaagaaacgctaaagggaatttttgttttttcttttttgtccttttcttttttattttttgagacagggtctcactttgtcacccaggctggagtgtagtggtgcgatcttggctcactgcagcctcaacttcccaggttcaagcaatcctcccacctcagcctctcaagcagctgggactacaggtgtgtgccaccatgtccagctaattttggtattttttttatagagatggggttttgccatgttgcacaggttggtctcaaactcctgagctcaagtatctgccctccttggcctcccaaagtgctaggtttacaggcatgag

SEQ ID NO: 22567 - DNA, 1087 bp, Homo sapiens
aacaggagcagaactccgtctcaaaaaaaataaaataaaataaataataaagcaaggcacacggcctgatcttgcctagattttttatcttccatgaaatgattaatgctgctcataagacttgagagaaattaaataccaaagagtaaaattttatgcaattggtcaggcacggtgcctcacacctgtaatcacagcactttgggaggctgaggtgggcagatcactggaggtcaggagttctagaccagcctggccaacatggtgaaaccctatctctactaaaaatacaaaaattagctgtggtggctttcctctagaagagctgggtgcagtggctcatgcctgtaatcccagcactttgggaggccaaggcaggtgaatcacttgagcccaggagtttgagaccagcctgggcaacctagagagacctgtctccacaaaattattggggcatggtggcacatgcctgtggtcccagctacttgtgagtttcaggtgggagggtcacttggacccaggaggtcaaggctgcagtgagctgtgatcacgcaactgcacttcagttcggatgatggaggtgagaccctgcctcaaaaatataaagtattggtactctacaacaagagcattgcattgtcacccatgtagacaataaattgactcagaatcacaaatacttatattggggacctgtatgtcaagccctaggaagagtgccaggtcatcatctgggaaaggaaatattaggagtattggggtgtgaatagtactgcacagaattccaattcatttcaaaatatatttcacagattatcacaaaccaggaaatgagttgtgtgtaattttctttgtttttgagacagaattttactcttcttgtccaggctggagtgcaatggctcgatctcggctcacctcaacctccacctccccgaaacctctgcctcccaggttcaagtgattctcttgcctcagcctcccgagtagctgagattataggcatgtgccaccacacctggctaattttgtatttttagtagagacggggattcaccatcttggccaggctggtcttgaactcctg

SEQ ID NO: 22568 - DNA, 1033 bp, Homo sapiens
actccatcctggacaacagagtgagactccttctcaaaaaaaaaaaaaaaaaaaaaaagaacagttgatgaaggatggatagactaaaacaatgctgcattaatgaggctacgatagtgcgtatttgtataaaaagcattaatttgcatttgttggcattttgaagctctgttgttggatgcatacacatttagtatctatatgtcgttatgatttgtaaatcatgtaatgcgtctctttacataatgatttttaaattattttgtaatgtttctcattacgttatgtaatgcccttattaactttccttggaaatcttttttacccgttatccatacaaccactcttgctttcttaatactgatgttagcatgatataccttttttcttttgttcgttttttattttaactgtcaacttacctatgctgtgtttgaagtgaggttcttgtacgtggcatgtagttgggttatgttttattttatttaaactgccatctctgtcctttacatcaaaggtaaattgatgttcttagaccacgtacctttaaagtaattcttgatgtgttaaagcttaattctgccattttattatttgttttctgtttgtttcctgtttccctgttctagtcttccactggatacttgatcacttttaaaattccatcttgtttaatttatactgtatttgagtatatcacttacatagttcttttggtggttgctctaggtattacagtatatatctataacttagcctattgctatccacatttaagtacttgcagtggagcattgaaaacttactttcatttaggtctttaccctctctaccttttagatataattgtttccaatgtttcctttttcatattgagcattccaacatatgcttttataatttttgcttgagtcatcaaatatgatttcagaaattcataagaaggagattcttacggctttgtggccctagatatactgcctgtagtatactgaccagtggctccagacctcttttctttggtgggagaggg

SEQ ID NO: 22569 - DNA, 1027 bp, Homo sapiens
accaggagtgaatatggcagtgttttcttatttatttagtggtttcttttctcttggatcatttagctttttttttttttttgagactgagtcttgctctgtcgccccggctggaatgcagtagcgtgatctcggctcactgcaagctctacctcctgggttcaagcagttctcctgcctcagcatcccaagtagctgggattacaggcacatgccaccacgcctggtgtgccaccatgcctgactaactgttttgtatttttaatagagacagggtttcaccatgtgggccaggctggtttcgaactcctgacctcaagtgagccgcccaccttggcctcccaaagtgctgggattacagacttgagccactgcacccagcccatttagttttttattaatgatttgagaaagatcttatattttacctgctagttctttgacagttaaatgttttgtaaatatcatcacccattctgtggcttgcgtctttttaacagattttattcataagtgagctgtgaatcacgcttatatttttacgcaactttgttttccatttaattactattacctttttgtccatatatttatcactaatttatattcaaaatctactggaaaataaatctttttccagtatgttctgtcagtttcttgggtttagagacatctcttctatgatcctttttttctctactgactgcttgtaccactattactctagaattctatctttttaaattcactgcccttctgcgttgagttctttgtttcttggattccttgccttcctgtttcttggtttggttcttcttgatattggtggcatgtgagaaaggatgaatgagaattaaattttgtgagttctggtatatttttcaaccactatattgattctttggcagggcatggaattctacattaaaaatatttttcctcagaattttaaaattatgatctctgtcttatagtattgtttagaactccaaagccattttcattcctggtctttggtttataccct

SEQ ID NO: 22570 - DNA, 1040 bp, Homo sapiens
tgcacgtgatccacttgagctttttcagagaaattatgttgtatggctagagaaatctagtttttagatgtttatttgtaaggataatacattttgcaaataatttattatattattcaataaatgcatttaggttttttttgcatgtaccagagttcaagttgattaaattaatagatattatctttgtcttcatgaagcttggctctattgtagcagacagaggttaaacaagcattcaaacaaatatgaaaaatttaactgtagggaatggatacgtaaattacctattatcaaaacaaaacacaaagaaaagaggaaaaaagagctctgagaaatgatagtagagtgtgcataattcagactgaacatgtaggaaatattttaaagatacatcatttagcagagacctaaaccactgccagaaacttgcaaggccaagagtaggggcagtggatatagggggacatttcaggcagatgaaaccatgatggggatgggtcggtacagttttgtgcatttgaagaactatgaagactacatagtagctacagcttattgttgggtggggggtgcagggagggatattaggttgaagagacaggcagatcactgaggaacttttaagagcgagttcattttgagcagaacagttccaggctaaatatcactctgggtgctaagggtgcaaaactggaaatgcaggcaggtagaagaaatgctggtttagtgtccaagcaaaagataattttgatttggattagccagttggagactgaaagaacaatttcaagacatatttagacctgctctaaacaggattgttatgtaagttgtagaaagagattggtgccgaatgttttcactttttgggatttgaggtattcactcagggccttagatagtatctttaaatccattccctttcctagcctctacttttgaggcaaataagtctcccaaaataataagcactgcatagttactttatgcaagtatgtaagtagatttggtgtgatcagaatcattccataatcatc

SEQ ID NO: 22571 - DNA, 1027 bp, Homo sapiens
ttaagcttcgtgattatattatttaaatatcctctgattattttgtttaattctgaaaagtgggcacaaaacgcccagctatattgtttcaaggtcttctgttaatataggggttttactttttatgtttggttgctgtatttttcactgtgatgttgaattccaatttctctaatattgaaaattctgctttggccagtagagctgcactaggtctgttgtgtcagcttgttctaggtatatatccttataaacaccatatagttagtgttttatttttaacccaatttgtttttgtattttaattggagaacaccatatatctataggcaggcttactcaatttctatgaaatcaccttttaaaatatctttttctattaaagagcagaaaagtaactaaaattctcaaactctgttgctctttcctatgtagctactcgtcatggtcatttaatgcatcgtttctcttcatctctctgttccctaaagattgaagttttctaagactcagcctctgacacatttactaattatacttaattgttccttggtgatttcacccccgtgggtttgtttcccttgaactccacactcactacgttcagtagccttctctacactacttgaattatttttatttaggtatataaaatactggtggcaatagcataaattctaagtgttaaacttgatgaagtaatattgtacacctatgtaagcactgcccagactgatatacatttacagcctaaggaggcttctttgtgctgctttgctattaatattccattgcccagaaatagcccctctcctaatttccataaccagagataagcttacatgtttttccacttcatgtaaatggaatcgtacgctgaaccctttttgtgtctggtttcttttgctcaacattatttcatgcaacaataaggatggctctctcagacataatattcatttttatttatgtagtgttttatgggaattgcactgagttagagaaactgaagtctgaaggaatagtt

SEQ ID NO: 22572 - DNA, 1035 bp, Homo sapiens
tctcctcgtcgtacagcttgtggagctccgactgcaaggccatcagcatgcccaggcaggggttaagctggagggccatggaggaggacaggccagcaggatgccgcttctgctccagggcatgcaccatgcgtgagatattctaattatatacacgttcataaacatatgctcacatgcacagagtatgatactgtatgttttgcaattcgtagataactgtcagacctacatgaaaggactgttaagaataacaaatgtgttgaaaggtttaaatgtcgggggcgggtggagttcagtgactgtgcaatggtatactggcaaatcaccagcctccgacaaatctaatatgctgaacacaactggtgggaagagtagacaggtacatctcttctgtgcatacagcatgatatgggctaggaactcactgaaaataatttgctctggaattctgtgatgttgaccttgggagaaagaaatgaataattcaagtcatagcagtgattgagaaggaaggtggctcaagtttgagacacaagagagttaagataggatgaaatgtactctatgagaagaatggaactccatgtcaacatataaacagtgagccccagttctatgctttaaggcaacctctgagccctcttttccttgtttattaaaatgggactgacacttaacttatgattgctaaaaagatgaggaataacgtatataaataatctgatataaagtaagcactcagtattggtagctattattatgaaaaaatgtcatagcaaaaacagatattgggcaaataaaatggcttgaagacatcaaaataaagccagctagactatcttaagtattccctccacacaatcattggccaaacttagtctgggtgagtccctaaaaatctcttaaagttgtcctcatttaattactgaatcccctctttcctagaccactacaggaatctcctaatggtttccccagtatgttctagcaccctctaatccattcagcacctggtgtgatatttggtctcac

SEQ ID NO: 22573 - DNA, 1023 bp, Homo sapiens
gtcataaacccaggattcaaatccatacagtctgactctagggcccacactctacgatactgtacagatggaggctcattatgagtgaagaaatacaaaagccaattacccattcatattgtttgtctattttgtaataatagttttttctgtattcgaaattagaatattttaagaatgtctatttcagtattaggacttaggatttatgcagctaccttctcccaatctgtcatttttatgttatttattttttgttgtatagacattgaagtttggatagttacatttagtgtatgataaatatgtatacataatagaattcagtcaaaatatgcaactattaatatttagtagtcttttctcatgagttgccaatgttaatcttttctaagatatctttcctaattaatattagatcatagagataatctctgttcaaagcattgttttccatatttagtctttaatccaactggattataatattgtaattggtttgagataggaatttactgataattctattagtagaattatctttgcatgtagaagaccagttgttccaacaccgtttattaagtagatctttcctttgtgatgccacctttactgtatacatacatgatggtttctaggcttttactttttctgtaatctatttgtctacatttatatcagtactgtactttgtgtgtgtgtgttttacattggtttaattacaattactttatatgggcaatgatttcaccacttctttatgcacacacattattcttagtttttcaaaaatttttcagctactttgggacctctgggcttccatttgaattttagaattagtttatctagttctaggaagaaatcctattggggatttccattgaattgcacaactagttggagaagaattaagcaaaaaatacatatatataaaaaatatataaatatatatatatataaagatatatgtgtgtgtgtgtgtgtatatatatatatatatatatatatattatatatata

SEQ ID NO: 22574 - DNA, 1035 bp, Homo sapiens
acggtgtttattaccgcgtgtttccctgatttcgtactgggttgggtgactgtctgattgtgtgtgactgtggggttgtgtgtgctgttttcatgactgtgtaaagagactaaaattgcagctttgaaagggtgtttttggcggtatgtgtctctgacaaggtgcttggatgtaattatatgccttgtacttaatgggattttgtttgagacaaggtggtctaacaatgtagcataattgggtgattgtgcctctagctgtgtaactgtggaaatgtgattatgtgtgactttatgtggccatttgtatattctgtgaccttatgggggtttagtccagtacagaagtaaatttctttttggtatttctggggttcatttggggctgaggtctgcctatggattgtgagtcccatgtggctctgtgctcctcccatgtggctctgaggacttaaggactttttgatttgaccacagtggctgccctttcatccatggcctgtattgcttcatttctgtatccatcctcggttcaccttgggaaatgtagttacttacgagttcacgacttcttccctgcgtcctcttgccttatagccttaaggggattgggtgcagggaagtggcaagaagtaaggaagtcagacatttggacacctgagtgatgaataggagttatttgcaagttacagacctggtcttaggatgagaattttagggctgataataccttcaagacagccactggatgctgtgcgcggtggctcacatctgtaatcccagcgctttgggaggcagaggcgggtggattacctgaggtcatggtttcaccatgacctctactaaaaatacaaaattagctgggcgtggtggcgcatgcctgtaatcccagctacttaggaggctgaggcaggagaattgcttgaacccgggaggcggaggttgcagtgagccaagatcaagccactgcactccagcctgggcaacaagagtgaaactcattctctaaataaataaataaataggccactggaaa

SEQ ID NO: 22575 - DNA, 1032 bp, Homo sapiens
ctctttcattataccttccttctgggatattttatttatcatgaaatacattagggaaggcttattggttttatttttttcttttcttttcttttcttttttgagatggggtctcattcttgttgcccaggctgtagtgcagtggcgcaatttcggctcactgcaacctccgcttcccaggttcaagcgattctcctacttcagcctccccagtagctgggattacaggcgcccgcagccaagcccagcttattttttaatttttagtagagacggggtttcgccatgttggccaggctggtctcgaactcctgacctcaggtgatccacccacctccacctcccagagtgctgggattacaagtgtgagctaccacccccggcctgtcttattgttaataaatgctctaagtgtttgtttttgtcattgttgcaaaataaccttgtttcactgtcattcttgcctgatgatttaactaggtataaaattctatactgacaattatttttttctcagcactctgaagatattattccactgtcctctggcttctattgttgctcttgagaagtctgccatctgtttcattgttattccttttgtaagtaatctgtattttctctggctgcttttaagatttttttctttaagatttaaatgtaattgattatattgtttcacttctagatgtttgatgttctccccctctcccagatcttttttttttaagctcatccctttctcatggtttttatcttatactttcatatatttccagcacttatgtgtcatacaatcccaatttctgggaaacaggtctaattttgctgtttcttgtatccatggggactcttgtgtaatgatgaattatccatagcactttttttctccttttctttgagagtccaggccaagactgaaaagtcccttgtcattttcctttaaggtttgctggatttgtttttctttctctgaactttatgtcttgaatatttccaattttgtaaagaggtttgtttgtaatccctgct

SEQ ID NO: 22576 - DNA, 1043 bp, Homo sapiens
ttgcaggagggcccaaggcaaagactgggcttcctcaaggtctgctgtgggacagaggttggtgagcccatcgtgaagactccaactcccaaaccatgagatacggatgaatcttactctggatccttgtatgagcggttctgagctggcacccccagctgaggaggctggagctaagccacagagcaactgtgaggttcactaccaggactgttgtcagcaggcataagagactctccacctagacactagtgtgcatgattcctcctggacctttaggcagatggttttgattgcacgcccaaggccaaatggggctgtagccaagccctctggggaatggggccattttcaagctttgaacatgggatcagcatgggagatcagccacctgcgtgccagtctgcactctcaaaatgactttcctaggtcttgggctttactcaagttttacaacctcctacctgaattccaaagcttctgcaaagagacttttatctgtggatgggtgcagaattctcgtgaggggatatgagtgggttacctcctatttctgccatcttgctgacgtcactcccataatctctcataaacactttttaactcctcaatttatggttacctttttctctccagtgctttggatttgtgctaaatctaatttttttctacacgtcactttttttgtattatttatggatattttcaaataattttggtattttgattttgctaattatttctgctgtttctacgtttctaatttactcattttctgattttttatctcacttatattttggtttttagttatgctttttgctcacttcttcttgaggtgaaatcttaattctcttaactatagtatttcttgttttttaataaatgcacttaagactgtaaatttccctgggtacaattttagctgatttcttgggatttcacacaaagtttcttttgctatttggctctaaattgttttaaaattttatttttatttccttctataacaaacatcatatagaattgtcttagtaacttaa

SEQ ID NO: 22577 - DNA, 1048 bp, Homo sapiens
ggtttcattgtgttggcagggctagtcttggactcctggtctcagtgatccgcccgccttggcctcccgtagtgctgggattataggcgggagccaccatgcccagtccatttcccccagtatttgaaatgcacagtttctgctctggttcattggtcagggcaggactttctcgtttgccttaaacctaacagtagtttagaaattggcctgtaactttttttggcatgatttccttctgtttgtgctgatatttttctcacctcaataaggataggagcttcttttcctttttttttttttccaggtagaatcatgttttcttttaattgaatacttaactcacaatgtttcctgttttgcagctgctctgctaataattaggttcccacctctcaagatcattaggagcttcttttccaattcctctgttttgcatgcattggaaggtaagtttccttgtaaaccagattttggactctgcaggctttgccaaatggcctttttaccctcatgtatattgcattttctttggatagtctcatggattctcaaggatattgtattcctgtattttaccattcatgagtttagaagtgtgtttactttcctgagttttcattttctttttcttctgtcatatgtaatttacagagcaaatacctaccagaatggataacttgagagatgtggaaagtgagtttctttgcgcttatctagtgagggtgatttttagtcaataagcatttggtatatgcctgggaatccaacagctgctatttagattcagagccagcctttatttatcagctttctgatgctgaacccatcagtgaacttctctgtatatttgattcatcataaggaaaatggtgacgccgagggtgactgatttccaggtttacatcggttgccccaggggaagtgcctggcccccatctggtccttgctgctctaactttgccctgttaattgaagaaatgcaggtataaacacttcctgggttgttgctggcatttattgtcctcacagtttacagagaagccca

SEQ ID NO: 22578 - DNA, 1089 bp, Homo sapiens
ttaccggtgtgtttttcacgtttataaagctgaatacttctgtatgtcagcttagcacccctagcatcagccatgctactctcctgctgtgcatagatgggggcctgtccccctgctgaatctcctgggttcctgctgtcaacacctgaaggtacccaccagatgtgtctgtcacttccctccatccacctctcttgtgtttctcatgtttctgcctccctagagaccatttctctctagagcagtgctttccaatagaaatacaatgccagacacatacgtcattttagattttctagtagtcactttagaaaagttaaaaagaggctgggcatggtagctcacacctgtaatcccagcactttgggaggctgaggtgggcagattagctgaggtcaggagttcgagaccagcctggccaacatggtgaaaccccgtcactactaaaaatacaaaaattagccgggtatggtagcaggtgcctgggattacagcctcccgagtaggctgagacatgagaatcacttgattctgggaggtggaggctgcagtgagccgaggtcatgtgcaccactgcaatccaaccttggcaacagagcaagactttgtctcacacaaaaaaaagaaaagaaagaaaagttaaaagggagcaggtgaaattaataatgtgttttatttcacctaaaatgttagtattatccagaatatcacttcaacgtcttatcaaaataaaaattattaatgagatagtttgcattcttcctcttttttgagatgggctcttgctttttttttggcccaggctggaatgcagtggcaccagcatagctcactgcagcctcaaactcctgggctcgagatcctcctgcctcagccttcctagtagttaggactacaggcacacaccaccatgcccagctaattgtttttcttttttgtttgtttgtttttcttttttttcttttttcttttttttttttttttgagaggaaatctcactctgtcacccagggtggagtgcaatggcatgatctcagctcattgcaacctccgcctcccaggtttaagtgattttcctgtctcagcctc

SEQ ID NO: 22579 - DNA, 1067 bp, Homo sapiens
gcagtgagaaggggtggaaaagagggattccagagtgccaggcacacaggttttctggaaggtttacatgaggactgctgtggtttgaatgtgttccccgaagttcatgtgttggaaactcaacccctaatgcaacagtgttgaccagtggaacctttaagaggtgattaggtcatgaaggctctgccctcatgaatggatgaagctagagtgggttagttatcttgggagggggttcctgataaaaggatgaggttggcttccttccctttctctttccccctccccccttcacatgtggtcactctcttgcccttccaccttccaccataggacggcacagtgagaccttcaccagatgcaggcccctcactttcccagtgttcagaaccgtaaaccaagtgaactcttgcttataaatcacccagtctgtggtattctgttatagcaacacaaacggactaagagagggacactcagtgggctcttctctctacttgatggagcactccctgcgtggtgccttgtatttgtagacatgatgctgtaaatgttttttgaatgtcttgaaggcttttgtttgaggagtttacagagaagcccctacaggcttcaggtcccttcttctgttgcttctttgctccttagttcctcccctaacctggtgctaaattagatcatagtgtggtccttggaccaacagtatcaatagcacctgaaagtcatgctggaaatacagattcacaggctgctccccagaatactgaagaagaaactctaggagtgagacccaacaatctgtgtttaacaagtccccaggtgagtctgatgcacacagaaatgtgagctgctgtattagatggtgttgagttcatgccaccggatcactgacacacacgtctgctcactgcttgctctttgcacaggcccctggatcctcctggaatccctgatccctgttgctccctggcggagttttctagtccctcttacttgaagcatgtctttcagagcccggcaccacccaagttgggtatctggtgaattctgtggtctgcatgtccatg

SEQ ID NO: 22580 - DNA, 1037 bp, Homo sapiens
ggggaagtgcctggcccttgtctggttgttgctgctctaactttgccctgttaattgaagaaatgcagctgtaaacacttcctggggtgttgctggcatttactgtcctcacagtttacagggaagcccatattttcagcctcttcctctgctttctgccatttctaaaccatctcacccgatctggtgtaatcttcattgtgtgtgagtttgcacagatgtaatttgggcctacatgtgtccaaagcctaatgcccacctcccacctccacgaaaatctggagctcaggacccactaccctcccccacccactgcaagcttgaacatttgatggtggaaaccccgccctgagtttgtattatggtgggttctcttgggtcttgttctctgtgggtctgtcctgcgttatagtgtgtggagccggggggattttcactgtgttcctaaaggagggtcacaaggagttgttgggcaaacggtctgatatttcctttttttttttgaaacagagtctcactctgtttcccaggctggagttctgtggcaccgtgttggctcactgcaacctccgtctcctgggttcaagcaattctcttgcctcagcctccagagtagctgggattacaggtgcccaccaccacgcctggctaattttttaatatttttagtggagacggggtttcatcgtgttggccaggctggtctcgaactcctgacctcaggtgatccgcccgcctaggcctcccagagtgctgggattacaggtgggcacctggccaaggggctgatatttcttaagggctttccccaagaaggaagaagccaaacctactcaggcaaatcttgtttatttattcttctaggtccagatttggaacaagtctctctagagattgaacaggtaaggctcacctttcaatagttacaccaagaaaggcctagctgatgacttaagctatggttttgggctgcacgagagtggtcaggtggacagtagggaagtctacatgtaacccaaacggaaaagagaaaaggc

SEQ ID NO: 22581 - DNA, 1067 bp, Homo sapiens
gctctgttgccaggctggagtgcaaaggcgcaatctcggctcactgcaacctccgcctatcaggttcaagcaattctcctgcctcagcctcccgagtagctgggactacatgcatgccaccacgcccggctaacttttttgtatttttagtgttagccaggatggtctccatctcctgacctcatgatccgcccacctcagcctcccaaagtgctgggattacaggcgtgagccactttacctgatgccctgcttgctatttaaacaaactgtgaaataatttgtctcaatttataaaaataatacagagagtttccatttactcttcaccctgctttccccaatgataatatcttatataaccacagtacatttcaaaaccaggtaactgacattggtacagtactattgagtaaactaaagactttattcagattcagatttcatcagtttttgcatgtactcttttttttaattgttgctctatagtagtatgaaatttcattacataaataagatttatgtagccaccatcaccacaataaagatgtagaactcttctatcactacaaagaaaactctcctgtgctatcttccctccaatcttaacccctggcaactactgatctgttccccatcactataattctttttgcttttttttttttttttttttttgagacagaattttgttcttgtcccccaggctggagtgcagtggtgcaatcccagctcactgcaacctcggcctactggactcaagcgattctcctgcctcagcctcctgagtagctgggactacaggcatgtgccaccatgcctggctaattttgtatttttagtagagacggggtttcaccatgttggccaacctagtctcgaactcctgacctcaggtgatccacccacctcggcctcccaaagtgctgggattacaggcgtgaaccacttgtgcccagcctcaaattttatttctactaaaatatataattattcttatgctacatttcttcatgtgtcagtctttttaaatttgtgtattttaattaatttgtccacttaacctc

SEQ ID NO: 22582 - DNA, 1053 bp, Homo sapiens
gcatatagttgatttttttcttctttatccagtttgccaatctctacgttttgttggagtattgaatgcattagcactcaaatgttattgttgataagtaaggttatttctacttttgccagatttttctttgttttctccaatgtgtttttacttgctctgttttctttagcctacttttgttttaatgttttaataaaatactttttagattcttttttcttttttttttttttttttgagacatagtctcactctgtcaccgagactggagtgcagtggtgagatcttggctcagtcatcctctgcctcctgggttcaagggattctcctgcctcagcttcccgagtagctgggactaggggcgcacgctactacgcccagctaatttttgtattgtcagtagagatgggatttcaccatgttggccaggctggtctcgaactcctgacctcaagtgatctgcctgcctcagcctcccaaagtgttcagattacaggcgtgagccaccgcgcccggctcctttttcgatcttcatgttaatttctctcagctatctagctatgtatctgccttgtgtgtgttcatgacttttccagggcttacaatatgtatttttaacttaaaccaattagagttattatttgtttaaggtaatgtaagaatctcacaagagtatgtttacattcccctcatcttcagtgctgttgtcatatacattatttctgtaaacatcctaaacccaatactacagtgttaaaatttttaagccatcgtatagtaatacgtatttttaaagaaattaaggtaaatgtatgtagaaatatgtgtgtgtgctttatatctgtcacatttcttatgctcttcactccttaatgtagatacaagttgccatctgataccattttccttcatcctgaaagacttcctttaacatttagtacagttacctggcattggattttccattttaatctgaaaagattattttctctccagtttgcgaaaattaactggagatagaatcgctggttaacatatttttctctggca

SEQ ID NO: 22583 - DNA, 1035 bp, Homo sapiens
cctgggttcacgccgttctcctctgcctcagcctctccgagtagctgggactacaggcgcccgccaccacgcccggctaattttttgtatttttagtagagatggggtttcaccgtggtctcgatctcctgacctcgtgatccgcccacctcagcctcccaaagtgctgggattacaagcgtgagccaccgcgcctggcccctctgagatttctttacctcagcaaacacacatctaataagtatccttggtggtggctcaggagatcgagaccatcctggctaacacagtgaaaccccgtctctactaaaaaatacaaaaaaattagccaggcgtggtggccggtgcctgtagtcccagctgctcaggaggctgaggcaggagaatggcgtgaacctgggaggcagagcttgcagtgagccaagattgtgccactgcactccagcctgggcgacagagcgagactccatctataaaaaaaagaaaaaattagcagggtgtgatgatgagagcctgtaatcccagctacttgggaggctgaggcaggagaattgcttgaaccagggaggtggagggtgcagtgagccgagattgtaccactgcactctagcctgagtgacaagagtgacactctgtctcaaaaaaaaaaaagtataaaaagtatcctttcacataggcagcatggcccagtggctgaagcacaaactctggggccacatggtctgggttcacactgtgactctatcctatattagttgtgataccttgggcaaatcatgtgtccttctgagccttagtgtcctgatctgaaaatggggatgataccagtgtcttccttatagggtggttgttgagaggtttcataagattatctatgtcaagccttcagggcagggccagctgtgatcttttttttagagacagggtcactctgttgcccacgctggagtgcagtggcgtcatcatagctcactgtaaccttgaactcctgggctcaagtgatcctcccacctcagactccctagtagctggggc

SEQ ID NO: 22584 - DNA, 1025 bp, Homo sapiens
ttgttttttttgagtcagaggctcgctctgttgcccacgctggagtgcagtggtgtgatctgggctcactgcaacctccgcttcctgggttcaagcgattctcctgcctcagcctcctgagtacctggagttacaggcgcccaccgccactcccagctaatttttgtatttttagtagagatggggtttcaccatcttggccaggctggtctccaactcctcacctcaagtgatccgacggcctcagcctcccaaagtgttgagattacagatgtgagccatgcacccagctggaaatggtgttttaagcacactagccatgtgggctgttaaagtatcatactatagcccatcaactaagacaatgattcttggacctgtaagggccccaggtccctgctccggcatcatgacctgtgtgcactttgatttgctgtagcgtgggcgtattttgaatgaagggtagccctggttagatgtgaggacagtagtgggtgcttttaagactaaaaatattgggtgggcatggtggctcaggcttgtaatcccagcactttgggaggccgaggtgggaggattacttcagaccagaagttcaagaccagtctgggcaacatagaccccaactctgcaaaaaaaaaaaaagtttttgtttttgagacagttctcactctgttgcccaggctggagtatagtggtatgatcacagctcactgcaacctctgcctcctgggttcaaatgactgtcctgccttagcctccacagtagctgggattacaggcgcccaccaccacacccggctaatttttatatttttagtagagatggggttttaccatgttggccaggctggtctcaaactcctgacctcaggtggtcttcccgcctcagcctcccaaagtgctgggattacagacgtgagccaccgcatctgacctcatctctgcaaaaaatttttaaattagccaggcttggtgatgtgcacctataatcccagctactcaggaggctgaggtgagaggat

SEQ ID NO: 22585 - DNA, 1049 bp, Homo sapiens
cccagcactttgggaggatgaggagggcggatcacctgaggtcaggagttcaagaccagactggtcaacatggtgaaatcccatctctactaaaaatagaaaaaattagccaggcatggtggtgggcacctgtaatcccagctacttgggaggctgaggcaggagaatcaaacgaacccaggaggcagaggttgcagtgagccaagatcacaccactgcactccagcctgggcggcagagcgagactcggtctcaaaataaataaataaataaataaataaataaataaataaataaataaacaaactgctgctttggacatgaaacctgttgtgtcgctgactctggccctcattgctgtgtattctggtgggtgctgtgggctctggtggaagcaacagcagagcttagcttgtgaatgtgtcttacccttgctgtgctccaaagacattgccagtggatggggtgtggggaagggacatcacagtggtttcctctgtcaactctatgagagtcgtggttctagactttttggaggtgtcaggtgcaggttgaatcctggccttctacctaaacagggcaggtgctggagattctcagcttgttcctgtccccagatggtgctcaccacacttatctccaactgctggacagtgcctggcatgtgagagatgctcagtaagtatctgttgaattaatgatacgagccagcattcactgagctcttactatgtaggaggcactgttctgactgcttctcagctaatatcttattgaatccttagaaccactccttggggtaggtactgttgttattaccatgtctcgtaagaggaaactgagttacagagaagttcaagtcacagagctggtgagtctcaaattcaggattcctatgcaagtcactggctccagagtctaggctcttaaacactcactgtgtggtctttcgatgaacagacagacgaacagatggggcagacaagcaggaccattctcacttgttccggcctcctcactccacacgtggtctccccctgttttggggg

SEQ ID NO: 22586 - DNA, 1070 bp, Homo sapiens
caggcccccattttccctgtgtgacctcatctgtgacctctcagctgcttgcttgctgtaccccagctgcactggcctcctgctgttcctccctcggagactttgccctggctgttccctctgcctgcaacacttcccctagaattccccagcgccgcctccctccctccttccctcaagtctctgttcagatgtcaccttctccatgaggcctctctccttattaaattgcaccttctccctcaccctcgcccttactctttgctttatttttcttcatagcatttacttccacttgacatattttgtctatgctctgcttcccagctctaggctccatagaagcacaggcacttttgtgtccatccttgtagaaccgttcctggcacgtggtagatgcgggctaaattgtgatatgaatgaatttatatcaggtgcaacatgatccaaggatgggtggccagccccgtttggggtttgaggagggtgtcagcttttccaggaacctgtggctgtgggtgaggcggcatgtgcagatgcctccccctggtcacccagtggctctctggcacctgcctgcagcatccagccctctgccttcctgtcctgcaacccctgcagtctgtgcagcccaggcctggtagtgactcatctgggcagcctgggtgcctgtggcatggaacaggaaagcttggcctagtaagtggagaggatgtcaggttcatttaggtggagaagactgtgtggaagataccacccatatacacacatctcatatgtatctccagcccctgcttgctgttcctgcagggggaggccagggagtgcctgggaagtagcaattaaccagccaggcacagttgagccatctcccctgctttaatgggtaataattcttgctctggggctgaacaagttttaattaaatggtgagcgcgaagaatctgaccgtgtaatagctgacacgtcctcatctattttctagctcccggtgtcagcaattgattctgtaaaaatatcctgggcagggcttccctgagctccatgagtgaggtcagtggccttcttgg

SEQ ID NO: 22587 - DNA, 1025 bp, Homo sapiens
tcaaatgaatgaaagtagagtttaagtctgcagtttttttcctctttggaaaaaaacattcctttcctgcccatgacccagccttgcacactggccgctaaacctggcgtatcgcatcatgtttcaggaggaatttggtcagatctgtgcactttattaggataatggttgacccagtgtgtacctccccaggtaactttggaaagagctggatagagttcatgaccaattcggaacaaagtctgctcttaggaggaattttgctaatagtgggaaatattcaagagggtaatcactgacttagttcaaggtaatttaaggtgaatgcattcctcatgtgtgtgtgtgtgtatgtgtgtgcatgcgtgccaaacttacttgaggtgaaggaggggcgaaagcccttttactcgaatgaaaggaaatcttttgaattgacctatcggttcagaaaatcccttttcaaatcttcccttgagcagctttgcttttgaggcccctgaaagctgggaaagaaggggctgtgaggcctgactgactcctcgctgctggctgtacccccaggcacgtgtgattttgccattgtctgaaatcttgctttccccagaatttgtgccccatgctgagttcctacagctcagccaccaggaattagggcatgggttagccaggattattcaaatttaatctgatcatcgttaaacatttttgcttgcatcctccccaaaagaattttgataagcccctgtatacctccttgtacactgtaaagctaacatctaaaataagcttatggtaactttaaatttgtcttatttgtgggagaagaaaatagtacacattttgaaggtcgaatgtaattgaaatattttatgatgtggttagataaaaaaaagtttttactaccttattgagtaaagtacacagaagctgaaagcaatcatgtaaatttttccctgggaattttttcttggtggatctagaaaaattcagtggtcctgaaaaatgttccctttgaacaaatc

SEQ ID NO: 22588 - DNA, 1026 bp, Homo sapiens
aaatattttttcccagaaaatatttttatttttttagtcatgcctttggaagtataaaagttttgtttttttttttttttgagactgagtctcactcttgtcacccaggttggagcagtggcacaatctcggctcactgcaatctctgcctcccgggttcaagcaattctcctgcctcagcctcctgagtagccgggattacatgcacacgccaccatgcccagctaatttttgtatttttagtagagatggggtttcgccatgttggccaggctggtcttgaactcctgacctcaagtgatccgcccaccttggcctcccaaagtgttgggattacaggtgtgagccaccacgcccaccctaatataaaagtttttaattttggaaattccgtttatcaattagtcttttatggattgtgcttttggtattatatttaagaactctttgacccagtatcatgaagttcttctttcatgttttctcctagaagttgcatacttttaactcttgcctttgaatctatcattaattttgatatcatttttgtgtattacataaggggcctaaatttatctttttgcgtattaatatccaattatcccagctccatttgttgaaaaaaagaccattttcctccactgaattaggtagcactatggtaaaagtcatttgattattaatataagggtttgtttcttctgatctattggtttaaatgtctatcctactgctagtgccacagtcttcattactgtagctttaaagttactttagaaatcgggaagtgttaagtcctcaccttgttttgttttccaaaattgttttggcttgtgtgggtcctttgcatactgacaagttttcagatcaccttgtcaatatctgcacaaaagcctgctgggatttgatagactgtgtgttgactctacatgtcaatatggtgagaattgccatattaatgtttagtcttccagtttgtgtacaaagaatgcttctctgtttatttagattgtctttaatttcttt

SEQ ID NO: 22589 - DNA, 1034 bp, Homo sapiens
tgaatggctctttctccaaaacatccaaatggcctataagcacatgaaaatggctcaatataattatcattagggtaatgctaatcaaaaccacaagattctatttcacaccaactaggatggctagagccaaaatgatgggcaataacaagtgttggccaggatgtggagaaattggaaccctcatacatggctggtgggattgtaaaatggtgtagccattttggaaaacaatttggcagttactcaaaaaaatatatacatagagttaccatatgatccagcaattccactcctaggtatatactcaaatactaatatatgttcacataattacttgtgcatacatgttcagagtagcgttattcgtaaccccagaagtgaaaatgacccgatgtccatcaactgataattggctaaacagaatgcgatatagacccacaatggtatattactctgtcatagaaaggaatgaagtactgatacagactacaacatggatgaaccctgaaacacacatgaatgaaagaaaccagacccaaaagagcacatcttgcttcatcccatttatatgaaatgttcagagtaagcaaatctacagagacagaaaatagattagtgtttgctgagggctggggatgctgtgaacaggaaatggaaagtgattgctaggagtacagagtttattttggagatgataaaaattttctaagctcaggttgtggtgatggtgaattacacacttttaaagggtaaatttcattcattgacgtttgatgtgattgttggtgtgtttggattaacatctgtcatttttgctgttttctgtatgcctcacatcttttttcctccttttattctccctttattgccgtctttctgataagcagatattttctagtgtttcatttttattttgttgggttttaaaaaactttcttttttttttttttttaattgggtctctagggatcacagcatgcgtctaaatttatcacagcctacttcagattaatattaaaacttagttctag

SEQ ID NO: 22590 - DNA, 1034 bp, Homo sapiens
tgtgtgcagcctggcctgtggtggggaggatgtaagaggagaggttatacctcctctttttcaggcagttgtgtttttttttgagatataatttatgtgtgttaaaatttgcccttttttaaaaatttattcctcccccacctcccatgcttttttttgtttgtttgtttgtttgtttgttttttggagaatggggtctcactctgttgcccaggcaggtctcaaactcctgggttcaagtgatcctcctgtctctgcctccctaagtgctgggagtgcaggtgtgagccactgcacctggcatatttgcccttttaaaacatttgatggttttcagtgtattttccaggctctttaatcatcataacaatctatttgcagaacatgatcaccacctcaaaaagaaaccctgaacccattcccgcttccctgattctgccctgtgattttcccatcccttcagcccctggcaccactaatctttctgtctctatgtatttgcctgttctggacatttcatgtaattggaataatgcagtatccatttctgtctggcttctttcactgagtgtcatgttttttgttttttggggttttttttttgcagagacagagtcttgctctgttgcccaggctggagtacagtggcgcgatctcggctcactgctacttcgcttcccaggttcaagcagttctcctgccttagcctcctgagtacctgggattacaggcgtgtgacaccatgcccagctaattccttttgtattttattagagacggggtttcattgtgttgcccaggttggtctcgaactcctgagctcaggcaatccgcccgcctcagcctcccaaagtgctgggattacaggtgtgagccatcacgcccggcctgagtgtcatgtttttaaggttcacccatgttgtgcatgaatcagtacttcattcctttttgggttggataatattctgttgtacagatagaccacattttgcttatccaggcatcacctgatggacctttgggttgtttccacg

SEQ ID NO: 22591 - DNA, 1046 bp, Homo sapiens
gtgagccgagatcgtgccactgcactccagcctgggcaacagagcgagactctgtctcaaaaaaaaaaaaaaaaatttaggtttcactgtctataaatatttattggaacacggcccgcccatttggttgtgtattgtctgtggctgttcttacactgtaatggcagaattgagtggttgcaacagagacaagtgtgacccaccccccaaacctacaatatttgctctttggccctttacagaagaagtttgctgatccctgcactacacactttcctttagtaatgcgtgttagagacagttggctctcagcacttttcttgcgtgctaactgtgctccccaaaagcagagcccagctgcaagccgtgggcatgcccaggttcggctggcggtgggtctgttggtgcctccgcgtgcacactcactctgagcatttcttgggccctggctgcgtggcaggccgctggctgggagccagggcaggtctaggcctgccctcaggaatccacaggccggtgggtggggagagtcagacagtatcgggcagtcctgtggagggatgtattcaggcctgctctcacaggccttccttgaccctctccccatcactcccactttgtttttatttgtggcacttaaataaaaaataggtcatgcatttatatgcttcaaaatcaattctatgtggatgtgtgagcagtctctgtcctccactcctctccctgcccaccttgttccttctccccttacgtaatgatttgtattttcccttgggtatccgtctaaggtatcattatatcaatacaagcaaatatgaatatatatttttgtcttctccttccttcgacaaaaggtagcctactcagtactctgctctgcactttgcaaatgtttactgaacagtatgccctggagatcctcttattttagtgttctggtggaaactgaagggtgggtaggagttaataaggcaaaaaagaaaggtgtatcttagggtgggggaagcatgaggaagagcattctaggcagagggaacagtgtgaac

SEQ ID NO: 22592 - DNA, 1034 bp, Homo sapiens
ccgccatgtaaatggctccagcttttgcaggccacatgcacgtcttcagagctttctccataatggactcttttggaagaccctggcctccaagggctgtatagtggcttatggctctcccagttaatggtgcttatgaatgtggctgtggagggagagaggctggggctggacaacctgggctttcccggtgtgacctgtggcagccagaaagagggacggggtcaagcaggggcatctttgtccacccttagctcctcctggctattcaggacccaccttacaggttcctgtggcctccctgggttgtcttcctggggtcgagggttctctggcaggcataccatggtgcccttgcccctctaccccgacatcccagccaggccatgttgaaattgccttttcatttgttagttgatctatgcaaaatgttgggagggcaggggccttgcatctacttcccttggcccaatcctggctgtgcagtaggttttaaaaacacgtctgaacaaatgaataaataaatgactcatgtgatggaactaacatctaaacagaacttaacttgcagtatcttctgggcaaatgccacatctgggctagagaggcagtggagggtggtggttgaaagccgaccctggagccacgtgctgggagttgaaatccagttctgtcgcttacttgctgggtgacctcggacaagggactgcacctctcaggacctcagttttctcatctgttaagtgggataatagtaggacctgccccacggagcagttgtgaaggttacgtgagttgaaatgttaaagcatctggcacaggcactggcttaagagttagcagctgctcctaggcaccgtgcagtagcgttgaccatgaagagtaaccgagtcttagcctcaggtatgcggagagaccagctcagttccaggggagatgttgttcaccttgtgaacctaagaaacagtggtttcatccaaaaaagattgctcagacctggcatggtggctcacacctgtaatcccagcactctt

SEQ ID NO: 22593 - DNA, 1068 bp, Homo sapiens
ctgtggaggatgagggaaggagggacaggaaggattctcccatgtgtctgcatcattgctggatccctgctgacagacacacaggttgtctcctgtgtctcccaacatgcatgaatgcacatccttgctgggctgtgtctttttttttttttttgagacagggtcttgctctgtcacccaggctggagtgcagtgatgtgatctcggcttgctgcagcctcgaccttcccggctcctggctcaagcaccctcagcctcctggatagctgggaccacaggtgcatgcccccatgtccagctgatattttttttttggtagagatgggggtctcactatgttgcccaggctgatttcgaactcctgacctcaagcgttcctcccacctcagtgtcccaaagccctgggattacaggtgtgagctaccgtgagtcttaagggatgaagggcaagggcatttcaggtggagggaagcatctaagtaaaggctggggccctgttctggtgctgtacagggaacctcccctgctcccagcccagctcaggccagagtgtggggtgaggggcagaactgtctcctgggctgtggaacagcagcatccaacctcaatccactacccgaagcatgtggagttgctgcccattttgagattctttcatgtcctccatcccccgtcttctccagagctgctttctcatctggccaagtccattccccccaccccccatcctctctcctccccaggtgagtccagagtttcagctaatgttgcagcggcagatgcatcacattggatatcctgccattctcgggcccttgctgtctgcatttaggtcagctttgttttcctggggattgaaagcagtggctggtgtggcctttggttctgggccagcctcacaaggaggctggacctgcaggaagtaaacgagaggcctcttgtttgtatgaacttgattcttctaccatctttgtcccctgttcccttctgtgtcttgtttctggccttgttcttgagagtgcaggtcccacaggcagtggccagtgctgcaggcctcctttacccttt

SEQ ID NO: 22594 - DNA, 1025 bp, Homo sapiens
gcacatctccatgcctgagtaatttttctatttttctttaatagagatggggtcttgctgtgttgcccaggctggtctctaactcctgggctcaagcaatctgcctgccttggcctcccaaagtactgggattacaggcgtgagccactgcaccccgcgtatgaatccagtcctttttgtgaggagaggggaaatgcttctctagaattcctgaatgagaaacctttgccctccccaaggttctgaagatacgcacctgtgctgtcttctagacatgttcatatttttcctttttcatttaggtctttgacccatctgacattgatgtctgtatatggaaggagacagagttcaaggctaagctcatactcttcactgttgcatttagtaggcaccattgttggtggttctagagccagacccgctgggttcaaatccctcctggctgtgccgtctacttgctgtgtgatcttgggcaaggtacctctctgtacttgagttttctggtctgttaaaaatggagatcatagtacaacctacttcacaggttattaagaggtttaaatggattggtagttaaagaacagaaaacagagccgggaatggtggcatgcaccagtagtcccagctactcgggaggctgaggcgggaggatcgcttgagctcaggaggtcgaggctgcagtgagctatgattgtgccactgcactccagcctgggtgacagagtgagaccctatctttaagaagaaaaactgtaatcccagcactttgggaggtcgaggcaggcagatcacgaagtcaggagattgagaccatcctggctaacatggtgaaaccccgtctctactaaaaatacacagacacacacaaaaaaatcgggcgtggtggcaggtgcctctagtcccagctactcgggaggctgaggcaggagaattgcctgaacctgggaggcggagcctgcagtgagccgagatggtgccactgcactccagcctgggtgacagagcgagactccatctcaaga

SEQ ID NO: 22595 - DNA, 1004 bp, Homo sapiens
caaggtgggcggatcgcttgaggccaggagtttgagaccagcccagacaacgtgacgaaaccccatctctactaaaaatacaaaaattacctggggtggtggtgtgtacctgtaaacccagctactcgggaggctgaggcagaattgcttgagtctgggaggcagaggttgcagtgagccaagatggcgccactgtactccagcctgggcagtagatcaagactccatctcaaaaaaaaagaaattattctgaggagtctgcaactaattcaccaggttgccagtaggagtccctggcatgagaaaggttaagaacccccttgggcttctccaggaaccccaggggaatgatcattgaagttgtcctgattcctggaccctggggtgttagctagctgcttgctaggcttccttcctgggagattcctggaggagctgaccggcctttgaggttggcggggatatttgggtagcatttggacattatggtattggggaagtggagcagggaggtgttgccagcccactgccttcattgaccattgtgacagagtgtggtctagccaggtggtcagaaacagactctgggaccaggttgctgggttcacatcctggctgtatatagtacactttttttttttttttaaacagggtcttgctatgttgcccaggctggtcttgaacttctgagctcaaatgatcctcccatcttagcctcctgagtagctgggactataggcttagtgggactatagaccactgtgcctagcttagtatacttttgactgactgggcaacctcagctagtgggtcccttatgaattctgtgcctcagtttcctcatctgtaacatgaaagtaataatagtatcttcttcttgggtgatcgggagagtgaaatgagtcagcacttgtctgctaggacagagccggcacattgggagggattgttattagtgaatggccattgcatataggacagctctagaccctctcagctctcat

SEQ ID NO: 22596 - DNA, 1153 bp, Homo sapiens
acaagtcccagggccccacccaaccacaagggagccaagaagtgcaatcccactgaccccaggaaggagggagttcggggcctttggagccacagctcatgactgccatggtctctgcaaggttagaagccacggggtcgcatatccacatttcccctccagaaatcaggaagccaggctgggaccgggtgcgtgttccccctgcgggtcccctgccatcacccgggaaggtattaatagatgggagttggcaggtttttggcttcaaagcggggaacgtgaccaggggtcttccagaggagctgacccaagcagcttctgaggctcgatcctgcctgtggcctgcaggtgatgaccagtggctgggagacggtggacatgacgcttcggcggaacgggctcgggcagctgggcttccacgtgaagtacgacggcacggtggccgaggttgaggactatgggttcgcctggcaggccggcctccggcagggcagccgactagtggagatctgcaaggtggccgtggtcacactgacccacgaccagatgatcgacctgctgcgcacctctgtcactgtgaaggtggtcatcatcccgccttttgaggacggcactccccggaggtaagggcctccacctttcagccaggtggtgggtggcagctcccagatcgctggcatgaggcctccctggcactgtcacttgaggtcccaatagaggggggataggcaggcccttctaggcaggaatagtggcaacagtgacaggacggggagggcacatctacagagcgcttactgtatgccagttattggtttagcccttcatacgtgcatgatcgcatttaatctccacagttgccctgtgaggggagagcctcattcttcccatttcctacatgaagcacaggatgttaatagttgcttgcctgtgggccccccacacttcattcatttgttcaaaatgtgtttattgagcccctactgtgtgcaagctctgttcaaagtgaccacaacaaagtgcctgctcccttgcggtttgtgttctacagggaaagacaggccgtgaagaaataggtgtgtcataccggatcaggtagtactaagtctcagaaggaaattaaagcagggtaatgaaggggctgcagcacgat

SEQ ID NO: 22597 - DNA, 1027 bp, Homo sapiens
gttatggattgaggcgagggtagacttaatagtcttgtttcagagtggaatatggagtgatggtaggcatgagtagtgatgagttgcattgtgctgataggttatgaaatgtaaattttttattttttgatatggagtctctgtcgcccagactctggagtgcagtggtgcgatctcggctcactgcaacctccaccttctgggttcaagcgattctcctgcctcagcctcctgagtaactgggattacaagcatgcaccaccacgcccggctcatttttttgtatttttagtagagacggggtttcaccatgttggccaggctggtgttgaactcctgacctcaggtgatccacctgcctcagcctcccagagtgctggggttacaggcgtgagccaccgtgcccggcctgaaatgtaaacttttatatctaaatattttatatagaaaataccaagattttatatctgaaacaccaagattttatgagcctcataacttaagtaggatttgtaattgtaaatgttctttcctcataaatacctgaggtttttttttgaaaggttctgaattgtctcaataatgaaaacttccagacacccaagcctagaggagatgggtagttggtagctttctgtactggaaacagaaacactcaaatatatagaacctagccagctaaccaaagtaggtagatttatagatcatcttaaaataaggctgattacacagtaaatgtcacctttggaatctggcttggtagaattgaaataggcttcagtacctcctgtcattcagtacctgttttcttgaactcctgacttcaggtgatctgcctcggcctcccagagtgctgggcttacaggcatgagccactgtgcccggcctcagtacctctttttaagatgctctcattcattccctggtgaaaagatgcttgaagtgcaagtgcaagtaggtgtggaaagcatggagggtttgtgttgcttcatttgttttggtatttgttttttccaccagtccctcc

SEQ ID NO: 22598 - DNA, 1025 bp, Homo sapiens
cactacagcctctgcctcccgggctcaagtgattctcctgcctcagcctcccgtgtagctgggactacaggcacccgccatcacacttggctaatttttgtatttttagtagagatagggttttatcacgttggccaggctgatctcgaacttctgacctcaagtgatcctcccacctcagcctccccgaagtcctgggattacaagcatgagccaccacacccagcctatttttctatcaatattaaaaagtaaccagtatccataccctcctaccccagcagtcaaggacttctgcatatttgtactttctatgggtctccaaatctgtccagtcttccccacgccaatggcctgtgtcccctgtatccacttgggggtaggggcggtttctcctcaccgtatctgtttcccaggaagggtgtggggattcagtctgggtccaggcatggcgaagctggcacccagtctcaggctccagggatagcgtgtaggagtgattttcctcggagcctgtttgtgggtggatggaagggatgtgggtctgatgggaaggacctcttcttgaccttggactcaacccctttcccccaggccccttcccagcaccggtgtgctctaggtcttaccacagctggcatggggagctggtgtggatgggacaggagctccggggggtcctgcatcgcccttggcccctggcctcttcttacattctaccttcacctggtctctgcagtgtttgtggcaacacagcccgcactctgggggaaggcagcggcaggggtccgatctgtgtcatccattcttccagcctgcgggccaaggcttccctcccactcactgacaccccactcaccccgacagcggtagccttgcttggtgacaccccagagctgggaagagaaaggagaaaaggttacccatcctaggagagggagggctgtggattggcagggcagctggggagtggaagtgtggaagctacccaggttttgaaattctcaaggctagagatttaactg

SEQ ID NO: 22599 - DNA, 1406 bp, Homo sapiens
gaaaaagagcgaaactccatctcaaaaaaaaaaaagagaaaaaatgtcgcatgtgactcccctgtccccagctgcagctacggtcttgcttccttccccaactcctggatgtttcctcatgctttatctgtctccctttcttctcacctcaacttatgatctggcttcttgtctcgggagaaaatggaagcagccactgtagaaattgcacctgttcctatcccagaccctgacattttatgtgcagctgactgcacacttttttttttaattcttaaacattttattttttattcaagtaagaaattattgattagcttcagttaatcccacaaagaaaatgatcaaatgcttaaaataatagagtttactagttctacaactgttctcactagcaaactagcaaatgagatgtgttggagatcttagacctattccatggaacagatagacaggttttttttgtttgtttgttttgttttgttttgttttgttttgttttgttttgttttttgagacagggtctcactctgtcgcccaggccgcagtgcagtgatgcaaacacagctcactgcagctttgacctcccaggctcaagtgatccccgcacttcagcctcctgagtagctgggactaacaggcccacgccaacacgcctggctaatttttctatttgtagtagaggttggatttcgccatgttgaccaggctggtcttgaacttctggcctcaagtgatcctcctgcctcgcctcccaaagtgctgggattacaggttgagccaccacgcccggccacaaatctggatttctgcccacctcactggctacaccttcccggcatccatgtgggggattccctcccttttgttggagagaacctataccacagacctaacctttgagcagaaatctgaaggaggtgagggtggtagccatggaggagaattccatacacaggccctgaggtaggcgggtgtctggcgggtttggggagcagcagggaagcccctgtggctggagcagggtgagtgagtagcgagtaggtggaggtgagggcacagaggtgacaggcagattctgtgtggcctaatgggctatggtaggaaaattggccttttctctgagtgagacagaagcaaggggaggtggctgaatacacttagccaatatgtgtctgccccctttctcagggctctggtttctgcctgccaggttcaagcctcacctccaggatttttggaaaatcatgtagctgccctggtctcctcatctctaaaatggatataacttacatcacatggctacacttagaagaatggctatagcatgtggggtcagtgctcaaagtggtagctgctttttttttttttctgaaatggagtatggctctgtcgcccaggctaga

SEQ ID NO: 22600 - DNA, 1050 bp, Homo sapiens
aattagctggacatggtggtgggcgcctgttgtcccagctagtggggaggctgaggtgggagaatcgcttgaacctgggtgggagaggttgcattgagccgagatcacgccattgcactccagcctgggcaacagggtgagaccctgtctctaaataataataaaaatgagaaattggccaggtgtagtagcatattcctgggaggctgaggtgggcagattgcttgagcccaggagttcaaggctgcagtgagctatgatgacaccactgtactccagcctgggcaacagagtaagaccccaaccctaaaacaaaaaaaaacagaaaaccacaatgagataccactgcacacccaccatgatggctataatcagaaagtcagataataagtattgactaggatgggagaaatcagaaccctcacattgctggtcaaagtgtaatgtggtgcagcttcttgggaaaacagtctggcagttcctcaaaatttaaacatgttttgtatttttagtagagacggggtttcaccatgtcacccaggctggtcttgtctcagcctcccaaagtgttggaattacaggcatgagccaccacgcccagccaagttcctcaaatttttaaatataagaggtatcatatgactcagcaattttactcctaggtatatgcccaaggcagttgaaaacatgtccacataaaacttgtacatgaatattcacggtggtgctaatatccaaaagatagaagcaacacaaataatgcccatcagccaatgaattgataaataaaatgtggtatatccatacaatggaatgttattcagacaggaacgaagtactggtacatgctacaacatggctgaaccttgaaaacatgctaaggagaagccaaactcaaagatcatataccatatggttccacttatatgaaatgcccagaataggtaaattgcaagagacgaaagaaaggtaggttagtggttgccaggggctgggggctgggtaggagggaagtggggttggagagtaactgtaccagttttgcggtgg

SEQ ID NO: 22601 - DNA, 1043 bp, Homo sapiens
gcccggccctggctgggggcttcttgacctgactctgctgtctctccctcactggccagcacctcccattctactcagacatcgtggaatgaatgcccaccccgtgtttgtatgtatcatctgtgtctgtgtgacattaagcaagtcactgaacctctccctgcctcagtttcctcatcaaatggagatatatcgcatgtgatcatggggttggaggttttaaagagttgctaatgtgtaaatagtaagaactagcaattagccgttatagcataattacctttaatatgtcatgccccccgcacccccgtgctgaatgtaattttgcgggggggcgggttgagacagggtctggctctgtcaccgaggctggagtgcactaacacaatctcagcttactgcaacctctgcctctcaggcacaagctgtcttcccacctcagcctctcgagtagctgggactacaggcgctcagtaccacgcctggctaatttttgtagtttttgtagagatggggttttgccatgttgcctaggctgatctcaaactcctgtgctaaagcaatcctcccgcctcggcctcctaaagtgctgggattacatggtgtgtgccaccatgcctggctggccagaatgtaaatgataactgttttgcttcctcctgtgtccagtacataatagggctccaagtcagtatttgtgaggcaggtgcatgcctcttagttgcggtcctgagggcatggccactgccacgttctggacagtcagagtcgctgctgcccctggaagatgaccgcgatcatgaagcccaggagagctcgatgctttttgcctttccctcctcccacagagggctggcagctctggttcctcccaaatgaaatagaaaccttgagtttgcatttcttctttggcgtgccggcagggcacctctgccttcctcttcctgccagggggaggaagtttctctcaggggctcttcaccctgctttattcctggccatcacacattgacccttgtccccttcggctctttccctgcatg

SEQ ID NO: 22602 - DNA, 1034 bp, Homo sapiens
gtcacccaggctggagtgcaatggcacgaccttggctcactgcaacctctgcctcccaggttcaagcagttctcctgcctcagcctcccaagtagctgggattacaggcgcgcaccaccacgcccagctaatttttgtattttttttagtagagatggggtttcaccatgttggtcaggctgatcttgaactcctgacctcaggtgatccactcacctcagcctcccaaagtgctgggattacaggtgtgaaccagcgtgcctggcctagaattgttttagaatgtccaactgtttgttaccctttctcactccattaaagatctgagtagttcctaaaagaatatgtttgtttctttttcaattttattttctaatttatgtcccaggcccagtgcacatactggcctagccagactgagccaggtgggcttgtcggccttgcccttgaggcacttagtgagcccagaagcagtcaggctctcagcatggagctcagtgaagacagcggcagtggggcatgtgacagcatggaaagggacctttttggcgggggcatgggagtggaggtttcccctcttagacctgagggaaaagactaagagcaaaggcatgggccaggcatggtggctcacccctgtcatcccaccactttgggaggctaaagtgggattgcttgaagttcaggagctcaagaccagcctgggcagtatactgagacccccttctctataaaaacttaaaataaaaatcagccaggctcggaggtaggcacctgtagtcccaactacttgggagactgaggtggaaggatggcttcagcccgggaggttgctatgatcatgccacttcactccagcctgggtgacaaagcgtgaacctgtctttaaaaagaaaagcacaggcaggaacaggaagtaacaagagaacagtacagtgatgcagggacagggagggagcccacgctcccagagttccaggttgggggttctagcaggaatcgtggagaagttgggctggggagcaggggtaacc

SEQ ID NO: 22603 - DNA, 1148 bp, Homo sapiens
caggaggtggaggttgcagtgagccacgatcgtgtcactgcgctccagcctgggcgacagggcaagactctctctcaaaaaataaaaattaaaataaataaataaataaataaataaataaatattcttgaatattattctgggatggagttaaattactcggaagtagtttgagtctttccagttttgcttttatgatttgttaggtgggtgttgagcagtgccccatctacagttaattattccccactattgaggcaagaccttcctgagtatcccacccgatagcctgtgatgatgtttttccagcctggctggtgggaacactcactattcctggccctgtgtgagtaacgagcacttttctgaaatccttttggatggttttcccatccccacagactcacaggcatggctgatccgtattctccggaatacacaagagaacctcctgcagttccccagcaatctctcctttggcaactctgttttgtactctgtcctgtgactctagccacgctggcctccacagactcttcctccatatccatctcctgacctcagacaacctgatgcgctctgcttggattcccctctctgcaccgtggctttgaaactctctcaagacaataagctgtggcagtcaagtgtggggcccacctcgtgtttcctgtctttcaggggtcactgtgattcattgcacgatgtccagtgtcttcaacactgttgcttcatataccgtatttcgtctgactcttgtttgtttgtttgtttgtttcacgtgggagtgaattctggtccatgttacttcattttgggcagaagtggaaatcccactgaataaacattgattccacgaatttgctgatgaaactctgacctctgacctcccagatagctgacagggggttccagaactgtggtcacaaggcctagcatacagtaggcgccccatgtttgttcaatgaaggaatgcaagaggacttgaactttgccctctcaccccggtctttgtccccagggcactgcacttggctgtgattcatcagcatgaacccttcctggattttcttctaggcttctcggccggcactgagtacatggacctgcagaatgacctaggccaggtgagccacgagggatggtgt

SEQ ID NO: 22604 - DNA, 1026 bp, Homo sapiens
actaccagcctttggtgcttctttaaattgctgcttctttgaacacacatatccatctcttcttgtccatctgtttcttcacataggcaccctccccttgaggcaccctcaggaggtcttttcattctgtgtcttactgccaagacccctccacctccattgtacctcttagaacaccactcaccttcaaccttgtagattttaatgtacttgtccactcaccctcactggactaggaactctgaaagtacgggatgtgtcttgttcttctctgaatcccacaaggtgggatctactctttgtaagttattggaaatcactggagaataagcagctcttccttctgcatttggccagaaatctccaagttcctcagatctcactcctcattcaggtttagtacaccttccctgccccctcctctcctctcacctcccttttttttctccacacagcaccctttgcctttactcctgccctacttgctcctgtcttagggactttctttgtgctgtttcctgattctgagctaccccaagtcctttgcctggtgacctgcctcacccgtcctggttggcttctcttagcagcccctctcagctgctaagtctggagcctccacagagctcttggcattttttcaagggattctgtttctagggcccagaaggggaaacagagaccccagggtaaatattggggcctgccttcagggagctcacaataccagtagggggcttgggcatgtacagagcagaaaatgaggtacaaattatatgctgtagaaattcagcagtgagagggagccttttatttggaaagacttcacagaaaaggtggtatttgggctggatagtgttccatgggagttgggacaatgatggtgcccccaggcagaggaaacagcttaagcaatgggtcaaagacaaagcctcctcatctctcacccatggtatctcttctcttcacccaaaagatagagatgaaagaagacagatttcctccatttgcattgtatttgccagc

SEQ ID NO: 22605 - DNA, 1045 bp, Homo sapiens
ctttgaagaaacatctcttgatgatgatatcatagactccttcctactgggcagatgaggcagaatggggcacaggtgagcccagatctgattgatgagaaggaaccaaccttgtgacggtccggggaagagcatttcaggcagagaggtcagcaggtgcaaaagccctgccatatgttcagggaatcgcaaggaccagtgtggctaaagcctaagtgagggagaggggtgagggttggaaaggctgacagaagccagattacttgcagcctaagggccacagtaaggagtttctattttcatttaaggggattgggaaactattagaagggagtttttaaaagcaagacagcgacatgatctgattaatttttttagaaagctcactttggtttctgggaggaaaacagagggtcaggacagaatcaggaaggaaagttaggagacaatccatttgtccagatgagaaatggtgacatgaatgtggtggtggtggtggtagtgaagatgtagagaagcagatatattttgggtgtacagaaaacaggacttgatgatgggattagagaaagagaggaatctagaataatgataatagccaagtcatttatgcctcacaactctatgagagtaggcactattattattttctgtcttccttctcagtaggtactattattacacccacattacagatgacaaaacaggcatggcaaggtgaaatcacttgcccaaaattacacaggtagtaagtggcaggcttatatttccaacccggcagtctggttctagagccacttaggtttggggaaagataagcaaggcatgtgtagctgacattaagaaaaaagaaatatcaagacctaatgactgggtctttgggaaatggaagaagtcaaagatgactcaaaaaaatgtctcagttgtccacagagaggtgatgattgaatctacaggagttaattacatgcctaagtgagagaaaacaagtgtaaagaagggaaaggaagcagagaataaacttttcggggggaaggggtgtcaa

SEQ ID NO: 22606 - DNA, 1061 bp, Homo sapiens
caaactcctgggctcaagcgatctgcccacctcagtctcccgaagtgctgggattacagatgtgagccaccatgcccagctttcttgcattgttaagagcaagcaagagctctgaagccagactgcctggccttgaaaatctcagcttggtgtacagtcttgggcaaagtgacttaacttctctgtgcctcagttgctccatctgtaaaatgataatatattcatatatgtatgttatatatttttgaaatagagttttggggatcaaatgtgcttatctgtggaaagctgttggcaaagggcctgacaatgtatgatgtatgaagacatgctaagcatcatgcttgctattgaaatgaagtatagaggaggaaaaaagcatcatgcgcggtatttttaaatacattgtttcatttaattcttctaacaagcttcattgaggaagaaacagagttacttgtcatagtcaatacagcaagtaagtataacaggagagccaggatttaagccaggtctgactaactccaccatcctgcttctgaatgaagagagctggactccagaggcactgtttatgggcatatgggccttttctcactgtttggggccagagaagaagcccagagggcagtttgtcctggaacatctcagcatttttttgtttttgtttttgtttttgttttgagacaaagtctccagtcccccaggctggagtgcagtggcgcaatctcagctcactgcaacctccacctcccaggttgaagcgattctgctgcctcagcctcctgagtagctgggattacaggcgcctgccaccacgcccagctgattttttgtatttttagtagagacagggtttcaccgtgttggccaggctggtctcgaactcctgacctcaggtgatccgcccgtctcggccccccaaagtgctgggattacaggcgtgagccaccgtgcccagcctttctccaggtgggagtgcagtggcatgatctcagctcactgaagcctcgacctccagaactcaagtgatcctcccaaagtagctgggactgcaggtg

SEQ ID NO: 22607 - DNA, 1073 bp, Homo sapiens
gcatagtccatctcctcctcctggtcccgctttcgtttcttcaacgtctcttctacaggcaggaaataggccacaaactggttcccttcctcatccatcatgcccctggttgggggaaaaggagtagcaatgaagtgtgaggacaagaggcagcaaggagcaggccaaggtggacagcaggaccacctacctaatcatggcctgagacatcatctccaacgcagctgcaccactcgtgtccttgggggctgggtctgagtcaaagatcacctgagcacatggattgatccacatctagggagatggaggcactggggttagatgggaacaggcacaaataggctgtccctttctacctcccaccttgggcctgaccttaaagtctgggaagacaggcatgacctccaccggtgtgactcggggtttgctgtaatgctgtgagatctggtggaacaaaaacaaggtgaggaggagctctgcagccgcacccttgcctctccccatcccagtccctcaattactgatttctgggcatcctcaaaagtcttctcaatggctgtgatctggctatccctgtctttgtatatttcttcctcggtaaactgctgcttcacagaaaccccaatcctaggaatgaagaaaaaggtccttaggggccactggacacacctaatatctccaccttccctctcttcctgttagtaacttacttgacctcaggcttctcattggagatgccataacggttgaactcagtggagatgtactctgtctttcgcatccatggcaccaccttcgcgtgctgctgggatctggggtgggaaatcaggtatctcaggaccccactgccctcctgcttgtagggcccacctgagccagtctccagtacccatttgctacccactcacctcttggagctggtgggggcctgaatctcctcttccaaaagtttctcatcagctggatctagaagaactagaggagagcggggggcaggaggaccatgagggaggcccaggcctgagcctttgctgacctagagcagaccctccctgtctccccacacaccattg

SEQ ID NO: 22608 - DNA, 1058 bp, Homo sapiens
ccacagggtgtgcgccaccacactcagctaatttttgcatttttgtagaaatggggattcgccgtgttgcccaggctagtctcagactccgagctctagtgatccgcctgccttgggcgcccaaagtgctaggactacaggtgtgagccgggcaggagagtaacttcactttggtttcctcctgccttaaatgggcataccacctggcattaggattaatgtgcgtaaagtacttagaactcagcccaggtgagttctccttaactcagcctagaagagatcatccgcccgagggtgagggggctagagccgccctgtgaattgggaaaggaggccccttttcagccttgccaggtatcctggaccccacccaacccactcactcacccacccaaccccagcaagtggggagagggagagcagtccaggtctccttatctgtctgggctgtttaggagtgagaccacacaaggcaggcagttctcagagaattcccctccaaggcctgctggctctttcttggcactttgctctgcagatttctttccgtaagtgcttatttctcacagtctttctcctttttgtccagtttctttttctttttaatttttttaaatagtattttttgtagacatgggatctcactgttgcccaggctgatcttgaactcctgatctcaggtaatccacctgcctcatcctctgaaagtactgggattggccgggcttggtggctcacacctgtaattccagctctttgggaggcggaggtgggaggatcgcttgagccccggagctggagattagcctgggcaacatagggaaaccccgtctttcaaaaaaaaaaaaaaagaagaagaaaaaggaaagaaaaacacaaaaagtgctgggatcacaggtgtgagccactgcgctcagcccctttctgtttctttttgtgatcctcccaaccctcttctccctctgaatctgtctctgggactgtctctgtctccccgtcttccctcccttcctcaccctgtctatctctctctgtatgtctcttggtgtgtgtgtctc

SEQ ID NO: 22609 - DNA, 1050 bp, Homo sapiens
gtccagaggctcggacccgggcgtccggaatttctgcaccgcatcctgagagaccccgaggtccagaccccggcgcccaggctggaggacttgagccatccaggtgcgcagcgccccctcctggagcagccgggagcccggacgtcaccccgcgagaccctggaggccgagcgccccgtatccccgtttcaagaactcaggatccaggaccgcagactccctccagggctccgatcccaagaccccgcgttggaggaacttgagatccggacttctaagcgccccaaccagtttcgggctgcagcggccatcgcttcaaggggacccaggactttgggacccccctgtgctcccacctggagggagtttcattcctgcccctagaattaggggaactcagaaatccatcccccaccccacggccctacctagaagacttaggaatgtgggtccccagcgccgccatctgagactccagagtcgaggctcctagcatcccctacgtagaacactgagaaattccgactgcgggaccccagtctccgagagaccccagattctattcctggagcctgagagcccgaagttcacgcccctgagtctgggctccgcacctccctggggaccgcgtcggggtcgcgcaggagccgggctgcctcgagccggggctggaggctccccgggaggtgaggggggaggcgaggggcccaggcggactgggggagggggcggcgccactgctgaacaatgagggggcgtgccggcggggggcgagccgaggcgccggcgggagttgggggctggaggggtgtgggaaggcgctggggaggctgtggctgtggggacggcgatcggggttcggagagaccggccggagggggtgcgagggctcggggccagcgccccagcgcgcagccctcggcgggggagggagccgtctgcaggaccctggcatccggtcccccagcctccgccctcccctgggaccccgcggcctcccgcccacggcttttcccagccctgcccctcgccctccgctccagctggagc

SEQ ID NO: 22610 - DNA, 1053 bp, Homo sapiens
tcaggtgatccaccctccttggcctcccaaagtactgggattacaggcgtgagccactgcaccaagcccattatccaccttttaaacttatttttgttttatttgtttgttgaacaaatcagtgtttgcatctactactgtgttccacttacttctcaggtgtctggtaggaaatctttgcatttttggagttgacatttagtaggtagcaatcacaaaccagtaaacagatgacagggtgattatagatcccttgtttgatgcacagaaacttaaattggctgttaaattagttgccaatgcttgtgagggagatttaacataaagattaagatttctttttctggggaaatggaaggagctggcaccctgggacacagagttgttctgcagagcagccgtttgcttgatgagtggctgccctacttatacagctgggaattttctccagttcccaggatatgttagttgccatttgtcctcttgcttgccttgtggcagagtgaagaaaaggaaaagatttcatgtggctgtgttctggaaaacgtttggtagatggagagtgctgtgtgtttcgggtgacttgtcccagtcacttatgttgcctgcttatcctctgtggacatttgattgccaatctttattgtgacctttggagagtgcctggcttccaggcttgcagtgaagagttggagaaattgggatgctgtggtgggagagtgacagggagggccttttctctaagctgtagcactggattcttggtctctgattcatggcttggagacactgcttggtggttaaagtcaggtggaaatgagaccaagatccccagttccatttcctgtctgggacattctcgtttgcactgttactagtctcacttccccaacactacaccatacttgaccccccacccccgccgctggctcctcttcagttaccaggtgaggcaagagggcactgtgaggcctgtccccactgccagggacaggattggatggccttttcagacagccaaatgatgacatggtccttgaaggacagggttct

SEQ ID NO: 22611 - DNA, 1027 bp, Homo sapiens
ccccgcatcccctgtacaccccaactcccaccgtcctcaccttgcttctttctgtccttcccagagagaccagctccctgctttttccttttaggcccatgagtggggggtggggccctggggtggggatgttgtggggagaggactctgggatcccagggcccagtgaatcccttctggggttgtagggtgggcgagctctgtcccaagataccccccacttcctgggccagtgcccccctttccccgttattttccgttctgtgcgcctcatacatttcggcttctccccaaccacctggtgcctggcctttacttttggttttcaacctttctgtgtccctcccttcccctcccccaacccattggttgattttgctgctataatttggctcatactttgtctgccctcgcccaccaccaccaccaccaccaccaccaccaccaccaccaccacctcctcttcctccaagtagaagagattgaaggtaagaatatgaaaagtgtgattccctgaccttcctcccatatcctgacatttcctccttcctgaggcacctgccctcaccggtagcctccccaccagccccggtctggccctgagggctctgacccatgtaggatccagagtcagggagttctggggccaggtataccccagttgttgacctgggaaagcacggatgtgtctgtctgggactgagcatttgtgggtggtagcgatgtgtggggtggggtgcagtccagggtgtgcctggactttgagatgggaacagctggaagccccccaacttgctgggccccatccccagtctttttgacaagaagcaggatgctgagtaggacagagtaggggatgaggggttgggatttcctctgtgagatgtcatcttcctgccccagggccaaaccctggccctcttagctgcacgctcctattttctccaggcccctgccctccacctgcccttgctcacgccctctgcccattatttttcagcctccaatatcgataatgttgtcctgg

SEQ ID NO: 22612 - DNA, 1787 bp, Homo sapiens
gtggaccagactgaacctctgcactctagatttttttttttttgaagcctctacaaaggataattaaaatttacaccatgactctttgtcctggggtgcactgtctgtaagccggtggagttatttcccaaaatccttggtccttcccagcttgaggaagtctgcaggactgagggaggggacctgtgcttttttttttgtttttttgagatggagtctctgttgcccaggctggagtgcagtggggcgatctcggctcactgcaccctgcacctcctgggttcaagtgattctcctgcctcaggctcccaagtagctgggattacaggcgtgtgccactgtcaggcctctgagcccaagccaagccatcgcatcccctgtgccttgcacatatacacccagatggcctgaagtaactgaagaatcacaaaagaagtgaaaaggccctgccccgccttaactgatgacattccaccattgtgatttgttcctgccccaccttaactgagtgattaaccctgcaaatttccttctcctggctcagaagcacccccactgagcaccttgcgaccccccactcctgcccgccctttgactgtaattttccattaccttcccaaatactataaaacagccccacccctatctcccttcgctgactcttttcggactcagcccacctgcacccaggtgaaataaacagctttattgctcacacaaagcctgtttggtggtctcttcacacggacgcgcatgaaagccaccacactcagttaatttttgtatttttagtagagacagtttcaccatgttggccaggctggtctcgaactcctgacctgaggcgatctgcccgcctcagacttccaaagtatggggattacaggtgtgagccactgtgcccggcctaatttttgtatttttagtagagatggggtttcaccccgttggtcaggctggtcttgaacttctgacctcatgatccacctgcctcggcctcccaaagtgctgggattacaggcgtgagccaccgcgcctggctttttgttttgttttgagacagtgtctcactcttgctcacactggagtgcagtggcgctgtcaccactcactgcagcctcgacctcctgggccctcgtgatcctcccacctcagcctcccaagtaactgagactacaggcacatgccaacatgccaagctaattttttgcattttttttttttaagagagatgaggtttcaggccgggcacggtggctcacagctgtcatcccagcactttgggaggccaaggtgggcgaatcacgaggccaggagttcaagaccagcctggccaacttggtgaaaccccgcctctactaaaaataccaaagagtggctgggcgtagtggtgggcgcctgtaatcccagtcactcggaggctgaggcaggagaatcgcttgaacccaggaggcggaggttgcagtgagccgagatcgcaacactgcactccagcccaggtgacagagtgagactctgtctcaaaaaaaccaaaaaaccaaagctctgctgtcatgagctgatgttcagtgttctcatggaggagacaaacaatgatcagataacttcctagggtaataaatgcataaagaaaaagtatagcaaggagcagcagtgatctggggactcagaggactggtttagacctgatgggatggtcgggaggcctcttgggaaggcgcatctgagcagagatgggatgaagtgaggagggaagccctgggatagctgagtgtgcctgaggcaca

SEQ ID NO: 22613 - DNA, 1026 bp, Homo sapiens
ttaagttagagagaaaaaggggaccccgtgcagcgatgacagagctgggaaacagcgcgggcaggtgggtccccggctcccggactgcgccctctgatgctcccttccccacaggcggactctgcctggacctgggccacgccctgcgctgccgctgccgcgccggcttcgcgggtcctcgctgcgagcacgacctggacgactgcgcgggccgcgcctgcgctaacggcggcacgtgtgtggagggcggcggcgcgcaccgctgctcctgcgcgctgggcttcggcggccgcgactgccgcgagcgcgcggacccgtgcgccgcgcgcccctgtgctcacggcggccgctgctacgcccacttctccggcctcgtctgcgcttgcgctcccggctacatgggagcgcggtgtgagttcccagtgcaccccgacggcgcaagcgccttgcccgcggccccgccgggcctcaggcccggggaccctcagcgctaccttttgcctccggctctgggactgctcgtggccgcgggcgtggccggcgctgcgctcttgctggtccacgtgcgccgccgtggccactcccaggatgctgggtctcgcttgctggctgggaccccggagccgtcagtccacgcactcccggatgcactcaacaacctaaggacgcaggagggttccggggatggtccgaggtgaggggctgcgccacagacgaacgccttgcgctgctggctgcttttacccatctccgtggtgcagttggcccgattccttgatgcatttccctggtcggtctctcttaccccggtagctggttttgggttcccctttgtgatgggtaggggaaaacaagatctgagaatttaaagagtctgagtttttcttctttctctcctcccacagctcgtccgtagattggaatcgccctgaagatgtagaccctcaagggatttatgtcatatctgctccttccatctacgctcgggaggtagcgacgccccttttccccccgctacacactggg

SEQ ID NO: 22614 - DNA, 1059 bp, Homo sapiens
taacataagatctgtttgaggggcaagttgacataaagagcttgtttaggtggccaaaaggtttccaggatctatttagagggtcttaagatatcaggggtctgttaggggctaagtgacatcagggtgaagtggggaggggaacaaacattagtgaagttgggaagctttcatgagaggactgtcttcttccaatgtgagttatcccctttcgtctaggatgagatcccagcactgtccgtgtcccggccccagaccggcctgtccttcctgggccctgagcctgaggacctggaggacctgtacagccgctacaaggtacattcgacccccaacccagaccttgcacaggacctgacatctcatactcttccccactttccaccactctctggatcagcaagtctggagccatccccttctgtcccctctctgctcgcagaagctgcagcaagagctggagttcctggaggtgcaggaggaatacatcaaagatgagcaaaagaacctgaaaaaggaatttctccatgcccaggaggaggtgaagcgaatccaaagcatcccgctggtcatcggacaatttctggaggctgtggatcagaatacagccatcgtgggctctaccacaggtgtgctaaggacacctcattcattcatctgtccacttaacaactatttcctaccatgtgctaggcagcagcaaacaaggcagggcagtgcagtgcaatgttcttcagagtattttgactgatcgaaaggtagaaatacatacatatatatatatatacacatatatatatgtatatctatgttttttttgtttgtttgttttttgttttgagacagagttttgctcttgtccaggctggagtgcaatggcatgatctcggctcactgcaacctccacctcccaggttcacacgattctcctgtctcagcctcccaagtagctgggattacaggcatggaccaccaagtctggctaatttttgtattattagtagagacagggtttcaccatgttggccagtctggtcttgaactcctgacctcaggcga

SEQ ID NO: 22615 - DNA, 1053 bp, Homo sapiens
acgtgtgcatgttactggctgtgctgacttcacctccttgggcctctcctagtagttgaagactcatttcacccggtgatagtgagcagttaatgaaataatgcagtgttttcctacaatgggttgtgacctattagtaattatgaatttcaatttgtgggttgcagccagtattttgaaacatgaaatagaacagaaagcgccagagaacatccacatggtatttataccatggtacaagtatatatggtgcaagttcatctgtttcgtgaaacttgtttcatacagatgtgcacactcatgtatacttgtggttcttcaaaaatatatatatatattttaattcttaaatttttttgtagagatagggtctcactctgttgcccaggctggtcttgaactcctgggctcaagggatcctcccacagtgctgggattacaggcgtgagccatgtgcctggccccaaaaatgtatttcttattgtaggtgccagacaaaaatgtctgaaagtcactcactctataacttttttttttttaaagccctaaaatcttaagcatatgttcagatcttaacacatgtgagccagggagcagtaggaggtagtagttaagcagtatgttttctggggctagactgcctggctttgaaatcttactcccccagcaacttcttatgtgatcctgggtaaattaacctctctgtgactcagtttcctcacctgtcagatggaaacaatcatagtacctatttttctagggtgggtgttcagaagagcaaattgatacaaagcatctggaatgggcaataaatgttagctgttgtcattgttactcatttgcttggtactttattgaacttttactctgtaccaagccttgtgctggaatgcaaagatgacaatcagagatgtcccttgccttgactgggaaaaaagaaaaagacacctagaactcagtcattcagtgactgtttattgaacacccactatgtgccaggatgtgttgtagatgctagagacatgggccaggcgcggtggctcacgcctgtaa

SEQ ID NO: 22616 - DNA, 1050 bp, Homo sapiens
ccatctgtcaggaggtaagtggtggtttctctctggatccaggcagcgggtgtgtgaggacccttcttctctgaaccactctgctgcagtcctgtcccctcatggctgccctgggtcgtgggcgccatctctctcttcctctaccatcactaggggtggatagtacaggggtagtgtttttgtgttttgctttgagacagggactcactctgtcgcccaggctggagtgcagtggggcaatcatgactcactgcagtgatcctcccacctcagcctcccaagtagctgggattacaggcgcccaccaccagtctggctaatttttgtattttttgtagagacagggtttcaccatgttgcccaggctggtctcgaactcttgggctcaagtgatctgtatacctcagcctcccaaagtgtcgggattacaggtgtgagccactgtgccctgccacaggaagtagattttaactctcatccttcaacagagtggaatgttggctgtccgtgaaaaccgctacattgtcctggccaaggacttcgagaaagcatacaagactgtcatcaagaaggacgagcaggagcatgagttttacaagtgacccttcccttccctccaccacaccactcaggggctggggcttctctcgcacccccagcacctctgtcccaaaacctcattcccttttttctttacccaggattggtttcttcaataaatagataagatcgaatccatttaatttcttcttagaagtttaactcctttggagaatgtgggccttgaataggatcctctgggtccctcttaatctgacagatgagcagacgaggtgcatggcctgggttgcagcttgagagaaccaaaatattcaaaccagatgacttccaaaatgtggggaaagggatggaaaatgaacctgagatggagtccttaatcacgggataaagccctgtgcatctccctcatttcctacaggtaaaagacagtaaagaaattcaggtcacaggccttgggagttcataggaaggagatgtccagtgctgtcc

SEQ ID NO: 22617 - DNA, 1013 bp, Homo sapiens
cctccctaagttgttgggattacaggcgtgagccactgtgcctggtcaagaaatggaactcttacacactgctggtgggaatgtgaaatggtaagccacttcggaaaacagtttgacaatttcttatgctaaaaatacacctatcagatgatttagccacttctaggtatttacttaagaaaaaataaggcatacatccatatgaagacttgtaaataaatgttctcattatttttatttgaaatagctaaaactggaaacaacccaaatatccatcagcaagtgaatggataaacaaattgtaatatttgtatgcaatataacaccactcagtaatatgaaaatgaactactgatgtatgcaaaaacgtgaaattcaaaataattatgctgagtgacagaatccagacaacaaataatacataatgtattattctatttacataaagttttagaaaatccaaactaatctaagtaacaaagcataccaatggtatatggggcttggggcaggtgagacggattatagagaaaaaagtaggaggtgatagacatgtttagtttttttgcttgtttgtttttactgtggtaatggtttttcaagtgtgtatgtcaaaacttatcaaattgtacctaatttattgtagttttattgatacctcaataaaattaatagttacatacataaatgtacttgaagttccacctagcacaataaggtaagaaaaaaaattaaggcgtgggactggaaaagaaatgaaactcttcattattcacaaatgtcatgattgcatatatggaaaatctaagtctacacaaaacctattaaaattaaatagtgaatttagcaatgtggctaaacaaaggtcaatataaaatattaaatataagccaggcatggtgacatgcatccacagtcccagctactcaggaggctgaggcaggagaattgcttgagcccgggagttcaagtccagcctgggcaacacagcaagacccactgtctctgaaaaa

SEQ ID NO: 22618 - DNA, 1032 bp, Homo sapiens
cagtgacgcacgctctggtaccatggagccactgagagcactgtcgtgggcagcaggcagacctgagtccaagtgtggctccaccactcactagctgtgtgaccttgggcaagccccttacctctctgagcgtgtacctgctcatcagctaaagcaggggtcataccaaatccttctgccttacagggctgttgtgaggattaccgagtgcctagcacagtgcctggcctgcagtaagtgctttataaatgttaaataatgttaactggtttttagaggtaagtgctgagtgttttggggaaacgtagaggaggggcctctaacctagctttggaggctgtggaatcaaggaaggcttcctgacagagggggcaacctgtgttgagacttgagggacaaatagttacacaagggaagagtgttctccacaaagggaacagcatgtgtgaaggccagaggttagaaagcacagggcctgctcagtattcagtgtggctgcaagatgaagttggggttagaatgggctgagagtgtttggaagtgaggctgcaggggtcatcaaaggccagggccaagaaggatggatttaggtgggatgcagtggctcatgcctgtaatcccagcactttgggaagcccaggcaggaggatcacttgagcccaggagtttgagaccagcctgggcaacatagtgagacctccatctctacaaaaataaaaataagaaagatggatttggccagtaggaacacgggacctgaagattttcaggcaggggagagggaagacaggccgagcaaaggagagacatcagagagccaaacccaccccatctattggagaacaaggccatggaggtcaaagcaagttcttgtgacctcattggccgggggtggctgttggggtgagggcagccctgcatgggaccaagggcagggctgggtataggtgaggattggggtgggctgcgacatcacccctccctctcccctgcctgcagcttcggggtgctgctgtgggagctgctgacggg

SEQ ID NO: 22619 - DNA, 1032 bp, Homo sapiens
ggactctaaacagcctccccatggttggctccatcccccacatcccagcccttgtttgggccaggcccagagctctcaggacaacctgttaggattccttggccctgggattccaccttgatcctgattccactaccagcccctcctcggggtgcaggtcccagggtttctctcccagcgtttcactgagtggaattggccaggagcttggctttgaatcccttcccctcagctccatagcagctgtttgtctgccatccccagaaattctgccttcctctgagcaggctgagtccccagagcatgaccactgacacctccatgccccaccactgtccttcctcctcccaccccagaatgctgggacccagacccccacgggcggccagatttcggtagcatcttgaagcggcttgaagtcatcgaacagtcagccctgttccagatgccactggagtccttccactcgctgcaggaagactggaagctggagattcagcacatgtttgatgaccttcggaccaaggagaaggtgaaggcagggggcaaggtgggaaagatggagcaagacccctgagttctgatgccttgggctgctcagagactcctcccctgaaccccagcctttgggtccatgcagggtcaagggagccttttttgcatattaagaaaagacagcctcctgttggtggattaataagaaaaaggcaccctgtactgaagtacttacaggtgacactgcatgatgtctggggttggctttaaaatactacagcagaaacgaagagagggcaagaggagagaaggacggggatacaagattcgcaaagcataggtaattgttgaaattggatgatgggtacaggggggtgcactgttctctgcttttgtggatgtttgaagttttctaaattgaagagttaagaaagaaaaagaaagaaaaagcacccctttctttgagctaacacagttccctgccctggcacccagcttggctagcaaagcatgagtcgggtggtgaaaccagtgtac

SEQ ID NO: 22620 - DNA, 1039 bp, Homo sapiens
ggctaagacgggcagatcacctgaggtcaggagtttgagaccagcctgaccaacatggagaaaccccatctctactaaaactacaaaattagccgggcgtggtggcgcatgcctgtaatcccagctactcaggaggctgaggcaggagaatcgcttgaacctgggaggcagaggttgcagtgagccgagatcgcgccattgtactccagcctgggcgacaagagcaaaactccatctcaaaaaatatatatattttttaatttagcccaatatatccatgcaatcaatacaaaataattgtgagatattttaccttcttttttcacactaaatctttgaaatccagatgtattttatatttatggcacatctaaatttggacagtaaattttcattaaaaatttttttttttctgagatggggtcttgctatattgcccagggtggtcttgaactcctgcgctcaggcagcgctcccactttggcctcccaaagtgctgggattacaggtgtgagctactgtacctgacccatcaaaaatattggatctgtatttagatttcataaaagttagagttgaaaaagtacatatacatacccaagttgctccaaacatgcttaaatgtttccaataaccaaatggagtacctgttttttgttgtttgtttttttgtttttgtttttgttttttttgagatggagcctcgctctgtcacccaggctggagtgcagtggcatgatctcggctcactgcaagctctgcctcccaggttcatgccattctcctgcctcagcctcctgaatagctgggactacaggcacccgccaccacgcctggctctttctttcttttttttttttttttttttttttgtatttttagtagagacagggtttcaccgtgttagccaggatggtctcaatctcctgacctcgtgatccgcctgcctcggcctcccaaagtgctgggattacagacatgagccaccgcgcccagcccccatacctgtttttaaaatttaaactcaaattgcggtaat

SEQ ID NO: 22621 - DNA, 1111 bp, Homo sapiens
tccagctactcaggaggctgaggcgagaggatcacttgagcccaggagttccaggctgcagtgagatgtgttcccaccactgcattccagcctgggcaacaaagcgaggagaccctgtctcaaaaaaaatcaaaaatgaatgcaagaagccccattgtctcactccacaccctgcacttttgcaggctcacgcctccctcaagctgcagggtccctcgcctgatgtgatgaagggagattttgcattgttttgttcatgaattagttcaaccatgtactgccctggaatacaactgagctctgggttcaaattcctagctgatccctataatcccagcactttgggaggctgaggtgggcagatcactcgaggtcaggagttcgagaccagcctggccaatatggtgaaacactgtctttacaaaaaatacaaaaattagccaggtgtggtggcgggcacctgtcatcccacctactcaggaggttgagacatgagaatcacttgaacctggaagatggaggttgctttgagccgagatcctgccactgcactccagtcttggtgacagagtgagacaccatctcaaaaaacaaacaaatttccaactgacaaaccaatgctgtgcaacctaagcaggtaatttccctgagccctgccacctcatctgaaaaacagagatggtaacactgctttgccctaaacttaccatgttattatttttcttttcttttcttttcttttttttttatttgagatggagtcttgctctgtcacccaggctggagtgcagtggtgtgatctcagctcacttcaagctctgcctcccaggttcacaccatcctcctgcctcagcctcccgagtagctgggactacaggtacccgccaccacgcctggctaattttttgtatttttagtagagatggggtttcactgtgttaaccaggatggtctcaatctcctgacctcatgatccgcccgccttggcctcccaaagtgctgggattacaggcgtgagccaccacacctggccctaccatgttattatttttctttctttatttttttgagacagggtcttgctctctcacccaggctggagtgcagtggt

SEQ ID NO: 22622 - DNA, 1049 bp, Homo sapiens
gttcaacagctcttcttgaaatggggacctggggcaggaagatggtaaggacagttggggacatagtaggtgtgggagtctggggacaccttgaaggaggtatctggggggccctggaacctctagagctggagtcaggggaaaggaggaaacaagacagagctttgggttgagaaagagggaattgaagctgtaatgatgggggaaggtccacaggggcctgtccatgtagggctctgtaggacatggtaagaagtttgtcctttgtcctgggggcaatggggagccacagaaggattttgagcaggagtgagacagcttagggtttttaagttccagttcagaagtgtttatcattcatgatgctttttggacctatttaattgtttttcagactgactgacttctctccctaggaggggcacttattttaaagggtccgttgaaataaaagatctaactgctgaaaatgaaaaatcagtttgcaaaaccagtgttctgttccgttttctgtagacaattgatggttcagtccaaagaggtcagaaacaattgatggtttagtccaaagaggtctgtaccatctagtgaaaatcagcaccattaaacatgagaacatttctgttttaaaccatttggaagccccgtgaattttattttattttgttatttttaaaattagagacaggggtctcgctctgttgcccaggctagtctcgaactgctgggctcaagcgatcctcccacttcagcctaccaaagtgctggaattacagatgtgagctactgctcctggccagcctgtggatttgtaaatgtctcctgtggtgtgatctgcctcatgtttcctgtatgtaggcttcagaagcacactctgcattctcagatggcttgaatcagccttgactttttccccaccctctcagcctgaatctcaggttgagatgccattatctgcacccaccctatatgctctgggcttagaactgataccagctggttatcattgtgtataaaagtgtcactaggtatagagagacatctaaaat

SEQ ID NO: 22623 - DNA, 1021 bp, Homo sapiens
ttgttaaaacccagattcctggaccccaccccagcactctgattcagtaggccatgtgcagtgaggcccaggaatttgcatttctaacaagttcccaggtgatgctgttgccgctggatcagggaccttacgttgagaagcactgggttagagcataaattctggaaccagacagcctgggttcgaatcctggctccatttatctgctgtgtgactttaagtaagtcacttaccctctctgagcctcagtttcctcacatgtgaaatggatgtggtgattgaccctcttcttcatggaggctgaggatttggtgagatccacagtacctggcttgtggtgagctgtccgtatgtggggtccgttgtgacgatgaccctggcagggcacatgtcttaactgtcccctcgccctcagagtgcgcccccacccctgtgtccaagtggccgcactccagacctgaaggctctactcaacgtggtggacaatgcccggagtttcatctacgtcgctgtcatgaactacctgcccactctggagttctcccaccctcacaggtactgctgggtgtggagatagggagccgctgcagttggccaggagacgggagagggaatcatggagaccagaaagctggtgggggctccaggcaaggggacagatggaagagaagctgcagggagagacagtcaccaggaggtgaccggaagaaggtatctaggcacttgagacaggagaaagagagattacagaggagacagggatgaggtttcaggacaaggtttgagggaacagagaaaaggatgagagggccgggcgtggtggctcacgcctgtaatcccaacattttgcggggctgaggtgggtggatcacttgaggtcaggagttcaagaccagcctggctaacatggtgaaatcccatctctcctaaaaatacaaaaattagccgggcgtggtggcacgtgcttgtaatcccagctacttgagaggctgaggcaggagaattgcttgaacctgggagg

SEQ ID NO: 22624 - DNA, 1060 bp, Homo sapiens
agatgctctgaatccatccatcattcagtcaacaaatcactacattcactaggctacagctctgggctccaccctttgctgggcagtgtttgggatagggtgtgacagacccaggtcctgcccttaaggagctctcagtccagtgggggagacaggacaaggcaatgacaacacagagtagtcagggctaggatggggaagcagagaagcctgagagggtcgaggaggagcctgctccagccttggggtgtcagggaaggctgcctggaggaggagccacgtgacccggcatctgatgaagtcacaccaaggacagggtaggtagcccgcaccatcctctcttgggcgccccttggcttgtgaccaatcctggatgctccccttctcctggctcaggctaccagccctgcgacccgcaggtcatctgcaaccgcgtgaaccacgtgcacggctgcctggcggagctgcaggagcaggcagcgcggcgacgcgcggagctggaggcttcgcggagcctgtgggcgctgctgcaggagctggaggaggccgagagctgggcgcgcgacaaggagcgtctcctggaggctgcgggcggcggcggtgcggcgggcgcagcgggcgcagcgggaacagcgggcggcgcgcatgacctgtccagcacagcgcgcctcctggcccagcacaagatcctgcagggcgagctgggcgggcggcgagcgttgctgcagcaggccctgcggtgtggcgaggagctggttgcggccggcggtgccgtcggcccgggagcagacaccgtgcacctggtaggcctggcggagcgcgcggcgagcgcccggcgccgctggcagaggctggaagaggcggcggcgcggcgagagcggcggctgcaggaggcgcgggcgctgcaccagttcggcgctgacctcgacgggctgctggactggcttcgcgacgcttaccgcctggcagccgccggtgacttcggccacgacgaagcttccagccgccgcctggcgcgccagcaccgcgcgctcaccggggaggtggaggcacatcgcgg

SEQ ID NO: 22625 - DNA, 1072 bp, Homo sapiens
ccgccgcacctctctctttgtttaccccgccgcacagctggcagtgccccgcccagaggtggcctggggcccagcgagggcgcgcagaggggagtggaggcgcgttcccgctcgtggctccgccccggtgctactggaggctgtaaggccgagctagaactctaaagccccagccagaaagaagttgggcggagacacagcgcggtgggcggaactagggcacccggacagcctggaggtggggtgggaggggcgtgaacaagtgagccgggcgaatcagagtgcggaaaggaaggtgggaggggctagaggcagcaggttaagctcctggataggcggggtttagaatcccgcgggtagaaggtaatgtgagaggggctacaaagggggcacagccagggggcggaggtaggacttcgtggaccaagcagagggagtgtgggcgggcatagaatgcgaaggagacagagttgggcggggagttatgccagggagtggttaaaatgtggtttgagtcaatggaagggatcagcattgggtcggaggggctggaacagcaaagggttccgtcggactacggaatgggcggggtcagcgccgtctgggctggtctggaactccgtggactcagccagaaattgggatccgagaggttgacatgaaagtgaataaacagcctgagggctggctgggctcacgcctgtaatcccagcactttgggagactgaggcagaaggattgcctgagcccaggagttcaagaccagcctggccaacatagtgagaccccgcctctaccaaatttttaaaaaacgtagcccgatgtggtgcacgcctgtcgtctcagctacttaggaggctcagatgggaggatcacttcagcttaggaggtcgaggctgcagagccataatcacgctactgcattccagcctgggcaatagagcgagatcctgccgacttagtgggtgggaccgtacctctgatggctgaacaactggactgggccaatgctgatgccagaattggggcggggccacatgacagctaagggcggagcgacttagaaatgaat

SEQ ID NO: 22626 - DNA, 1030 bp, Homo sapiens
actctttggccaggacaccaccccatcccagcctccagctcaaacccctgacactctccagccaagccctgcccctagccaaggccagagtctgggctggccatcgttttcttcccgctctcttgtcctctctctgtctctcttacctattcccagagggtttccgggagatctgcccggctggtcctggttaccactactcggcctccgacctccgctacaacaccagacccctgggccaggagccaccccgagtgtcactcagccagcctcgtaccctgccagccacctctcggccatctgcaggtgagctggctctggcagaagtgggtgccatcttcaaggggctgccccagccccatagtgaaaggaggcaagagaggatttgggctccactcgttgataccccttctttatcaggctttctgcccacccatcgcctggagccccggcctgaaccccggcccgatccccggcccggccctgagcttcccttgcccagcatccctgcctggactggtcctgagattcctgaatcaggtttgctagaaagaactgagggcattgggcctgcagcagtggctcacgcctgtaatcccagcattttgggaggctgaggagggtggatcaccaggtcaggagttcgagaccagcctggccaacatggcgaaaccctgtctctactaaaactacaaaaattaactgggcgtggtggcagatgcctgtaatcccagctacttgggaggctgaggcaggagaatcacttgaacccaggaggcagaggttgcagtgagctgagatcgtgccattgcactccagcttgagcgacactccatctcaaaaaaaaaaaaaaaaaaagaattcagggcattgatgggggtattacaggtgggattctggggtaaaagactccaaggtgaagattccaggttacagcaaataggaatggtatgggcagagataagcgtttgaagggttgggtggtagttagatcaggagctggagtcacagttgggctcttctgtgtcaa

SEQ ID NO: 22627 - DNA, 1031 bp, Homo sapiens
ggcgggaacccaaatatcgttttgattggcaacagctgagcccagaaacgagacttgctctgattggtcaagctactgcgtttccgcgcggcgattggctggcagaaaggcagaggcggggccaggagagaaagctttgtggtttggtctcagggaagtagcaggcgccggttgagagaactacggccctgtcggaaggtaacctccggtgcaaacgaccatcggcggcaggcgagcggtacgcttggcgtccgggccttcctgggcccgtctgaggaaacttgctgctcgaggccaggctgcctaggacctgtcccttttttctatactggctcccacatccgggttttttctccgggacggcccttcggatgcttgggccaatgggaatcgccatttagggtgctccgcccaccgggtcgcgtagagcatcctggaagtcgtagtaaatctctcgagagttctctccgcacgcgggctggagaagcgggtcctacgcacgctttgttgtcgcgctttgcctccgtccttgcccctactcccgccttacctgacttccttttcggaggaagatccttgagcagccgacgttgggacaaaggatttggagaaacccagggctaaagtcacgtttttcctcctttaagacttacctcaacacttcactccatggcagttcccgagacccgccctaaccacactatttatatcaacaacctcaatgagaagatcaagaaggatggtgagttctcgggatagtccggagtccagactgtcccgcacgggctggcccctcttccgtcccctgcacccgcctctctttctaagtgtttgtccagccaaacttcgagttaactccttggcctttacacaaactacttcctgtcttcaacactccattagttcatcttacactctgccctttaacgtggtcactgctgctcatcttacaaggtttgaggtcacaggacccttcctccaggaagccttgccttgtcccttcacgtggctgccgctgacttgccgtacgc

SEQ ID NO: 22628 - DNA, 1066 bp, Homo sapiens
agagattggattggaatccatcttttttccctgtatctttctctccctgtgggtatccctgattttggctccatctggtcagacttcctcttcaaattcctggtgattggcagtgcaggaactggcaaatcatgtctccttcatcagttcattgagaataagtgtgagtttcccgcagtggtcctgggaaccctgagctgtgtttatgcgcatggtgtgggctggtgggcagccggtggggagggcagggctggccataggtacaagtccagtgctggctttttggtccttgctttgtcgtatgtcctttactaggttctccttgacctcaagtcactccagcaaggagaatgggtttgtagagactgagagggccttggaggatgggggatcctctgagctgtctcctctctccctgtactgccccttctgttcctcctactcccagtcaaacaggactccaaccacacaatcggcgtggagtttggatcccgggtggtcaacgtgggtgggaagactgtgaagctacagatttgggacacggctggccaggagcggtttcggtaggtgggctgggctcccaagggtgatggggagagagagtgagaaggaaagagagagatgtgtgtgtagagtcacttggagacactgagagggcagacaaggcagacagagagagatgagacaccgtagttagcaggtatatatatccaaggagagagggagtactggagagataaagagatggtggaagaaaaagaggtaggggccaggcgcaatggctcatgccggtaatccccgtgctttgggaggccatggtgggaagattgcctgagcccaggagtttgagaccagcctgggcaacatagtgagaccccatctcaaagaaagaaaaagagatagagaaaagtggcttgggggtggggaaagggatggagactgagagacaccgaaacagaaagagaaggggaaacttgagagactcacactcagaaaggaaaagagcaagagagacagagactaagagagttgaagagaatgataagggaggtaaggaggcctggca

SEQ ID NO: 22629 - DNA, 1050 bp, Homo sapiens
aaacagcagtgtttattacccctgctgtacacatcaggcagttgaggcccattcaggtgttggaactggctagggttacccagcaaattatccttggagttggaattaggtctttctattcagactgtagcttttggctcctgttcggaggtctatgggacagataatttagtggggattctttgtagtccagggcagcagttcttaacattgctgcatggtagaattacctgggaagctttaccaatttcaggcccttccttaggccaggtacttcagaacctcagagctccccagggggctccactccacagccaagggtaagaattcctggtctagggctgtgaggccacctccttgcacacctgaaaatgtttaaattggtattattctactgaaatggctgaggtggggtttggggtatcttgaaacaaatcaaactctgttactaattgagccctagctgggtgccaggccccaggtatgtgtgttgggagggagtgggctcttgaggcccaggagctgaggtttctgatagacttggggatgggattttggctgaaaaagaaagtcttttggggcaggagcttggaacccttgacccaaggagtcatggggaagatggggcaaggaggggtgggaaaataggtaattcatggctgcttctctaagatgtgcctgcctagccccagtaaacctacctccctccatccctgccaggccatggtggcgtgttacccaggcaacgggctcgggtacgtaaggcacgttgacaatccccacggcgatgggcgctgcatcacctgtatctattacctgaatcagaactgggacgttaaggtaggggtgagggtgagggtgagggtggcgctggggctagggctggggcgggggtggcgtgcgtccactccattttccactctcagcccagattctggcattctcctgtttctcttctcaacacacagcgggcagtgcgatctgccggctcttcctgggaaatggcacctcctcctctctagcggactgtgtggtgggaactcccctctt

SEQ ID NO: 22630 - DNA, 1106 bp, Homo sapiens
accgtgagcgactcagcacaaacgtggggtcaaagggctcgcctgagggtgaagaatggaatgggtcaggaagacgcgatgtgcagcacaccagacctcatgcagcaacaccattaatttgcacaacatccgactcaaccatggcaacgtgtcttacggtgcaaacacgggcacatggtcacaacatgctgcttaacaacaccccaaaagcatctgtcaatgccacagacagcaccgaacccacagcttcctgcagcacatcgacagcaacaacgcccaaccacagaacaggttggcaacacacacacagcacgcgacatagcacaaggcaatcatcaggcatcacggaacacaacaacacagggcaacagaacacccagcaaatacgatcacagtacatgccaacacacgacacgcagtgacctaatagccagcccggaaacatcccaagacacggtaaccacacaccaacacgtaatgccagcataccgctacataatcctgccacacaacacacgctagtacacagcaacccagcagacagcacagaacacacgatgtggcatcacaacacatacagtcaaggcagcagaacaaaggacacactatgcagcaacgcaacaacgttggcagccagcagatgacacaatgcaaaatcacatgcagtgcctgacaactctacaatctcacccagaaatatctcaacacaacacgtagcatctggccgtccaacagctgaacagaccatagtaaatactgaacaacacatttctttctttccttttttcgagatgaaatctcgctccgtcgcccatgctggagtgcggtggcacgatctcagttcactgcaacgtctgcctcccaggttcaagagattctcctgcctcagcctcccaatgagctgagatcacacccggctaatttttttgtatttttagtagagatggggattcaccatgttgtccagactggtctcgaactcctgacctcaagtgatgtgcccaccttggcttcccaaagtgctaagattataggcatgagccaccgcgcctggtctagtttttgtattttttgtagatacagggtttcaccatgtcgcccaggcc

SEQ ID NO: 22631 - DNA, 1106 bp, Homo sapiens; identical to SEQ ID NO: 22630

SEQ ID NO: 22632 - DNA, 1061 bp, Homo sapiens
tcgcccctttattcctttgtgcgaagccccttcatccatcttcaaagcacatcactccagtctctgcttccatcctcacattgtctctctctggctcttcctgcactcctctttttttaaaattaatattgccacattattttaaattatgtacaaagacctaacatgtcactcagggaccatttcacccactgctctatttagccgccagtctcttcagcaatggtgagggtttggtgtacacattatttcatcacccaggtaataagcatagcacccgacaggtagtttttcggtcctcaccctcctcccatcttaccctcaagtaggccctgctgtttgttgttcccttttttgtgtcaatgtgtagtcaatgttcagctcccacctataagtgagaacctgtggtgtctggttttctgtccctgcattagttcacttaggatagtggcttccagctccatctatgttgctgcaaaagacattatcttgttcctttttatggctgtgtagtattccatggtgtatatataccacattttctgtctttctccttccttccttccttccttcattccttctctctctctctctttctttctttcagacagagtcttgctctgttgcccaggctggaatgcagtggtgtgatctcatctcactgcaacttctgcctcctgggttcaagtgacttctcctgcctgagcctcccaagtagctgggaatacaggtgcccgctactatgcctggctaatttttttgtatttttagtagagacggggtttcaccatgttggacaggcttggtctcgaactaccgacctcacgtaatccacccaccttggcctcccaaagtgctgggattacaggcgtgagtcaccacgcccagcccacattttctttatccagtctaccactgatgggcatttaggttgattccacatctttgctattgtgaacagtgctgctgtgaacaaaggtgtgcacgtgtcttcatggtagaacgattgatattcctttgtgtatatactcaataatgagattgctgggtcggatggtagt

SEQ ID NO: 22633 - DNA, 1061 bp, Homo sapiens; identical to SEQ ID NO: 22632

SEQ ID NO: 22634 - DNA, 1033 bp, Homo sapiens
agagaggtctccttatgttgcccaggctgatcttgaactcctgggatcaagtgattctcctgcctcatcctcccaaagtgctaagattttagacatgagccaccccacccagtgattatattgttttatttatttatttatttattgagacagaatcttgctctgttgcccagactggagtgcagtggtgtgatctcggctcacagcgacctccacctcccaggttcaagtgatacgcctgccttctgctgctgaatagctgggactacaggcgcccaccatcacgcccatctaacttttgtatttttagtagagatggggtttttcgccttgttggccaggctgctctcaaactcctgacctcaagtgttctccccaccttggcctctcaaagtgctgggattacaggggtgagccaccacgcccagcttatattgtgttgaaaatgttttcttctctcccactggtcctttccttaggtaagaattacactttcctctaccccatggacaggcttggctgtctacttgctttggccatgactcctatcaactctttttctttttttttttttttagacagagtttcgctgttgtcgcccagcctggagtgcaatggtgcaatctcggctcgctgcaacctccacctcctggattcaagccattcttctgcctgagcctcccaagtaactgggattacaggcacacgccacaacgcctggctaattttctttgtatttttagatggggtttcactgtgttggtcaggctggtctcgaactcctgacctcaggtgatctgcccgcctcggcctcccaaagtgctgggatgacaggcgtgagccaccgtgcccggccaactctgttttgttttttttttttttttgagaaggagtctcgttctgtcgcccatgctggagtgcagtggcgagatctcagttcactgcaacctccgcctccagggttcaattgattctcatgcctcagcctcctgagtagctgggattacaggcacatgccaccatgcctggctaa

SEQ ID NO: 22635 - DNA, 1050 bp, Homo sapiens
tttgaattgtcttttgtctctgtgtcctccttgacatttatctttgactcactgaatctctctctctctcatctcaattttgttttgtttgctttgttttgtttttgagacagtctcgctcttgttgcccaggctggagtgcagtggtgcgatcttggctcactgcaacctccacctcccgggttcaagcagttctcctgcctcagcctcctgagtagctgggattacaggcgcccgccaccatgactggctaattgtgtgtgtgtgtgtgtgtgtgtgtgtgtgtgtgtgcatgtatttttagtagagacagggtttcaccatgttggccaggctgatctcgaactcttgacctcaggtgatccacctgctttggcctcccaaagtgctgggattacaggtgtgagtcactgtgcctgtcctcatctctattttgatctcactctggttctgtttctatgcacctcgattttgtctcaatcttgatttctgtctccatcacataatacctggcataatctgccatgctctgaatttctctgcctcaagtcctctgcaattatttttcctctttagcttgcttctactttttagttcaagttcctccactcctggcttcctatctggaggtggaatggtgaagggagctgttctaagagtatttgctctctcccttcccgtctgagtaggaaaaccagactcaccatcaccacacacatgccaccaccctgaatgggtgttaaatgctggggtgtgaggatcagaatgggatggggaggtgaaatctaagagagtcaaaggagatgggctgagctgagtctctactccaagaaagacattctagcagcagatccaagagacagaacgtggcactgtgtgtgagtcactcagttttcgtagaatttccactgcttctggacacaggatgcctcagctcagccagccaaaccccattcccaaaacttacagataccttgagggattcagtttccaagtctgagaatacagtcgtgtgaaaaggacattgaattttgataaatagtatatgtg

SEQ ID NO: 22636 - DNA, 1053 bp, Homo sapiens
tactcccttattttcattggaccttacggcagccggcgcgcgagagttacccaatcagcaagcgctccgcctcctgccttttcccgccctccgctccggcctcggcttcgacgtaggccaacgcttcctccccagtagctcctaggccttctcgtggccgttgttttgaaaacggcgctctgattggctaggtttccgggcccgcgcccgttgccccacgcactgaccaattggcactcatgtaacatcggacgaggcacgagtgaggggggaggcggtggcggcggccattttgagccgctgccgccattggagtgggccccccccctttcccccttcgcctcctgacaggaaaggtttaagggggacagagccctgggaggccgggccgggctcgggggccaccccgggggcccgggccatggatgtgcgccgtctgaaggtgaacgaacttcgcgaggagctgcagcgccgcggcctggacactcgaggcctcaaggccgagcttgctgagcggctgcaggcggcgttggaggccgaggagcctgacgacgagcgggagctcgacgccgacgacgaaccggggcgacccgggcacatcaacgaggaggtcgagaccgaggggggctccgagctggaggggaccgcgcagccaccgccgcccgggctgcagccgcacgcggagcccggcggctactcggggccggacggacattgtgagagtgcgcggggcgggggccggggagcccggagcctgggccgaggaaagggctgtgggacgcgggagtccagcgcctgaggtcggggagacgacctgaggatcgggggatcccgctacccgccgccgaaaaggatctggggaccagggccccagcacgaccggagggtggatcctgacactcagtgcaggggggacactgggggaggggcctctgggtttcggaggtgagggacgggggtggcggggaggattccgtaccgtagggatcggagaccggaaactgctttctggagccgaagagagtcggaagaacaagaggttttccgtttggg

SEQ ID NO: 22637 - DNA, 1049 bp, Homo sapiens
taacattccaagtggatgaaatatgtggcgggagacagaggatcctgtgtccagcacaggagtacgtatctggcttagcgaatatggggaggggggaggccgtagggagcaaagagaaagaaacctgttgacttcactggaggcctcagagtggagtgtggggaatgtttctggacctgagcgtctccaggagaaatctcgacggttcccagaagcagttatttgtgtacccagggagtgggggccctcggggagcagcacggaactcttcatcagccaggagctgtgactctgggaatgggttcgggtagacctgcggttgtctgaggagaggaaaacctgatatgggacggcgtgaatcttcagttagaaaaaaagcagctttcgggccgagtgcagtggctcacgcctgttattccagcactttgggaggccgaggcgggcggatcacgaggtcaggagttcaagaccagtctggccagcatagtgaaaccctgtctctactaaaaatacaaatattaaccggatctggtggtgtgcgcctgtagtcccagctactcgggaggctgaggcaggagaatcgcttgaacttgggagggggaggttgcagtcagccgagattacgccattgcactccagcctgggcaacaaaagtgaaactccgtctcaaaaaagaaaaaagcagctttctttctcttttttttaaatacagatggggggtctcgctatgttgcccagggtggtcttgaactcctgggttcaggtgatctcacctcggcctcctgaagtgctgggattacaggcgtgaatcactgcaccaggcctcagggcagctttctagtaggactgggaaatggggggactggaaaggttaaggagtaagtagaagggattctggcgtaagagtttgtggagtttttctgaaaagagggcaccctgggacttggggctaaggggataaggagagaaatgaggtaacagaagagacaggatttggggttggaattggatacttgttcataagagaatttcccggagggaggagtgtg

SEQ ID NO: 22638 - DNA, 1074 bp, Homo sapiens
cacctggtttgtgcccagatgtatttatcctctgagaaggaatccgatcagttagcaagtggcagaatagtctctccttccctttggttctggctcacggctcctggcatagccactggtagggcccttggggccctaactgagagctagcccctggggaggagagcctgtatgctgcccatcctagctttctaaagttctctctgggtttggctgcaaggttcttgagggaatttctggttttagttccacctctgagctttcacacgtgttatcccaaccccagtaacattctccattctcatcactgagtcattacctgtgtatcctttgaatcaaggcttatctgttattttccaggtccctttcttcattcctggtactactttgtagccttcaacacaatcatattaaatttttgtgtgtctttaagatttgtctgtctcactaaactgaaggcttcagtggggcaagcttgtcttcagctgtatcccaggctctggagtatagtatgcatgccatgaatagttaatattattattcttaccactcttagttgagctcctggacctgcagatgccttctggatgctttggtccagggttcttcatgaaccgcccctctaattggccatttttaattttgttttaagatgccatggacaatattaccaggcagaaccaattctacgatacccaagtcatcaaacaagaaaacgagtcaggctacgagaggagaccactggaaatggagcagcagcaggcctatcgtccaggtaggaaaatacacatggttcatctctttggatggaaacaatctacatggagcctttaccccctgcttagagcgggtcttcccagagaaactgtgcatcttttttcttgggcagttcatctaaacattgtcactctggcaagaattgtttaaaggaaagatctcagtcctatttccaagtgttgggagaggggaggttccatggtatctgtaaaaaagtgatgttagtatcagccgggtgtggtggctccctcctgtaatcccagcactttgggaggccgaggcaggtggatcacctga

SEQ ID NO: 22639 - DNA, 1034 bp, Homo sapiens
caagtgattctcctgcctcagcctcctaagtagttgggactacgggcgtgccaccacacccagctaattttttgtgtgtttttagtagatgtggggtttcaccatgttggccaggatggtctcaatctcctgacctcatgatctgcctgcctcggcctcccagagtgctgggattacaggtgtaagccactgcgcctggcctctcctccccattttatagattgaggagttggcttgtccgatggcagagctggggctacaacctagcatacttgctcccaggctagtcctcttggttaataagcagcattccttatcatttgtgccttactatttggaaagcagggtcccactattgagaactgatggagcccggactgacccccagttttgtgctgcttttactgtgttgtggcctcccagtgccttttcttagtgtatctggttgattttgtctaacgccattctggttcatccacaaagttaaatccccagacatttcttgtgggtggctcagaactttactgaatgtaggttaaaccgcagatttgtgtcaggctctgtgagacttgtaggatcattcagccacaggagaatattttctgtgccgttatccacagacattcatcaggagccctgtgtgagcccaacctattgctgggaaccagggaagctctcttcaggatggctgagcaccatcccagccctagagaaccaggagacttttctgagagatgtggtccacatgccgaagctggggagtgatccaaaatggtctggggttgaatgcagaaatgagtagatgtgaatgagcttcagcatcagggattaatgctgtgggagaaatgaaggtagcctacatctgtggtttgctcttggttaggcactgattcctggagtctgcctgagactaggacttacccgtggtccacagcacggtatcccatcctgactttctgttaatggtatgacttaaagaggttattgcacctatgggatggcttaaccggagtgattctggcctcttttggtag

SEQ ID NO: 22640 - DNA, 1051 bp, Homo sapiens
gtcagtcctcatggtctccaggagcaaaatccagccccttcactgatttctaccacaagtagactggactgaatattgggtgtcacaaggaagggttgcatctcagcatacagccattctcctccatcccaactcctgtcttccttcctccctttcttttcaaattctcccctctgtgcagagttattcagttgagctcctactcccagactggacaatgaaacccatcaagccctccaagttctacatcattaagggcttcctttcacccttccccacccctattttaaaaaggcatctgattaataaaactagtaaagaaaatgatttttttcttcaaaaataaaagtatgtggcagccattgaggctgttatgaccatcgcaggtttaacctgcctttgcctatttcttccgtcaggcgaagagcctttctcctatggctatggaggcactgggaagaagtccaccaatagccggtttgaaaactacggagacaagtttgcagagaacgatgtgattggctgctttgcggtgagtgctagcagcctgtgggagttggcagaaccagatgttgggctacagacttctttttcaggatacctctatccattgtctgccccatatccagccactctcgccatacttctttgtctctgcttgacagactggaatgtttactgtcattttgtgggaaattctgtcattccatctcctctggtcttgtgtgcaaagttttcagatgacaccctgaagaggtttggggacttcaggtgtgcatagccttcctccgttcctaggtaccagagtaacattttctaaacaaacctaggaatttcttatctttcattgctaggaaatagcctgtctgctcctgaaggcagtggtattggctcttgccccatgttggcatcatcttatcccaaaacttctccctttcttcatctcacattggttgagccaggcttcctacaatgcactgccttctggaagagtagagatgatgcaaaacagaacagctgttgctgccatacttcagtctttgagaacagt

SEQ ID NO: 22641 - DNA, 1042 bp, Homo sapiens
ttcaccatgttggccaggctagtctcgaactcctgacctcaggtgatccacctgcctcagcctcccaaagtgctgggattacaggtgtcagccactgcgcccggccctcaatatgttttcaataaaacatttttaaaatgaaaactgtgttcatactctacaaattgttcggttttaaaccttgcatttttttcccattgaagagtaaatcttggccatctttccctgtccacacagacaatatatagatctagctcagttaaagttgtttcttaatagttaatcattgtgaattgattttttcaagaatagggtttccaaaaaaaaatcgaggaatgtaaaaggggatacagtgtaaagtcttctttagacaccccccctcccgccccacccatttttcacatataccctccccagcatgtgaacccactggtactcggggtttcatctttttttttttttttttaacttgtatgtcttgggggtctttttatttatttaatttttttgagacagagttttgctcttgttgcccaggctggagtgcaatggcatgatcttggctcaccacaacctccgcctcccagattcaagtgattcttctgcctcagcctcccaagtgctgggattacaggcatgcgccagcatgcccggctaattttgtagttttagtagagacagggtttcaccatgttggtcaggctggtctcgaactcccgacctcaggtgatctgccctccttggcctcccaaagtgctgagattacaagcgtgagccaccatgcccggccttggtggggatctttttatggtactaccaagagagcttctttgtacttttatattgtctgtagtcattgtatgactgtaccataattgatttaacctagcgcctccctttggtggacatgtcgttacttttgcagctttgtatttagtgactgtaatggctgtctagtattctgatgcaggggtttgggtaccctgctttaatttagcccgtcttcctgttagtggctgtgaaagttgtttcctggaacaga

SEQ ID NO: 22642 - DNA, 1049 bp, Homo sapiens
tggtgggattcagtgggtgagagggaagaaggggaggttggggggctccttcccttcagaacttgaagtttctcccactgcctcctctccagtggtctcccaggtgccagacccaaaagcttttcctacagtgataccctttatttttacttccccttgactcatatgttttaacatgattttaacaaactgcacttattaagaaatgtgtttgccctgttttgtttggtttcgttttgttttctttgaataaatgacatggcacctcctagcaggaaggaagcagggttgaaaccctgaagtgttactgcagttggccgttaattggggtgggggcctctttaaagggaaattatttactcattcattaaacaacttaactgagggattcatgtgcctggccccgattttggtgctaaaaatgcacgcttaaacaagggtccctggtttaaaatccactagttcatttttaaagtgcttctcttgttctctacctctcacagtctaaaatccctccaggagtttttgagtaaaggacatggaacaggcctctaggtggagggatgggtgggactgatggggcagagaccagggctggtttgtttggcatcatcactgggcatccacagaccacctgcctcaggcctggcctgtgtgcagcacggaggacagttcctgcctgttctgtgtttggggctcatggggattccaggagcttcatgtttcagccagtgtgtgtgagccacctgctgtgttcttcagctgtcctggacagtgctggggacatagtatggccacggcagtcctggaccccgttctcacagagctcccactccagagagaacaaagacctgccagcaccaagtggtcagctgtgagagcctggggtggtgtgcagggagggcttcctggaggagtgagccagggtaaaagactccagattgcatccccatggcccatcttccccttccttagcaaccttatgtcttcgttccctcatacatgctgtgttcctggctccttgtgagagacaatgctgggccacagga

SEQ ID NO: 22643 - DNA, 1049 bp, Homo sapiens
acaggcgtgggccaccgcacctggcctacagtatgcttcatagaaatatgaaaagaatgagagcaaggttgagatagaaagtaacagggcatccctcctgagtaaaacaatcctgccccctcacgctctcgtctaccctcccgtgggtctccctgcttctgtcgtctgccagaaactggctgagccaagtgcacttgcagacgccatctgttctccctgggagtggggccggtgccagcgccagcatctggactcttggcaaggagccctggagccctggagcgagggaactccggccccacaaaggccagggaatcctccagtctggtgagacggagggcttctgggaagggaggcctatacaaggctccatgaaggaggtggaagcttgcaagacgatgatagtcttgtaatcagtccgatggagatggatgtaaataataatattaataaacaccatcaaatgtgttcagagtgctttctttgccaggctttggataaatgttggatatctgttctttttattttttatttttctatttcctaggcagcacctaaaccaaaataggttcagagaggctcccaatgttggacatttgttgttgcagcaactctaagtactctacatatgttatcacataagaggcaaggagcattatccccattttgtaggtgaagaaataggggttcagagaggtgaaggcattgtctagaggccacacactcagtgacttaaagagcctggaaaggggccaggaatggtggctcacacctgtaatcccagcactttgggaggctgaggcgggtgggtcacctgaggtcgggagttcaagaccagcctgactcatatggagaaaccccatctctaccaaaaatacaaaattagccaggtgtgatggcgcattcctgtaatcctaactactcgggaggctgaggcaggagaatcgcttgaacctgggaggcggaggttgcggtgagccgagatcacgccattgccctccagcctgggcaacaagagtgaaactccatctcaaacaaacaaacaaaga

SEQ ID NO: 22644 - DNA, 1048 bp, Homo sapiens
atggcgtgtgcctgtaatcccagctactcgggaagctgaggcaggagaatcatttgaacccgggaggcagtgagccgagactgtgccattgtaccccagcctgggtgacagagcaaaactccgtctcaaacaaacaccgaaagcccatctctgaacacttttttctctttgtatctctggggaagccctaggggcaggtattggcctttgagggctatggagagcagagcaatggggcaggaaaggtggatggagatgcccacctgggcactttcctgtccgtaggacatgtcatccagtgacagtgactcggactgggatggaggcagccgtctttcaccatttctaccccacgaccacctcggcttggctgtcttctccatgctgtgttgtttctggcccgttggcatcgctgccttctgtctagcccagaaggtcagtctgtgtgtgggacttggaggggactgggcataaaagagaaaaatgcaccacaaaaacaaagagccatatacctgaggcgggaaggtggaaggtagcccagagaacctgaactcaaatcctgagtctgccactctctgcaagattttttttgagtctcactttgtcgcccaggctggagtgcagtggtacaatctcggctcactgcaatctctgcctcttgggttcaagtgattctcctgccccagcctcctgagtagctgggattagaggcgcgcgctaccatgcctggctaatttttgaatttttaataaagacggggtttcaccacgttggccacgctggtctcgaactcctgacctcaagtgatcctcccatcttggcctcccaaagtgctgggattacaggcgtgagccacggtgcccagctctctgcaagattttgggcaagtcacttaacttccctgtgcctcactttcctcatctgtaaagtgggaataattgctacctctgggtcaatgtgagaatcaaatgagttagaatagtggcatataccattttaatgtttttatttattttttaaaatttattattattattattttttacca

SEQ ID NO: 22645 - DNA, 1950 bp, Homo sapiens
ccgcacggtaagcgggggctccgagctggaccgggcgcgaggtggcagggccggacgccgaagcctcagagcgcgtgcctgagggccccgaggcgcccggcgcgggcccgtcccgccccctagagccgcggccacgtgcgagcggcaggcccggacatgcccggtcagcgccgtccgggaaccgagcgtgggccccggggggcagcggcggggtgcgtggggcgtccggagtcccggggctggggagtggggtcgcgcaggatcctcacacgcaggggccgggctctgttagtgcgatccagagaggccgtgggcgtcggtgagctccttcagacccgcaggagccggagcccggcgttgaaggggccgtgggaagtaacggggggtaccacggtttaggatgcgctggagcgaaaggattggggtggggtccgtgctcttggcagtcgtctctgccaggcctgtgttcacatgcttgactttctccctcagatgcctggagttactgtaaaagacgtgaaccagcaggagttcgtcagagctctggcagccttcctcaaaaagtgagtttggggactgaggttcaaaacgggtggaggctgtcgccttggcctgcccatctgagccccagtgtttgccggtcctggcaggggaggcttgtttggggcctccgtggctcctttcagcgtgaggcctggcttgtgttccggttccagcctctctttgtactctgggcacagcatagttgtgttgaggggagggcatttgggatatggggtagtttgtggagatgactgaatcgtgcttttcccactgttttggtcttaggtccgggaagctgaaagtccccgaatgggtggataccgtcaagctggccaagcacaaagagcttgctccctacgatgagaactggttctacacgcgagctggtgaggaacttaggtctttggctggagagtggggagctgggtgacccctggcacaaaccatacttccctgtctcctctgagctctttcccgccccaagagggagagaaacccttggttgtgtcaccacttgctttgtgtgatgtgacattcgataacttggtactccaagtttttatgacattctaagagctttgtgagaggaggacctgtggctttgagcctcaggggaaaccagagacagatgaatgttcatattttgcttacaggtggtttaatcctttctatatacacggaggcagactccctgggtttggatccatcttttacatctggctgtgtgtcctctggcaagttggttaacctgcctgtgcactctctcatccccaaaatgggactaattattgtaccagtactagagtattgcaaggattgaatgaatttaaagcagagtgtttagaacgtgtctgttgcacagtagttattcaggaaaaagccagttgtctttactattgctcagatcatcaagttagccttctccatatctctaacaggctgtttctaactaaatggttggagatctggccaggtcagtccctgctttaaatcttgacttctgatcttatggacaccctgcaacctcgtgccagccccgtctcttttcgatcttccaataataatttacgtacagtccctgactagtgttagttctcacgtgtcttaatatttcagtactcactaaatcttcactttcaggaagatgtaacagggtgggcggtggcagtgccgtgttatgtcaaggtgacagccttagcaccgaccttcactaactaaggggcctcggcctctccaatcttaaaccttctctctctgtgaagtggggactccatcctgaccacaacttgtctccagataagaagtaggtgggaagcagggtttggaaatcggcaaagctcctccatgaccctgaaaagagttggccttggtacaggttgcttggcccttcagaatatgaagcatttt

SEQ ID NO: 22646 - DNA, 1123 bp, Homo sapiens
gtgggattacaggcgtgagccactgcgcccggcctgatcccatatattttaaatcatctgtagattacttatagattaatacaggccagacatggcacatacttatagtcccagctacttaggaggctgaggcaagaggattgcttaagcccaggagttcgaggctgcagtgagctatgatcacaccacagcactccagcctgggtgacagaatgaggccctttttttgtgttttaagaaaaaagaaaaagcactaatacggtgtaaataattgttacactgttttgaattgtagtttttttcccctaaatatttttgatccacccttggttgagtctgtggatatgaagggctggctgtatctggacctgatctcagggcaggagtgggctgggaacaagcggtgtgtaagaactgtttctgggcagaagcagcccaccccacacagactactgcctggcacttggcagttatggaagaacccccaattcccccacttgatctttagaactagaggaaagaaatcactagagcagactcagaccaacttgctgatctctgggtcccaggaacaaaccagactctgctctgagctccagagctaggcaggaccatgtgatggctgaaatctgggtgcttcctgcatgtgggccccggtgccatcacagtggcaggacagggcagttcctccagagctgtgtgacacggagccagtgagtaccctctggcacctcagtttcactctttaaaggagagtagcacttgacacacctgttgagtcctcagagtaacccggccctcaggtgaagcagggtggagagatcgaaaagcatttggcacagggcctggcagatgtgtgctccagttaatagaagcgtgcaagcgtttctggggaggctggtgtgtcgactggattttacggagctttttttgcaggcaaggaggctggctggggtggaccagggacttgcccaagccagccttccctgtgtctgcagaggggctggtacacattccaagcagggggcacccactgcacagagtgtctgccctgcccttgttatcctgagctctccagactgaggtggcccggagagtggcaataggtcccttcactcctgct

SEQ ID NO: 22647 - DNA, 1129 bp, Homo sapiens
cgttaacttttcccaattgatttttcggggcttttgatctaaatgcttgcacaaacaacaccccgtcagctcccaggggggctcccactactgcccccagctcgttagaatgcacctgactagggccctcagtgggacttggctggcggcaggtggcttcttgagaagcctggctcacagccaggagggaaggggctgagaacaggacctgtgctcactggggcctgcatgacccttccctccccacagcggccgcaaactgacacctcagggacaaagagatctggacagaatcgccggacaggtaaggcctgcgtttggggtggggctgggtcccttagtcgctgcccaagcatttccaaagcccatacttcgtcaggtagacttatttccttctctggagggcacagcccagggtgctggtggggtcagaggagggctgcccagagacaggagaaaggacagtcctgtctgacttttcctgttggtgctgcttagaaatttggaggcaggctggctgtggtgtctcacccctgtaatcccagcactttgggatgccgaggcaggcgaattatctgaggtcaggagttcaagaccattctgaccaacatggagaaaccctgtctctactaaaaatacaaaattagccgggtgtggtggcacattcctgtaatctcagctactggggaggctgaggcacaaaaatcacttgaacccgggaggtggaggctgcggtgagccaagatcatgccattgcaccccagcctgggcaacaagagtgaaactccatctcaaaaaaaaaaaaattggagggaactccagcccaggtgccactgggcatctatccacagagcacatagctgtacccgtagatgactccccctccccaggtcagcctgcgatgtttccccttagtcctcatgcgtactgagcatcacatgggctgcttgggagaggtggagataagggaggggggctggttcagaacccaggtctccattcagatcctggctggccaacaccctggggcagagtggccacacccctggtgccacagtctcctgtcttggcctccctgtggccaaaatctacccttggccacctcaagcatggtagtgaggagtcagtg

SEQ ID NO: 22648 - DNA, 1034 bp, Homo sapiens
gccgctgctttggggaccctttggtgggtgcggggaggtgggtcaggttccatctgggcccacctctgaccctgtgcccctctctccccagaaggtggaagaggtgggtgcctgggccctgggtgggggaagggctagcccctcccccatttctcccagcccctcccctctccccatggccactccctccccttcactccctgtgaggggtgggtggggacatcaccctcccagttgaagagctaagtatggaaatcctccccaccccataacaccccctctgttgccatccccctgcctcagggaagggagggggtcagtcctatgctccatcctgggttccccatcccttcccccatcaaatttcagtatcccccctcccccaagaccccccactaccccagtgcccctaaaatcccaccactcctctgactctctcctctcttctgttgcatgtttgatccctgtcctggtcacccttgccccggtcctggtctctccctgtctctgtccctgtcctggtctctccccgtctctgtccctgtcctcgtctctccccaatttctgtccctgccctggcctctccccacctctgtccctgccctggtctctccccgtctctgtccctgtcctggtttctcttcgtctctgttcttgtcttggtctctccttgtctctgtccccggcatctgcctgactctgtccttggcctcggggtccaggctatcagggcgtctggggcgctcagagagcctgcgggtgagtgaccgccgccggccttcccggggcagcctcggggctaagggccggggtgggggccgctcccggagcgacgtggacatggaccccagttccgccacggcagtgcttggccctgcccgacgagccacgtatgtcaaccctctcccttcccccatccactaaggcagcctggagaatcagggagggattgttgtcagagtcacagaggaatgggcgttggagaccgaggtcattgaggccaactgtggtcacagaccttggaggaggagggg

SEQ ID NO: 22649 - DNA, 1034 bp, Homo sapiens
aaaaacaaaaacatagaatacaagacaacgaatgagccagaggctgcagggtgggaggagccagcaggtgtagggctctgtgattttgagctgtatcctgagggcaatacaggggtgaaagagaagttgaaaggcagtacctgcagaagcccaggaaggcctcacagagtagtggatgtaaaagctggcctccagacaggggaggtcctgggcaaaggccagaggtgtgacagagcctggatcatgcagggcctcccttgggaggctgtggagctttgtctttgtctgggggctctggggagctatggaagggttttgagcagggagaggacatgatctgatttatgttttagaagatctctctggctgctgtgtggggtatggatgaaggcctgtttctcagtgatagcatgtctacctgttcccagcttgggggccattcctgtcaagctagtgggatgagaacagaataggaagtgtgtgtgtgtgtgtgtgtgtggcgaaggggtctgtgtgctggatataaatcactctctggccttaaagagtcccagactggttaggccaggtgcggtggctcacgcctgtaatcccagcactttgggagaccaagtggggcggatcacctgacgtcaggctttagagaccagcctggccgacatgaagaaaccccctctctactaaaactacaaaaattagccctgcgtggtggcgcacatctgtggttccagcctgggtgacagagcgagactctacctcaaaaaaaaagaaaaaacgtctcagactggttgggaatggtggggctggacacagatattcagcccccagtgtgttcactgagacagtgctcagggctaagaaggaaagtggaggggtggggtggatgtacctagggaggaaagaggactgtgctgcagataacagagcaggagccactaaaatagggttctgaagcatgcataggagtttattgagtgggaaaagggagcaaacagcctctatgaagacgtgagggtggctggagtgtctcagga

SEQ ID NO: 22650 - DNA, 1031 bp, Homo sapiens
cagtgctgctttgaacatacacgttagaacaatttatattccttggggtatatacccgataatgggattgctgggtcaaatggtaattctgttttaagttatttgagaaatcttcaaactgctttccacaatgcctgaactaatttacattcccatctgcaacctcactcgcatgtgttattttttgactttttgataatagccattctgactggtgtgagatggtatctcattgtggttttgatttgcatttctctcatgattagtgatattgagcattttttcatatgcttattggccacgtgtatgtcttcttttgaaaaatgtctgttcatgtcctttgtctactttttaatggggttgttttttgcttgttagtttatttaagttccttataggttctggatgttagatctttgttggatgcatagtttgcaaatattttctcacattctgtacattgtttactctgttgatagtatctttagcagtaactttttcaagatcacagtagataagtgacagagccagcatggctatccccaaacaacaatctgtataaaactatcacttaaggccgggtgcagtggctcacacctgtaatcccagcactttaggacgccatggcgggcagatcatgaggtcaggggtttgagaccatcctggttaacatggtaaaaccccatctctactaaaaatacaaaaaattagctagtcatggtggcatgcgcctgtagtcccagctactcaggagactgaggcaggagaattgcttgaacctgggaggcagagcttgcagtgagctgagttcgcaccactgcactcccacctgggcaacagagtgagattccgtccccaaaaaaacaaaaacaaaaactattacttaatctctgtgcctcagtttgctcatctgtgaaatgaaaattataacacgtaatgccattggatagctgtaagagtaaattgagatgatccttcaagaatgatgcccagtgaagtgctccacacatttcctttcttttttaaaattt

SEQ ID NO: 22651 - DNA, 1032 bp, Homo sapiens
ctagaggtccctgggcctgggggaggaatggatgggcatgctgagcactcagggtcctctgggatagctaaagcaagcggggacttgggaggccggcccaggtctgagaggcctcctcctccgtccccttgcctccccctctgtccccttgcctccctgcagtaccacttggactactgctccatgtacacagaccacagcgtctgctcccgggacccggaatgcagttggtgccaaggagcctgccaagctgcaccccctcctgggacccccttgggggctgtgagtgacagccctagaccctctgttccctagcatagagacctgccctcagtgtctccctctgcctaaccagatggacaagaactttccctcaactgggagacttgttttcatgccggagatcctccttcctgattcctgactgcggagccctgaacctttgcctatcccacccagcccgacccttttgagcccgtgaccccatccccgcatcccccgtcctctggatctcccacattccaagtcaactccccgttcttcagttttttcgccctttccatcgcaggaccctgtatccacagcccttccttcccagatctcttgagctccagttgacagtgagccctttcccctctcctcctcgcagtgtccagccgccagctgcctgggcctgggccgcctcctgggtgactgccaggcctgcctggccttcagcagccccacagcccctccacggggacctggcaccctgggctggtgcgtgcacaatgagagctgcctccctaggcctggtgagtgtccgcagcagtgggccggcaggagggggccagagcactccacactgacccaccggcccccaccccctgtcttctcagagcaggcccgctgccgaggggagcagatctcaggcactgtgggctggtgggggcctgcgcctgtcttcgtcacgtccctggaggcctgcgtcacccagagcttcctgcctggcctgcacttgctcacctttcagcagccgcccaatacctccca

SEQ ID NO: 22652 - DNA, 1067 bp, Homo sapiens
aaatggctagaggccaggggtaaaggtgggctctgggaccctgtcgtctattgtctgaatttaggtcttgcctcttttcccagagtgacctttgacaagccacctaacccctgtccctctgcctcagtctctcatttggtaaaatggggaagaaggttgggttgaccagtcttttctggctctgatgtggcctgtgagtccagaaagggactcacacatacacccatccctggtggcacaggtctcaattgtccgcagcacgaccatcaccctaacacccagcgcagagacagatgtgtccctggtctaccgtggcttcatctacccaatgctgcctggagggccaggtggaccaggggctgaggacgtggccgtgtggacgcgggcccagcgcctacacgtcctggcccggatggcccgtggccctgacacggagaacatggtgaggccgcctgggacattcagggggttgtttatggtaaatagggagttaggggtgtggtatagagcatctgtggtgatttgaaggttctggggaagggctggggagaaattagaggcaggagatggattttttgtgtgtgtgtaagacagagtctcactctgttgtccaggctggagtgcagtggcgcgatctcggctcactgctaccttcacctcccaggttcaagcaattcttctgcctcagcctcccacgtagctgggattacagatgtgcatcagcactcctggctaatttttttgcattttaagtaaagatgggttttcaccatgttggccaggctggtttggaactcctgacctcagatgatccgccaccttggcctcccaaagtgctgggattacaggcgtaagccactgcgcctggctgggaatggatctttcgtagaggagggagggtgctgaggttttcaattgtgagcagaatttgagggaaactttgaagcaggtgaggaaggtctgagtcagacttgaaaggcccctgaaggctgggcatggaggtgtacacctgtaatcccagccctttgggaggtaggggcaggtggattgcctgaacccagaagttt

SEQ ID NO: 22653 - DNA, 1089 bp, Homo sapiens
aaaaaaagcccctgaggaggagggtccctgggggtctcacctctgaggttctcaggatctaaggagctctgaggccctcttcttaggagggggtggggtacagggtgggtttggaggtatcaggggtctgaggaaggaatgggaagggttctgaggcccctgcctatcactcacacctaccccaggaggaggtggggcgctgggtggctcatcaggagaaggagacgcggcggctgcagcgccctgggtctgctcgcctcttccctctgcctgggcgggaccacaagtatgcagtagagatccagggccagctcaatggctcggcaggccctgggcacagcgagctaactctgctgtgggatcggactggtgtgccaggaggcagcgtgagtacccaggacctacctccaaccctagccgcaggccccagcctcagatcacctgggctttctgaaccccaggccacaaactctgaaatccctagattctggcctcggactccttaactcttggcctctgaactctggacctcctcttgaaccctgtggcccctgacctctgcctatagaccctaacctgatcccatattttgacccccatcttctgactcctcacccttgaccctgctgaccctgacctctgccctccatactttgacctataataatctccagattcctccagaccttggacctctttactgatttcctaaatcctgacttcctatgtgcctgagttctcaacctgggctccaaacccttactttcagttagcgccagactctgacccctgccccagaccttgactgctgccttcctgtgaccccttccccaggagatctccttcttcttcctggagccctaccgctcgtcgtcctgcacctcctattcttcctgcctgggctgcttggcagaccagggctgtggctggtgcctgaccagtgccacctgccacctgcgccagggcggagcccattgcggggatgacggggctggtgggtccctgctggtgctggtgcctaccctctgcccactctgcgaggagcatcgggactgccacgcctgcacccaggtgcctgtggggccacca

SEQ ID NO: 22654 - DNA, 1031 bp, Homo sapiens
cggccttctacctccctgggccactcaggaccctttgcctggtaggcggggcccacagcccaactcgggcagcgataggctttcggagacgccagtctctgccaggcccagtcagtcggccaatagacccggaacctgagggatcggaatcctggtccactccgcagaggcccgagcgggctcgcgagggaacgggttctccgagtctggccgggtaagccctttccagcacgcctagtattaggattctgcacatagctcgggtggaaaaccgtgaggcttagtgaggcttgaggcggaggggggaggagctcagtcccggcgaacccatcttgctttcttggagaaactgagaccgggatactggatctgttattcatccatccgttcctcccaccctaagcctgattctcgtctgctcctgccttcctgttccttcatccgttctgcccttcctgccctcaattctctcactcacggattccctcgtctagccactcactcacacactctcccacctattagttagacaaacatttcctgaggcttctggtgtgccaagcctcgtgctgggcgatgctggtgaccaagatgagtcaggcctgggccgtgccctcaaggagcccgggtcagatgggaggatggacgttgatgggcatgggtgtgcggagacggtgggagcccaggagagacttttttgagtttggcgtggtcgggaaagggtttccaggggaggggccattggagctggatcttggaggagcagaaggtgccaggcaaagtggagatgccaggcaaaatgggtgtggggagggtgtttcagcgtgaccaaagacagggaggcatgcaggagcagtactgcgtgcaggtgcctaagcggaaggccagtcaagtctgtatggccagcaggggaactgtaaggctggaggaggccgaagagatgagcagaggccaggctgaggagcttggactttgtcctgagggtgagggggtagtggagagccatggaagggttgagagtagtggaggac

SEQ ID NO: 22655 - DNA, 1046 bp, Homo sapiens
cgctcaccacgatgtgcacaggtggcaggctcttgagcatgctgtcgggtgccagcagcggcgacatgaaggggttcttgactatgggtgaggagtagaggggcatctgtgtggcaccctggctggagcgtcgggggtggaaaccctcggggaaggcggcacggacgcccaggcctctgtccatggggctcagctcatttttggcctcagcctcttcccctgcatcctcaggtggtaataagaagttgacatcggagggtgtggaggggctaagtgtctcagctgacagcgacatctcgggggtgtccgacgacgtctcggagtttcccctcaggctcaagtccctcagggtcaggttcttgagggaatccgtgcccagtgggccctggggctgggccagtgctgcttcagacacactgcggcgcatcggctctgagagagggagagcagataggcctggctccgttagtttggttgtgtgtgtggctggcagggaatgccatgggaagggcagtcgcctgtggagcgctgtgaaaggctgtgtttccccagactcttgcctaggggatgggtggagttccagatgccccaggtggtcatggtgggggtcttggcagtggggcagtgtgttctagtgaaggatgtgtgtgtgtgtgtgtgtgtgtgtgtgtgtgtgtgtgtgtgtgtgtgtgtgactgggaagattaggtgcagtttacctctaggaacctattttttcttctagatcaaggaaatgaaaatagtccttggttcataggtggcaggactcagtgggataagatgtgggattaggtaccgctacccactggggatcataatatatcgttttttgtttttttttttttgagacaaagtctcgctctgtcacccaggctggagtgcagtggcaagaacatggctcactgcaacctccacctcccaggttcaagtgattctcgtgcctcagcttcctgagtagctgggactataggcatgtgccaccatgcccggctaatttttgtgttttttttttagcagagatgggg

SEQ ID NO: 22656 - DNA, 1043 bp, Homo sapiens
tactattgtgagtgggggcaccaccaaccatgtccacgtaagagggcgaactttaccgattaatgctgtgtgtgttctgactgctccactgaccagccatttcccccatctctcttctcgagcctccatattccctaagacatacaatattgaggccgggcacggtggctaatgcctgtaatcccagcactttgggaggctgaggcaggtggatcacttgaggtcaggaggttgagaccagcctggccaacatgctgaaaccccatctctactaaaaatacaaaaattagctgggcatggtggtgtgtgcctgtaatcccagctactcgggaggctgaggcaggagaatcgcttgaacccgggaggtggaggttgtagtgagccaagatcacaccattgtactccagcctggaaaatagagcgagagtctgtctcaaataaatgaaatgagatgaaaaatagaataaaataaaatagaaatcaggccaattaacaaccctacaatgacctcaaagtgttcaagtgaaagaagagtcttatgtctctcattttaaatcaaaagccagaagtgattaagcttagtgaggaaggcatgtccagtgctgaaacgggctaaaaactaggcctcttctgccagttagctaagttgtgaatgcaaaggaaaaattcatgaaagtaattaaaagtgctactccagtgaacacatgaatgataagaaagtgaaccagtcttagctgggcatggtggctcatgcctgtaatcccagcactttgggaggccgaggcgggcggatcacgaagtcaggagatcgggaccatcctggctaacacggtgaaaccccagctctactaaaaatacaaaaaatcagccgggcgtggtggtgggtgcctgtagtcccagctactagggaggctgaggcaggagaatggcgtgaacctgggaagcggagcttgtagtgagccgagatcgcgccactgcactccagcctgggtgacagagtgagactccgtctggaaaaaaaaaaaaaaagtgaactaggctta

SEQ ID NO: 22657 - DNA, 1079 bp, Homo sapiens
gttagccagcatggtctcgatctcctgacctcgtgatccgcccgcctcggccacccaaagtgctgggattacaggcgtgagccaccgcgcccagcctctctggtgttttaaaacaagcttacactaaactcagatgttcaaagtctgatgccctgccactttcttacttcagtgcatgtttctttttcgagacggagtctcgctctgtcgcccaggctggagtgcagtggttctatctcggctcctgcaacctccgcctcctgggttccagcgattttcctgcctcagcctcctgagtagctgggattacaggtgggtgccaccacacccagctaatttttgtatttttagtagagatggggtttcaccatgttagccagggtggtctcgaactcaggtgatccacctgtctccacctcccaaagttctgggattataggcgtgagccactgcgcccggcctcagtgcacgtttcttataattccttttaaaatctgaccattgtcatgggcatgcatcaagtctgtgaatgcagacctctgggatatgcccagtgggaatactggggactcagggaatagttatcacccaaggtaggatggcatgaggcagtatcaagggacacctgcaggggggtgggggttgtgtcccacagatggtgggagccacagatggtttcatcaggacagaggcacaataaccgcatcttgatggtctcagggcttagactcacctgttgcgtccagaaccaggcattgaccagggttcaaattagtgctccacctgcagagccctgggcagagatggacaacagcctccccctgcaggacagtcagtgcagggctgggtcacctcagcactccacaggcctttgcctgcagtgttctcctggccagggaggaggccaggcccatccctgtcacatcatctaaggggctgtctgccctgagggtctgcagaagagttgaacagagtaaggggcataggaagcagtagagccgtgtctcttcttgagctgtgttaacttttgtcttcttagtccctgaggtcactcccaaatgtgggcatctagacctgag

SEQ ID NO: 22658 - DNA, 1034 bp, Homo sapiens
caatgtgtggatacacctcatttttctatccacttatctttcaataaacttttcagttgtttccaccattttggctattgtgagtaatgctgttgtgaatggcagtgcataaatatctaatcagatttctttccattgttttgggtgtatgtccagaagtgggattgctggatcaaatggtaattctttgtttaattttttgggaaatagccataccattttccacagcagctatagcatttcccatttccatcagcaatgcactacagctccaatttttccacttacttgaagatactttttgctttgtgctgttgttgtttttatcaaagctatcctaaagtgtgtgaggtggagtatacttgtggttttgatttgcatatctctaagtattagtgatgtcgagcatctctacatgtgcttattggttatttgtatatcttccttggagaaatctctattttagtcctttattcattttttaattttttttttggatttgtgctgttgttgatttgtaatagttcttcatatattctggaaattaatcccttatcagatatataatttgcaaatatttttcccatttcataggttgccttttcacttttctcaataatgttttttgaaattcgaaagttttggccgggtgcggtggctcacgcctgtaatcccagcactttgggaggccgaggtgggtggatcacgaggtcaggagatcaagaccatcctggctaacacggtgaaaccccgtctctactaaaaatacaaaaaaaattagccgggctttggtggagggcgcctgtagtcccagctacttgggaggctgaggcaggagaatggcatgaacccaggaggcggagcttgcagtgagcggagatcgcaccattgcactccaacctggcgacagagcgagactctgtctcggaaaaaaaaaaaagaaatttgaaagattttagcttttatgaagtacaatttatgcattttcttttgttgcctatgtttctgttgttataaccaatatatcattgtga

SEQ ID NO: 22659 - DNA, 1089 bp, Homo sapiens
ccagccttgtgctgagcactgtcaattgaatcatgaacaagctttgataacttgcccattttcgtgcagtttactttgtagtaaagcagaaacatcaaataagtaaatttataaatagataaatagtatgtaatgaagcaaattctttggaaaaggtaaacagcataagggaatagaaaatgatgaggactgacagggctaatttaggtaagacagtcggggaacgctttcttgaacagagatgtggagcctgggatctctatgtgaatatctggcggaggaacagatcagtcacagtgaacagcaaatgcaaagaccctgttgttggaaaggaactttaccagaactctagagtagagttattaaaggaacatgtactaagaaattaggccagggagataggaaggggccagataatacattgttttgttgttcttgtttgtggaatttggattgtttagtctctttcagtctgaaacagttcacatgtctttccttgacttgcgtatatgtctgtgatgcttttgaagattacaggccagctattttgtatagtgttcctgaatgtgggtttgtctgctatttcttcatgattagatttagaatatggatctttggcaggattatcacagaattgatgctgcgttcttctccctgcattttgttgggtggtatgattaatttatcattactcatgttattcactctgagtacttgattaaggtagcgtctgctggcttcctccttgtgcagttgccctttttcccttccacaactattttgtggggaggaactttgaaactattaaatattgtggaactgggcacagtggtggctcacacctgtaatcccagcactttgggaagctgagacggttggatcacttgaggccaggagttcgagaccagcatgggcagcatggcaaaaccccatctctacaaaaaatacaaaaatatttgctgggctgtggtggtgcgctcctttagtcccagcaactggggaggctgaggtggctggattgcttgaacctaagaggttgaggctgcagtgagctgagattgtgtcaccacactccagcctgggtgacac

SEQ ID NO: 22660 - DNA, 1058 bp, Homo sapiens
catcccttcatgctaaaagctctctgtaaactaggtactgaaggaacatacctcaaaataataagagccatagatttcaaacccacagccaatatcatactgagtgggcaaaagttgtaatcattccccttgaaaactggcacaagacaaggaccagccccccgccctttccccactcctgttcaacacagtattggaagttctggccagtcaagtcagacaagtgaaagaaataaagcatattcaaatagagaggaagtcacagtatctttgtttgcagatgacatgatcctatatctagaaaaccccatcatctcagcccaaaagctttttaagctgataagcaacttcagcaatgtctcaggatacaaaatcaatgtgcaaaaccgctagcattcctataaaccaacgacaggcaagcagagagccgaatcatgaatgaactcccattcacaattgctacagaaagaataagttatctaggaatacagctaacaagggaagcgaaggaccccttcaaggagaactacaaaccactgctcaaagaaatcagagaggacacaaatggaaaaacatttcatgctcatggataggaagaatcaatattgtgaaatggccatactgcccaaagtaatttatagattcaatgctattcccattaaactaccgttgacattcttcacagaattagaaaaaaaaacctattttaaaattcatttggaaccaaagaatagcccaaatagccaagacaattctaagcaaaaaagaacaaagctggaggcattatgcaacccaacttcaaactatactccaaggctacagtaacgaaaacagcatagtactggaacaaaaacagacacatagacaaatggaacagaatagagaactcagaaataagaccacacacctacaaccatctgatattcaacaaacctgacaaaaacaagcagtggggaaatgattccctatataataaacggtgctgggagaactggctagccatgcacagaaaattgaaactggaccccttccttacaaacattatacaaaaattaaga

SEQ ID NO: 22661 - DNA, 1117 bp, Homo sapiens
caggcaggcggattcgggggattctgggaagtgtagtccagacgcctgtggcatcatcgacacttccggtctccgagcaggacactgctacttaacaaggtggtttgagccaagtatgtgtcttgcgggtctttgcgaaagtgaaccagttattaggggcgcctaacgacctggggggtcaactaagggggtaagaagccctggagaagacctgaggtttggagatgcgaggggtgggagggaagtttcgttgccgtcgatggagccttctggcgttgggggctgtactcaggtccaccggaggagtcgtcgggggttcggggggggcggggaagaactctgtctagtcttgtgtgcctgtttagagggttttccaggtgtttgacctcgttcagtccgcctccctccactcttaagtgtgcgacctctttctcgcgatataacgtggggtgttacttaatctccctgtacctcccattgccgttttttaaatgaggatttcaggaccatcctgatagaattgttttaggagttgaaagttgtggtataaaacaaagacttaacagctcctgtcacttggtgtcctgttaatttcccgcgaagtggtcaggtgcccgggtggggtcagagctccagctgctccggcccttctcttggagcccggcagggctctggatgatcccggacgcctctgacctctttttaggaaggcgtgggttgcatccacgtttcacgaagggagaggagcatttaacttgtatccgggacggcgacgcagagtgtttgacagctttctccttccccagcctgacttttctaaaagagctgcagggagggacttggctactgaggacaaagctgtctacacgagtggtctttggcttttctctttttaaaaaaaagttatttattttgttagtctgtttttattattgttattatttgagaatgaggtttgctctgtctcccaggctggagtgcagcagtggcgcgatcttggctcactgcaacctccgcctcctgggttcaagcgattctctgtcctcagctccggagtagctgggattacaggcatgcgtcaccatgcccggctaatttttgtatttttagtagagac

SEQ ID NO: 22662 - DNA, 1030 bp, Homo sapiens
ttggaaaacacaaactgtaccttccttgtattcagtaaagtttcaggccatgtcctaagtgaaatcctgaaaacactgaacaaaggtttcacttacccacatctcttaattctgtgtccttataggaggcaagatccaaactgagttggagtctgttccagaaacaggaccacatgaagagtggtcttgccagcaaatctgggaacaaactgcaagtgagttaactagacctcaagactccataagtagctctcagttctccacacaaggtgatgtcccctcccaggttgacgcaggactatctataattcacataggagagacaccttctgagcatgggaagtgtaaaaaattcttcagtgatgtctccatccttgatcttcatcaacaattacactcaggaaagatatcccatacatgtaatgagtacaggaagagattctgttatagctcagctctttgtcttcatcagaaagttcacatgggagagaaacgctataagtgtgatgtgtgtagtaaggcatttagtcagaactcacaactgcaaactcatcagagaatccacactggagagaaaccattcaaatgtgagcagtgtgggaaaagtttcagccgtagatcaggaatgtatgttcattgcaaattacacacaggagaaaaacctcatatttgtgaggaatgtgggaaggccttcattcacaattcccagcttcgggaacatcaaagaatccatactggggagaagccattcaaatgttatatatgtggtaagagcttccatagtagatcaaatcttaataggcattccatggtccacatgcaagagaaatcatttagatgtgatacctgtagtaatagctttggtcagagatcagcacttaatagtcattgcatggaccacacaaaagagaaactatacaaatgtgaagaatgtggaaggagcttcacttgtaggcaagatctttgtaagcatcagatggaccatacaggagacaaaccatataattgtaatgtatgtgggaagggcttc

SEQ ID NO: 22663 - DNA, 1987 bp, Homo sapiens
tcacagtctaattttatgcattgcctttaattgtcacatttccataatctttaatcttgaggattctacaccctttgtctttctatgcttgatatttttgaagagtataggcaagttattttggagaaaggcattcatttggagttgtgtctgatgtaattcatgtgcgggttcacattatgcattgttggtagggataccacagaagtggtgaattgcgggttcagattatgcattgttggtagggataccacagaagtgctgaaatgtccttttcattgcaacataacagggtccaagtgatgtcagtttgtctcttcattggtgatctcaaccttgtccacttggccgagacgctgtctttcagatttctccactataaagttacttaaaaaaaattgaaaagaataaagtttcttaggaatagataacattattagtgggcattcagctgtaaaatgaccttctccatttattctttgttcaactacaaatattctatcaatatggccttagaattgactcttaagttagataacgtgtacattaacaattattttttccaacctattgtatcatataacttacttatatcaggtgtacatccagtgatcattagacagtttgctgaatggagtaaccatcaccacaattcggtgatcatttcatgctcatattgatttcctcctgcctacttatggttagacttcattctcactcagatctgaagcaatcactaatcagttttctctatgcattttcctacccagacattttatagaaatggaatcctgcaatatgtggtcttttttaactggcttctttcatttagcaataatgtttcaaaggttcatgtatgttgtagcatgagtcagtacttcatttctttaaatttccaagtaagattccattgtatggatagaccatgatttgtctattcatttacccacaggagggcattttggttgtgccgttttgggtttttatgattaatgctgctgtgaacagtcatgtgccaattcacaatacacatccctgttggtgggtggcatccctggccaccttttcatgtctctttttctgcctttcctggcactttgcaggcacaattctgctttcccaggaactgcatcactcaggactctgcaagtttccagaagtaagagggaaaatgaccacgttcaaggtgggtaggacttgcttctattactcttaaaattccctctcagtacttaaattgtcacaagttttcctctgtcttgggaagactcaaggagaaaaacagacatttgaggatctcttgtgtaccatgtacttcctttgttacttttgagtggattttgcatttgtttttactacttgttttcttctatcatttattctatggagtagacaagattgtaggaatggataattatttcattatactacttctctgctcacacattagctatttttatcctgtgatactcttcctcatgtgcattcataactgtatttgtattggtgatgttaatctaatttaaattgcactctttgtatttaatattatataatgttcatttttaatggttgcaccatattcccatttaatcgatgttcctttttaattactttatacttccagacaccaggaactcagttttgaaaggctacttttgatgtgtgccacgttggctgttttgtagatagagtatccatatgtggcacatcatggcaggctgtaactgtggcttcacacaaggattgctggaagtttccacacaggaagagctagattctctttcccccatgcctgagtcatgccttctatgtcttttacttactggcctttctttactcctttatatactaaggaatttgaccaaagtaatatgtaagctaatttttttttttttgagatggagtttcactcttgttgcccaggctggagtgcaatggtgcgatctcggctcactgcagcctctgcctcccaggttcgagggat

SEQ ID NO: 22664 - DNA, 1050 bp, Homo sapiens
tcatctttctgttctttaggcctgaagtctgacacgtctcaccggacaattatcaagctgtctgtaggtgtttgtttctttctggatgctcttgaggagaagcctttattttggtttaccagtctctaggcattccttggctcttgtttcccttcctccatcttcaaaggcagctactttgcatttctgacccttcttccatagtcatgctcactctgccactcttcttatgcctctctctcctgcctttcaggttccttgtaattgtgttggttacccctggatgattcacaatgacctctctttcttgttagctgattagtgaccttaattgcatctgcaatcccagtcccccttgctgtgtaatataacatgttcataggtcttgggtactggatgtggacatcttttatgaatcattgttctgtctactactgaagcttctgcctcagagcccttacttgcttttctgtctgatcagaatactctttcacctcaaaactttctggcttctcctttaagcatattcaagtctctgttcagttttagagaggccatttccaaccaccctatttaaaatactattctaggccaggcgcggtagctcacgcctgtaatcccactactttcggagaccaaggtgggtggatcactgagatcaggagtttgagaccagcctggccaacatggtgaaatcccatctctactaaaaatacaaaatttgccaggcgtggtagtgtgtgcctgtagtctcagttactcgggaggctgaggcaggagaatcacttgaacccaggaagcggaggttgcagtgagccgagatggcgccaccgcactccagccttggtgacaaagtaagactctgtctcaaaaaaacaaacaaaacactgttctatttttttcttcttgtgctgtcttgcactgtgtcttatatatttctgtttacctgtcacttttacccccaggaatgtgatgtctaagaggatgaattttagctgttttgctcatggctgtctattcacaggctagaaggtattgttctggtacatg

SEQ ID NO: 22665 - DNA, 1098 bp, Homo sapiens
tagacaggagaatcgcttgaacccaagaggcaggttgcagtgagccaagatcgcaccgctacactccagcctgggcaacagagcgacactccatcttaaaaaaaaaaaaaatactctgaatggcttcttatttttcttaaagttgaagtctcttaaaggagcttatagagtcctgcgtggtctgctgttcatcctcctctgcgtctctgactacatctcctgtattctacctcttgctccatcttttccagccacatcatcctccctgctatttcccagacctggtaaggacattgctcgctctgtcgcccaggctggagtatagtggtgcaatctcagctcactgccacctccgcctcccaggttcaagcgattcttctgcctcagcctcccaagtagctgggattacaggtgcctgtaaccacgtccggcggatttttgtattttttatagagacagggtttcaccatgttggccaggctggtctcctgacctcaagtgacccgcctgcctcagcctcccaaagtgctgggattacaggcatgagccactgtgcccgacctggacactgcatttcttactgctgctgtaacatattaccccaaactgagtggattaaatgataaaaatgtattgtctttcagttctttgtttgaagtccaacatgggtctcactacgctgaaatcaagctgtcagcccgtccctgtttcttcccggaggctctagggaaggagaatctgtatcgttcccttatcagtgtgtaggggctgccaaatttcatagcttgtggccctcttcacagccagcaacagtgcttctctgatcattcttctatagttgcatttcccttttattctctcttcatcctttttccactttataaggaccctctaattgcactgggcccacttggataatgtagaattgccttctatttttagttcagctgatttgcaaccttaattccctctgcaaccttaattaccctttgtcataacctgacatattcttaggatgagaattagaacgtggattctttgggggttgattattctgccaactacagatacttctgcctcaaagcccttatttgccct

SEQ ID NO: 22666 - DNA, 1049 bp, Homo sapiens
ctggccaggctggtctcaaactcctgacctcatgtgatccacccacctcggcctcccaaagtgctgggattacaggcatgagccaccgcccctggcctccatctagactttgaaatgattgccttctaattacagtagcattctcttatttaaaatatttgttttatttaagtcagtgtttaagcaatagctcagcatatcccagtggtccagtgaccacacagctgagaacccttgttaagtggtacagtaaagcattctgtcaaaactttgacatttatgacatgttacctaggaaataggacttagaaaatgagtttgacctgggctttaaaaaagtatactgatgaaggtgccagaattgatgtccattagactgtaagctccatgggggcaggaactttgctaccgaatctatacaaccttaacattgactagtgcttgtaggtgtgctcaatacttgtttgttaactgaatcaaaaggagtaaatgcacaatatttgaacattgtatccaaaggaagaaacctgcgaaataaaattatttgcagaaatgaacatttgttgaaatgcagaaaaccactggatactgcagcctacaatattaatatgatattactcttttacagttgacacctgtcctctctgtagtctcttctctcaaatttggttcttattgagagcctgtctagtttcccaaaggttttataaaacataagttgaagtacctttatttttaattttatttttgagacaggacctcgctctgtcaccgaggctggagtgcagtggcataatcatggctcactgcagcctcgtcctcccaggctccatccatctgcccatctctccctctgagtagctgggaccacgggcacgtgccaccacacccagctaatttttgtatgtttggtagagaaagggtttcaccacattgcccaggctggtcttgaacacctgagctcaagcaatccaacctccttggcctcccagtgttaaattacaggcgtaagccaccacacccggccaagttgaagtatattttgtgat

SEQ ID NO: 22667 - DNA, 1064 bp, Homo sapiens
tttttgtctttttgctgaagtatttgagagcaagctagagatagtgatgaaaatgaaattagttacattgataacttactgttatctaacccacagtttgtatttaaacttactccattttcccattaaagactttgaaagtaatttcttcccccagatgagtttccagtctaattgtatgcattgcacttagttttggtttcattagtcacctttagtctagaatgattcctcagactttatttcttttttgctctcgatatctttctagagtattgagaaattatttgtaaaatgttcttatttttttgtttccttaatatttattcatgattaaattcaagctatgcattgtcagcagagatgccataaaagtagggaggcatccttctcagtgcatcataggagtcaaatgttggtttgtgggtttgtcccactagtggtctcaactttgtttttttggataaaatgtctgccaggttacctttttccttttgcacttaatactttgagactatgtagccatcttattcctcaccaaactcaccagtttttagcagctattgatgatgttctagttatctttcattctacctttattagtttatgtgttctactataggagctttcttttgtcacccatttatttattacacattcttttgtttataacaatatagactcaggttcctcccttttccttttttttttttttttttttttttttttgagacagagtctcactcagtcgccgaggctggagtgcagtggggcaatctcagctgactgcaacctccgcctcctgggttcaaacaattcttgtgcctcagcttcccaagtagctgggattacaggtgcctgccaccatgtccagctaatttttgtcttttagtaaagacagggtttcatcttgttggccaggcttgtcttcaactcctgactgtaagtgatctgcttgtcttggtttcccaaagtgctagtaggattacaggcatgagccactgtgcctggccaggttcctgcatttttaatttaagttaggtatggattgtcaaacggtgttt

SEQ ID NO: 22668 - DNA, 1062 bp, Homo sapiens
tgtgtagaaattttcttgagactggcaggtgcctcagtggtaatcttccttgtctgtgactattttatccttacatgggagacgttttctttggagactggagtccgtcatagatggcagtgacgttcctagtggcatttattattattcttattttgttgttactgttgttgtttagatacaaggtctcactctgttgcccaggctggagtgcagtggtacaatcacagctcactacagcgttgaactcctgggcaaagtgatcctgttatcgcagcctcctgagtagctggggagacacgcgtgcatcaccacatctggctaatttctaaagaaatatttttagagacagggtcttgttatgttgcccaggctggtttggaagtcctggtttcatgtatttctctcatctcagcctcccagctggctgggattacaggcacaagccaccatgcctggtcctagtggctttaattgtccactaaaatcagtttatttaccaaagatttacctaagtcatgtgaactttaaaaaaatgtgagttaactactatttttctgataaattacttaagtgcttaatttttttctttaagtcagttaaatagagctctttcatacattttggtagaaaatattacatacatatatagacacaagaacatacagacaacacaaaaagatattttcccttttccctttaaaattttagtcatgatacattaaaacagtaatatactgtgccatttagaatgtttatttttgctctttgaaagtgttcagaaacaagcagggaaaacaaaagagccaaattatttacagttgcatgtaaccaaattgacatgaaaccaaatgaagcgtgctcacaaaaattttaagccaggcttgcagagcaaacaaaatataaaaccgtgtttgcagaaaaaccaaagcaaattcagtagaaaatacatgcctcacagaacgtaagttctgtgggaaccagagtactctccaaaagaacacttggccttataccagaagaggctttccagaaaagacaaaaagtcttttgtagtcccac

SEQ ID NO: 22669 - DNA, 1068 bp, Homo sapiens
ccaggtacctgctcttgaacgcactttgttgttccattttctgtcctttcagttaatcaagtttccgtcactcagtaagttactactgaaaaatgatgaaatatttgttgaataaatgtgagagtgggtaggaaaactacttggaaatgagtattaccaataacatcttaccactttgattttaaggcattcgtctgtggaccatagctattgatgaagtaggtcttgttattttgttatgaggaaattaggcagagtttatgttattaaatactttcccgaagttattcaactgatagtaagaggtggatttgggattgaacccaagcattccttttcagactgtgtgatcttttttgtttgtttttgtttctttggtttttgttgttgtttattttctattcctttttctgagtctgtggtcttaatctcaatgatacagtcgtcttcagttatcttaaatagtaatccatatggctaccggtgagtcgttggaaatcagccttgggaatgtaggtatggattttactgtggaagacctcaaaaactgcactgatgaattttgaattttttagaaaaatcctgcaacatctcacttacttaatttcattccatgtcaaaatatgtcatattctagttatagaagtaatgaatgctcattatagagatgcactatccaatccagtagctataagccatgtgtgccctaggagcacttgaaatgtgtctagtccaaattgagatgtgctgtaagtgttaaatacacactggatttcaaaaactttgtacaaaaaatgtaagatggctcattgataattttttgtattatatgtcaaaatggtaatattttggatacattggcttaaattatgttgttgaaattaacttcacctatttttgtttttgtttttttgccttttttatatgttactgctagaaaatttaaaattatttatgtgtctcagtatatttctattggacagtgatgttatattcagaaaacttaaattacttataataaaactgctaacactttaatgtgtttccctttagtatatgctatggatg

SEQ ID NO: 22670 - DNA, 1033 bp, Homo sapiens
ttaaataatatatactattttatttattttatttcactaggtttttgggaaacaggtggtgtttggttaatgagattttgaatatatactctttacttatacaactgtacactcccaattccttccttcaaacttttgtccaattgtcaagcatttgtcgttggcatatgctataaagccacagtacattgctattatttttgctttaggagtcaagtgtctttcagagcaattaaaagttaaattcttaactgcttctggaaatcgtcattactttgcaagtttaccaaattttatatagcatcctttctgtttgaagaactttctttaatgtttcttgtactgctggttggctgctactgaattttttcagtttttgtcttaaaaagttttcattatatcttcattttcgagggatgtatttgctgggtatggaattatgtgttgttgtttttttctttctatactctttgtattctggtttgcatagtttctaatgagacatgtcctgtaattctcatctttgattctttgtatgtattgtgtctcctcacccatcccctgcctttggccgccttcaaaattttctctttattttgaatttactgcagtttcaatatgatgtgtctaggtgtgattgtttttatttttattttaaaaatacagatactaccattgaaaatccacagaaatatattcattcacctagaaactcttgtttcttactacattcttcatgtaataaaccaaaggatggaagggtgtatattttagtacattagaaaaagctcatttgcatatacttcttgaatttttcatgtgcacaaagacccactgaaagtatacacgaaaaactaacactggtcgggcgtgatgacttatgcttgtaatcccaacactttgagaggacgaggcagacagatcacttgaggtcaggagttcgagaccagcctgggcaacatggtgaaactccatctctactaaaaatacaaaaatcagccaggcgtggcggtacacatatgtaatcccagct

SEQ ID NO: 22671 - DNA, 1050 bp, Homo sapiens
atttcaacttgtaattgtttttttaaaattattcttgagatctttcccatttattttgtcctagtaaagcctttgaaatctggtgtgtatttcggcctggctatatttcgagtgctcagtagtcacatgtggccagtaggtgccatattggacagcacagatctagactaagctcccacatcatctacactggctcatccaaatactgtctacacacatacacagagcctgtcttaatttcgtcagctcccggggacacactgtatatgtgggggtgatctcacccccaccaccacattttcaacactggcccgacaatatagcatctgctgtaatattccaacaccctgtctacactgaacccatcagtaatatccacacaagctcttctagacatcattcatactgttcctcccaccattgtctatactgcttactccccgccaggcaattggtacacagattccctcaggtactgtctatactggagtccctcaacactgtcactgggtctgagcgaggaggagatctacactgactcctacccctcgcccccgaataaaaccctgtcccattggcctgcccccaaggacattgaaaggtcttcgctgtcaatcacgtatgggatggctgagcagcagcctagagcagggttatctgggactctttcctgcaggacttgtcagaaccttgaatacactgctgtgtgttgtgagtggtcattgcctatgagtgagaaaaggaggaggcattttcctgcaggacacccaagacatgcctggtccaggctacccaggaaagctagtggagaaaagcagctcctcagaagccttctccatgtccccactgaccaaggactcctaggcttctgctctctgtggcaccccatctacctagactcctcctaggcctctccagctcccgctgttttccaaatatccccgggccttttcctgcagtgtcgtgaatcccgcgtaccccaggccccccaaagcctcccagtctctgaacctctgtatccatttcctgcagaccccccagaggtatcca

SEQ ID NO: 22672 - DNA, 1182 bp, Homo sapiens
cactatgttgcccaggctggtcttgaactcctgtactcaagcagtcatctcacctgggcctcccaaagggcagggaagggattccaacatatgtggatgtcatcagttatttaaccagtccctagtagaggacacagatgtcattttccattttcaactctgcaaatgccatggtggtgtccatccccactggtcacttgtcagcagttgtccgtggaaggaattgccggtcaaaggttttcaactggtgtgatggtgcctttactgtcctgcctcaaagcaccgcaattcaggctcttgagccagatagctgcgtttgcatcccagctctgcggagcacccaaagcctgatgcttccatctcctccacctctgttcattaaaccagtgttccttgactacttactgtgtgccgggtgcaattaaccaacatacgttggtcgataaaacagaccaaatttcctccccatatagagcttccattctagtggtgaaagaaacaagaagcaagataaagtgtgtagtgtgtgtgcaatggtgataaataccatggagaagacaaagcagagaagggaatgggactgggcgccatgactcatacctgtaatcccagcactttgggaggcagagatgggaggatcacttgaggctaggagttcaagaccagcctggccaacatggcgaaaccccatctctaccaaaaaagatacaaaaattggccgggtgtggtggcatgcacctgtagtcccagctactcaggaggctgaggtgggaagattccatgcacccaggaggtggaggttgcagtgagtcaagatggtgccactgcactccagcctgggtgacagagtgagacgctgtctcaaaaaaataataattaaataaattaaagagaaggggatgggaagggtgatcatcacagttgaaatagggtggccaagtgaggtgttactaaggtgacatcccagcagaggcctgaaggagatgagggtgagctctgcgggtgcctagggggaaagcattccagcagagggaacagcatgggcaaacccatttctatccatcagtccctgcataagcaaacaccctggacacctaactggagagtttgaggaccaacaaagaggccactgtggatgcagaggcgggagcaaaggggagagtaatggaaaacgtgggcaga

SEQ ID NO: 22673 - DNA, 1912 bp, Homo sapiens
aggtctccaagaccaccctcctttcatttgctagaaggactcactagactcaggaaagctgttaggctcacagttacagtttattacagtaaaaggacagagattaagatcagcaaagggaggaggtgcacagcacacgttccacgacagatgaggcgacggcttccatctgccctctcccagtggagccatataggcagcacctgattctcacagcaacatgtgacaacatgcaagaagtactgccaatactgccaaccagagcagctcactcgagatctttgtgtccagagttttttgtttgtcttgagacagggtctggctctgttggcagactagagtacagtggtgagatcacagttcattgcagccttgacttctcaacgccaagtcatcctcccacctcagcctcctgagtagctatgactacaggtatgtgccaccacgtctggctaatctttttattatttgtaaagtcgaggtttccctgtgttgcccaggctggtcttgaactcttggctccaagtgatacttctgccttggcctcccaaagtgctgaattaagcagctcaccatccacacggctgacctcatacatcaagccaataccgtgtggcccaagacccccaccataaatcacatcattagcatgaaccacccagagtggcccaagactcccagatcagctaccaggcaggatattccaagggcttagagatgaatgcccaggagctgaggataaagggcccgatctttctttgggcaaggttaagcctttactgcatagcagaccacacagaagggtgtgggccaccagagaattttggtaaaaatttggcctctggccttgagcttctaaatctctgtatccgtcagatctctgtggttacaagaaacagccactgaccctggtcaccagaggctgcaattcaggccgcaagcagctgcctggggggtgtccaaggagcagagaaaactactagatgtgaacttgaagaaggttgtcagctgcagccactttctgccagcatctgcagccactttctgccagcatctgcagccagcaagctgggactggcaggaaataacccacaaaagaagcaaatgcaatttccaacacaagggggaagggatgcagggggaggcagcgctgcagttgctcaggacacgctcctataggaccaagatggatgcgacccaagacccaggaggcccagctgctcagtgcaactgacaagttaaaaaggtctatgatcttgagggcagacagcagaattcctcttataaagaaaactgtttgggaaaatacgttgagggagagaagaccttgggccaagatgctaaatgggaatgcaaagcttgagctgctctgcaagagaaaataagcaggacagaggatttgctctggacagagatggaagagccgggaacagagaagtgtggggaagagataggaaccagcaggatggcaggggcaaagggctcaagggtgaggaggccagtgggaccccacagagttggggagataaaggaacattggttgctttggtggcacgtaagctccttgtctgtctccagcacccagaatctcattaaagcttatttattgtacctccagcggctgtgtgcaatggggtcttttgtggaaatcaaggagcagacaggtttcatgtgtactgtcaccacgtgggatggaaccagaggcatggaagcaagacgctaaatgaagagggccataagggctgggattcccaggcaccttaggaacagcttgtctttttttttttcctctccaaaaaaaatgtttaagggacggtgtctcctgtcacccaggctggagtgcaatggcacgatcatagctcattgcagcctctaactccggggctcaagcaatcctcccacctcagcctac

SEQ ID NO: 22674 - DNA, 1029 bp, Homo sapiens
attatttaattcacacagcaatcctaggggtgggtactttcattatccccattttacaaaacaagaaacagctacagagttgcaaaaccacttatcccaagccaggccgctgataagcagcagagctgggattggaaccccggcagttagggcctaaccaccctgctcctctgctgagtgtttgttgaatgactgccggtgaggagtgacgcaccccctctcctcctctccccagccaagcccaagaaccaagctgaggcccagaaggtcacgttcagccaggaccctacgacagtggccctctgcatctccaaagagggccgcccacctgcccggatctcctggctctcatccctggactgggaagccaaagagactcaggtgtcagggaccctggccggaactgtcactgtcaccagccgcttcaccttggtgccctcgggccgagcagatggtgtcacggtcacctgcaaagtggagcatgagagcttcgaggaaccagccctgatacctgtgaccctctctgtacgctgtgagtgtatcgggggtgacccctcccccatcaaaactgcctacactggcttctctaaagcactgtctacattgtctctgaatgttgtctacgtgggttccctgaagccaaattctgcactaccttcctgccattgtctacactggctcccatgggcaaatctacatacttccccctcattgtctacattggctttactgggttcctgcatgctgtgcctagtctgtggtaacctgggatgggcttgcaagagccagtttgatacatttctttccaattccacatccaatgaagtcttctcggtagcttgaaatcaaccttggggaatatttacaccaaggaaattggcaaaccctagaaatgggggcttcttttattccccagagagttggtttaccagcaaagagctgcccccaacagtgtcttttctggctcccatggaccccggttgacactgcccctggaccgttagatcaatcatgctgggccatgtccac

SEQ ID NO: 22675 - DNA, 1309 bp, Homo sapiens
agggccagagacccctcctgtcagagccacagctggcaggatccacagccacagacactccctgtgctgagaaattctgttgcagagatgcatcagaatccagacactcacctggatggtaaccctgcacgctcaaacccattgtcaccaagacacacacccaggaggacagtggcaccagccaagatagactgaacgaagccagatgacacctggaaagggacattctttttttttttttttgagatggagtctcgctctgtcgcccaggctgaagtgtagtggcgcaatctcagctcaccgcaacctccgcctcccgggttcaagcaattatcctgcctcagcctcctgagtagctgggactatatgcgctcaccaccaaacccggctaagttttgtatttttagtagagacagggtttcaccatattggtcaggctggtctcgaactgctgacctcaggtgatccacccgcctcggcctcacgaagtgctgggattatatgcatgagccactgcgcctggccagaaaaagacattcttagaaacacgccagggcgacggtccatgcagcacacctgtgcaaacacgcaatgtgcaggccccccagaaacatgactgaaggtgtagggacaaactcccagacaggggctgtccctgtcatgcagacagactagccacggagggacagaagcagacccccttactgagtcataatcttagaatgcacacacacttgcagggacacccgagggaaaacagacacctcttcaggaatccagatacagccagggagataggacacccctacgggaaacactgtcacagacagcaaacccagagagacagctgtcccgctctgggctcgcctggcgcgtgaggatgcacataagtccccggaggaagacgtcacacagacacgctgggggcaaaactaatccaggacagcaacggctgcacacggaggaatgtcatccctcactcacagaccctcagacggaaaatcaaagacatcctgggaggagcttcttcccaggaaccctcccgaaactccccgaaactcctccgaaattatccagaaagtccgttagggagattctcattcaacaaatatgtgtttcctgtttgctaggcactcttgctgaggttgggaatacaatggtgaatgagccacagtccctgccctcagtagcacacccaggggagggtcagctccacccgcccagacagacaccgaactggaaatacacccctaacctctaccccagatacacctgacaagctgatcccctgcccacacacccagcaggt

SEQ ID NO: 22676 - DNA, 1040 bp, Homo sapiens
aaacctttcattcccgactccagcgcgtggaatctaggacacccctttcccagtgatgctcacctcagaatcacctgagggtttttcagaatgcccaagcttctagatcgaagttgttagggatggacttgaacatctggcatactgttctgcagcttcacttctgctccctgaagctaagagatgtgttgtttgggatcgactctgccaccaacttgttagatgactttgattctgcccatacgggtttcacagaccatctgactttcctggtcccttcatccctcaggttgaggccccaggcttggcctcaccacaatgtggcacgaggctcggaagcatgagcggaagcttcgaggcatgatggtcgactacaagaagagggcggagcggagacgggagtattatgaaaagatcgtgagtaactggccttttgtctggggtgagggaccctgggttggggggcacagctggtcatcctggtaaaatctgggcttggaagtatgtcaagacaagaggctcatttcctcaggagtatattcattaatcttttcttgaggataatcattggtgggatcccaagggcttctgtttgttgtagcatactgtgtcgtttggtgtggcctcccagtgccgatccggtgttagcaagaaaaagggaagtctctgtaaccctcagagcagtcctgacgttagactggccacctccagaatgtctgtttcgcttattgctgtgttccccattcccagaagagctcagccactcttgagatttggcttggcacacaataggagtgagtattaagttggcctggcacagtggctcacgcctgtaatcccaagtggatcacctgaggtcacgagttcgagaccagcctggccaaaagggtgaaaccccatctctactaaagatacaaaaattagccaggcttagtggtgtgtgcatgtagtcccagctacttgggaggctgacgcacgagaattgcttgagcccgggaggaggaggctgtagtgcatggagattgtgccactgaactcca

SEQ ID NO: 22677 - DNA, 1036 bp, Homo sapiens
gtctctactacaaatacaaaaaattagctgggcgtggtggtgggcacctgtactcccagctactcgggaggctgaggcaggagaatggcatgaacccgggagacagagcttgcagtgagccgagatagtgccactgcactccagcctgggcgacagagcgagactccgtcccaaaaaaaaaaaaaaaaaaaaaaattttttccattcatacgtatatgcacatacccagctctgtgagactggggactaattatatttgggtcacgtttgtaccctagggttgggtccatcaaatatggtttgaaagaatagatgaataaaacaatattaacaatagtaattaaccatttaattgatccttcgcaggcacccccaggccatgtgagagatgcaggattttttttgaatccccacagtcacctgtgagacagagaccgctcttacttccactcagcagagaagaggaagctctgagagctccttgcttacctctgccacccaggaaggaaccacggggctaaagggagaactcatctccgatagtgtcagaaagatgtgatcatcaaggcaaggcctgggtctctgttggtcatagttgaggccccagaagtggcctaggaacacagcactcaggaatgaatagctaccttttttttttttgagatggagtctggctctgtcgcccaggctggagtgcagtggcacgatctcggctcagtgcaacctccgcctcccgggttcaagcaattctcctgccttagcctcccaagcagctgagactataggtgcccaccaccacgcccggctaatttttgtatttttagtagagacagggtttcaccatattggccaggctggtctcaaactcctgactgcaagtgatccgcctgccttggcttcccaaagcgctgggattataggcgtgagccaccacacccagcctagctgccatttattaagggcccatggtgcgccagacccagtgctcaccagcttggcatagtagtcctctgaacaggcctgcgaggtaggtatt

SEQ ID NO: 22678 - DNA, 1400 bp, Homo sapiens
gatgttttcccgtaacatttccactcctcccctgctgaccaggaagtagtcttatgaacagccgtgaggaaggctaagaggtgtagactttattttgggtcgccctgaccagatatatttggagttctgttactgttgtagcaaagggaatagatgttggttgccaattaatggtttgccactaacagtggagacaagagcatgtccttcgatgttgttggagtgttggacacatggaccactgagagcagcctggccagcgtcgctatcgctcagtaaatattagctcttgttattgacattactgttgctgatagaactggagtttggatccaggtggagggatggtgcagaggaaggaaggctggagctgagactccaggccccctccctgttagcagggaagcttgctgcattgtattccccctcaggacagtggtgacgaccaacccctctcactggataatggggaagagctcaaagaaccaatgtctatgggtgctttgtggtgcaggcctgtacaagcggcctttgtccctgtatgtgaacgtgacctgcattccgatctgggctgccaagctgtggagtatggctgggccgtggctgatggctgctttgaggaggggactctcatctcagccttgggccgagagcagaggctgtggagcgagtgtcagtgaagctgcggtagattgtggcaggctgaatgagtatgtccagatgcagttggtttctgtcttcctgatttgtcgttggtgcctgctttctctccctgtcttcagtcccaagcagactccggttctgtcattgcttctgtccttgtcaactttcctttttaatcagtggtttggataaagaaacagaatcctctgttgatacggaaataagaagtaaacaggtcgcagctcaggcgtcgcctcctccaggaagctccagactgacccccaagtctgggtcaggtgttccccctgtgggcccccatctcagcgctgtccactctaggttgtccttgtatggggacaagtctgtgtcccacactggactgtgagcccatgagggcagggccagggctatctcagttactgccataccctagcacaaggtctgcttaacagttgaatgaatgaatgaatgaatgagtaacttcatgaactcctctgacacaatctgatcctagagacaggataatccagtggttaagagttggttttgggccgggcgcggtagctcacgcctgtaatcccaacactttgggaggctgaggtgagcagatcacctgaggtcaggagtttgagaccagcctgaccaacatggagaaacgtcatctctactaaaaatacaaaattagctgggcgttgtggcacatgcctgcagttccagctacctgggaggctgaggca

SEQ ID NO: 22679 - DNA, 1027 bp, Homo sapiens
gggaagaaatcagagagggacaggccagcacctgtgagggctgagtggttgggagtggggtggggggtggggtgcggcccaacatgtgtcagcaaatctcctggaggcagagcccagcctggaccagactgcatccacacattgaaagatgaccaacatcattagccatcagggaaatgccagtcagaaccacaagataccacttcacccacactaggctggctgacatggaaaggacagactataacaagtagtaggccaggcatagtggctcatgcctgtaatcccagcactttgggaggccaaggcaggcggatcacctgaggtcgagagttcaagaccagccagaccaacatggagaaaccccatctctactaaaaatacaaaattagctgggcatggtggcgcatgcctgtaatcccagctactcaggaggctgaggcaggagaatcgcttgaacctgggaggtggaggttgcagtgagctgatatcgcaccattgcactccagttgaagatcctgatttctctatattcttgtcactacttgtgttttgttttgttttgttttgttttttgtttttggagatggagtctcgctcttgtcccccaggctggagtgcactggtgggatctctgcttattgcaacctacctccacctcctgggttcaagcgattctcttgcctcagcctcccaaatagctgggattacaggcgcctgccaccatggctggctaatttttttgtatttttagtagagacagggtttcaccatgttggccaggctggtctcgaactcctgacctcaggtgatccgcctgcctcggcctcccaaagtgctgggattaccggcgtgagccactatgcccgacccactgcttgttacagtctgtcctttccatgtcagccagcctagtgtgggtgaagtggtatcttgtggttctgattggcatttccctgatggctaatgatgttggtcatcttcccatgtgcggatgcagtctggtccaggctgaagtgtccacacc

SEQ ID NO: 22680 - DNA, 1070 bp, Homo sapiens
tcgagccatggcccgcaagatccgcatgaagtaagaccttgcccctccctgtcccatggccacacctcctggcctgcctggccttcccaccatgggctgctggctcaagccctgcccagctccctgtgggtggatgaaaggcagagatccctgcctggccctcggggctgtgcccagctgcctctcttgctcctctccctgaatttcctcccaccatttcgacctgcctcccgccaccgcgacctcctcccagctcttccagcctccaagtgccagtcacctttgctgtttttttggcctggcaagctgttcctgataccccttccccactcacccaccgccatgggtctttctcctgtcccagcctcagtttgcttatctcctaaatggagatacagtcactgtcccacctcacaggctgttgggaggatttgacaagatcaaggccaggcacggaggaggcacccagtagacgtagccattgggttgccaagcctggccactgtgacggagaccatttcaacactcactgtgtgcaggtgccccagtgcggcaggaaatgatgggactatcctgcctccctctgttccccaggctttcctaggaaggggctgggattccagtcagccccgccagctggggtccctctgaacctggggctccctttccaagcggggattggtggcagtaccggcccccttggtttactgtcttcctcggagtagggtgttggaagcacctgccctccctgagttcagtgtgtccagtgttcccggccagatgctcatgccatgccttcgcagggagcgggaacgccgagagaaggagagagaagagtgggaacgccagtacagccggcagagccgctcaccctccccccgatacagtgagtgtccccaccaggctgcagggctctggggctttaaagaaaagtgtcaagcagggttaccaaaaaaaccatagtacagccgggcgcggtggctcacgcctgtaatcccagcactttgggaggctgaggtgggtggatcaatcacctgaggtcaggagttcgagaccagcctgaccaacat

SEQ ID NO: 22681 - DNA, 1025 bp, Homo sapiens
cccaggctggagtgcagtggcgtggtctcggctcactgcaagctccgcctcccgggttcacgccattctcctgcctcagcctcccgagtagctgggactacaggcgactgccaccacgcccggctaattttttgtatttttaatagagatggggtttcaccttgttagccaggatggtctcgatctcctgacctcgtgatccgcctgccttggcctcccaaagtgctggtattacaggcgtgagccaccacgcccggccacacaagaatctcttgaacctgggaggcggaggttgcagtgagccgaggtggcaccactgcactccggcctgggtgacagagtgagactctgtctccaaaaaaggaaaaaaaagaaacaggacaatttcaatcacctcccttctgtgcctggccccagggtcttgggtacccaacacttgtcactcagctcagttagtcctcactaggtttagagaggagaggaccaagccacagggagtggtgcagctgctaaaacctaggtcctcctctctcaggtctgcacccacaaggccagcatttccctatacacattcaacatcatagcatagcgcttcatatgtcccagacatgtgccaaacatggtaggttagttaggtaatttagtccccatgcccgccctgtgagttagggctctgttttacagatggggaaacagaggcacagattagtcaagccatttaccccaggtcacacagcaatactaacaataagagcagttcactattatggagaacctagaatgtgccaggccctgtctggcaggagcctgttgaatcctgataacagcataggcagcaattggggctatttttccatacaatggaagagaaaactgtctcttactgatgtcacacagctaaaccggcctgggatctccactcttcattcattttgttttttgtttgtttgtttttttcgagatgagtcttgctctgtcgcccaggctggagtgcagtggcgagatctccgcttactgcaacccct

SEQ ID NO: 22682 - DNA, 1035 bp, Homo sapiens
ctagagtgctgtggtgcgatctctgctcactgcagcctccgccttttgggttcaaatgattctcctgccttaacctcccgagtagctgggactacaggcgcatgacaccacacccggctaatttttgtatttttggtagaggcggggtttcgccatgttgaccaggctggtctcgaattcctgacctcaagtgattcgcccaccttggcctcccaaagtgttgggattacaggtgtgagccaccgcacccggccctatccacacatttttgcatctattccttttatatttatttacttgccagtctacagtaaggattatattttccttctcttccttatttattcatttatttattattggtatggattctggatttctgttttatccagtgggttataatctgtaactatcattattgtattgttcaaataattccagatttggccactgggagccctttcaagctagctcatgtgtgagtgggaatctatctagaagatagaatttcctgatggattgggtgggttgtgtgtgagagaaagctggggtttattcttttttttagagacagtgtctcactctgtcacccaagctggagtgcagttgcacaattacagctcactgcagcctccatctcctgggctcaactaatccttctccctcagcctcctgagtagcccagctaatgtaaaatatatatatatatttttagaaatggggtctcgctatattgcccaggctggtctcaaactcccagcttcaaagtgatcctcctgccttggcctcccaaagggctgggattacaggcatgagccaccatgcctggccaggttcatcttttggcaaatatttattgcctataagttgagataaaaacattataaaagcagacaaaggtccttgccttcacggggctcatgtttttgtgcatgtgacacttttgtttctgatccaagccattgggggacgatggcacagattttaggagggtggatcagtctggggcaggtgcagtggagctgcctggtagac

SEQ ID NO: 22683 - DNA, 1012 bp, Homo sapiens
tattatttttaattgagacagagtcttactctgtcacccaggctggagtgcagtggtgcaatctcggctcaccacaacttctgcctcccgggttcaagcaattctccagccacagcctcctgagtagctgggattacaagtgcgcaccaccacacccagctaacttttgtatttttttagtagagacaaggttttgccttgttggccaggctggtctcgaatcccgacctcaggtgatccgcctgcctcgatctcccaaagtactgggattacaggcatgggccaccttgcccagcccatttatcttcttggcatatggaatatgtatgtaatgtacatgtaagttgttgaagtgtaatatgttgaagacctgtgagcctccctcctaatttcagagtgagaacattgccattaactcacctctgcctgtgggtgggtggagggagcccactgtcctgactgttgtcattgtcattctgtgttttttattttttgcggggggcgggggtggatgggtgagggacaggtgtgtcaggttcaataaaaagggaaagggtcatcaggtggcctttttaaaagttttatcaaccatgtctgcatgctgaaaagcatggtgtttcgttctgcctgtttttgagtttcataaacatggtattgtgaggaaattcctgggtcttggtttttcttttctttctttttttttttcttttgagacagtctcgctctgtcgtccaggctggagtgcagtggcataatcttggctcactacaacctctgcatcctgaattcaggcgattctcctgcctcagcctcccaaatcccagctgggattacaggctcctgccaccacacctggctaacttttttgtatttttagtagagacagggtttcaccatgtctgtcaggctggtcttggaactcctgacctcaagtgatccgcccgcctctgcctcccaaagtgttgggattacaggcatggattccttctgatacatttcacctggagtgctg

SEQ ID NO: 22684 - DNA, 1023 bp, Homo sapiens
cctatttcaggccccaggaggccttgtgtggttctgtccctcccctgccccccaactgaggccgtggcattgtgggagcagaggacggaactggacacctagtgaaggtgcgtagaaggcatttgccccaggctggctctgggctgagcacacccattggtgacctcatcacgtgcacaccttcgctgcctgagtgcagggcacccaaaagcctgccatagacaagaagggaccttccctgagttcacccagctggccctgtctgagttggggactcacacctgtgctgactccagagacccaccccagccccaccttcctgttccttcagtcaacacatatttattgagcacttactgtgtgcccagtaaagacccttctggggatatttcagtgaacaaaaggggtaagagttctcccctcattatagcataaatgcacagatcagtacgcttcctgctgggtcatgagaagtgccacctagagaaggaagcagggattcatagtgataaaggggctgactttttggagggtggccagggaaggcctttgaggaggtgacttgggagtgaagacctgcaggcagggagggaaggagccgttggggtgtgaggaagaggggtgctctgggcagggggtaacaggtgcaaagaccctgaggcactgtgtccagatggctctgccactggcaaggatcaggacctcaatgactgtagcagcccctccccagcacccccaagtgaggtctggccatgcagctctcccatgtgcatgctttgcctcccgtgctccataagcaggaccttgacccctccagcctccttgctgacccctctcgtctcacactccaggtcccgatctgtgcagctcactgccagatgcatcaggcagcctcctgcacctgcactttcttcacaaagttccctctgccagagacgccttttgcatctttgtcatctctgagacttttccagatgcctcccgctgcagctgatcccagcctggccatcctccccgcctcca

SEQ ID NO: 22685 - DNA, 1057 bp, Homo sapiens
tttaatgaaatgtccagaaaaggcaaatctgtgtagatagaaagcccagccctcccttccgcatggtggcggctgtggccctccagggaccggggctgcagctgttgggtttgggctacgtcccttcattcatgctgggagccactgcctgttagcctgggaacacccgggaccaggcctgtctcttccaactgcttctgtgtcctgcgtcaaggggccgggccctgaatagcgtacggcgatgtttagctgttgagagtgttttgggagtggggatcctgagaggcacgtggcattgtagttgagagctgagttcaaagcccggctcgcatatataccaggtgtgtgatcttgggcaaggttgtttctctgagcttggtttcctcatagggttgaagtgaggattcattctttcacccaaaaatacaaaaatacaaaaaaaaaaaaaacaaaccaaggaccaagtacagtggctcatacctgtaatcccagcactttgggaggctgaggcagaaggattgctgaagcccaggagttcgagaccagcctgggcaacatagtgacaccccatctccaccagaaataaaaatgatctgggcgtgacagtgcaagcgtttggtctctgctgctcgggaggatgcttgagcctgggaggtcaaggctgcagtgagccatgttctcaccactttacttcagcctgagcaacagagtgagaccctgtctcaaaaacaaacaaaacaccgagacagtgttggagacatggtggtgaccaagacagccccagtcctgtcctcctgggctcccgggctagtaggggaggtggctgatgtgtagaaagattgtgtgctgttcattgtgtatttgtgtgaaggtgcttggagcggaggtgaggcgtggagggcagtggtgacttggggtgggggtgcccaagggcactttacctcgggcagtggccagcggggggcctgaaagggaggacagagctcaggcagcctgttgttgggggagggctgaagagggcagtatgggcagaggccttagggcgggagtgggtgga

SEQ ID NO: 22686 - DNA, 1092 bp, Homo sapiens
ctacagggagtggccctccgcgcgtgactcaagcacttctatttatgagcccagcactggaagactctgggggtgaatgggaggagggggagcaggaggaggaggaggtctccaaggacatcaggcgcctgttctggaggggccaggcttgccctgcggagggcaggcgtcctgggtggtggtgggatggtcccctgtggccccgggcacagggccgggcaggcagcctggtgccggagaggcggtgcgtgctggtggtggttgagatgcacagaacagccccagacagcgcaggccgggcagggtggggggatgggagcagaggatcagagctttctttttctcaagtgcaataaatctatcagggagctggggcgggagcagccggcactccgggaccctgctgtccaggccactggaggctgcgccctgagaggcactacagccctttgggggcgagtggcatgggtgtgggtgagggtgggcagagggctggggctactcctgtcggtgcaactctgttcacaccttttctaataaactggggctgggttcactttgcccaacgtctgcttcgtgcggatcctggaggtggttgctgggggtgggctgggtggaggccatcacagctcctggttacagagcatctgccagggcactggtcaggcattactgcgtcttcccccacagtcccgtctattctgcatccatgctctggtgtctcgtacggtcacctcccagccaggcgagtttacacccatcctttctgcagggagagacaggccccagatacctcctggcttcaggtctagggtctcaggatgctggatatggagtggctctgcccagtcgcccatcgctcaacaggaacagatcccagcctgtccctggcagccccaggtgttgtgcaggtgggagtatgccccgggcccagccagcactgcaggagcctggtgggcggcttgttcccctttgccagcaggggcctggggggccatgggggtgctgttgcggatttctgagaggtctgtttttccctttaggaaaggggggagcaggccgggcatggtggcccacacctgtaatcccagc

SEQ ID NO: 22687 - DNA, 1024 bp, Homo sapiens
cctggctcagcactcaggaggaatcagcaggccggggttcgcatcccagcactctgctccatctgccctgtgaccttgggggagggactccccctgcctgagcctgggtgtccccgtctgaagactgcagatcataattggacccacattggaggccagggtgagggcacggcaggcagtggcggacgcgtggttagagccctggccgtggtggttggaactgcccagctgtggggaggttgtctttctgcccctgtgaatggactgtgtgaccttcacatggcaccttccctctccaaggctcagtttctctgctggaacatggagtcattccctgggctactgcaggaattaagtgtaggcgagttacctgtttacacaggacttggtccatagcatgagctgctttgtagaaatggttcatgacccagcgtggtagctcacacctataatcccagaactttgggagacccaggcaggaggatggcttgagcctgggagctgaagactagcccggacaacatagcaagactccatctctacaaaaaaatttaaaaatcagctgtgtgtggtggtgcactcctgtggtcccagctactcaggagcctgagatgggaggatttgcttgaacccaggcagttgaggctccagtgagccttgattacaccactgcacttcagcctgggtaacagagcaaggccctgtctcaaaaaaaaaaaaaaggttcaggtgtgagaggcagtgtggtattgtgacagagaagagcatcaagtctggtggaaactatcgggcacggtggctcatgcctgtaatcccagcactttgggaggccgaggtgggcagatcacctgaggtcaggagttcaagaccagcctggccaacatggtgaaaccccctctttactaaaaatacaaaaattagacggttgtggtggcgggcgtctgtaatcccagccactcgggaggctgaggcaggagaattgcttgaacccaggaggtggaggttgcagtgagttgagatcgtg

SEQ ID NO: 22688 - DNA, 1031 bp, Homo sapiens
ggaggccgaggcgggtggatgacctgaggttgggagttggagatcagcatgaccaacatggagaaaccccgtatctattaaaaatacaaaattagccggatatggtggcgcatgcttgtaatcccagctactcgggaggctgaggcaggagaatcgcttgaacctgggagggtgagcagagatcgcgccattgcactccagcctgggcaacaagagcaaaactccatctcaaaaaaaaaaaacgaaagtggaaagggtggtagagggggctgaggagtttggaaaatcttgctgtcagtagggagccattgagtgttgagttggggtgggggtgttatggttggcacatttgcatagttactgaggacaggttaggaggggccctttctccctaatgccctacactgttcccaaccattatagtgaagctctttgaggtgattgagactgagaagacgctgtacctggtgatggagtacgcaagtgctggtgagccgcccaccctctccgccctgcccctgtgccacctccccctgccgctgcacctgaccctgaccccgctcggcctctgccctgcaggagaagtgtttgactacctcgtgtcgcatggccgcatgaaggagaaggaagctcgagccaagttccgacaggttggggcagggctgagggtggggctgactgggtgcctgggtccctgggagggcgtctgagagctgggcatggtctgggctgtccagcgacctgggggcggggcttaagtctgggcaggggtgaaggtgcagagctgggtgtgctgggcatatagttgcccagatgtgagggcatccggatgtaggtttgcaggtgccccgttgggtgggtgagaggatgtttgggcatgaaggcgccccggtgggcaggtgttgcatgtgtagggcatgtgggtgtgcccagcgcgtaggtgtgtgggtgatgggggcacgaaggtgccagggtgccaggtgtgagtgtgccggagtgtgattcaaaagatgtgtgggcagtagctatgt

SEQ ID NO: 22689 - DNA, 1031 bp, Homo sapiens
caggagttcgagaccagcctggccaacatggtgaaaccctgtctttactaaaaatacaaaaattaaccgggtgtggtggcaggcacctgtaatcccagctactggagaggctgaggcaggagaatcgcttgaacctgggaggcagaggttgcagtgagtcaagattgtgccactgcactccagcctgggcgacagagcgagactctgtctcaaaaaataaataaataaaattgaatgtagtaatgattgtgcaactccgtgcatatactaaaagccatcgaattgtgcacttcgcttcaaacaaaacagttcctgtcttcccagactaacattcctactggggccaggcagctaacaaaacaataagcaaactagatatgatatcagatgctggcctgtgctatgctggggggaatactgtaaggggatgggaggtgtgggctgagttgttgcttgctttttttttttccccctttgaactttttattttgaacgattgccaatctacggaaaagttgcaacagtagagcaaataacacatggtatgtttcaggagcttcacaatcgctggcctgtgtccacatttgctctatctgtctgtatttgcacatgatctttgctgccctcatcggcattgatggcgcatttgacagttagttgcagacgctgtgtccttttatccctaaaggcgagagcgggttatctcctgagaccaggggcgttttcctgttgacggtgacatacaggaaatacagcagtggtataatcctggcctctacgccatggcccatactcagatttcatccatcatcccaggaatatctttggcagctatttttttttcccagtcggggatccactcgggtccctgcgttgcatttagctgcgccatctcttgtgtctcctttcatccggaacagttctcagcctctcttttgtctttcatgacattgacattatcgattagttcaggccagttaattttgcagaacgtccctcaatttgggttgcctggtgtttcctctcgattg

SEQ ID NO: 22690 - DNA, 1029 bp, Homo sapiens
gagccatgatcaccccactgcactccagcctaggcatcagaacaagaccccatctcaaaaaaagtagaagggaggaggcattaaagagaataaatcagtgaaggagaaagaagaggtacaataaagcaacaaaacctaaagttggttttttgaaaagattaataaaatcagtctgggcgtggtggctcatgcctgtaatcccagcactttgggaggctgaggcgggtggatcacttgaggtcaggagtttgagaccagcctggccagcatggtgaaaccccatctctaccaaaaatacaaaaaattagctggatgtggtggtccacacctgtaatcccagctactcgggagactaaggcaggttcacttgaatctgggaggtggaggttgcagtgagctgagatcatgccattgcactccagcctgggcaaaatgagtgaaactctgtccaaaaaaataaataaataaataaaatccaatggacccctggtaaaaatcaattaaggaaaaaagacagcaaacatgaatcaccagtatccacaatgaaaaggggaactttgttctaacattaaaagatagtaagatgatattaggaactactttgtgccaataaatttaacagcttagatgaaatggacacattactttaaaaacacactgtatcaaaactgacacaagaagaaatagaaaacctgaacagtcttatattcttgttaaagaaattgaattcgtaactgaaaaccttccctataaagaaaatttttggcttggatgactcccaccagtggaattcttccaaacacttaaagaagaaataacactaaccttagacaaacttccagagaatagaaaaagagggctctcttcctaacatgtttatgaggcagcataatcctgatattccctgtgttcccagagctcacagcccagtatgggatggggacatatatgagaacagacattgacagcacagtgattgaagctgcagtggggagcccaggggcctgtgggaacccaaaggaggaggca

SEQ ID NO: 22691 - DNA, 1047 bp, Homo sapiens
actggcccatgaggctgcacccctgcccgccgggcggccccgccccaccaccaacctcttcaccaagctgacctccaaactgacccgaaggtgagctccgcggggatggcaggggcagggcggggcggggggccgatgggacctaacctgtcttccactctgctctgtctcctgtaccccaacatttcctcttcctcctcctcctcctcctcgtttcctcctcctcctcctcctttcctcctcccctgtcacccctcacctccctcctcacactgcagggttaccctcgatccctctaaacggcagaactctaaccgctgtgtttcgggcgcctctctgccccagggatccaagatcagtaagtcccgtccatgccctgttctcgctggctctgcctccctgcctgcatgtctgacctgtgtgtgcgggcattgggagggggctctgtggatgtgagggtctgtgcgtggggtctggttgttcatttactcacagaagcacagcctatggagccagactcgggggttcaaatggcagctctgccaagtgaccttgagcaagtcactcaaggtctctgggcctggttttcctcttctgtaaaatgggtatagtaataacaatacctgtctcctagggttattgtgaggactaaatgaagtgacgtatggactgagcgtagaacattgccttggaaagtgctttacatgtgtattagttattaattgctattattcattgagcccctactgtgtgcctggcactgtcctaggccctgtagtagagggtgagcaaaatgtacaaaactcctgccctggcagacccaacattctactaagggatctagacaaaaaacaaagaaataagtaaaatatacttactatatagactgctaggtagtgcgaagtaactaagaagaaaaatagagtaggagccaaatttggtggcttatgcttgtaatcacagcactttgggaggctgaggcgaggggatcacttgagcccagaagttcaagaccagcctggacaacgtagcaagatcctatctcta

SEQ ID NO: 22692 - DNA, 1030 bp, Homo sapiens
ctatgtgcagggtggaagggagggaagttgacaggtcagaagatcaggaaagaggtcggggctggacagatggggagagcgcagatagatttaagagagtcctgtgaggcaaagtgggcaggacctggtaacaggtgtctggactgtggctttggctggctcagaaggtccccactggcgtgtgtggtctatgtagcctctgggtgtggagctgggatcttcaactggggacagtacagtaaagaacatcacagcatctcacaggttctgcataccttaatgtttagaatctctcctaaccttccttgtagtaatctccctgggaacttttggggacatccctaggcctcaatttcccctctgtaaaacagagggcagattgaactacaagggcccttaatctctgtgactcttgaggtttgaaaaagcaccttaggttcctgagggctttgtcggttcttccatttactcccacctcacttttttttttccctaaaacgtttgtcttttggggcccaccgactgtgtccttgttaacgtagacattggcctgtttgactgggtggaggtgattgacgtgcccaacacccaatgcatgttcagctactgcttgacttctattaactcttctccctccaccaattgctctaccacacctctttcctgttccttcctgggactgagttctccaaaaggcctatccctaaagacttcatggggatgctcagactcacagattggagagggaaacagcttggtcaaagacattgaggtgggaattggagggtgtcaggtgtgaaagaatcagaggagtaatggggaaagaactggaaaggtgagcctccagcaaatggtatgcatttcagtgtggccttgagttgcaaaataacagaaaagctttctaggagaaatggggagccatggcaggttcttgagaaagtaagggactggcagcagctacagagggatgaagtcagacgggacagaaggaggccactgagaagcagaatataggtagatgtgacgagct

SEQ ID NO: 22693 - DNA, 1049 bp, Homo sapiens
ctatgtgtgctagaaaaccctttgggcttggagagtgggagctcggatgggcgtttcaagttctccaccaggctgtgggaactcagatgggcgtttcaagtaccccactagggggtactgaaaaccttcaagtttttcagttccccatagaaaaggggtctaggctgacggtttctaccccctcctctccaaggcggtccccgggttcccaggagtctgtaggtccagacttcggtgacactgacacttccgcccagcgtagctctagggcaaccgcccgctcagcaaacaccccccccttccacctttgctgccccaacaacagtcaggggaggccggggaatcacttaaggggccccgcccaccaccggagttccacccactccgcgtgcctctccctccccccagatcatcacgcctgggagttgcgggagcgggtgcgctgcctcggagtcccgcgtgtatacggctccccagccgtctgcccctgtgtgtgaatccctgaggcggggtgacgctggggttggagtaggagggcagaggtgctgaccttgccctgggaccctccaggcctgatcgcccctgcacgaaccagacccttcgccgccctcacgatgactacctctccgatcctgcagctgctgctgcggctctcactgtgcgggctgctgctccagagggcggaggtgaggaagcgaggagccagaggagctccaggcttggagggaggtatggggacggttttagggcttccgtcgtcagggcgctgtcgctcacgcctgtaatcccagcactttgggaggccgaagcgggtggatcacttgaggccaggagttcgagaccagcctggccaacatggtgaaactccctctctactaaaaaaaatacaaaaattagccgggcgtggtggcggccgcctgtaatcccagctactcggaaggctgaggcaggagaatcgcttgagcccgggaggcagaggttgcggtgagccgagatcgcgccactgcactctaacttgggtgacagagtgagactctgtctcggggtgg

SEQ ID NO: 22694 - DNA, 1040 bp, Homo sapiens
ggtagcccctgagcttctcactctgactccaacagggtgagcttgctatccttgtggcacagggccttttgcattgtggatgatggagcggctcgtatagtccataagttttgtgcgtagctgtgtaccctgtccctgtgagctggttctgcccggcacctcggtgacctcgaggaaagaagctgaggtaagacctggcctgcctggctcctcgacttccttcctcagccctcaaattctggctcccacctcactctctaaatttatttttattttaaatttcattttagagacagagtcttgctttgtcacccaggctggagggcagtggcaccatcatagctcactgcagactcgaactcctgggctcaagggatcctcctgcctcggcctccaaaaatggtgagattatggacatgagacactgcactgggcctattgtgtatcttgttggcctaaaattgaaacatgccttgtgagcgtttactgcaacttcaatgagtgattattatgttgcctttaatcctgagagactgtattacttgtgcactttttttttttttggatagggggaaattagatttattccctatatgttttagaaaattgaagttttaaatatcagactcactagctgccctgatttaatctgttacaattaagtcagttaaaaaactcctccttggccgggcatggtggctcacacctgtaatcccagcactttggaaggccaaggtgggcaaatcacttgagatcaggagttcgagatcagcctggccaacatgatgaaaccctgtctcccctaaaaatacaaaaattagccaggcgtggtggcgggcgcctgtaatcccagctacttgggaggctgaggcaggagaatcgcttgagcccgggaggcagaggttgtagtgagctgagattgcgctactgcactccagcctgggcaacagagccagaccctgtctaaaacaaaacaaaacaaaacaacaacaaaacccccaggacttcctgtacccacattctagtggggaagacaggaa

SEQ ID NO: 22695 - DNA, 1050 bp, Homo sapiens
agctgcagccacccaagccatggctgcagacccaggcatctctgcactcttaggggcctgggaaggcactccctgccctcacaggcttagaagtgcctcctcctgctgcctggcttctccctgctgtcagcacccactgcaatcttagagcaaagttggggccgagcctaggcactgtcacagcctggctgggtgtgcacatacccggggcagtgctgacacaccagccccctgccacagccccctccagactttgggcaccgatgagcataggaggaaagctgagggggtgctgagggcagcttggtactggcctgcaggtgccctttggcataagcagcctgggcaccatggatggcagcaggaggcagacagcctcctgggcagaagggggcaggtcctggtgaggccccaccttgaggtcagggagggcctgaaggctgggggctgggctgccagtcccaggaccagaggatgaacctgtggtgcctttttggggcctattcatggccatctgtggagcaatcagcatgcacttcctcccctctgtggcccataaaagccccaggctcaaccagcacagggcagatgatgggacaaccagctgcagagcggagctatactttctgctgagagctggagcagatgatgggatgaccagctccagggaggagctaccctctctgttgagagctggacacttgttgggatgatctgcatgcagaaaggagctgcctgctgcaggagactgagctggtctattgctcagtaaagctcctcttcatcttgctcacccttcgcttgtctatgtacctcattcttcctggtcacaggacaagaacttgggacccactaaatggcggggctaaaagagctgtaacacaaacagggctgaaacatgccccttgcttaccacgctgcaggcaaagagaaggagacaagagctgtggcccttcagggagcccagacttgggagctccctgagccagggctatgactccctcttggggccctgcagctcctggtgtctccaggcatctggatgctacc

SEQ ID NO: 22696 - DNA, 1080 bp, Homo sapiens
taggttttaggtcaggtgagagttgaagaggttttaagttcttaagaacacaggctaagggagaagaaggaggaatggagggtggaaggttgcccatagtgaaggaggcaagcccagagaaaagagagggtagagacatggaggaggagggagtggtacttgccacccaggggaggtggtgcttgccacccaggggaggtggtacttgccaccaaggtgaaggatcaaggcaggcatccccgcagtgatcagacatccctgaaatgtgggtgaataatcaggcaggcatccccacagtgattaaacaccaacggaagactgtctggagtgaccagcgctggagttttgagtttatggataaaacacgtctcttctgtctctaccagaaagggaaaggaaccaaaattaaggaagggagagattgaagggtggagcaacagcaagagaggttggagaagagagtgaaaagaccgcttacctgatttgaaattggtgagatgttccttgggctggttggtctgaggacccaagatggtaggtggatctcctcatggagtgagggtgaggacaggggactggtctcccgaaggagtccccctcccccgggtctttggcaccaaatgtcacgtgtgtctgtatgaagagaccaccaaacaggctttgtgtgagcaataaagctttttaatcacctgggtacaggtgggctgagcccaaaaagagagtcagcaaagggtggtgggattatcattagttcttataggtttggaataggcaatggagttaggagcaatgttttgtgggcagggggtggatcttaccaagtacattctcaaggatggggagaatattacaaagtacttttttttttttttgacggagtcttgctccgttgcccaggctggagtgcagtggcgcaatcttggctcactgcaagctccacctcccaggttgacgccattcttctgcctcagcctcccgagtagctgggactacaggtgcccgccaccacacccagctaattttttttgtatttttagtagagatggggtttcaccatgttagccaggatggtctcaatct

SEQ ID NO: 22697 - DNA, 1066 bp, Homo sapiens
gtcattggtgatcaacttaaccttcagcccttctcccctcccggaggttggagggtggggctgaaacattccaaccttacaggcccactttggtcattccagtgaccagcccccatcctgaagctacataggggtggctagccattagtcaacacatgagcatgcaaaaagacacatcactttggagattccaaagattttaggagttatgtgccagaaaacagtacatgatgaatatcaaacctgtatttcatagtaccactggccacccgtggtcttcaaacacagttccctcatatccaaagaatatacaactcaaaaggtattactggccagtttgttactagaactccattaggtcattaataattagttcatcatattatatgattatgtctcccagggtgagaccagtcaggtttgcaggtttctattcagtcttgccaatttccaaaagcaggcgtgatctcagcaaatatatggctcccccctttcaggcattaggtataattgagataagagacaatgtcacccttgttctgagcctctttcaaagtgttaatgtaatactggagatttcttaattcataactcatttattcattcgtttaccctcgtaaatgttcctccgtttcttcatttatacctgttgtcctaaaggaagaaactgaggcaaaattaatataagtagagattttatttgggccaaggttgaggaccagcctgggagcctcaggttatctcgggaagtgctccagagaacagataagctcaagcgtttaaagacaaaaggataaatcggggaggagtgattacaaagggtgtctttcaggaattctcattggtttaaaaaataacattgatcagtaattggctctgcgttattaaattacagggtgtaagtgatggcatccgtgtatggcattgtgaggttgatgtgtagctgtctctggactcttactcttgagtccacagggtcagtggcttcgggggatgagtttttctcaagatggggagtgggacatgactgctccctcattccagttcctctctaggctcaatcatt

SEQ ID NO: 22698 - DNA, 1066 bp, Homo sapiens
ccagtcccccagttttaccaaagacactaataatagcaagaccaatttattctcaaaataagttttagtgttatactttatttgcataaagtacagcaagattagtgactgaccatatagactccttttaagttggctttcccggaaaatgaggaatttcggattagactttttttttttttttttttgaggcggagttttcctcttgttgcccaggcaggagtgcaatggcgcaaactcggctcactgcaacttctgcctcctgggttcaagtgattctcctgcttcagcctcctgagtagctgggattacaggcacctgccacacacctggctaatttttgtatttttactagagacggggtttcaccacgttggccaggctggtcttgaactcctgacctcaggtgatccacctgcctcggcctcacagagtgctgggattacaggcctgagccactgcacccggcctgtaagatactttttgagaagaattaaagtaaaacaataattgcctgtgtatgacagaggacttagaacagccatggttaaagactcaattgaccaggaaatttggctatttctgcagcatataatttaacataataatcataattaataactgataacatatacgaggacatagtttcttttttagaaatctgtacaattttggaacatatattaatgagacccatacaaatataacaaaaaagatcagcaccatttcctacgtgacaatacttcccatatggtttttaacatcccagataagcctaatatgtctctcttggtcttccggggtccctgacatccagaagttagttcgaggtcaaaaagacttaattttagaatttgaaattagatttttctttgaaattagatttttctttttttttttttcttttttggagacaaagtctcactgtgttgcccaggctggagtgcattggcacaatcttggctcactgcaaccacggcctcctgggctcaattgattcttgtgcctcagcctcccaagtagctgggattacaggcatgtgccaccacaccccgctaattttttt

SEQ ID NO: 22699 - DNA, 1034 bp, Homo sapiens
gtttatcttctgggaccacacttgtatatgtgggccactgctgactaaacatcattatacagctcatgactgtgtgtatgtctctctcttttttttttgagatgggtcttgctctgtcgcccatgctggagtgcagtggcgggatctcggctcactgcaagctccgcctcccgggttcataccattctcctgcttcagcctctctagtacctgggactacaggtgcccgccactgcgtccagctaattttttatatttttagtagagatggggtttcactatgttagccaggatggtcttgatctcctgacctcatgatccgcccacctcggcctcccaaagtgctgggattacaggcgtgagccaccacgtccagcctgtgtgtgtgtgtctctctcattagttctgtctctctggagaaccctgactctcatgatggatgtccctcacggggtccttttccggaagacaccacctatgttctttcctgtctatgcttggaacttgggtgcaaacctaggccggatctgggggactccctctgtgctccctggcccttcctgggatctcctgatttttgttctgtggctttgggttccttacatcagagtccagcacagtcagttagaaatgcgtgttgccttgcaagcggatactagtgcctgtacacctacagcatggatctgtgaaagtaacaggaatagtcacaaccactatttcatccagcgctcgccagggcccagggtgtgaccttcatgcagtaatataactcatttcatcttcacggctaccctgcgcagtggagactctctttgtccctggtttataggtgaggaaaccaaggcccagagggtagctcactccactgaggttgcacagccaggaggtggcagctttgtcccagagtcaggccataagcagggcaggcgcagcgggtccgagtttctcggcacagcactcacccttagctcaggcagtgcaccttggtggtctctctgacttattatacagagaatgctgggtatgacttgcca

SEQ ID NO: 22700 - DNA, 1033 bp, Homo sapiens
atgaaatgaatagtgctaagtgccataaaactgaatagagtaaaggggggtgggtgaaggaagacagggaggtcaggaagaggcctctgggccagacctgacccaggaggggactcttcactcactctgtcccgctctcgacctgtgtgtccacacccaagttttccccatccctgggagcgagacccccttctccctcatagtggctgtggtcactgactctcgtgtcccgttgttcacaccctagccattgaggatgagtacagcggacccaagcttgaagacggcaaagtgacaatcagtttcatgaaggagctcatgcagtggtacaaggaccagaagaaactgcaccggaaatgtgcctaccaggtaatgcatctgtcaggtactgggcacccgggaaccctgggatggcatcacagcactgccagccgcgggcactgagcaaaacgacaggagaagggcggccatgacagccaacaccaaacaggagtcgtgtgccggacactgtgccgagggcttaccacatgatctcatctcgtcccacagcagtttggggaggtggcaggcagtgccatttgacagatgcagggacaaagggccagagaggtcaggtgactggcccagggtgaaaggtgaggaagcagtagagtctgttgctttgagttctcatcccaggctcttgggcgtctgtggctgctggttgttgcaggttgtttgggacctgctggttgctcctagtcctgagaccaccccctccccgacctaggagggcagctggccacagggtgttaactggttgagtgagactcaggctctggtatcccatctggacaaggccccctgccctgacctctcagggctacagggaccttaccatagttttggggaactgctgagatccaccacctcctgggttggttatgaggatgcgggacttcttgtgagtcaggttgacaggcaggtgactcttacaggagtgtgcaggcaatatgggaagccgccatttgataggtcctagagagccaagtgg

SEQ ID NO: 22701 - DNA, 1055 bp, Homo sapiens
catttcaatgtcatatgggcttacagcgtttagtgtctcttctttcatgtggcacaatgtgtgtgggattcatacatggatgttgtgtatatcggtagctcaagtcctccattgtctgaacagcccatgacttgtttatgcagtcttcttttgagagacatttgggttatttctactttgtagcttttataagtataagctgctatgaacttcttggacaagtctttttgtgaacatgttttcattgttcatgttgaatttctctattgattgtcttttgtttcattgatttttcattcattattctctatgcatgcttgaggtttaatttgctttcttctggcttctgaagatggacattaatgctgttaattttacatcttttcttccacacaaagcatttaaaactaaatttccttccaggcagtaagttagctgcgtcccgtgaattttaatacgtcgtattttcattatcattgagttagaattgttttctaattttctttatggtttctgattttatccatagattattgagaagggtattgtttaactcccaaatatttggggacttctagatgttactgttactgatttctaatttggtcagacaacacactctggatgattccattggggctatttttagatctgtcttggcaaacatgcagtatgtactggaaaatagtgtgtattttgcagtcgttagtcatagggctctataaatgtcaattagttcaagatggttgagactgctgttaaaaatcttttatagcctattttttctaattgctcaatcatttattgagggggctgttaaaagctccgactatacttgtagatttgcctatttctccctataattctcagttttttgcttcctgtattttgaaatttttattaggcacacatttaggattgttatgctttcttgatgaattgactcattataatgaagtgacttcagtactttttggcttgaaatccctgttttctattaaaatagttaaaccagatttttacagttaatatttgcatgctataacttttctacc

SEQ ID NO: 22702 - DNA, 1028 bp, Homo sapiens
aaattagccaggcatggtggcacacacttctaatcccagctgctcgagaggctgaggcagaagaatcacttgaacccaggaggtggaggttgcagtgagccaaggtcgtgccactgcactccagcctgggcaacagagcgagactccatctcaaaagaaaaaaaaaaaaagaatcttacaatattgtgattgcttttattttctcccagcctttgtgctcttgtcatgcttatgcatctgctataaatacattgttgtcatttccttaaatagacactagtcttctaaagaaatacacgtatgaatacacagaaaatgtcttttatatttaccctttctcttactccttgtttcttcttccatatgtgagtttctatctggtatcatgccccttctgcctgagtacttttagcatttcttacagtgcacgtctgctgtagactaattctctcagctttggtctgcctgaaaatgtttttattttgtcttcatttttaggggtgtctttgctggatgtagagttctaggttgacattgtttctttcaaggctttaaatgtgtttttttcccattgccttttgacctccattgtttctgtgagaactcagcaatcattcatatctttgttctatatagtctgcttttttcttcactggttttaagatgttgcctttgggttttagtagtttgactatgatgggctttgatgtgctttttttgagtctgtgggttaatatctttcattagttttggaaagttcttagccattatttcttatatttcttcccatttctgctctcctctccgtctggaaagctaataacatgctctttgatactatttgatactattccttagatcttaatgacctgaatttttttaattcttttcacgatttttcctctatgtatttcagttcagataatttcagttgtccttatgttcactgattctttgtaactgctgtcaagcccaacaaatgaattatttatttcttacattgtattttttattggtagcattttcat

SEQ ID NO: 22703 - DNA, 1024 bp, Homo sapiens
agttactgagaggacaggttaagaacagggcctggcccacacctgatgctatctaagtatttccccgtgttatggtatctgctcgatgaacggccacttgtagggccactaggcctatgcattgttgagtgggagggcccgtgtcccatctcccccatggctccaggcctctctgaggagagctgaaggaggtggactgactagtccccgcacctccccgccactggctttccgggagacaggaggcagggtcctcagtgccatactactgaggctcagcggccaagctctggctggagccacggtgaggaaaggattagaaacccagatcccttgagccctgccaagtcctcactccctgggaggtgctgacaggaggcttgaggccaggcaggagcagcccatctggcccatcttctgccaccacccccaaccccaccgcaccgcacccttcccctccacgcttgccatgttttcctcagcaggacagatatttaatggtgactttgtggaccgaggctccttctctgtagaagtgatcctcacccttttcggcttcaagctcctgtacccagatcactttcacctccttcgaggtgagctgggaagtgacaaggtttgggttcattgtggggtcctgagtggggcactcactctgcaaggataatagttgcagctgtatttattttgtggactcggagatcatgcacagggcgaccttttaagattgagtatgtagtgcactgcacaaaagcatcacaccaaaggacgcgtttacatcatagatagtgtagaaatggatgtttactctgaccatttttcagcagatggcaaacaagggtgtgaggatgggccccttattctaatttgcacaagggcatgaaacaggctcctgggtggccctaaatctggcactaaagctgagtgactgagtgaacagaccagggctcgagggtgggagtaaggagactgttgacgaggcagttgtgccccctcagattcaggcttggtgtcagatttgggt

SEQ ID NO: 22704 - DNA, 1031 bp, Homo sapiens
atcttattttgggtgctggggtggctgccagccctgtcccgggacctgctgggagggacaagaggccctcccccaggcagaagagcatgccctttgccgttgcatgcaaccagccctgtgattccacgtgcagatcccagcagcctgttggggcaggggtgccaagagaggcattccagaaggactgagggggcgttgaggaattgtggcgttgactggatgtggcccaggagggggtcgagggggccaactcacagaaggggactgacagtgggcaacactcacatcccactggctgctgttctgaaaccatctgattggctttctgaggtttggctgggtggggactgctcatttggccactctgcaaattggacttgcccgcgttcctgaagcgctctcgagctgttctgtaaatacctggtgctaacatcccatgccgctccctcctcacgatgcacccaccgccctgagggcccgtcctaggaatggatgtggggatggtcgctttgtaatgtgctggttctctttttttttctttcccctctatggcccttaagactttcattttgttcagaaccatgctgggctagctaaagggtggggagagggaagatgggccccaccacgctctcaagagaacgcacctgcaataaaacagtcttgtcggccagctgcccaggggacggcagctacagcagcctctgcgtcctggtccgccagcacctcccgcttctccgtggtgacttggcgccgcttcctcacatctgtgctccgtgccctcttccctgcctcttccctcgcccacctgcctgcccccatactcccccagcggagagcatgatccgtgcccttgcttctgactttcgcctctgggacaagtaagtcaatgtgggcagttcagtcgtctgggttttttccccttttctgttcatttcatctggctccccccaccacctccccaccccaccccccaccccctgcttcccctcactgcccaggtcgatcaagtggcttttcctgggacctgc

SEQ ID NO: 22705 - DNA, 1029 bp, Homo sapiens
ttaccaagttagagttggagcttaggactaagctcctgttgctactctttgattcctctctcacctgccaatccccaactgcctgtcatcaagtcccgtaacccagagtctgtgtagggggctctttccctgggagatgcagtaaaatgaactggattacctttgttgtatactttttcagatataaaataaacactgcctgtttttcaaccattcacatggagattactttataatttagggggatggggttatccagattatattagctacataactaaaaccatatacctcttttaaaaacgatatggaatttttcaagctgagtcattgttgacctaggctctcaaacagcaatggtctgaacagcacttgtattgctggcattaagaaatgcaaacaaataattcgtgttcatcttcccaaaacttttgatccagtgctttatcaggcttcatctataaagaattcttgaagataacttttggcatctgtcaatctaattttcatttatttgcttctctgatactgagaaatgccattaagttgatatattagcagagaaccagatactttcagccatgaagtatcattacaggaaagtaatatttattttagttgaaaatagccagacttgcctatctctctcatcttcctttattgaaacgaacattttctttttatgtactttgcagcagttgtgactgttgtattatagatctgcaggtatttcctgcctcttttgctctcctgatatctctgcattcttacttggatgatgccctcgtcctggccactgtagtaaactggtaattgcatttggacaattgagaggcggcttcctatgatgtaaagaacattgaagaaacctgggtcctagccctagccctgtcatttactagctttgtgactagccaaatcattttcatttctctggactacagttccttcatttgaaaaatgaagggattatactagttggttcccattctgccttattttgtggctaataatacttgattgtcatct

SEQ ID NO: 22706 - DNA, 1039 bp, Homo sapiens
catggtggatagatagagctgaacccttagttctctttgaacaaggttcccttctaacccctaaagtgtgcttgttttaagagaaaggagccggctgggcatggtggctcacacttgtaatcctagcactttggtgggccgaggtgggcggataatttgaggtcaggagttcgaaactaccctagccaacattggtgaaaccccatctctactaaaaatacaaaaaaaaaattagcccaggcttggtggcgggcacctgtaatcctgctacttgggaggctgcggcaggagaattgctagaacccaggaggtggaggttgcagtgagctgagatcgcgccactgcaccccacctggctgacagagcgagactctttctcaaaaaaaaaaaaaagccgtcggtcaaagtcaggaatggctataaaattagtgatgtgttcccttttatgggccaaaaacatcattttaatgagatttaaatttatttaagctttttttttttcttttttgagacggagttttgcccttgttgcccaggctggcgtgcagtggcacgatctcggctcactgcaacttccgcctccggggtacacgccattctctggcctcagcctcccaagtagctgggattacaggcatgcgccaccaccctgggctaattttgtatttttagtagagacggggtttccccatgttagtgaggctggtctcaaactcctgacctcaggtgatctgcccgcttcagcctcccaaatgctgggattacaggcgtgagccacctcgcctggctaagctattaattaaattttttttcccaaagtcctgttttgaagtcctgtctataattaattttatttaaataatttagcaaaagtttgttaagcagaagagggaacaaactagttctttgtagttccagaggatagaggtagaggtctaggtatctacaaggtttagagtgcacaaaacatgcctcttcctctctgggagaatttttatgccgtttataaaacaaaagcaattcttcccttacaggtaac

SEQ ID NO: 22707 - DNA, 1032 bp, Homo sapiens
agaagtatgactaatactggtaaaagtgtctttataatgattgttgcgatatgattgaatttctatcctaatgcttaagaatccttagtgaaaatgtgggaaagaggatgaatcactgttttctcccttcccaaatcccagatgattttgctagaattttaaggatggattgagtgttcaggtgattttgtcttgacttcttgggttggttgggatctttaaagagagagagattaaaaaggatttactactagcaaaactgaaaaagcagaaacatgtctgcttgaattttgagtttcttttctctttgatagtggaagcagcatcttaggccaggttcattttgtaactggtgtgggtgtatgtatgcatgtgtacatccgtctcatgtttgttaaattttcttgactccctaacagttgtttgtactccacatcatcagttttggtaccttctactcgttactgaaaggatatatttaccttctcagtgggttggtgaagatggggggtgggggagcatatatggaaactgatgaaaatgataaaaccgtggtgctccaaagtaaagaaaggaatttttaaaagcctttgaattaactggaatgtgggatcttggattggatcctggtacagaaaaggcaataaatagaaaaactggtaaaatctgaaagtctgtagtttagttttttgtgctaatttcttagttttgacaaatacaccatggttatgtgaacattaggggaagctgggtgaagggtatgtgaggactctgtaacatctgcagcttttttgtatatctaaaattattccagagtaagaaattgaaatagaagctgtgactagcaagagcttccaagggctgtgacttcaccaagggagtgtgttcataagtagggcttctctctaagggcctctagaagttctgcttatctgcccacttccctccttcaactcagtgctctaaccatgtggaatgactaactctccccaaaatccatgcttctgggccgtttcatacacttctcatcgg

SEQ ID NO: 22708 - DNA, 1022 bp, Homo sapiens
gttccattttgtgattaggctgagtatttttaagcacaactctctcccttgtccttagaattatctccagtatcctcaaaacaaagagcaaatgatgcaattaggatgcaatcccttgcctgtggatttcaaggaaaattattttccacactacttggaagctcatggacaaagtcaagctttctttagatctggtgaacttagaaaaaataacttgatgaagtgagattcttaccttgaggttagtttttgagagtggatcaatgatgtgaaatttctaagatattcttgatttataaatatcactttatgactcattccttggagcagtttttattttttcctttgaaaaactttagatgtaattgactttggtttacactctatcctgttttttggtttttttttttttttttttggagacggagtcgctctgttgcccaggctggagtgcagtggcacgatctctgctcactgtaacctctgcctcctgggttcaagcgattctcctgcctcagcctctcgagtagctgggactacaggtatgtgccaccacacccagctaatttttgtatttttattggagatgggatttcaccatgttgaccaggctggtctagaactcctgacctcaggtgatctgcccgcctcagcctcccaaaatgctgggattacaggtgcaagccaccacgcccggccatacttttagtgaaaggaaagccatgtatctttttctgctgtctcctatgtcatgtcttactctgccgttttgtaatggtccttgagattgagataatagagagagattttctagattttcacctactcactgatttttactacaggcattttaattcctttaaatttgagactgattttcttcccatagtatttaacttatcatcatccttataggagggccagacccttaggatttatgtgaatactgctagttggtaggaaaggtacttttcctgaagccttgaaagagtatttccagaatagtgagcttcatatttttt

SEQ ID NO: 22709 - DNA, 1054 bp, Homo sapiens
atgcttttgataatttggaccaagagacatggtattctgaatagcagccaaatatatgaggtcaaggtgacttcctctagcaattaggacagctgtcatggaagagtaggccagacctgatttccttcttaagtccgagggctaaaccagtgataagagatgactcgttgatcttcctgatattactggccaagcactttctaaggaatgacgattgataaggaagaacaaactactattttggtctcttatctaaaggaaaatcatgaagctagcactttatagaaaatgcacttattcagttccttgtatgatcacaaatgttttcttagttatttttgggctccccaacaggatatgttacttatagtttgaaattcgcctttttttttttctctgaaatatatcttgaagtgttgagtggtggctaggtgccatatagaacatacaagcagaattttatagaagtatacatttagtgaggggtggagattattgctttaataaatgggactggctggatgtcattcttttttgtccccttcccagtcactttgactctagggtcttgattaatgtgatcatctctgcagagtgtggagagacagcactgggatgggggtgggaagtgggcgcaaagcctttcttagggcacagacagctctgacagcagtttctgggactgccttcccctctccccttcagcttccgcatctgtgacgtgagggagctggctgccagcattcccagcttggcctgccttccagtggctttcattcagagacagcagatcatgttcatctggaagttttcttagttgttcatctcaagaagaatcttaggaattttttttcaaatcagccagttttcctcagattttgcttcttctttatctgccctgttcctttggctaatcttctgtcagcgagacacagggtcatcagtttaagtatgggaaggaaattatggccttgagcacaggcagaaagcatctggctcccaggcgcttcctgtgagccaccatgaaattacaaagactgggcctgacaaggcc

SEQ ID NO: 22710 - DNA, 1028 bp, Homo sapiens
ttgccctgagtgtttcatagaggtgttaaaaaagaaaacaccctccttctaccttccagttgcggcactctggtggggaccttgtgtcttggttaaacaaatcacaaacaactctagatgcttggtgacagtctgaagaaggcacgtagatatttgcattatgttttattacagcatgtatttgtgactgagaaaccaaaatacttctgaagtattttcctctctgaagtagttgactcttggcataaaatgggaaactttgaagtcctgtgtttctgtttttctaatgaaatatctctgtacagctcaaagataaaagtaattaccatttttaaaggatccttctttcccctctgttttaactcttccatttaaaaaggattagcactggaaaattattagaatggacattcagattctgttgtgtatcttagttgcctgctaagaacactggttcccatcacatttaaactctaaagacattgtgaagtctggatatgcccggtctcctactttctctttctttgtggccttcagatcattaaatttagtgactcagctaattttttttacccacctcttagaactaagttgaatgtatttgtgaccaagcacttaaagttatttcctctaaaccaagtgtttgagatgtttttagatttataacagtctttgtttaccgtgtaattcagtccaattgaggaactagtaaaactgcattatctagacatcaaagctaagaagagtatacttacaccaagaaacttattaggtttctaacaagtggaaagttaccaggtgtcccaaaattaaccacttccatgccagctgattttcactttttgtagctattttaatgatcagcagcattctgggtttaaaaataacagtcgtggctgggcacagtggctcgtgcctatgatcccagcactttgggaggctgaggtgtgagtgggaggattgcttgaggccaggagtttgagaccagcctgggcaacatagcaagaccccatttctaaataataata

SEQ ID NO: 22711 - DNA, 1014 bp, Homo sapiens
atgacatactttttcctgtccttcagtcccaaacctgtaaatcttcccattgtggaagcaacaactctgttttacttgaactaccaatcggactgcacaagaagcggattgaactgtctgttctttcataccattcctcctttagcatcagaaagagccggttggttcatgggtacattgttttttattcagccaaacgtaaggcctctttggctatgttacgtgcctttctttgtgaagtgcaggatattatccctattcagcttgtagcactcactgatggcgctgtagatgtcctggacaatgacttaagtagggaacagctaactgagggggaggagattgctcaagaaattgacggaaggttcacaagcatcccctgtagccaaccccagcataaacttgagatctttcacccattttttaaagatgtggtggaaaaaaagaacataatcgaggctactcatatgtacgataatgctgccgaggcctgtagcaccaccgaagaggtgtttaactccccccgggcaggatcaccgctctgcaactcaaacctgcaggattcagaagaagatatcgagccatcttacagcctgtttcgagaagacacatcactgccttctctgtccaaagaccattctaagctctctatggaactggagggaaatgatgggctgtctttcattatgagcaattttgagagtaaactgaacaacaaagtacctccgccagtcaaaccaaagcctcctgtccattttgaaattacaaagggggatctatcttatttagaccaaggccatagggatggacagaggaagtctgtgtcttctagcccctggctgcctcaggatgggtttgatccttctgactatgctgaacccatggatgctgtggtgaagccaaggaatgaagaagaaaacatatactccgtgccccatgacagcacccaaggcaaaatcatcaccattcggaatatcaacaaagcccagtccaacggcagcgggaatggttctg

SEQ ID NO: 22712 - DNA, 1034 bp, Homo sapiens
tcaaaaaaccaactagaaaaccgagttccgatgcctggttccccaccaccccacctgcttccagtccagttaaatcaaaatcactagggctggtgtccaggcactttgaaaaaaaaaaaaaaagacaaaaaaaggcagtgaatccaacaggctgggttctgttttttatttcctttattagatgtgttaccaagcatttaaaaggtttaaacggctatactagatggtacaactctagtgaacatattttctgactctaaaatctagataagtaactttacatttataaggttgtttatggagaccaaaagagaatatttgaagttgacagcgtagggtcagtaagtagccctccctgctgttcccacagaagatagaatattcttacctttttccattgttgcatagctggtacttgctcatgtggtacctagatgagctttgtttattgtggatatgtcttctgttaccaaatagattggaagttcattgagggcgggagacgactttggtcctagtattagctctgctgccagtttgttatgtggccttggggtgattcataaattcattaaaaaaaaacaaaccaagactcttgccttctaggaacttagcctagtagaatatttgttgtatgtgtacgtaaataactgtacctcattcagtacctacagagggaattaggacttcatctggcggtttttaaaaggcttatgatatagtactgccaaagtatgaacaaggccttctgagcctcacctcctcacacactagtgtgagcagcacagtgtaaggagaaatgagaatctctaccacagagatagtctgcgtctcagctcaatttgagaaaatagaaaggaacattggcccagtacattattggaaactgtttttgttcagcaaatacattgagtgcccactgcacgtcaggccctggaacccaaccatcttcccagctgatagaaggcccttcttttggctcttacctatcccctggcttccattctactctttttcttgccccagtggacttg

SEQ ID NO: 22713 - DNA, 1060 bp, Homo sapiens
gctcacttgcagcctcacctttctggcctcaagcctcttgagtaactgggactacaggcatgtgccaccatgtctggctaatttttgtattttttgtggagacaaagtctcactatgttgcccaggcaggtctcaaacacctggccttaagccatcctcccaccttggcctcccaaagtgctgggattataagcatgtgccactggacccagccagagaccctgtctctttaaaaaaaaaaaaaaaaaaaaaaaagatagattgaatgagtggttttcaatctggaacaccttaattccattttcgtctttcttcaagaaaaaaatgaccatatatttccccttgttggcattagtttgtacttttatggaatttcagaagaaaaattaaacctggtatctgtgagcttagtgtgcattggagggatgtctttgtgtacccttatttcctaagaaaactttttctcccttttataaaattaaagcaagttcattgtagaaattggacaaatggcaagaactgtgaagaggaactcaaagattcgtgatctgctacttagtgaaaaccaccgttaatgatttgagatgtttcttgtagtcttatttctctgcatatacacatatatttattttcacataattcagagtatgaggtaagctagctttcaacatttttttaacatagccctcttagatgaggcagaagaggccgggtgcagtggctcacacctgtaatcccagcactttgggaggccgaggtgggtgatcacttgatgtcaggagttccagaccagcctgaccaacatggcaaaaccccatccatctctactaaaaatacaaaaattagctgggcttggtggtacatgcctgtaatcccagctattcgggaggctgaggtgggagaattacttgaacccacgaggcggaggttgcagtgagccgagatcgcaccactgcactccagcctgggcgacaaagtaagactctgtctccaaataaataaataaataaagcatgcatgcatgccaggcatagtggtgtgcacctgtgatcccagctat

SEQ ID NO: 22714 - DNA, 1035 bp, Homo sapiens
acttttgtgggtggtggaagtattccatattttaattgtgatcatttcactcatgtattacatatttcaaaattatcgggccaggcgcggtggctcacgcctgtaatcccaaaactttgggaggccgaggcaggtggatcacaaggtcaggagatcaagaccatcctggctaacacagtgaaaccccgtccttactaaaaatacaaaaaattagccaggagtggtggcgggcgcttgtagtcccagctactcgggaggctgaggtagaagaatggcgtgaacccgggaggcggagcttgtagccagccaagatcgtgccactgcactccagcctgggcaacagagcaagactgcgtctcaaaaaaaaaaaaaaaattatcagatggtatactttaaatggatacagtttactgtatataaattatacctcaataaagttgatttttaaaaacaaaacaaaaaagaagtcattggggaacagttttgaagaaacttgctgtttatataatttcaaaatatcatctagcgcattaactactagttacaaagggggaccacacctttataatttaaagatctgggtattaccaccttaccaaagtagttacactcagcatctctactggatgaacccgacattgtgttgtgcctcctggccaaaaatatttcacctgaattttatcagggagaagcaatcagacaaacccagaatatgatacatttataaaacaagtggcctgaactcaacaaaaaaggggtctcatgtgacttctccatttgtaccgtgaactcgttttccactagcctagtcagatgtgaaacccatgaaacttggagtcacagctgacaccccacctttgccaggcaggagtagctggccaaccataggcaagacacctaaactttctaagcctcatttttctgttccttcaaattgggaattaaaataacaactctttcaaagggagtttttgacaattaaatcctgtttgtaatgttcttggagtagtgcctggcacatagtgatcattcggt

SEQ ID NO: 22715 - DNA, 1051 bp, Homo sapiens
ccttagcaccttcacacggtgtcgtgcctctgcgtcgttgttaaacactgttcctgctgcctaatatgttgtttcctctcccatctaacacattcccatcctttccgaagccttcacactctagacatgcctcgattatagtagctgtccccttgtgttagggatactgtttctgtctgtcactccttagaagaagagacaggagggagcttgctctcctccctctgccatgtgaggacacgagaaggcagctgtctgtatgtaagccagcaggagggccctgccagaaaccaaataggctggcccctcgatcttggacttcccagccctcagaaccatgagaaaaagagagctattgttgaagccacccagtctgtggtattttgttatggcaacccaagcagctaagacagatggcaaggtgaccaactcaggcatcagaacacctgagagccttaaggcaggggccccttctttcctgattcatgtgtccccatgggacctggctctccagagtcctccatcagggatctttgtgtccacatgaccagaacacagcaattgggtcagcagaaatgggaattgaggcaactgaaagtcagaagggctgagacaggtggacgaagacgtggacaaatgccacttgagagccgtggtctgaagagatgagctcacgcctttgtgtagtgcccggctcccaggtggtttactgtttgaaatgtaagctgactgggtatcagacaactgaatcccactttttcaaacaaagatggtgcaaggccttgtgatttcaccccagtttgcgttctttcactcttggctggcatcctttggctatttaaattcgtagcctcccaacagtttttaaaaaacaaacaaactcacacaatttatcttttcatgtaagctgcaatttggttgaaacaagacctttctagtacatagtccaaagctcctgataactgaaactacaatcagtgtttctgttctgtgatctgttttttgttttaaaagccacaacagaaaaccttttcttctgttacggctgtca

SEQ ID NO: 22716 - DNA, 1030 bp, Homo sapiens
cctgtggatggtgcagagtctatacccttcatcaggagatcagagtgaggggcgtctcctcccctgaaaaagttagagatcactgttcattcacagcgtttgtggaaactataccactgatcgagagcaagccaggacgatgatgcagccttgttctcaagggatttataatctagtaagggtgaagatttcaccctaaaccatgtagagcctacaaaaggaggtcagggaggccagggagggctgggaggtagagttgttgggacttaaaggatgactcgaagtggaatgattgagcctagatcaaatcattttctcttcacagctctccgtgacaggagactgcatagcttccctgtgagtccatgggccccaaagtgattataactgacctctagcttgactgtgcccatcccctgccattggatcctctccaaaacagacagtcattgtcacgtatactcacacgacacacagggaaaatagcaaccaacaaactgtttccatgtgttagagtggtagaacctggctccatttccagtgtctcacctccatgtgtatgaactaaaaataggcaaacttggctgggcgcggtgactgacgcctataatgccagcactttgggaggccgaggcaggcagatcacgaggtcaggagttcaagaccagcctggccaatatggtgaaaccccatctctactaaaaatacaaaaattagccgggcgtggtggcgtgcgtctgtagtcccagctactcgggaggtggaggcaggagaatcgcttgaacccgggaggcagaggttgcagtgaactgagctcacgccgctgtactccagcccgggcgacagagccagactccatctcacacacacacaaaaaaaatagacaaacttctggggggtatcagggtgtaatgactcccttggttttttgggttttttttgttttgtttctcttttttggggtttttttttttgagacggagtcttgctctgtcacccaggctggagtgcaatggtgtgatctcggctc

SEQ ID NO: 22717 - DNA, 1044 bp, Homo sapiens
tgcactctggcctgggcaacaagagtgaaactcttgtcatctcaaaaataataataatatttacagcatcttgacagactcattaatgatgtcattaccccattttggatgaggattccaagcccctgagaggagaggcgatttactctcagacacccagcctagctataagacagaaccaggatcagaaccaaggtcattttggtgtcaaagccatgcatgttttaaaatgtttttctacaaactgtcttgttttggccacgctctcagaataggtcatgcctacaggcaggtgccattgttgaggcttgttaagagtgtagagaaaaaagaatactggcaggcattgtgcagtggactgtgcatagacgatctcatttattccattgtacggtcagattagctgaggtcaggggcaggattcgaacccatgtctccctgacagcagaactcaggtgctcatccacttgccaaccagctttccacttagatcattaggataatagctactctctcagcactaagtgctaagatctcattaaatacataccaccaggggatgaggtgagaactgttatctctgttacacatagaaggaaatggagacatgattgctttgattttgacctaaatgctctcctgccccctcaccctttgatcttccattgaggtgagattgggggagtgccgcagtgtggtcctcagaagacacaccatagatacactgttagcattggatgaaaaagaagggcttcatacctttccacagaggtcggtcctcttcaagaccatttgaatttaatgctcaaagagtttccttctctccctgagtgctcagcacccctccggccttgcagtttagcctgccttagacttagtcttgcatgtgtaaaagaaaaagggaatggtttattagatgcttccagactccagaaaagtcgacaaaagttgttagttaagtcctgcctggcatggggtgttttagagtactagcagtgccaattaaatttttttaaaggactaagtgctgagtttctatatcta

SEQ ID NO: 22718 - DNA, 1050 bp, Homo sapiens
cttagcagctatgatctggggcaaggacttcacctttctgaatcttagtttcctcatgtgtgtattctctacctacccaatagctcttcccatgaggtgtgggagattaaatggcatcatcgtttatttaataaacaagcaaatggtggatggggacaaagcacctagctcagtgcacagcgtgtgaccactctgatatggaaagtgccagcactctcccaggcgagtacagcagtggcagctcctttgtaactaggcgttgcttggtaggatgtccctggggttggtccattaacctccttttctctcggggaaagggccttggtgcaattaacagcttttaagccagagaattgatgcctcttgctccagtgttcttgaagcctcaagaagtctgggacccccagaaaacaggcaggccagttgcttttatcttgcctgatggctgtctctccagaggtagcagtgacaataacaaccaacacgtggctctcggaagcctgactgactccagggcccggtgctctctactgtcggcactgtttctgttgtccaggggcagcacccacagtgcttcctctgtgcaccttcagcaagacagagtcgctcaaagccagtcttcagaagggacccagggttgctttagccatgagaccccatgtcagttttcacagtgacttcactgtcctttcgacaaagtccttgagatcttgatggctcacagtggacttcgttcccaggacagggtgagtggactcagtagacagcttggaatccactctaagctgaacagtgctcctctgcccacggtaggatggggagggagtgggagcccatccttcccttgatattttattctaacttacgtatttaattgacttttactactttttttcttgtatcacactatacaccaaataagttccagaatgatcacagaatgaaatgatttttttaactgataaaaagaactagaaggaaaaaaaacaatagctgatacaggaataggaaaaacctattctaagcataaaaaccaaggaagacatcata

SEQ ID NO: 22719 - DNA, 1024 bp, Homo sapiens
aaggatgatgttctctaggatcagcctcccgagtagctgggactacaggcacgtgccaccacgcctggctaatttttgtattttgagtagagatggagtttcaccatattggccaggctggtctcgaactcctgacctcaagtgatccgaccgcctcggctaattttgtgtatttttagtagagacggggtttcaccgtgttagccacgatggtctccatctcctgaactcatggtcctcccaccttggcctcccaaagtgctgggattacaggcgtgagtcgccgcgcctggcacacccagctaatttttttttgttttgtacagatggagtcttactttgttgcccaggctggtttcgaactcatgggctcaagtgatcctcatgccttgccctcctaaagtgctgggattacaggtgtgacccactgcgtccagcctgctgtagttttgtcggagagaaacgatggtggctcagactagagtggtgtttgtggaacttgagggaagtagatggacaatgctgctgtgaatgtgtatctttttttttttttttttttgagacagagtctcactcttgtcacccaggctggagtgcagtggcgcgatctcggctcactgcaagctacaccttccgggttcacaccattctcctgtctcagcctcccgagtagctgggactacaggcacccgccaccactcccggccaatttttttttttttttttttgtatttttagtagaaacggggttttaccatgttagccaggatgatctcaatctcctgacctcgtgatctgcccgccttggcctcccaaagtgttgggattataggcgtgaggcaccgtgccctgctgaatgtgtatcatttttgtgcccacttgggtatttctttttttttttttttttttgagacggagtctcgctctttcgtccaggctgaagtgcaatggtgcggtctcggctcactgcaacctccgcctcccgggttcaagcgattctcctgcctcagcttcccgagtagct

SEQ ID NO: 22720 - DNA, 1027 bp, Homo sapiens
ggtctcgatctcctgacctcgtgatctgcctgccttggcctcccaaagtgctgggattacaggcgtgagccaccacgcgtggccctcaactgtacgtttttatccatgtcctcgttttatatgggattcccacattcttgctgaggttcacacagttgttgagccaggatttgaatcaaagattgaatccagcctgaattatttcagagccttactgttaaccattgtgtggtacagcttctcagcacataatgagatccctgaagaagcaggatggaatgggtcaaggatacagggttagcctagaatgggaagtgggccagctcattttcttggaggagaaggtagtaagatagagagtgtgctgtggatggttggtaggaggtgttgaggggagattacttctgttgtacctagtcttggtgaaggtggcaaggttatttgcagagattaatggttaaattagatgtttgatgtgtgaagaaatactttgagagcagtatggaatctgtaatcttactggtggctattaggggattatattatcctgtctttgaggctctgctctgctgatgttcagccttaggggtgaaataattcctctgttccagtccccactcatctctccacctctctgagttctttttttttttttttgagacagagtctcactctgttgcccaggctggagtgcagtggcacgacctgggctcaatgcagcgtctgcctcccaggttcaagcgattctcctgcctcagcctcccgagtagctggaattacaggcgtgtgccaccacgtccggctaattttgtatttttagtagagatggggtttcaccatgttggtcaggctggttttgaactctggacctcaggtgatctgcctgcctcggcctcccaaagtgctgggattacaagcgtgagccaccgcacctggccatagtctatctatgttttttaaaagttcatttcaagcattcttaattgtgtctgatttttgcacaagtttgattttttttttaagtttt

SEQ ID NO: 22721 - DNA, 1026 bp, Homo sapiens
tttagtttcactgccaaatctatgcggaggtgaaaggataaattctttgtcaatatctgcaacctttcagacatagttccctgcattctggaaaagcttaacaaatcttgataaatgtgaaatagtcatagatgagctactagttttttaaatgaaaggccccagtatgttacatgagaggttagaatttgggttgggtagttttttttttttgcacctttttttatttgagatggagttttgctcttgtcgcccaggctggagtgcaattgtgcgatcttggctcatggcaacctctgcctcctgggttcaagtgattctcctgcctcagcctcccaagtagctaggattacaggcactcaccaccatgctgggctaattttttgtatttttagtagagatggggtttcaccatgttggtcaggctggtcttgaacccctgacctcaggtaatccacctgcctcggcctcccaaagtggtgggattacaggtgtgagccactgcacctggcctgttttttacacttttctttctttctttctttcttttttgagatggagtctcactctgtcgcccaggctggagtgcagtggcatgatcttggctcactgcaacctccgcctccctggtttaagcagttttctgcctcagcctcccgtttttacacttttctatttcatatgtgcatctgttcaaatatgggcttggaaggatggatcatctgtgcatttgtcctgttttctttttcctagtcccttctattttttaacttgaggtattgggacactttccatttggacataagtcttcattttcttatctgtagtaaccacatttattttatgccaggtgtcccttgaacttgtagagttagagggtttgttaaaactgaagtgtgaggccagttgattgtgtaatgcgtgtgcatggggccatgttgaccgccttgcaggccgtgtttggctggtccttgcaggttttatagttactttagactctgcagggttccatttgatcaattggtt

SEQ ID NO: 22722 - DNA, 1070 bp, Homo sapiens
gagataaattgttaacaaacggaggagtacaaaagctgctttgtgggtgctgtcagtttataaatcacaccctcttacaagtgtgacacttggccttggtgtgaagggttttatggcttaagggccttctctgattgaggcaggtctttcacattcaaatggagagagtgcctagctttgttagccattcacagctggaagtttccctggagtcagttctgatggtgcccactggggtggatctggaaacctcttttgggaaccactttatctcgctatgaggagaatgtgggcagcccaggcctttgcccaccattccggagggccctacaggcacagaggtttttgtgcagcctcttcctacgtggagctgagctggaaggtatcaaaatattccccagctgacattgttagtcagctgttacacttgaacaatgcaggctcggattccaaccccaagcccttaaggttacgaggcattcagtgcattcctgctgacaatccctgggattccaaaccttgcctttgtgcagcctcaccaagggccctgcggaccgactgggctggactgggttttggccatggctttgtcaccttgcaataacatgcctccttccgttttggcacagatggccctgtgatttcaaggttctcttccaacaccaaagattccttgattcagatgctgcccttttgcctaattgtacagaataactagttgggttgtgctcagagagtgcagggtgggggtggggaagcagctacttcctgtttcctgtgaaaggttttctggttagggttcccttcccctccccgctttccctaggtttaaccaaaggttgtaaagccacttttgcttcaaggtacactttgtgctcctaaattagtaacgttgaaaaacaaaaaggaaaaacagcctgtggttttcacaccctctaggaagctggtgggcctttctagcacctgtgccattctgataaataagggcttaggaaaatgcctagcccagaaataggtgctcagtagtttgtttgcttcctttggtgctcaggagaagatttgagacggat

SEQ ID NO: 22723 - DNA, 1655 bp, Homo sapiens
gctctgtcttccttcagtgcagggagtttgtgttgtccatccccagcctctacagaagcacacagtgagtgttcaataagcatttcttggatcaaatggcccctgcttcttttaatggtcagtaaactttaaataatgagatttttctgcaatagagaagagcaactgccttgtgattggaagccagcatatgttattcctaagcagttctgccttttttccacagaaggtggtcttctgccctgttaaagaagccctggaggtggactggagcagtgagaaagcaaaggctgctctgaagcgcacgacctccgactactttctccttcaaggtgaggtctcaaagcacaacttaccccgggagagcttttggctctgatttctgcaaatgtggttgcaaggtccagatggttttgtgatgtttgccttgggtggcattcttcattggctagttctcagtgatcacttgagaaaggggtggtcacttgaagggggtgaggtctaccattgagctctgggttctaatgacttctcctttttttacttgttgaaatgacctccctgtcaagttgaccttatggtaatagtgttacaggtcacagattgagaaacctctttttttttcttttttctttttttgagacagagtcttgctctgtcacccagactggagtgcagtggggtgcaatcttggctcactgcaacctccacctcctgggttgaagcgattctggtgtcttagtgtccccagaagctgggatgacaggcatgcaccactgcgcccggctaatttttgtattttgagtagagatggggtttcaccatgatgcccaggccctgaagttctgagattataggcatgagccaccatgtgaagcctgatcaaccaacttctcttcaccgccccccgcctttttttttttttttttttttgagacagagtcttgctctgtcacccaggctggaatgcagtagcgctatcatggttcactgtagcctctacttcctgggcttaagtgctccccatgcctcaggctcctgagtagctggtactacaagcacacgccactgtgcccagctagtttttgtatttttttgtagaagcgaagtttctccatgtagccaggctggacttgaactcctgagctctagtgaaatccccgcgttggccttccaaagtgctggagttaaaggcgtaagccaccagtgcttgttcccctcttcagaattctttctctgcctcaaaaccatcctcacgcttatgaaaggtggggttgtttttcctcttgctattaatgaactacttatcagtccatctttgctggtggtcaagagactgttagtaagtattggttggcttttcagtgttcttcctgtacctggcacttttttgtttgtttttgagatggagtctcgctctgtccccaggctggagtgcagtggtgtgatcttggctcactgtaacctctgcctcctgggttcaagcgattcttctgcctcagcctcccgagtagctgggactgcaggcgcgtgccaccacacccagctaatttttatatttttagtagagacagggtttcaccatgttggccaggttgggctcactctcttgacctcgtgatccgcccacctcagccccccaaagtgctgtgatt

SEQ ID NO: 22724 - DNA, 1030 bp, Homo sapiens
actttattttcttcctactaaagtactggtttattcggtggccttggtgattagatttaggcataatagttaaatgtaatagaagtttatgtaacaaacagtgattaataatgttgctgtccagattcccgttatagcgctaacctgatgttatgaactgagattaaatttgaatttgagtgcttacattattttgtaaaggtggttgtatattcacatatccacagttttttctataaataacgtgaaaccgtgcttggtttctcttttccaaagtttgccttttccattacatgggcaagtcctgaacctaagccgagacactagtccatcatctccagcaatgaatgtcatccccccagacttcagcatcctgagttaattaaaaggtgcagatgaagttaatcaagtttggaactctaattttgtgcagtgttttgatacgatttgatgagtcatcttttggtagagcacctctctatccctgacagtgtttgatcttaacggaacagttttataatgtgtaaactggtgggaggtgctcttcagaaatgcagtcaacagtggtatgtgtgcgtgtttggctcttggggcggggcggaaagcagaacaaaggagaatttaataagcgagaacttgtcaggggctagggtcagttctgaggctgctgcctgtcaagaacatggctttcttcctgcccccctccactgctgctaactggagtctgaccttcgagaaagagtgaaaaaagacagcttctgtttgttttgctgcaagtaagtggctggactgattggcccccttcccagaggccctgcaaggacttcagatgtggtcagcgaggtatgtggatggtgccagcctgccggccctcgtccagccaaactgcaccaggaacaggcaagggtcccagagaaacagcggggtcagctgctgccgcctttgctcctgctcttaatgctgtcctatttcttcctaagaggaagctggtttactctctcaagattgatgggcaaagttttatatgacc

SEQ ID NO: 22725 - DNA, 1217 bp, Homo sapiens
cacttgtctgtgttccagtttgcttggtgagcacacagcattgtgttcaggagtaggagctggcagagcacacttcctttggggaagtggtggaattaagtgatttgcttactaggatgggtaacttggaggggcaggtgactgtgtcatctaaaatttgtcctctagatgccccatcctggcccagaagggctggtttctatgtgggttgtgaagactttttctgccctcatactttaatttcacgcctcaaatttcccttgcttcctacatgttaacacaggcctgctccctgacatttgtctgggaatagcatatagaacccactggccattatgggtaagaagagaattgcgagaatgtgaccagggcactgaaacatctgatatctctaggacagatataggaagcacagatatagtctttcctttaacttataaaggtaaaaataaaagtattgtgaaagaatttctgcttgccaaagttcaaaggtcttttccaaccacttatgaatcccttgctcagatttcattttcacgcctagatgccagcattaacactgctatctgaatcgggccctcctgctagaagttgtttttattcaggagagcctactactgaatttctccagatgtcatggtcacagttctgttcccagtgctccattttccttgtcttcctctcttttaggtactgcttctccgagatggccccagtgtgtgcggtggttggagggattttggcacaggaaattgtgaaggtaaaacatcactgtggagcagaaaattgttaaccatgactttgtatatgtgctgacagagagaatggaaactgtcttagacagctgcctgctttctctcaccccattcatctttgtttcatgccctccccatttccacctcatcccattttctctggcccatccaggtgccattcagcaaatgaccttggagtgcctgctctgtgcttagctcacagttggccatagtgcctcgaaggtgtgatctgctctcccctaactgtattagttatccagtgcctgttgtattggtcagggattctgcttctcatagctctataagtgagtactatcatgatccccacttaagaggaagacacttgggcccatgaaagggactccagaacctgtgctcttaacctctgtacagtttatctctattcatcaccatgacatcaaagccctccctttttttttt

SEQ ID NO: 22726 - DNA, 1052 bp, Homo sapiens
cctaaaagttgtggctggactgtgggcggggccatagtgttgcttgttcagctgtgtggcggggctcggacgccgggcggaagctctgtgggcggggccagaaagttttgccttactggaagtgggtccagattcttggccgggacgttgggggcggacccagaggctgacgcaatggcgggggcggggccacaatgtagtgggggagccagggggcggggccagggtgctggcggggaatgctgggggtggagccagaaagtttcgtctgagccacgggcgcggccagagcgttggccgggaggcggggaagcggggagttgagccagaaccctggggaagccatgggcggggccagatgctgacgcaacgaggtgtgggagggagtcagggggcgtgtccaggaggttggccaggccaatcggaggcggggccagagggttgactgggcaggccgggggcggggctggaataataataagagatggtaggggcgggtgtaggctgttgcctgcgagccaggaggcggggaaagagcgtggctgggaaagtcgggagcggggccacattaatggcccatgggtgggggcggggccagaagtctggcgggaaaggcggggccagaaagttttttcccgagccgtgggcggggccagagcggtttccaggatgtcggggacgtggccctggcattcccagccggattgaggctggagctttgcacagaaaatctggggcgggcctgggtagttttgtccttgttggggcgggtggagtattcagtggggcaaaacgccagttccaggaagcctcgccagtgagttctgggcctgtgtacagaatcctttcgggggaggcgggaggctgtcgaccttccgtagggcgctggagacgggactaggacgtccctgaggaaggcgcgggcttggaatgttctctgagagcttgggcagccaataagagtggggttcggactttctttgagcgtgggattgggaatgtttctgaaccttacctggtggagctagaatattcgcctggatatgagaggc

SEQ ID NO: 22727 - DNA, 1052 bp, Homo sapiens
agagagggtggcaggggagctggtttccacagggtgctcagggaaggcctcacgagaaggcagcattggagcagagacctacaggaggtgaggggttggagggtctctgggaaaagtgttcctggcagagggatccgctggcgcaaagcccctgaggcaggtttcagcctggtatgttgtgggaatagcaaggaagccggagtgatcgtggggagagggtgagagatgaggtcggggaggtaccaaggccagaccccacgggtcccacaggctgtggggaaggctgttactcagaggggcaccacaggaacgttctgagtggggctgcaacgtgctgaggtttgagggatatgagcggccttcttgttcagagtccaggagagaggcctgggctggggccagacttaggaggagttcaggggtctgggagtccgtctggcagacagggcacctgatgcttccctaccccggctgtctgctcctaggagattgaggaagaccgtaagaaagctgaacttgagggagtcgcagtcacagctccccgaaagggccgctcagtggagaaggagaacgtggcagtggagtcggtgagctcgtcactggggtgtgggaccctgaggatggggaggggcagagggttgaggcctgggacccaggagcccccagctgtcctgcaccagtgggtggcctccatcctggccgcatgcctccctgccccagtgactgtattttccccatctcccctcttccaggagaagaacctgggtccttcccggaggtctcctgggacccctcggcccccaggggccagcaaggggggccggactcctccacagcagggaggccgggccggcatgggccgagcatcgcgcagctgggagggcagccccggggagcagcctcgaggaggaggagctgggggccgtggccggaggggccggggccgaggttcacctcacctctctggagctggagacacctcaatctctgaccgtaaatccaaggtaggagctaggcagcgcctggagccctggctgaggttctctgttgtc

SEQ ID NO: 22728 - DNA, 1070 bp, Homo sapiens
attttttgtttgtttgtttaatagaaatggggtttcacactatgttagccaggctggtcttgaactcctgggcttaagtgattttcctaccttggcttcccaaagccctggaattataggcatgagccactgtgcctggccctgcctctgtggttctgtagaatgaagatgctaatggtacttcttcatagacttgctctgaggaataaataaactggtgatctcaagccctgagaacgatgtcacatgttctctctctccaccacctctgtccctcagggtttaaaagccccagctgggatcctctggggatagcaagtcagtccaaagccctggccaccagcaaatggtgagtttgagggaggggcctctccatttcggttcccactggcccccctctctttggttttcatctctcttctcccagccccattttttcctactctttcgtttccttgttgctgtgtgtcctggctcttttctctttctgtgtttgtctctctgcgtctcagtctttctgtgtcctgtttatctctctggtgtctcttggtattgtttctctctcccactctgtatgtctctgactcattctgctcattctgtgtcctccctattgctctctgtccccagctcgttcttttttttttttttttttttttagatggagtcttgctctattacccaggctggagtgcagtggcggtgggattacaggcgcccaccaccatgcccgtataatttttgtatttttaatagagagagggtttcaccagagtggccaggctagtcttgaactcctgacctcaagtgagcttcccgcctcggcctcccaaagtgctgggattacaggcgtgagacactgtgcccagccccagctgattctctttcttctctcctccacacttatcttaccccaacactttcttccaccttgctccccttcccctgcccccgcaccccacagcttccaggtccctagtctcagtgtcccctgtctccttccctttatctcttccttttctcctcctatttctcttggtttctcttttggtctccattgtttaatcttc

SEQ ID NO: 22729 - DNA, 1044 bp, Homo sapiens
ctagaggtcgcctgtctactttgagcagaggaaactaatctatatttttacatttagttgctgggagtttgcagacacttccagagatgtgggaggtaggagtgtggggatgagaggtggagacgtgtgtgtgtgtgtgtgtgtgtgtgtgtgcgcgtgtgtgtagtttagctattgcctttactcacctcagctgtacatagagcagcgatcctcaaacttactagtctcaagactctttcattctttcttttttagacagggtcttgccctgttgcccaggctggagtgcagtggcctgctcatggctcactgcagccttgaactcctgggctcaagcgatcctcccatttcagcctcccaagtagctgggaccacaggcatgcaccactatgtctagctaatttttaaaatatttagaagagatggggggtcttgctatgttgccaggctggtcttgaactcctagactgaagccatccacctgtatcggcctcccaaagtgctgggattgcaggtgtgagccaccacacctgggtgagatgaatactattataaaagagcaagttcagcccccttttgcctctttgcctttctgctctctgctatgtaaagataaagcattcctgctctgtggagcaggaattcaaggaggtatcttggcttcagaatcacccaacctgccagtaccttgacattggacttcccagcctctagaaccatgagctaataaatttctctttataaattcaaggaggtatcttggcttcagaatcacccaacctgccagtaccttgacattggacttcccagcctctagaaccatgagctaataaatttctctttataaattacccaggctgtggtgttattttattttttatttttatttatttatttatttatttttgagacagagtctcactcttgttgcccaggctggagtgcagtggcgcaatctcagctcattgcagcctgagcctcccgggttcaagcgattctcctgcctcagcctcccgagaagctgggattgtaggcacccgc

SEQ ID NO: 22730 - DNA, 1080 bp, Homo sapiens
gagaaagggcgtggtgactcactcctgtcatccacagcactttgggaggctgcggtgggaggatcacttgagcttgggaggtcgaggctgctgtacgccgtgattgtgccactgcacttcaggctgggtgacagagtgagaccctgtttcaaaaaaacaaaaatgaattttttttttttttttttgagatggagtttcgctcttgttgcccaggctggagtgcagtggtgcgatcttggctcactgcaacctctgcctcctgggttcaagcgagtctcctgcctcagcctccagagtagctgggattacaggcaggtgccaccaccctggctaattttgtatttttagtagagacgggatttttccatgttcgtcaggctggtctcgcactcccgacctcaggtgatctgcctgcctcagcctcccaaagtgctgggattataggcgtgagccaccatgcccggcctgaaaaagcattttttttttaatgagaaagatggagaaagtcaaatggagaactgaagagagatggagaaaggaagagttggattacagagaaaaatcagactacagaatgactcataagtgaagagagatgcgagctgactaggacagggaagagagatgagggtgatgatgaacaagacggactgaaaaagagacagaggcctgaagatggagtggagagagatggaggggacagagggggaaacaaacccactgaaggccatgagcccagggcaaataggccaagagaccaaaagatggtcagagacacagttatacagaaactagaagatgcagacaatctagaagccaaaaaagatagataccttgagaggagcgggatgctgtcagtggggcccagcatgcataagcagtttctagcctcagaagaatgctctcattttctttttctttttttttttttttttttttttttgagacagagtctcgctctgttgcccaggctggagtgcagtggctcagtcttggcttcctgcaagctctgcctccagggttcgagtgattctcctgcctcagcctcccgagtcgctgggactacccgagtagccaggt

SEQ ID NO: 22731 - DNA, 1048 bp, Homo sapiens
ccatcccagccaccccccatcttcctggcctctttggcagctccaccctgtccccccaccccacaaaggggggctacgcagtcactgacttcctcacctacaactgcctcacggtaagcatgaaccctccttccctgaaggtgggatttcaggaagaccccaccaccccgtttcaccttagtccagggacatagttcccaagtggggcccgtggccctgagggcttctgggaagggtcccgggggggcacttgggtggtgggtggcacttggcgggggcccagccctgacagctggcctgccacagaatgacacagacctgtacagcgactgtctccgaaccttctggacctgcccccactgtggcctgcatgcgcccctcacgcccctggagcgcatcgcccatgagaacacctgcccccaggccccacaggatgggcccccaggtaagcacaggactgtggggacccggccacctctgcccagccgtctgcccatcccatgatggtctcctgtgcgtgtgagcacttgctagagcttcgaggactgacgacctccacccgctggccctggctggtgccacacacaggccttgtcctgaagatcaggagcccaaggcagggagagcctggagcgccacctctttctgtctgcctgtcccctgtggtgtctctgtgttgctgtctttgtctctgtttctgtctctctgtggctatgtctcttgttatttttctctgtcctgcagctatctctgccttggtcacctccaccctgttgtcacccagggatgccacacactggggttcagtgggggagatagcactggggccacatgcctccatccccggctggctgtgtctgcctctcagtctccatgtctctccttgtgtctttctctctgtctctctcactggcagggatgcggagtaaagacagacctgtgtatttttattaatctgggagggcttcctggaggaggcaaaactgggttctccaaaggccaggagagaacctgagccccacaggtgcctggcatttgggtgcaggta

SEQ ID NO: 22732 - DNA, 1050 bp, Homo sapiens
actgagctcctattgtattgtatacctggcagttttgggagtggggatgtgacatgaacaagtcaaagatccctggctgggcacaatggctcacgcctgtcatcccagcacattgggaggctgaggcaggcagatcacttgaggacaggagttcgagaccggcctggccaatgtggcaaaaatctctctactaaaaatagaaaaatcagccaggcatgatggtgtgtgcctgtaatcccagctactcgggaggctgaggcaggagaatcacttgaacctgggaggcggaggttgcagtgagccgagatcatgccactgcactccagtctgggagacagagtgagactgtctcaaaagaaaaaaaaaaaaaaaaaatccctgcctctggggagctgacctgccagtggaggatactcaaagttgggctcatcagactgtactgagtgctgtggaagaaaacagagggaatgggggcagagagggctggcggtgtgggtggtcattgtaaccggcccttgctgaaaaggtgacatttgaacaaagacctgaaggaggcgagggagcaagccccatcagtgtgaagccctgtcagggttcctagctgcaagaacagcaggtgcaaaggtcctgaggcagggatttgaaaacacttacccagtggcacagccagtaagtggtggagctggggtttgaactgggtagtctggagtcagagtcagattttttttttttttttttttttgagacagagtctcactctgtcacccaggctggagtgcagtgacatgatcttggctcactgcaacatccgcctcccgggttcaagcgattctcctacctcagcctcctgagtaagctgggactacaggcacccaccaccaccatgcctggctaatttttttttttttttttttttttgtatttttagtacagaccgggtttcactgtgttagccaggatggtctcggtctcctgaccttgtgatctgcctgcctcggcctcccaaagttctgggattacagacatcagccaccgcacctggccagtttt

SEQ ID NO: 22733 - DNA, 1025 bp, Homo sapiens
tccttgcaatattaagtattccaatccatgaacatgggatatctttccatttatttgtgtcttctgtaatttcttgcatccatgtatcatagttgtcagtgttcagatctttcacttccttggttaaatttaatttaatctttttgatggtattgtaaatgcgattgtttcttaagtccttttttggttaggttcgttgttagtgtgtagaaacaccactgatttttccatgttgattttgcaactttctgcaatttcaatttgtctgttctagagtttgacataaatagaatcacacagcatgtactcttttgtatcaggcttctgttgctcagcatagtgattttgaaattcatctatgttatgtgtaccagtagttcattccttcttttgctggcaatatgccattatgcagatataattttttcatccattcacctgctgatggacctttgggttatttccagtgtttggctgccatagatgatgctgcttgaacatgcctgtacgagtctttgtgtggacctatgctatcatttctcttgggcaaatacctagaagtggattagtagggtcagatgataagggtatgtttaattttgttagaaactgcccacctgggcgcagtggctcacacctgtagtcccagcactttgggagactgaggcgagaggactgcttgtgcccaggagtttgagatcagcctgggaacatggcaaaacccagtctctaccaaaaatacaaaaaaattagccaagcatggtggcacgcgcctgtagtcccagctactcgggaagctgaggcaggaggacctcttgagccctggaggtggaggttgcagtgagccaagatcatgctactgcactccagcctgggtgacaaagtgagaccctgtctcaaaaagaaaagaaaaaagaaaaagaaaaaagaaagaaagtgccaaatatttttcaaagcagttgtttaccaccagcaatggataagcattccagttgccccacatcttccccaccacttaccattat

SEQ ID NO: 22734 - DNA, 1047 bp, Homo sapiens
ttatagcctttcccagtcattcctgcatccctcccttgaagcggccacacgtctgatatttttcccccactataaatcagttctggatattgtagatttgtttggttttttttttaagatggagtcttgctctgtcgcccaggctggagtgcagtgtggcgatctcggctcactgcaacctccacctcccgggttcaagaaattctcctgcctcagcctcccgagtagctgggactacaggtgcccaccaccacgcccagctaattttttgtatttttagtagagacagggtttcactgtgttagccaggatggtctcgatctcccaacctagtgatctgcctgccttggcctcccaaagtgctgggattacaggcgtgagccactgcgccgggcccatgttctagatctttacacaaatggactcacacagtgtgtagacttttgtgccaggcttcctttgctcagcatgatccatttaagacccatttgtattgttgctgtagaagtccttcattcccttttactgccaaactgtattctgtcgtgtggatgtaacagtgtattcatttacctgttgatggctttctgtgccatttacagttaggggcttttatgaataaggctgctgtgaaatttttttttttttttgagacggagtcttgctctgtcgcccaggctggagtgcagtggcatgatttcggctcactgcaagctccgcctcacaggttcatggcattctcctgcctcagcctcccaagtagctgggactacaggtacccaccaccactcccggctaatattttgtatttttagtaaagacggagtttcactgtgttagccaggatggtctcgatctcctgaccttgtgatccgcccacctcggcctcccaaagtgctgggattacaggcatgagccaccatgcccggctgctgtgaaaatttttgtacaggtgcttttgtggacatacttttcacctcccttgagtaaataccttggcgtgacattgttgggtcatagagttggtatatatttaactttacttaa

SEQ ID NO: 22735 - DNA, 1031 bp, Homo sapiens
atatgggaggtgggatggataaaacttggatgagtcagatgtggggtcaaacttggttcctaagtccccagagagagctgtatcagtgagctgtcactacataacacacagccctggctgggcacagtggctcatgtctgtaatcccagcactttgggaggtcaagatgggaggatcgcttgagcccaggcatttgagacctgcctgggcaacatagtgggaccccgtctctgcaaagaattaaccaggtgtggtggcgtgcgcctatagtcccagctcttcaggaaactaaggtgggaggatccctggagcccaggaagtcaaggctgcagtgagctgtgattacaccactgcagtccatcctggccaacagagcgagaccctgtctcagaaaatcaaaataataataaacagaaaaaagaaaaccatgatcccaacggttagaatttggactgggcgtagctaggtgcttctggcctgggctgggtgtctgtagtcagctgttggacagctggtgactgcgtctagggcttggctggctgttagctggggtgatggggtgatgggcacgtggctctcatcctcttgcaggccagcctgggcttcttcacctggcagctgggcaaagactggaagtgtgccaggctcagaatcacacaccatcggccaggctccttggctcatgcctgtaatcccagcactttgggaggccgaggcgggcagatcacgaggtcagttcaagaccagcctgaccaacatggtgaaaccccgtctctactaaaaatacaaaaattagccgggtgtggtggcacgcacctgtaatcccagctactcaggaggctgaggcaggagaatcgcttgaacccgggaggtggaggttgcagtgagccgagatcatgccactgcactccagcctgggcaacaagagcaagactccatctcaaaaaaagaatcacacaccatcactttcaccacattctgttggccaaagcaagtcaagaagccagcccagggtcaagggctgaagtcat

SEQ ID NO: 22736 - DNA, 1038 bp, Homo sapiens
ttcaagcaattctcctgcctcagtctcctgagtagctgggattaccggtgtgcaacaccatgtctggctggttgttttgtttttttttaatcttcatgtgtgtcttgaaaggcttcccctgccttctgggttgagagcagcaagacacctagctggcctggtgagggtgcacacagtgcaggtgccgcagcgcccccaaaactgctgttttccattgcgtttatctcatctggaaaatgggggtaataccagggtgtttggaaggattcaaagaaccctggtacctggctgaagcaggagatctgttaacccttccagatacacacacaggccatgtgcggcaaacagcaccaaagtggggccggggacttctgtccagcctcactgggctgtggcccaaaagctctgggagtcgccccattagatagcatcaacagtggcaattaaaatgatcacaactagcgtacacactgcttacaaagtactttagggcatggattagaggtgttcctatgtaacagtcccatggaggacgtagtgttatcctccccaaacggaggcacagaggggataagtaacttgtcttagggtacacggctgggaacgggaagtggcagcccagggatgggagcctcagaatcagtcaaggtgcacttgattcctgctgtgagcatgcacaggcagtaaccccagcccctcgcccaatttctttttttctttttctttttcttctttttttttttgagctctgtcatccaggctggagtgcagtggcgcaatctcagctcactgcagcctctgcctcctgggttcaagcaattctcctgcctcagcctgcggagtaactgggattacaggcatgtgccaccacacccagctgttttgtattttagtagagacaaggtttcatcatgttgaccaggctggtcttgaactcctgacctcagttgatcctcccaccccgccctcccaaagtgctggcattacaggtgtgagccaccacgcccggccttcttttctttttgaaatggagtctca

SEQ ID NO: 22737 - DNA, 1022 bp, Homo sapiens
tgaattgcgttcctcttgagttgtagcaaattgtgccagttgagacccctaagggcagtatatacaagcatctttactagacataggctttattcctaatgcgacgggtggtaaatggtaccctagggtgaaaaatagtgccctggggtgcgttttgctgtgcatttctcttattacaagtgaggttgagtagctctgaaaatacttaagccttttgtctttccttttctgtgcactgtctgatcatatcctttgcccctttttcaccagttgtaattcttagtgatttctagagtctctctatatatgagagagatgaactttgtatttggagttgcaactgttttccccagtaagtcatttggcatgtgacttaatttgtggattgtgtgtgtgtgtgtgtgtgtgcgcacttttgatgagaatgaaattaaatttttttaattttttggtatctttaagctttttatgtttaaatgacttcaaacacataaaaagtttcagaattagtacagagagctcataggagttctttactcctcaactagatgtattagttatctattgctatgcaggaaattaccctcaaaacttagcagcttcaaacagcaagtattcacgtgtctcacactgtttctaaacattaggaatctgaaagcagcttagctaggaggttctagctctggatctcccatgaagttgtggtcatctgaaggtcccactgatctggagaacctgctcccacgctcacttgtgtggctattagcaggaggcctcaattgcttcctcagtgggcctctccaaagggcagcacatgacacacagcggttggcttcccgcaaagtgagtgacccaatagaaacagacagaatgctcaggatgggagccgcaggctttttataactaatcttggaagtgtcatataatcacttctgccaaattctattggccacaaagaccagcatatgggaggggactgaacacaaggaggtgaggattgttggtggctgcctcccacgtct

SEQ ID NO: 22738 - DNA, 1038 bp, Homo sapiens
actccagcctgggcgacagagcgagactccgtctcaaaaaaaaagaaaggcaatgagctacctcaatgctgtcttctgatttacccccagtgggtttggggaagcactgtgtgatcaaacacactagtatttctggagtgaaatcgatgggtatccagagtagttgagataaatcatgaccataaataacctcatgtagccgggtgtggtggctcacacctgtaatcccagcactttgggaggctgaggcgggcgatcacctgtggtcaggagtgtgagaccagactgggcaacgtggcgaaaccctgtctctactaaaaatacaataattagccaggtgtggtgtctggcacctataatcccagctacttgggaggctgaggcaggagactcgcttgaacccaggaggcggaggttgcagtgaggtgagatggcgctactgcactccagcctgggcaacagattgagactgtctcaaaaaaacaaacaaacaaacaaacaaaaaacctcatgtcatttcggaccagattttgaaattagatacctccttagccccatttttaaaaagttatgtatataattagagcagtgctgtccaatagaacttcatattttatttattgtttttttgtttgtttgtttgtagagacaggggtctcactactgtggccaggcaggtctcaaactcctgggctcaagcgatccccctcccttggcctcccaaagtgctgggattacaggcctgagccttgttttgtattctcttaatttacttatgtctgaatgagccccacgtggctcgtggcgctgtgccaggcacagtggttttagagttgggggaatttgggccttgctgaagagggtctcaccaagcctatcctgaggattggagggtccagggtgcagtctggtgcctggcaggtagtaggtgctcactgcacacagctcctcccagctcggtcggggggtcctcatcctaaccccgcgggttttctttgccccgattctgcagacgagtacgtgtcttcctcccgctcg

SEQ ID NO: 22739 - DNA, 1043 bp, Homo sapiens
tttggaggttgaggttgcagggagccaaaatctactgcctttcagcctgggtgacacagtgagaccctgtctcaaaaaaaaaaaagttttaaattatttagtcatggtgttgtgctcctgtagtccttgctactcgggaggctgaggctggagcccaggaggtggaggctgcagcatagtataatgatgccactgtgctccatcctgggtgacagcgagactaaaacaaaatacagaactctggctaacaatttacaagccgaatttcactaatgtctgcagtttcctttgaaaaatgtaaaacaggcctggcgcggtggctcatgcctgtaatcccagcactttgggaggcaggcggatcacctgagggtcaggagtttgagaccagcctggccaacatggtgaaaccccatctctactaaaaatagcaaaagttagctgggtgtagtggcagggcgtctgtaatcccggctaggctacttgggaggctgaggcaggagaattacttgaaccccggaggcggaggttgcagtgagctgagatcacgccattatactccagcctgggcaacaagagtgaaactctgtctcaaaaaaagaaaaagaaaaaaaaaacgtaaaacaaggtggattaatgaacagatgccccataaaacaaaagcactgaaatgttaagggcagaatctaggtggtggggtatgggggtatgcacagaaaaattcccttgactttaactgaaagtgtcctaatagggaaatggcacattggggtttcggggccatgtaatggcacaggtttctatcatggccctgcacctgcttttgagtctgtaacttggtattatttttcctaaagcgggtcctccagattataaaagcctcaggcatcagccaggtacagtgactcacgcctgtaatcccagcattttgggaggctgaggtgggtggctcacctgaggtcaggaattcgagaccagcctggacaacatggtgaaaccccatctctactaaaaacacaaaaattacccaggcgtggtggcaggtg

SEQ ID NO: 22740 - DNA, 1124 bp, Homo sapiens
tttaggctgcctgagacatgctccacgacttcctggatgggtgactttgggcaatggacttcacatctccaagcctcagttttctcatcctttgaaatggggttatcacgatacccgcctcatggggccattgtgaggatactgtgagatcatacatgagaaaaacacataaccctggtgcctggaacatggggtggctggttaagtgatagctgttacaggattcgagagcatggactctgggccattgtgctgctgatgcttggtggatgctgttgagtgagtgacttcacctttctgtggcctcagtttcctcatgtggaaaatgggagacataatagtgtctatctcataggtaaattattcagaaaggcatccagcacagagtaagcacactcttaacagctctttcaccggtagttatttaaacatgtattgtgaaatacattcttgcaacttctttctcactacttattctagaaacagagactcggagatctgaaagtggaacagcatcaaacacacacatcacccagaaacctagaacgttagagcttgcaagaagctcaaagaagctcaggcctaatctgaaacctattaacagaacccagttccaatgtaacaaatgcttattgagcacctactatgtgcatgcccttcactggacgtttagaatccgagactgatctcggctcttgaacagttcagaacttaatggggtagacaaagaccaaaaaacaaaaaaaaattatagatagtggcccatagtagtgagagtgagattgagggggagatgagaggaggatacaaagggagtggtcagctccacctgaaagcttactgggtggttctggaaggcttcctggaagaggtaaccagtaagcagaaccttgaagaattttgttgatatgtttatgtatgtatagtatgtgagctaacagacacactaggtttactatgtgcaggtactgtcccaagtgctctacaaatatcagagacagccaaggagcaggagagacaggactatggagggggcgaggacagggccctgggtacactcctgggactgggtagatgatgagatggtctctgaatggggagtgcgggagcaggtggttgatgag

SEQ ID NO: 22741 - DNA, 1046 bp, Homo sapiens
aggctgaaggaagtcagacaagggtttcacaaaagcccacgaattattctagaaaaatgtacggggtggcataccgtgaacttgcaatcttgataaatcaaacatggctgcacgcggggatttcctttgcttccacctgataccacatggtggctgtatgtttattttattcatatttatttgtacattgaataattttctaaatgtgcattatttttgtattttttgagatggagcttcgctcttgtcgcccaggctggagtgcaatggtgtagtctcagctcactacaacctccatctcccaggttcaagcgattctcctggctcagcctcctgagtagctgggattacaggtgcccgccaccacgctcagctaatttttgtatttttagtagagatggggtttgcctatgttggccaggctggtctcgaactcctgacctcaagtgatccgcccgccttggcctcccaaagtgctgggattataggcgtgagccaccgtgcccggccttgttactttaaatgaggcataaagtctcaaactctgtatgttgattcttaaaatctagcaggctcctgcgtttttcttcacctcgtgcatgtaggaaaaaaggggtgtgtcaaggatgcccttctggtttaacaaagaaaatttttaagcatttatactggtggatttaagcatttctctgggtggatcctggggagaatcacccagttggggggccatttggaaaaagcataggagggcttttagggggtgtgttactggggtatttactacctgggagccagggtttcttaactacataccaggccccgggcagtctgtgttacaagggtcagcaaactaggaagcccttggaccaatcccaacctgcagcctacttttttttttcttcttcttgagacagagtctcgctctgtcgcccaggctggagtgcagtggcgcgatctcggctcactgcaacctccacctcctgggttcaagcgatctcctgcctcagcctcctgagtagctgggactatgggcgtgtgccaccgca

SEQ ID NO: 22742 - DNA, 1043 bp, Homo sapiens
tataaacataaaatctgccaaaaaatgctgatattaccccacatggagaaacactgaacccctcttcagaaatcagatgccaatttaaatattactatcagagaaatacactctgatttttttttcctattccctttcttttattttcttttttgagacaaggtcttgctccgttgcccaggctggaatatgatggtgccatcatagctcactataacctcggattcctgggctcaagtgatcctcttgcctcagcctcccagaatagctaggactatgggtgtgtgccacaatgcctgactacttttttatgttttaattttttgtagagaagggctcttgctatgttgcccaggctggtcttgaactcctggactcaggtgaagtgatcctcctgcctcagcctcccaaagtgctgggatgacaggtgctagccactgcacccggccctatttcattttctacagtgttggttgcaactctctacattaatttcatgtaatgggctatgctgtgcagtctgagaaccgctgtcctagacaaactcttgctcacacacataaagagatgtataagagagtgttgtatcacacgttggggtgattgaagcatcattcgtaacagaggagaactggaaacaccatcatagatggcagagccgtggagtggaacattcggcagcagtaaaaggaatgaaactgaacagttttgaaaatccgagtgaaaagccagctgcaaaggcatctgtaaggtgggatgattgtcttagtctcaattgatgtaacaaactaccacaaatatggtggcttaaaacaataccaatttatttatctcacagttctggaggtcaggcggccaatatgggtctcagggctaaaatcaagacattggcagtgctgtgttctggaggctctaaggagaatctgcttccttatccttccagcttctagagaccacccatgctctttggcttggagcctcttcctccatttgttttatttatttattctagacggagttttgctcctgttgcccaggctgga

SEQ ID NO: 22743 - DNA, 2016 bp, Homo sapiens
cttttttatatttatttatccttggcctgggggctgtctcctctcactcagtggtgtgtctcatttgttctcctctgtgcctgagccagcacatggcacatcatattttctcagtaaatatctggcagaaaaatgtattcatcagcctggccaacatggtgaaaccccatctctactaataatacaaaaattagccaggcgtggtggcgggcacctgtaatcccaactacttgggaggctgaggaggaagaatcgcttgaacccgggaggcagaggttgcagtgagccaagatcacgccactgcactccagccagggcgacagagtgagactctgtctcaaaaaaaaaaaaaaaaaaaaaaaaaaaaaaaatatatatatatatatatacacacacacacacacacacatttacatagccccgccttcatcaaatgtcaccctgccccttaaaatgccgcccatgcatgttctcccacctactgcttttgtttccaatcattcctaatggcccggatctattggatcccagcatcactgcttgttagcgcagtggccttgggcaagtcactcctctggtgcagatgggggtccctaagaccaccctcagtttccatgattcactagaaggaatcacagaactgagaaaaattgttatagtcaaggctacagtttattacagcaaaaggatacagagtaaaatcagcaaaggcaagagccacacaaggcgaccccatcagtctctctgattccttaattatctaacagcagcacatagggcagaggccaagagagaccagcatgagctgccagatgtcgtctctcagtgaagtcccatggacagtgctcagttctcccagcaatgacatgtgacaacaatgatgtattgctagccagggacacttacttgggccttggtgtccagggttgttattggggtcagccatgtagacttgtgctgaatactgctgagagatcgagacagacggtaagaacggctgagagctgatgcacgccaggtgtccttccatgcgttggccaggagtgatctcattttagcccatccatgaccctgttaaatagacatctccatttttccagacaaggaaccaaggctcattgaggagaggtcacttgcctgaagtcccacggctaataggcaaatccaggagtctgatccttaaacctccacccttacagatgtggccttggacatggctgcacaccctcgcgtgagttcactcactcaggatgtattgagccattgttccagggcaggtagcattcaaagcatcaggggtgctgttatagccaaggctacagtttattacagcagaaggacacggaataaaatcagcaaagggaagagccacatagggcagaggccaggagagaccatcccgaaggggaacatccctgtgcttgtggggcttccatcttaaggagggcaagcaggcaatgggcagatcaggaaacgaagatatgacttgccaaagggtggtaagtgccatggccaaaaggaggcagagagagatggggtgtctgcttagttgggaagtcacagaagagcgggacgtgatgtttgaacagagacgataattataatggccactttcagaacacttactatttgttggataagtaataacagtaatatatgtaccaggcaatgttctaaatgcttgaatgcatctcatctttccaatcacagagatgctcttattatcatcactttacaaatgaaagggaggttagggaagttggcagaaggcacacagccaggaagcaggggctccaggatctcagcccagggatcttggcctcagaggctatgcttttcaccactgtcctgcctctcagtgcatggagaaatgaatgttcagtgcctagaagggataatcagggaatatggaggttaaggaggcaactgaggcacagagaggttaaatcgcagggttcagaagtgttgggggtgggactcaaagctaaatgatctgcctccacaatctaagctcat

SEQ ID NO: 22744 - DNA, 1030 bp, Homo sapiens
gaggagccggggctgaagcggcagaggggggcaccccgggtgggcggaggggggatccccacggggtcggggcggcaagaggacaccccgacagcctctgcaatgtccggggcccaacttccagagcaacatgtgtagccacgtcctcgcctagtccaggtggccgcaaccttgggggagagacagggcaggacaggaccaaggaagaggaaggagagacggagccagggacagacaggaggtccgggctgccgctgctgccgccaccaccactgccgccgccccggggcctgccccccgacatcggctctctgagccctcctcggaatcttggggtcgctggacgccgggttccggtcctggcccccccgccatccccccaacagaacagggtcatgaaaaggtaaggcggggacaggggatgcagggatggtggtgggaatgtggacccccaaatctaggacagaggaagttggcaagaagcctcgtggagggagggggtttgaacggtgggcaggggtcttgacccccacctagctcccctgtccctcagggactctcctccaccctctctctctccctctctgagcccctttttcctgagtccctacacctcagacctttcacgcccccatttctctgacacttggctccctctccccatccccacatacctgatgccccatatccctgtgcctccatctctctatctcaccttctccctgtacccccctccctgcatcagtccccccatcgcgagccggtcctctccctctctcctctcgctctcccctcccatgtcagagctatgagtctgctattaatacccccgccaaggaccttgagggcatccaggcccccagcacccctcgccccaagctcccaccccttcctcaaggttctggaacacccttccagcctcttccaagcatcaggattcgggtggggagagaccgatgttgtgtgtgtgtgttgggaggtgaggggggaggaaacgggatgccgtctgcagcacaactcgaggttgtgg

SEQ ID NO: 22745 - DNA, 1031 bp, Homo sapiens
gtcgccatttcttaaaacatttcttttctccttttcgttttcccaattgccctgtccgcctctatcttctctgtccccctccatctaggtctctgtccccccctctctctgggtctctgtccccctctgtctctgagtctctatcctctcaaggtctctgttcccctctctctgggtctctgtcctctctcaaggtctctgtccctttctctctggatcaatgtccctttcctgctgccctctctgggtctctgtccccctctctctcagggtccctgtcctgcttggtccctgtactttttcttggggcaccctctcaacacccctcctcctgcctatctctgcatctctttgtctttctgtagtctctgctttccaacctgctgtccagcccccaccagtaggtggggagtggtggggaacacccctggtttcggaagagtgagagtgttgatttgggagggtgagggtggggcctgggggcggggcttcttggcctcagattagacagtgactttgacacgaagttgaagcaccttaagccctgtatctcctttatatggaaacattaagctgctctcgcaggtcaggtggaggatccctttccctcccgccctgcttttgctaggggaggggggtgccctgagcctgagtcgcagccagcctgggagctgggccatgttggccgcagatggccccctggtgaaggttcccgttggctttgggaagtagacaacgggtctgcctcacggggctgaggtgggactggaggatttcgagggcagaactctgggaaggaaagaaaggcttaggacccaaccagcattccccctggcactgcgggggcctggccagctcatggcgttccctgagcctgttccccaactgtgaaagggggtgatgatcttcacctcccggcatcctgagcggccaaggtgagcagtggggtctgagagtccagtgggggctgtgggcatgtcgggagctcatcacgaggcctcgtacataccaggtgtgtttgaaaccagagt

SEQ ID NO: 22746 - DNA, 1038 bp, Homo sapiens
ggcgtgtgaggagggtgcgggggtcggggcagggaccggagtctaggggactgagggaccaagaggaacagagactcaggcccgggactggggcaccggggtgggagatggaaatggaaaacctgggccaggactgaacccagccaggcctgggactgggttctggaaataagagtgcggatggcggtttgggggcccagggccagacacgcaggcctatggattggggaccaatggatggagacccaggtccaggtctcggggacccagggacagagacccaggcccaagactggaggacatctagggctctgtgcttgaacctgatttgaggttcccataatggggccagggcaggtttgggggtgaagcagacgtcctggacccgagagagccgctggggataggggggcagatgtagttcctaagggtgagtccacaggcggtggggggtggggggctgtcctggcgctctgggcctggggaatgtgaggggcaggactggcaggtggctgggcggggcagtggggaacaaaggtgagcgaaaggaggaggcagaatccgggcagagggcagggagagggcctgtggggaagggacctcagtcctgctcccacccgctccctggagagcaggcggccagacacccaggtcagtgctcagggaccagctcttggcccctgccccttgcaggcgctcgcatgtggctcctctcggaccccgtagtccctgtcatatcccttctctccagctgtctccatgcctgcctcgtacccctcctatttgctctcccttccactctgtcttgcctttctcgttggggtgaaaaagtcttactctcttaagtatctttcatcgcctgagtttcacctcattgaccctgtttgtctcctctcagtgtttctctggctctcagaccctatctctattgcgtttgtgattgttttgctgttttacccactgcaccgtatggggggtgggggtgtcggggaggtgtgtctttcagtctttgcatgtctgtttctgcatatccaatcc

SEQ ID NO: 22747 - DNA, 1081 bp, Homo sapiens
gcttgaaccccgaaggcggaggttgcggtgagccgagatcgcccctttgcattccagcctgagcaacaagagcaaaactccgcctcaaaataactaactaaataaataaataaattggggtgggaaggcattgaccctgagctgagagagaactggctcgctgttgaagcagggccacgcatttgattgacagttcgtttgttggaggggcgtggtcacgctcggaaactccgccgtgacgttgcaaaagctggaatctccgcgagaagtcctgtcttacttccacttcccacccttcgggttgcggtctcgaaaccccgcctctcttcgtgacgtcagcacgccgggcgcggtaggctataaaagcctagtggccattgtgttcgttgctcttatcggttcccatcccagttgttgatcttatgcaagacgctgcacgaccccgcgcccgcttgtcgccacggcacttgaggcagccggagatactctgagttactcggagcccgacgcctgagggtgagatgaacgcgctggcctccctaaccgtccggacctgtgatcgcttctggcagaccgaaccggcgctcctgcccccggggtgacgcgcagctcccagccggtgagtaaggggtcggaacgcctgggtccccacggggctgggggcccggatttagaaaggagaaggggttgggagcctggagtcctgagcctgagggaggagggatctggaagccagattcttgggtcccccgtgaaggaatcatctgccaagtagggggtcgggtcagaatgtttcagtctgcgagggaggagggtgtgagggtttgatttgtcaatcttcagcagaatgagagagctagggactatgactttgtcgccaagggaagcaagtaaagacttttgttcttggttcttgggactgggagttctgcgtctgaagaaagagagggctgggggcttggacccttggatctaaggcagaactaggggctcagactcctggctattgagagataagaacagagccaagggacagagatgggcgtggccgagatcagaaaggaatttgggactctcgcgt

SEQ ID NO: 22748 - DNA, 1035 bp, Homo sapiens
gcccagccaatttttaaattttttttttctttttgaggcagagtcttgctctgttgcccaggctggagtgcaatggcatgatcttggcacactgcaacccccgcctcccaggttcaagctattctcctgcctcagcctcctgagtagctggggttacaggcacttggcattatgcctggctaatttttgtatttttgtagagacggggttttactatgctggccaggctggtcttgaactcctgacttcaggtgatcctcctgcctcggcctcccaaagtgctgggattacaggcgtgagccaccgcacccggcccaattttttacttttttttttttttttgtagagacggggtctagccatcttttctaagctggtctcgaacttaatgtgctcaaatgatcttgccttagccttccaaagtactgggattacaggcatgagcccctaaatttggcccctacattttctttaatcttaatcaatttacatttaaacagcccatgtggctagcggctactgtactggacagcgcagatccagagtttaggcagagaagagacccccaggcctgagccctgggccacactagcatgtggaggtcaggaagaggatggagccgtcaaaggaggtggaggggcagccagagaggacagaatcatgttctggaagccaagggcagaaagtcaagtcagatgcaggtggaaattaaccactggatttgcaagatgagggttcctggcctcctcctcaggaggaaggttgtgcttgtctgagggagccgaggaaggagggccggtggtgaggacaggaagtgtggctgaccgagcctgaagccctgcagctgtggggtctacgttggtaggagaggctcccctcacaactggagtcggcactggcctggttgtctgggaggcagaggtccctgataaccctggagctgactctgtgtccagagcactgaatgccagggccagagaatcctgcatgacagtgacccaagcatgtttcctcgaaccctccctttgatctatt

SEQ ID NO: 22749 - DNA, 1051 bp, Homo sapiens
gggtttcaccatgttggccaggctggtctcgaactcctgacctccagtgatccgcccgcctcggcctcccaaagtgctgggattataggcaggagccactgcgcccggccccagccagggctctttttttgcaggatcatatggaataaactgagaacatgtgggtgctgtgtaaaccataaacatgaagtaattgtgatcattagcccttgtggttagatcttagtacaattatgtgcttaatcaggcctcagtgacttttgtttaactaggatgcatcctcagagcagctccagttcattgagcatttaccacattcagccatcttcctagggaggtgccaatttgggatatcctttccatgtgccccttcattcccccaacccctgctccctactcccacccacccctttgacaaagaaggaaaccagggctcagaggggtcaggccacatgtgcagcaagctggctagtaactgagtctttgttctttcccttcatgtaggtgcccactcccacatccggggactggggctggacgatgccttggagcctcggcaggtagagcagaggaggctggggtgtgagggcctctccatgaaggtcttgggtagtgggtacccagggtcctggggagtgtggggactatgttacggtcttctggacctttggctacatacccataaacttcaaccacatgtgggttttcttggtactaaagaattgattaggctaggtgtggtggctcatgcctgtaatctcagcactttgggaggccaaggtgggtggatcacctgaagtcagagtcaagaccagcctgaccaacatggtgaaaccctgtctctactaaaaatacaaaaattagccgggcatggtggtgcatgcctgtaattccagctactcaagagcctaaggcaggagaattgcttgaacctgggaggtggaggttgcaatgagccgagattgtgccactgccctccagcctgggtgacatctcggaaaaaaaaaaaaagaattgggagtgggtagcaattgctttgccaccttaaaaa

SEQ ID NO: 22750 - DNA, 1115 bp, Homo sapiens
ggaccctgctgtctccctaaggcctgtgttgtggggaacagggttgttagttcatttgtttagcccctgccacttcacaagcactgtttttggtttaggcttttcagcagcagaacatagggtaaaagttggcaggaagggagacccctggtaccttgggctcctcctgcatgggaggacagttaaggggctcccacaacccagctgggtgtcacaggctgaagtggtgggttgtgggatagtggtctgtcctggctctaaccttaggtccccaacccttgggctgaggatgttccatcccctccacatagaggaggaattggagtacaagacaggtgtgttgttgccattaaccaaactcataagagggtcagatgtcaacctccagtggctctttattctgaaagtgaaaactgtacagtcacaggcagcatagcagtgtttcactcagcaggggaccgtggatgtgatggtgatcctataagattatatcatattttgccaggcactgtggctcacgctgtaatcccagtactttgggaggccgaggcaggcggatcatgaggtcaggagttcgagaccagcctggccagcgtggtgaaatcctgtctctactaaaagtacaaaaattagctgggcgtggtggcgagcgtctgtaatcccagctactcgggagactgaggcaggagaatctcctgaacccagaaggcggaggttgcagtgagccgggatcgcgtcggctcactgcaacccagcctgggcaacaagcaaaaatctgtcttaaaaaaaaaaaagattataccgtctatttactgtaccctttctatgctttgataacgtttagatgcacaaatacttactattgtgttaggattgctgtagtatttggtgtagtaacacgcttggcctcggagcagtgggacgcaccctctagcccaggagtgttaggtatgctgtctaggctcgtggaagtgccatctcatgttggcatatcgacatcatcatcaaacgacgcacttctcagaacatgactctagtgagaagacaggttttcctcctatacctgtgaactttgatgaatccctttcctccaaatcctggagtgcaggatttcc

SEQ ID NO: 22751 - DNA, 1016 bp, Homo sapiens
ctctgctctgggctgctacttagatgagccctcaaccagtgatgtcctgagggagagctgccgtcagggcgctgcacgcatacgctggctgtggggcgctgcccggcattgggtctgtgctaccttctttgagcttttgttctctatcttcaggacttgggggtaccattgctttgctgcatttgctttttacctttagtcacatttgtggcccccccaccccgggtaagcaagtgctccagggaactcacacagtgtgctggggtggtttccctctggctgcccttcaggaagctcagctgttgtttggccttcgtccactccccagccctgcagcattcattggtcccactgtcatgctccacagtaactgttagaatgcctgctgtctggcgttgccgggtgtgtttccttgctgctgtgacagctttcagctcttcattaaatgttagcatcttgtgaggctttttctaacctgccttgtaaagtcacccgtttctattctctgtcgtcatctgatgtgatcataggatctccttatttacctctttcattagcatatgaaccccatgagggtagacacctttttttttttttttttggagacagtctcactctgttgcacaggatagactgtagtggcacgatctcggtttactgcaaccttcatcgcctccctggttcaagcgattctcttgtcttagtctcctgagtagctggaccacacccagctaattttttgtgtatttttagtagggatgaggtttcgctgtgttgatcaggctggtcttcttgaactcttggtcacaagtgatccgcctgccttggcctcccaaagtgctggcattacagctgtgagccactgcgcccagcacctttttttgtcttgtttactgcgaaatccccaacaactatagcatttccaggcacatagtagatgcttaagaattacttacttacaagagcacaaacatcggcgaataaaaagaattacctattgaatgaatgagagttag

SEQ ID NO: 22752 - DNA, 1377 bp, Homo sapiens
atgtctcttctcctcctccctctgtttctgatgtatcttttttttttttatatacgtgttttttaaaaaacaaaaaccaaatcccccacaacgtgtgtgtgtgtgtgaacctggggaggtaagtgtcacacgttgaacctcaggggcaaagagggaactgggtggggggctggggccagctggaggtggggggaggggtcggattttgggggaacctcccccattccccccactgaagttgggggtggccaggttgcaatgaggactggcctttgaacctgccctctcttccccccccagtagaactggggctgggccacccgaccctccgcttccccaaccctggccccccaccctgttcctcagcgggcagtggggtgataggcatgttgagcgcctgcccctacagttccaaagccccctttgaggctgccgcggcgtccacatgggcagggatgggtgggggagggtgggcagggctgcggcgtgtccaggggccgccgtattaattgactgttcttattgtcactgcagccaccacgcagctggcttgcagctgatgcttacgctccccttacaacacctcagtgtatggttggtataagggtttgtatcatgggtaagatcactcagcaccgcacaccagcccagcttagccaggcagctcaggagcagcgaggcgcccctcctcccaccccagtcgcccccgtagcctccccgcacccatggccctttccttgtttgggtgccctttgtccctcctgccccgatccgtatgctctctgagaatcttgctgatcccaggaggggaaggatgaacctggtgggaaaggcggcggcctctccgcttgggttccacccagcctctgatgacccggcttcgtgatgtcagcggcgaggtggcaggaacaccgagggcagggctccaggccagggctccactggagcccttcagccttccctccctgcccccgtgctttctatggggctgctactgtgctggccctggagagtctttttggctgctagttttggggtgctctgccccctttctgtcttccttactgtggttgaggcctcccgagggggctggctgtggtgtccagcagctctccagaggtggtcaggagctccctaaagtgcatggaattggggcttggggtgtgggagggaccaaggggtaggctgctagcagctgaaggtgtcgtaggtttttactaaagaaccttccactgtctagagacttgagagagggaaagagagagagaggcctagacgaacacaatcacatgttttctttgctgttcctcccgggatgggcctgttttggggtttgggactctgaacccgagcggggttccttcgcttgactttgat

SEQ ID NO: 22753 - DNA, 1070 bp, Homo sapiens
tgcaggggccccgccaggccccctgggagtgtataacccgcctctctgctccctgccatttcctgaagatttctcccacccccttctggttcattttctgttctgatgtctgttccccccacactcacccccctccaaaaaaaacaaaaacagaaaaaaccggtgtggtctggggtgcggagcgtcccagctgggcctcctgccccggcttggtgtctcagggtgcatgcttggggttgtggaggagccccctcccccacagcagagtccagcgtggagttaaccttcagtttctttgcagcgattttggccgccctggcgggagggggctgttccatcatgtgggagaggaagggccggggagcctagggggtggcgggtgagggtggacgtctcccccgaccaggagtggttggggcgctgagaggaagcagacgctgagatggagcaggcccttcaccggtttgggagagggttggtctggctgtcagttgcctggctgtctgttgggcgtgtgcgtgtgcgtgatgatggggacacggggcggggattctgtagagctgggcctgtcctgactagaggaccctctggggactcctctcccctccccctccccacatctgttacagccgcttacaaacacgcagatggcaagaagattgatggcaggagggtccttgtggacgtggagaggggccgaaccgtgaagggctggaggccccggcggctaggtgagcacatcctgccttcgacgggctctcgggggccctgggcctggtggccttgttctcccttctctgctgctttctgcttctctgtctcctgccggcccacctctcccatcgcgtcctcatctccggcttctctctcttgtggccatcacatttctgacagctgcctgcctcctcgttctgggttactgtgaggagcaggggcaccagcctggagaggcctgagcccacatgctggcgtccgcccttgctagctgggggtccccttttcctgcctcattgtactcctcttagtggaaataaccccgagttcactgagctcagtgtactgggcgccca

SEQ ID NO: 22754 - DNA, 1049 bp, Homo sapiens
gcgtgacctatttttttcccccatctcgcctttctgtcttctcctcttccctgctcccacttcctggctggtctcccactctggtgccactccttcctccctgtctccataacttttctcttttctgtaccaccggttccttgaccccgacctcctctcttttcctgacctgtctcggtgctcctttatatggctccatcttttcctccatgtgtccgccctacctgtcaccctttttctcacatctgccccttttcccttgcctcttttccttgaccccatgccgtgtgcttgcagctgctcctggaacacctggagtgcctggtgtccaggcacgagaggtcactgcgcatgaccgtggtgaagcgccaggcccagtccccgggtggggtctcctcggaggtagaagtgctcaaagctctaaagtctctcttcgagcaccacaaggccctggatgagaaggtatgagaattagaagagcaggggtggagaatggaaacctatagttgactggggctgttctgagtgggagagattctggccgtgattggttggggatgttctgagttggaagaatgttgactgtgattgattgggacaggatacatagactgggacctgactggttgatagcagaaaaataaaccaggatgggggctaacagtggatggggcagattggatagctggttgcggctgcatacccgttatggagacaggagccccaacgctgccctatcggatccgtcccaggggtgttctggaccaggggcaactgtcctaaactggatcttgtctccagctgactgttgccctgccccgatccccaggtccgggagcggctgcggatggcgctggagcgcgtggcagtgctcgaggaggagctggaactgagcaatcaggaggtgtgggtgtggccaagacagggaatttgaatccaaggggaggggctaaggggctgcccacggggcggagccggttgggtgggttccagagagaatctattggggcaggactagggcagacaagctatggggttggactatggag

SEQ ID NO: 22755 - DNA, 1044 bp, Homo sapiens
ggacattgcaagagtgatggccctttcttagtgggagagctgccttgaaagagtccattgtcctgacttgggggtttagtgacgttggactgcagtgagacagagttaaagcagtgcttccccaaatttaatgtgtagtggggtggcacacacctgtagtctcagctacttggaagactgaggcaggaggaccgcttgagcccacgaagctgaggtcaacctgggcaacatagtaagaccctgtctctaaaaaataaacaaatacagccaggcgcggtggctcatgcctgtaatcccagcacgttgggaggctgaggtgggcggatcccttgaggtcaggagtttgagaccagcctggccaacatggtgaaacgccgtctctactaaaaaatacaaaaattagccgggcgtggtggctcgtacctgtaatcccagctactcgaaggctgaggcaagagaattgcttgaacctgggatggggaggttgcagtgagacgagatcgtgccaccgcgctccagcctgggtgacatagcagactctttcagaaagagagagagagagagagagagagaaagagagaaagaaagaaatttaaaaataaatataatgtatatttcgaatcacctgagggtcttgtgaaaatgccgataccgacttcagtaggtctggagtaaggtctgagattctgcaattccagcaagtccacaggtgatggtgacgctctaggtctcaggacaactgtttgagtagccaagagtatatgctgtcatgaagggctaggagacaactctggattggtccattatcctgagcagagattggtcattgtcctaccatggggtgggaaaaaaccttggattgggaggttggactgtacccctctcatgcacagtgggaaggggccagagggcctgactcttccctcacctgcccatggccccagatcctggcatatggcgacatgaaccacgagtgggtggggaacgactggctgcccagcctggggctgccccaataccgcagctacttcatggagtcgctgg

SEQ ID NO: 22756 - DNA, 1056 bp, Homo sapiens
gcgtgagccacggcgcccggcctcttttttttttttttttaaagagtctttgtctgtcgcccaggctggagtgcaatggcgccatctcagctcactgcaacctcctcctcccaggtttaagcgattctcctgcctcagcctcctgagtagctgggattacaggtgcccacaaccgcacccggctaatttttgtatttttagtacagacagggtttcgccatgttggccaggctggttttgaactcctgacctcaggtgatccacccgcctcggcctcccaaagtacttggattacaggtgtgagccaccgcgcccggccttaattcatttttaggtattttttgagacagtctcactctgttgtccaggctggagtgcagtgggacaatcatagctcactgcagccttgagatcctgggctcaagtgattctctcgcatcagcctctgagtagctgtgcgccaccacaccaggctaatttatttttaatttttttatagggatagggtctccctatgttgcctgggctggtcttgaactcttgggctgaagagatcctcctgccttgacctcccaaagtgctaggtatagtacaggctgtggtagggtagaaagagcaagttatttttgctttggaatcagacaaaactgaatttaaataccagcttgggccgggtacagtggctcacgcctataatcccaacattttgggaggctgaggtaggatcacttgaggtcaggagttcgagatcagcctggccaccatggcaaaaccctgtctctactgaaaatacaaaaattagctggcgtggtggcgggtgcctgtaatcccaactagttgggaggctgaggcaggagaatcgcttgaacccaggaggtggaggttgccgtgagccaagatcgtgccactgcactccagcctgggcgacagagcgagactctgtctcaaaaacaaacaatcaaaaagaaacaaaccagcttggccctttcttgctgtgtggtcttgaggaagcagcttcccctctctgagccccagtttctctctgtggaaagtgga

SEQ ID NO: 22757 - DNA, 1092 bp, Homo sapiens
cactccccggtcccttagacttccattcagaagtgacacctgtcacctccaccctcatgtgactggccaaagtgagtgtggccatgtccgagttccccaggatgggacctcgaatcctcctgctgggggggtgggggcagcagatgtttcaggacagtctgccacggatcagatgggtgagcaagagattcaggatgggcgtgatgggtcacacctgtaatcccagcattttgggaggccgaggcaggctgatcacctgaggtcaggagttcgagatcagcctggccaacatagtgaaacctcgtctctactaaaaatacaaaaattagccgggcatggtggcacgcacctgcaattccagctacttgggagcctgaggcacaagaattgcttaagcccaggaggcggaggttgccgtgagccgagactgtgccactgcactccagcctgggcaacagagtgagaccccatctaaaaaaaaaaaatgcttcagagattcagagatccacagatgtggaagagagcttctattttgtctcatgtaccacctcacccctcagtttggagttggagaagccgaggcttagagaggtcaaggggctggccaagctcccacagtgataaagctagtgctagggcgacacctgccaggcccaatgtgacaagatgcatcctgagtcctgtgtgccaagccttggcggggcaaagttggggcccggaggacggtaagacacagcaactgcgagttcccagagacagatccgggttccagccccagctcaccatgcactgggcgtgccacccagggagtcagccccactgcagcccccgctgcggggcgtccggagaacgcgccatctgcggcgtgagcggccgcctctcaccaccagggggcgcgctccgcctgggcccagattccaccccttgactgtctccccccaaaaatttcctttcactttcggtctctggctgtcacccggcttggccccttccacacccaactggggcaagcctggtgcgtgaggagacttggactctaggtccccaaggggcggagccagggtccccactcctggggcagggggagcagag

SEQ ID NO: 22758 - DNA, 1694 bp, Homo sapiens
accaatgaaaacacaggaagccgtccgcgcaaccgcgttgcgtcacttctgccgcccctgtttcaagggataagaaaccctgcgacaaaacctcctccttttccaagcggctgccgaagatggcggaggtgcaggtatgggctccgcgcgggccggggcggcaaggggccgggtgggatccaggccggaatggggtcgcaccctctctgtcttgcatgttttgcggagcttaacatccataatgaagcaaaatggaagtcttttgggataaggggaatctgtaggaaatgccgcggctctctttaggcctagggttggctacaatgtggcatttccttctcgaggcgagggtgatagagcttccagcacaggacaggtattttgcaactagattttgcttaccttgaactcgggtagtgggtgggggccctggggtagagtcttggccgaattggacccttgtgtgtcctcagcgatgaggaacacgcggaagtgtggccgggcggtctcggggcaatgagaaactgagttttggccaaaatggaaggtatttttatcccgctcagtgcgcgggctactttgatttcacgtggaggtgttaatcggggtcccctgcagctccggttcttttaattctcaatgcctttctgcggggggtcgagagctgttggctgcggggcactctggaatgaactcgttttccgtcgttttggggattggcgattgtcctgaggcgtgttactggaagtcgagagctgtgatgaatggttccacaaggatgggacatcttttgggcctgacacctgggggccctttccctggctcctggtgtagctacttaagtataaaggagggattggccctggaaaggtttctttgtgagtagtctgttgttggggcgggtgacatttcagagccaggccgatctaggcaagttgtgttcaccaagcatgtgtctttgtgcctagcacagttcgcaatgttttgcgtagttcagttaaccatattcctgaggcagttactggtatccttgttttacagaggaggaaattaaattggaattggtgattttgggccaaggtcacgacttcaggaagtctgtctggattttagagtctttgtaccaacgcttacaaagcatgtgtaacaaccagtgtgtgcttcatgcttttgcattaaaacaatgaggatttctacttttagtgttttttctgagacggagtctcgctgtgacacccaggctggagtgcaatggtgcgatcttggctcattgcaacctctgcttcccaagttcaagtgattctcctgcctcagcttcccgagtacctgggactgcaggtgcctgccacgacgcttggctaatttttgtgtttttagtagagacagggtttcaccatattggccaggatggtctcgaactcctgacctcaactgatctgcccacctaggcctctcaaagtgctgggattacaggcgtgagcccctgtgcccggccaggatttctactccggaggaagctgaggttcggtgcctgagcagtttaccggggaaagcagagtgctctatagcagagctagcatgggcttttgactactctgcctaatctcatcccacctgaaattcggttttcttccaaattaaatttgtggtagaaacatcctatacattagaagagaattagattgtgttaacat

SEQ ID NO: 22759 - DNA, 2270 bp, Homo sapiens
cctacagtttattagttacaaggtcttgtaactgggtagtcagtgggcagagccttgctggtcttcgttcaaatccaattgctttgcaaaatacaatctgagcataaaatactcatagaagaactcagatatgaggggagtttgggcctcttaaactgctcactcactgatcctgaggcagccttgctttctcagtccctgttcctcatctgtagaacggggctccgtgcatagttcccagctctgatggctgggtgcaaggcacgctgttggcacggtaggacaaaagaagggaatgcttgcttgtgaggacaatcaaaggctgtccttgtctctgagtccttttgcccttgtctcccacaggtcctggtgcttgatggtcgaggccatctcctgggccgcctggcggccatcgtggctaaacaggtactgctgggtaagtcgctgctcgtggcccctctgtcatgggcccccgctggaggtcagtgatgagcaacattcaccatctttcgtttgagtctcacggccatgagatcaaccccatgcaccgctctgagacctgccagccactcttccccagggttggggactccaggctcaagaagtaattatgtattaggctagtttttcatttaaacaggaacttagctctggcaagtactgcgctgtgtctggagggtgactgcataggcagtggtgggaccctcaggcggctcggccctgctaagcctttccctccctctaggccggaaggtggtggtcgtacgctgtgaaggcatcaacatttctggcaatttctacagaaacaagtgtaagttaggacctgggaggagcactggagagggtctccctgtggggtgttgaggctctgaaagcaattgcagccgtgttgggagaggctacttggggtttctgagaaggcccttggaagtggggttttgggggtgctggtagactgggcaggcctcacactctcccctctccctagtgaagtacctggctttcctccgcaagcggatgaacaccaacccttcccgaggcccctaccacttccgggcccccagccgcatcttctggcggaccgtgcgaggtgagcagagcgtggggactgcaggtggtgacgggcaggcggccggtgatgagaacttctcccactcacattcgagtttcccgaccatgagatgactccacatgcactaccatctgaggccaccccatgggcccacctcagtggggtgggtgggcatccttatgaggccctctgactgggcctgctatctgtcacccaacaggtatgctgccccacaaaaccaagcgaggccaggccgctctggaccgtctcaaggtgtttgacggcatcccaccgccctacgacaaggtgagctatgccaaaccccacaggcagcggccttacctgtggcgtccatgatgttccgcaactacctacattgtttgatcctcatgaaagcagcactggctgagacgccagtccagccgacctccttccctgtctgtccctcccgggctcttaagcccctctctttctctaacagaaaaagcggatggtggttcctgctgccctcaaggtcgtgcgtctgaagcctacaagaaaggtgagtcccagcttacgctgcaccatctacttgggagatttcaggcctgctgagggacctggggacctggagcctggcagatgatgtccttatctcacgatggtctgcggatgtccctgtgggaatggcgacaatgccaatggcttagctgatgccaggaggcttgggtgggtgcttttctaacaggcctgcagagaacagttgcattatgatatgcccagctgtcagtcacctcccagctctcaacagctccggctcttcagggtgtgggggcttagatatccttacaacttcatttgttcaccccccccccccccccccgcagtttgcctatctggggcgcctggctcacgaggttggctggaagtaccaggcagtgacagccaccctggaggagaagaggaaagagaaagccaagatccactaccggaagaagaaacagctcatggtgaggccaggggctggtgctgaggggggcatctcactcctggacaggcctggcaggtgccttgctcacagagtactcttaactggcaaaggaccagccggggttggggtgggatgcagtccatgtaatgagggcaatgcaacccctcctgaccaccaccacctgcacttattcttggcagaggctacggaaacaggccgagaagaacg

SEQ ID NO: 22760 - DNA, 1029 bp, Homo sapiens
ggttaattccgggcgtccgtgattattttctagagattaactggagtggagggcgcttgcttttgtttctagatgagtgcttcctaattcctgggggctcctggcgttaatggaggctcaagcgttttaggacttaccttcttaaaaaccaagtttaagaaggtttttttggagttctccggtcttcaggggtaattctgtggaaacggactcctaagggctaatccagggagcctgccgtctggtatttaattctgaatccttatgtactacataaggagtgaatcctgggtgggcgatcttgggtcttggagaatgatcctcgctgaaaggtgtccagggtgtgagagggttgatcctggtttagaggatgaattttgcaatccctgagaggccttctggagtatataaattgaaataacctcgggcttagatctgagtatgaattacaggtaaggtcagggtggtcatgtcttagagggtgattctggggcaccaggccttggacgccggcgctttgcaagtaaatgtagagcatggggtctgggaggttctgggaaggtctctagggctggttggctgccggcttcaaacttagcagctcatcagttttctcctcataatctgtagactgagcgtgcctaccaaaagcagccgaccatctttcaaaacaagaagagggtcctgctgggagaaactggcaaggagaagctcccgcggtactacaagaacatcggtctgggcttcaagacacccaaggaggtgcggggaacctcagaagaaagaaggggaacctggcgttcctgcacgtgtgcccacgacgagttgccctgcctgcatctaagtggcttctggggctgctgggaattgtagttgcttccctgaggccacgcccctggctcttttaaggaaccgcccgcccaaggctcactcctttatctttcctatcctttcaggctattgagggcacctacattgacaagaaatgccccttcactggtaatgtgtccattcgagggcggatcctct

SEQ ID NO: 22761 - DNA, 1010 bp, Homo sapiens
tgctgtgtctcctctgattggttgcctttgaggctgctggtcgctgcttcatttctcgccggattcgtccgcccctgcctcgcccctcccctttcgctccaattggccctgttaccatcagcccccaaatcccaccttctcttccaggcttttccgcctctccccaacccaccccaattctttccctctgggtttgccctattcttttggctctttggaactctgaattctttcttcctgattccctttcttcctgattggctctaattctctggcccgccctgttttatcttattttgccccattgccttattctacccaccttgcctttgcctccaaggtttctgattggttccctcttcctaggggtactggtaatgacatgatgctgtccagtttgacccttgaccctcctgattggctccttccctttttccctccccatctttttttctgaaccctcccacttagctcaatcctttctgacacgttctctggtctttcttagacttcattgtcccatcctttcctcttccttgctggaaatatccaaatttggtctccctcccagccttactgaggactctgttcttttgctcctggctctttcgcttctagatttttctacacttttgtctaccatttcctacctgggccccctgtccttatgactggattgccccttgtcttgctttactgtctcacctttcccccttccctcccctcattcatgtctcattagcttggttctatccatcttgtttttgaatttgcccttttctctcccatcccctccttttcctgatccaacttgcttttggcctcttccctttctctcttgactgtatcctacccacccccacctggctgactataacccctgtccccggccaggcctctctggactcttcgacactggcctccaccacgcgggctcagcagggcccgacgcctccgtcatgaaccttatctcggccctggaatcccggggcccccagcctggcccctcc

SEQ ID NO: 22762 - DNA, 1027 bp, Homo sapiens
ctcctgacctcgtgatccgcccgccttggcctcccaaagtgctgggattacagatgtgagccactgcgcccggccttttttttgttttgttttttgagacggagtttcactctgtctcccaggctggagtgcagtggcacaatcttggctcgctgcaacctctgcctcccaggttcaagtgattgtcccctcagcctcccgagtagctgggactacaggcatgcaccatcatgcccggctaatttttgtatttttgtagagacggggtttcaccatgttggccaagctggtcttgaactactgacctcaggtgatccatctgcctcggccttccaaagcgttgggattacaggcatgagccactgcgcctggccatgaaaccccattgccacaaaaaatacaaaaattatccaggagtggtggcgcatacctgtagtcccagctacttggtgggtaggtggctgaggcaggaggatcacttgagcctaggaggccataggtaagctatggtcatggttgtgccactgcactccagcctgggtaacggactgagagggtctcacaaaaacaaagaacaaaacaaaaaaggccaggcacagtggctcacgcttgtaatctcagcactttgggaggccgaggcaggtggatcacctgaggtcagcggtttgagaccagccttgccaacctggtaaaaccctgcctctactaaaactacaaaagattagctggccctagtggcaggtgcctgtaatcccagctacttgggaggctgaggcaggacaatcacttgaacccaggaggcagagatttcagtgagctgaaatcacgtcactgtactccaccctaggcgaaactctatctaaaaaaaaaaaaaggccgggcgcggtggctcacgcctgtaatcccagcactttgggaggcagaggcgggcggatcatgaggtcaggagatcgagaccatcctggctaacgcggtgaaaccccgcctctactaaaaatacaaaaaaatagccgggcgtggtggcggg

SEQ ID NO: 22763 - DNA, 1030 bp, Homo sapiens
ataaatgtctatttagtaacggtttccctctccccttgccccgaccccccctccacagccacagcccccgccccctccaccttgtacataatgtataggaaaagtctatgtatggctggggggggtggggtggcttcagagagctgggggaccccttccccccaagtcccccctgcaggccaagatctttgctaaaggccattccctccgcagggcatttggcgtcgggtgggaggggaaaacgcatcttgttaattatttttaatcttatttattgtacatacctggggcaggggcttggggaggtggaggggggagaagggtcccctctctctgcccctcccactccttttctacggcgatttgtctgtgtctggcccccacccactgcccatcccccattgttgtctggatgtggttctattttttatcggtctcctttcccctcctccccgttctcgcccccgccccaccccctgctcccactaccctttgtctcttgctctttcttgggcttctgtacaactcaacttgtatacactgtgtacacacaaccagccaaacgaaaacccaacggcaaacactttaccggcaggctggagtgcctctgtcctgcggcgctggagtgggtggcagtggtagcaggggcagaggttctggaacgggactttcccagagccctgggcagtggggggcctgaggctggcatatgttctgtgtccccgcacagcagagtatcccaccctgaaatttaatgacttcagacaacaaatatttatcactggggggtttcttttgttttttagctaaagacagggtctcgctctgtcacctaggctggagtgcagtggcatgatcatagctcactgcagcctccaactccctggctcaagcgatcctcctgcctcagcctcccaaagtgacgggattacaggcaagtgccactgtgcctggccctgtgttctttatgttacccaggctggccttgaacttctgggcttaaaagatcctcctgccccagtctcaagta

SEQ ID NO: 22764 - DNA, 1028 bp, Homo sapiens
ttcggggccgcactgactgagtttacaccctgactgctgccttctctctgtgtgcccttggggaggatactgcagccctctgcctcagtttcctcctgtgacctttgggttaagaaccatggtgtgcagttgttgggagcatcctacggctggctcctgtgaagcacttggggcttcctgggcaggacctggtggcccagggagtgtccacggctgggccagcaagcaggcaccaggagggaggcaaaggccctgaccgcctctctctccctgttcctttgcagtttctccacagtcgaactcctctaggcccacctgtgcccgtcacctcaccttgggcacgggagacgggggccctgccccaccccctgccccctcctctgcatcctcctccccttccccttctccctcatcttcctccccttcccctcccccacccccaccgccccctgcacccccagccccacctgccccccgattcgatatctatgaccccttccaccccaccgacgaggcctactctccaccgcctgctccggagcaaaagtacgacccttttgagcccaccggctccaaccccagctcatcagcggggaccccctcacctgaggaggaagaggaggaggaagaggaagaagaagaggaagaggaagacgaggaggaggaggaaggcctgtcccagagcatcagccgcatctcggagaccctggcgggcatctacgatgacaacagcctgagccaggacttcccaggtgacgagagcccccgcccggacgcgcagcccacacagccgactcccgcccctggaacgccgccccaggtggactccacccgggctgatggagccatgcgccggcgggtcttcgtggtggggaccgaggcagaggcttgtcgggaaggcaaggtctcggtggaggtggtgaccgctggtggagccgccctcccgccgcccctgctgccgcccggcgactcggagatcgaggaaggggagatcgtccagccggaggaggagcccaggctggcgctgt

SEQ ID NO: 22765 - DNA, 1033 bp, Homo sapiens
accatgttacccagtaactcatccagaatgtcttcctggagggaaacaaaaaaagagaatcaggcatttccatatccttttctggagacttcatatggaccaggtctgttctcagcaacgcagggaggtcaggcttgagctctgccttcaaggggcttccagcctggggacagagccagccatggcatcaacagccaaacaaacactaatgaacgccaggtgctaccattccaacccaaggatctggctctatgcaggtaagacctgggcaaagcaggctgggtagaatttcagaggggatgctcccccagcttgggcctcagcaggatcaaggtgagggagtttttcagttcccaagaggctgacagccccctgcgaatcgaaatccatgaaatcccgggaaggtgtgctcgggccttgaatgctgggtgaagacttggaattttctcctgaggagaccggggcagggacagacagggtcagcactggctcaggtgaggggcaggctggaggcaggggagtggggggatcgtctagagggagaggacaaggcccatggagacaggtcggagactgaggggcatgaaagttgggcacattctcacctgggtatcagaagtactgcctccaccattggtgtccggagaggtgtctggctgggaaaagtccccaactcctgttgagaaaagtggtgaggggagtaggagtgccaggaacccttggggccccagcctcccacacgaaccccaagctggcagacctgagttcacaaactcgtagattttatgtgggtcgtgagggtccttgctccggtcctctgctaaacgcaacccttctttgcggttgagggcagagcggaaattcctcttccaggttggcaggtctggcttatccctcccgggaacatatgcaccagtggcctcggcccaggcctggggcaacagtggtgtcaggatggtgggggaggacgacttagatcctgctcctggggccctaaccctgtctcccgagtcctaacaccaccctctttccc

SEQ ID NO: 22766 - DNA, 1051 bp, Homo sapiens
tggttgcatttacgccaataaatcctcagctggggtctggctttgtttcctgggggcaaaggaggtttggggttcctttcgcaggtactgcagtgccagcctcagcagtggggggaccggccttggcacctgctggtggctgccattctgtggatctgcgtctcccgtcccccgtctctaggcctcttgctccccttccttggttccttctcggggtccctgtcctccacagctgtctctcagggtctttgtccaactcttttcatccctctcctgggtctgcgcccctcccctctgcggtacccgtgtcctgcctagtaggggatgggggtggctttccagcacagccagccctcaagtttcccagaacagtctccccacctccccccaacactcgacattgttcctctctggctgttttttcctgttcgggtcccttcaaggcccaactgtgcccagccctctgcagctggggacactgagtgggttgggggtgtatgtttgcaaggatagaatttctcatgggggagtggccctgcttcctcccctagaatggcttggggcttagggctggggacttgccctccatggaggtcagtgggagttgcagctgtaaggtggcagggcctacccatcttacagaggtgaagacgaggtccctctgcctctgctgcagacatggcgtctgcacccacccttccaccctcagggcctggccacggggtcctgggtcccccacaatactgtgcactcgacctggttgacccaggacaccctcctcgttgaacagccctggctacacctgcttcagtgcaactggagccctcaccggcgagtgcctgacacctcggccttttctcttccggaggggcgctcctcagtgtgtttggggtctccctcgctccacgccctccagggggccgcatgtgcacttgccctgcattgcctggcccccgaggttccagggtcccaactgtctactaaccggcttcccgacagggtgagggtgaggtcgcatctacaaccagagccagcgcttccccgccgccac

SEQ ID NO: 22767 - DNA, 1047 bp, Homo sapiens
ctgccagctgtttatgaccagttccagccgatggaagggaagtgggcactggtcgatgtgtggaaaagacaggcatgatctcttcccctgttccccctgcttaatggctggaaggcagtggcgagagcaactgtctagaaatggctgagcaaccagaacgtagacacctgtaacctgctgcatttgaagagcagagctactaagcttatcaagcattttatgtgcaaaaaagcagttctcttggtttctctcatggttgctgaactaatacacaaaagatagacagaataagtttcctcccttgtgagatggaggcagcaacacatttcttgcatgattgctctggggaagaagtggaataagaaatattgtatccagttaacaacagcaaaatggtggattaaataattcaggccgggcacagtggctcacacctgtaatcccagcactttgggaggccgaggtgggtggatcacttgaggtcaggagttcgagaccagcctgaccaacgtggtggagccccgtctctactaaaaatacaaaaattagccaggcgtggtggcaggcagttgtaatcccagctacttgggaggctgacacaggagaatcgcttgaatccaggaggcggaggttgcagagagcctagatggcgccattgcactccagcctgggcgacaacgagattccatctcaaaaaaaaaaaaaaaaaaaaaaaggaattcaaaaattccacccctccataaaaacaatgaaaaaactaacaaaaaccataagaagcagtttgttcacaattctggaaattaaccaaaggcttgcagcaactcaaagagcatttattcaagaaaagtgactctcgataaaaaacggcaagacttgaggaattttaacttatcctagtcctatctcccactccctagctcagcaggaaccctggaaaataacagcccacatttcccacagggaggaagcagaatgaagctagaactcattcaaagcctcataacccaaagaagagtcattctatgattgttaagtgatgcctgggaa

SEQ ID NO: 22768 - DNA, 1050 bp, Homo sapiens
ctcaggtttgtgtgtaagaacaacggggtcctgttcgagaaccagctgctgcagatcggagtcaagtcagagttccgacagaacctgggtgtgtcccgggggactgtgggaatgggtcggagggagaccttggggaaggggtcagagggactcagatggagctctgcctcccccacctactgcaggccgcatgtatctcttctatggcaacaagacctcggtgcagttccagaatttctcacccactgtggttcacccgggagacctccagactcatatcctctcaggcccggcccagcctcctgcctctccacgtcggccttcctcaccgtggggaagccggctgacccaggtccacacttctcttcagcctctcttgggcacgcaattagttctctgagattgagtgtctgcatctgttaagatgggggtgggattccttcccccaggacaggggatgacagtgaagtggtgtgtgggaggctttacttccagaactccacctgctccaggcctcattttgtccctgtctggcaccttccgtgtcctgccatcgtcctccactgggctccatgtcatgatgccagcaccgcctgcactcaggagccaggcctgcgggtccagacgctgatcaggcctgatctgggctgagtcactttgcctctctgggctctcctgtccccgctgtgaagtgtatgtagaccctcctcttcctcatagggttattgtgaagatcagagtgtctggaaaaccctggaagggcggctggaggtatcagtcccccctgcccgttctctgggcctccattgccacattcatgaaattagaaaagctcgacctgaaaactccttctggccgggcatgggggctcacacctgtaatcccagcactggcaggctgaggccagtggatcatttgaggtcaggagttcaagaccagcctggccaacatggtgaaaccccatctccactaaaaatacaaaaatcagctgggtggtagtggcacgcgactgtaatcccagctactcaggaggctgagacaggagaatcg

SEQ ID NO: 22769 - DNA, 1031 bp, Homo sapiens
gaaggcagcccccccggccttgctggagccgctgcagcctccgacagatgtgagccaggacccgaggcacatggtgctggttcggggactcgtgctgcctggtgaggcctgggcaccgtgcgcggggatgggggctcgacgtgtttccccagctccctctgacttggattttggatttctctcctttctctgcatcttgaatcccttctctctggggttggccatccctcctgctctcagttgggggtggctcagccccaggccccctccagtcaaagcagccagtccccctgcctcccgccgcaccctcaggtgccactctctcagcagccccccagcagcctctgccccccgtccccccgcagtaccaggtatggatatttccgggaagggacatgcttctggggacttgctggagccctggcccctggggagaaatctagttgcatgttggagcttgtgggatgatgggagtcccatgggacattgggaaggtgggactcttggggccatggaagctcatgtgctgtgtgatgggtgttgtgagctaagctatcccagctggtgcctcatggggccatgggtggtgtgacctcgtgggataccaggactggggggccatggtcctcaccagtcccttcccttcttcccttctacccacaggttcccgggaacctgagtgcagctcaggtggccgcgcagaatgcagtggaggctgccaagaaccagaaggctgggctgggccctcgctgtgagtcctggagtgaggatgaagggcgggcaggggccaggcaggcctctctccacacacttgttccccacttcttcccttggtctctcccacagtctcgcccatcacccctctccaacaagctgctcccggagtgggtccccccttcagccaggccccagctccccaactacccccaggaccccctggcgcccccaagccaccacctgcttcccagcccagtctggtctccactgtggcccctggctccggcctggctcccacggcacagcccggggca

SEQ ID NO: 22770 - DNA, 1061 bp, Homo sapiens
caggcagccggcacgctcgcttgtttttcctattggagagttgctcgctctccgggcaggaaacctggaaatgggggcggttttgggggacagcggcgagggaggggcccgcgctttgtaccagcgcccccagatgtcgcacccgtgggcgttctcccctggcggccgctccgtgcccgtggagtgcgcacctagaatacgcgcccgcgcccacatgtgggatgctttgatggactgccgtgagcccagaccttaaacgtaaacattcagcttcgcaggtactttgggctgcacacgcttctccggacccaaaagatgcacatgcttttcagaaaccgtaaggtttacctggggctgtaaaaccgcacatcgcgactttgcaccgtgcacacgcttgccccgatgtgagatttcccctgggttcgcgctcgggtccgcttcttaaatacactgcctcagcggtgtggatggcacagagctgtggcagccctactgaaaccttaaacaggcttcctggggtcataaacatggataccgagacttagatcacctcccacaacttaaacgtaccccttcactccactgccttcgccccttcctgcagcattcgcatctagttgttcaaaagtgctttccgggtcctcagacatgcaccccaaggttttaaacctcagtgcaagtactagatgggcttccctgtgcaatagggatgtcaggcgcgcagttttgcacacgattgccaagatgtgagatttactttaggttgcaccttaaccgtcgtttttaaatatgatcgtcccatcttgatgtgctgctcctgctgtggaaggtatccctgggttttaggcaagcatatgtgttctttactatggctccagatcccagcatatttgaagtcctgagtcaacctgctctcctagacaagcagacattaagtatgtcgcttgggctcttaagtgcgttctcctgacttttacccatctttgtggcagtaaatgcatacgtgtcactgtatatgcggactagatacctcaggtcccagcgccataaacaacttgtat

SEQ ID NO: 22771 - DNA, 1012 bp, Homo sapiens
agccctgagggctcctctttgcctctcccccaaaagcccaggcctgagcccaacagtcggtccaagaggtggctgccatcccacgtctacgtgaaccagggggagatcctgtgagtgctgggctggggggtggaggcagcatccaggggagctggggcttcctgaccctcgtccctttgtgccccacaggaggaccgagcagtggccaaggaagctgtacatgcagctcatcccgcagcagctgctggtgaggggctggggccgggtgctggagcctgcacgcagtagctcttccagagggcggggctgggggcaagagcgcctccccaggtggcctgagctggctgtgagggagcggagctgagggtgctgaagcaggtgtggtgggtagctcctcaggcttggcttcaaggggtcccaggcagccagctggtggctgtgcagggactgagcggggcaggggcagccacgacctgcacctggggggctgccaagggatctgagagcggcttccacagcactccagggttgggctggttgagcggtggagatgacgtttcctgaggtagggaggacaggggagtctcagtttggtcctgggcccgggggactcagcgggctgggagccgggaggccgtggtgggagaagccagagctgggggtcccctcgcttccccgcagaccaccctagtgccgctgttccggaactcgcgcctggtccagttccacttcaccaaggacctggagacactgaagagcctgtgccggatcatggacaatggcttcgtgagtggtgccagcagacgcaggggaggggccggccagggcagagcgagcccggaccgctcacgggggcggacatgggagaggaacagagcaccatgtcccagaccagctggggagagagggtggctagtgtgggcgtgacttctgggggctctgtgctgtccccacggcactggatggggcactgaccctggttctgcgggggcctgctcctcctctgccacat

SEQ ID NO: 22772 - DNA, 1033 bp, Homo sapiens
actggtgagtggtgaccctgtcatgtacaggagggaccctggggcatgtggggggggtggggttgggaaagaagcagggcgaccttggccttggggagagcagagcagagggagaggcagcagtcccagcggtcctaggctgtcgggaaactgcagcccagcctcagggccatgggaggtggtatccaggcctgggtggggccaggcctctgctcacagggatgtggggtcagtgcttgggagcctgtggccagcagcccccactgcacccctgcccccaggtgacacgcttctgagcaggggcccctggggacttcaactgcccagcaacatggaggatggtgtcctgaggcctccaaggacggtccccacccctctacgtttccccaataaagccttttaaaaacctgcctgccttctctgctcactgcccgatgccttgcagccccctagctctaaggtggcccagcaggctggacagcccgggaactcactgggtctggctctcggctgtccacaccctcttcccccccgaatctccagacccgcaggccttgggttcaagttcagtgtcacagaacctgagctggattttgtcctcaggggtcacacctggccttgagccagcccctcggttgaggctcgtgggctcaccagctggctctcggggggccacacagcgccctccctgtgtgttccccggctaatgtctaaagtgctcatgccaggtcccagctggactcccctcggtagggccccaccttttgttacctgaaaatgtccttaaagcctcctccatgtaagaaactggcaggcctggagcccctcccccgtggggaccaccctccttccagcaaaatgccggccaagctcaaggagaaacagcgtttattgtggaggggagctgggcggggctcagccctcggagaactggcagtacagccgccccagcctcggctccacccatagccggaacgggatctccaggatggcagagaagccttcagccagcgttggggcctcgaactgcttc

SEQ ID NO: 22773 - DNA, 1058 bp, Homo sapiens
aggtaggacacatcttgccctcagtggtcacggtcccaagggctttgctgcccacaatcaagaaggccaccagtcaccaccttccagtcccaggagcatggaagtgaatgggaagacaggactgtcccagcccaggtcaacatggccagtgtctctgagactgcagccttgctcatcctactgggctcccggattggctgtgggtgctcccacaccaggcctgcccctgaggttcgaggctggtggggtgacagatgcagccagttagggtgatttgcaccatcctggggtcacacagggtgcaggggacatccagagaaggcacgtgacccctctggggaatggagattccttccaggaagaggtgatgctggagcttggcactgagggactcttgggagttttctcttctggcagagagagcagcccgtgcaagccagaggcaggcggcccccgtgtgtttagggagccgctggcctttcattgtagctcaagtgtgggattttgagtgaagaaaggttggaggtaagataggcaggggcgaaggacagacccgaggggcctcgagtgccaggttgaggaatagggcccttaccctgcaggtcgaggggtgcctaggaaggttctggaaaggtacatgtccactgggcccccttcccatcttactcatttgtgcttccaaggaatgtgaggccaggggcagaggggtggcttgtggcggggccctcaggagatgcctgtgccgaaggaacatcctgggttgtggttgataaggctgactctggcttcccacgcgcttcccccaacacagtgccgtctccctaggtgcagagcccagctgcccccagggctcctgggccttctcagtgagtctgggggagctaaagtccatccgccgctccaagccaggcctcagctgggcctacctggttctggtgacccaggctggaggttccctgcccgcactgcacttccaccgcgggggcacccgcgccctgctccgcgtcctcagccgctacctgctgttggccaggtgagctctctcccagtgctgggcc

SEQ ID NO: 22774 - DNA, 1022 bp, Homo sapiens
cctccctgggcctcagtttcccctactgtgggaggatatagccagctggtgagtgggaggcctggcgcctcacagcaggagcatcagtgatagtttctagaaccagctctgcttctcccccagagcaaaccccgaggctgggggctgccagcaggaggagcagtgggggctggcactggtggccagcagggatgggcccccctacctttctcacctttgcaccctgtgcccggtccccgcagaaagggatgtgagccgcactgacaggaccaacaagttctacgagggtcccgagaacccggggctgggcctgctgaacgatatcctcctcacctactgcatgtatcacttcgacctcggtgggtgccaggcctggggacgggcgtggccggggctgtccaggggagcgctgcgggcttggctgcagcctgaccccatgtccccccaggctacgtccagggcatgagtgatcttctctccccgatcctctacgtcattcagaacgaggtggatgctttctggtgtttctgtggcttcatggagctcgtggtgaggcttgggtcaggggtgggacacaggcctatcgagcgatcaggtgtcctggtacctcacggggtctgctctttcccccctccttccgtcccacagcaagggaactttgaagagagccaggagaccatgaagcggcaactcgggcgactgctgctgctcctgagggtgctggaccccctgctctgcgacttcctgggtatgtctctcgggagggtgggcaggagacaatggggccatagaccttgccagattctctggtagcagccacagtggcatcctggacattgggtcctgatccaaacaagagaaacatccccacacaacctagaatgtagaggcagaattgctgtttgaagcaaaacttcaccaaatgcagacacgcaggaatgctgactcaccccgtcctcatgctcacctagatcctgtttgggctttgcctttggcttaacctgcagggtatttttcagaaa

SEQ ID NO: 22775 - DNA, 1131 bp, Homo sapiens
ggtaagagtgcatgtgccacgtgtggtggtgcacgccaatagtcccagccactcgaggctgaggagggcagattgcttgaggctatagtgagccgtgattgtgcgacggcattccagcctggtgacagagaagaccgtgtctctattttttaaaaaaagcatgtattgagtgccgactctgtacattgggttgcagtggaagttgagatgggaggagccctgttaccacatcaggcatcttggtgggcattaggaaaagcattccccgcccccgccaaaacgtggtctcacccaagggaggcgggctggagctcggtccattgtgaagcgggcagccttctttactgtctaggggagcactgcttcctgccctctgagagcgctaacctgcgtgggtgggcttctggaagaaggcctgggcagtgagaggcactgcctaggaaaagggtgggaggagcattgctagtgctgcagagcatgcaccagggcctcgctccctcattgtcccacaatctctgggggacctctctgtatttcccgacatctgtccaaaccccaccctctccccttcctcttactccggccctttcaccacccgagacggtcccagtaacccttttagtatgagcttagcagggcagggctgcagggaagcgtttctggcagaggagattggcgattgcagaggccctgaggttggggagagctggtggtttggaggaactacagggaggcccaggcagctggagcacaaggagatggggtggagaggaggtcgggaatcccaccctaccccttcccagccgctcctctgccaccaccctggaacactgccagggtccccttgaggggccgcctgcctccacccctgcctgatggggctgctcacagcacaggcagaagggtcctgtcagcacttaaggctgcccacttccctcctccgctcagaaccctccgcggctcccgtctcactgggagaagagctagagtcctctctgtggcccacaaagccctttaggacctggcctcgctcactctctgccctcagctctcaccctctccccctgttccagccactctggcctcttactggcacccatccagcatgctgcagccaagggcctgtgtact

SEQ ID NO: 22776 - DNA, 1048 bp, Homo sapiens
atcctggattcgctgggtgtttgagtactctgtgccaggcacttttctggaagcaggaacaagtcagagaagtccctgtctcgggaagacagacggtagacaagtgatgagttttaatagatcagtaaagcagtgctctggggctgtgagatgctctcagaaggaaactaacgcagggtaacgtgataatgagcgaagagcctgttgctttagctggagtggtccagaatcgaccgctctgggaccctcaagtgcaaagccctgaggtggaaggagcttggcgtatttgtagcaggagccgaggggacgagagaaacacagatgaggtcggagtcatgatggggaactagatcctatagggccttgtaaaacttggtatggaatttctcctttattctaggttcagcggggagccgtgggagggtttgagcgtggaaacaacacgattcgccccatgttttgaaaaactcaccactgagtggaaattggattgtagcaggaataagaatggaaggagggagatctgttaggagggagagcgtcctgcaggcagagaatcaggctccggttacctttgcgggcggagacagggggactggctgatggactgggcgtaggagcaaggggaagagtccaggatgactcctgggtttgtggtttgagcagcaggctggatggggaaggctaagggagaagcaggttggggttgccgctctgaaggcaaagattagtgggggagtgagtgggcagggtttagagcggagccaggagtgggcagggcgatgtcagtgcctcgcctcagcccttccactgaaggaacttgttgccactgtcttctcttttttttttttttttttttgagacagagtcttgctctgtcacccaggctggaatgcagtggtgcaaactcagctcattgcaacctccgcctcccgagttcaggcgagtctcgtgcctcagcctcctgagtagctgggattacggcacccactgccatgcccagctcattttttgtatttttagtagagatggggtttcgccgtgttgg

SEQ ID NO: 22777 - DNA, 1050 bp, Homo sapiens
tttaaaaacttctttctctgacaatttcaaattaacaggaaggttgaaagaataaatagtgtaggccgggcgcggtggctcacacctataatcccagcacttcgggaggccgaggcgggcggatcacgaggtcaggagattgagaccacagtgaaaccccgtctctactaaaaatacaaaaaaattaggcgggcgcagtggcggacgcctgtagtcccagctactcaggaggctgaggcgggagaatggcgtgaacccgggaggcggagcttgcagtgagccgagatcgcgccaccgcactccagcctgggagacagagcgagactccgtctccaaaaaaaaaaaaaaatagtgtaaagaacacctgcacgccctttgcccagatcacctgtttcaacattctgtcctatttatgatttgcatggatgtttcttatctcccttctctctgtatacgtacactcactttttacaaagaattcccaataccttgcagacattatggccgtttactcctaaatacttgagtgtgtatctccttagaatattcttattgaaccacaataaagtcacccacttaagtttaacctgcatataaccttgtctaatcaaccagaggatatatactttttttttttttttttttttttttgagacagggtattgccatcttgtccagtccagtcttaaactcctgggctcaagcgatcctcccaccttggcctcccaaagtgctgagattacaggcataagccactatgcccagtgaacttttttgttgtggttgtttttttgtttgtttgtttgggttttaattgttgttgttggtggtggtttttttttgtttttttttttgagacagaatattgctgtgttgcccaggctaaagtgcagtggcgcgatctcggctcactgcaacctccacctctcgggttcaagtgattctcctgcctcggcctcccgagtagccataattacaggtgtgtaccgccacacccagctaatttttttgtatttttattaaagatagggtttcaccatgttgaccagg

SEQ ID NO: 22778 - DNA, 1022 bp, Homo sapiens
gtcttgcctttggtccaagagtcagctgcaaagctgacctgtgaccccactctggccaattttgaatcctacaaaggactgcccttccaccccgtgcagcctgtgtggcctacagtgattctggccctgacccttgaccctcattctcttccaagtttcctgcctgacccagaccaccacctctgcctggctcctttcagaaccacatgccatcctggccggggaagaccatgactccatgtactccacttccttcccttcccccaccagggcaggtcccaccatcagccatagatcctcgctggcttcggcccacaccaccagcgctggacccccagacagagcccctcatcttccaacagttggagattgaccattatgtgggtgagtttaggggttatgggtgagtgctggggccctgcgctcctggggcagaggccgggccaggtcagcccctctggccctgtgctcctggggcagaggccgggccaggtcagcccctctggctctgcccctctggttgccatagagctgtagtgacagaacagaccagtgggtgccaggggttgtggagtgcgaagcgaaggtgacacagggtcagcttgagggaggtgcttggagcgttgatctgttttgcatacgtagtagctgcagcctgtgcaaggacctctgtgccttaaaattcataacaccagacacataaaccaaaagtcaatttgacttcttttttttgagatggagtcttgccctgttgcccaggctggagtgcagtggtgtgatctcggctcactgcaacctctgcctcccgggttcaagtgattctcctgcctcagcctcccaagtagctgggattacaggtgcacaccaccatgcctggctaatttttgtatttttagtagagatgggcttttgccaagttggctaggctggtcttgaactcctgacctcaagtgatccacccgccttggcctcccaaagtgcttagattacaggtgtgagccattgtgccagcccaatttgac

SEQ ID NO: 22779 - DNA, 1069 bp, Homo sapiens
ccactggagccccctgcacctctgatcatccctcccacaccaggtttcgggcccgagcacatgggtgacctgcaacgggagctgaacttggccatcagccgggacagtcgcggggggagggagctgactgggccggccgtgctggctgtggaactgtgctcccgagagagtgagtgctcccccaggatcagcgggttggagggtcccctcgggaggccattggctggtcccagcttcttccatccacaggcatgtttgggtaccacgggcacggcccctccccgttcctgcgcatcaccgtggcgctgccgcgcctcgtggccccggcccgccgtctcctggaacagggcatccgtgtggcaggcctgggcacgcccagcttcgcgccctacgaggccaacgtcgactttgagatccggtacggcctctgcctcacttctccggcctctatccccaccctcgggcagcccctgtccactgacccccagccccctccaggttcatggtggacacggacatcgtcggctgcaactggctggagctcccagctgggaaatacgccctgaggctgaaggagaaggtgcagggcttcccagggcagggctgggtggggagctggtaccctgctgccaccgctgacccacccatgcccacaggctacgcagtgccagctggaggcggacgtgctgtggtctgacgtggtcagtcacccaccggaagggccatggcagcgcattgcgcccttgcgcgtgctcagcttcgatatcgagtgcgccggccgcaaaggtctgtccccgggcccgggctcctgcccgcctcattgatgtgccaagtcgggggtcggaaaggcaggtccggtggagggaatggcaagcatgaaggtgccggggcaggagcaccccagcccatgtggccagatggagtgagcacagagggtgtggagatggcctggaggtgagagcagagcaggagccagggtgagccacgtagggccggcaggcagcggggacagccccggggagatggcaggtgcagcctccctgctgtgttgggagtgaggggcaggagt

SEQ ID NO: 22780 - DNA, 1034 bp, Homo sapiens
ggccagcttcaaacccaaacttaaattgccatgatgcaggtgtccaggttcccagagctggacgtcagtgctgcccagagtgtagtaatcgagtctgaggccccgaacctgagggcacaaaccctgaagctggtgcccctctgcaaaccctggcatctgctcagtgaacagctcccctgattctgacatggccaggtagttgggaattcctgaactccacagcctccgtattttgcagttggggaagctgaggctcagagaggttgtgtggctatccctgggtcacctggtgaggcagaggcaggatttgggagctgtggggttcatgcatctgctacgggttgccttgtgaggtggaacatggtggaggtgtccccactttgcagatagcaaaatgggggcccagatggggagggaacctggtcactcgggtggaggccaggccaaaatttgaagctggacctcctggcccctgcctgggttgaagggtgggcgggggagggggcgtctctgaacctgagctcctcacagatgacagtgccaacttccggaagcggggctcactgctctggaaccagcaggatggtaccttgtccctgtcacagcggcagctcagcgaggaggagcggggccgactccgggtgaggtggggccctcagggctgggtgtggatggggatggagggtttccagctgtctcttcagccaccccctgctggtccccagcagccttccctccaggcccaggtgggctcccagcaccacctgccactctcagcctctgtcctcaatgactgcccctggaggaacggcattgcagttcgtcttagcgccgccaggcatggtgtcctgcatcacggcctcttcctgcactgctccctctgctggcagacccccttcccctgcaggttcacacagtcggctcctcttcttttccagatcagctgagctgtttcatgaccacttagatgagatttgtttgtgaggagaaagcctcaaaatagctatggttggacaggagctcacttctgtcgc

SEQ ID NO: 22781 - DNA, 1065 bp, Homo sapiens
agccagatgtagctgtgagggaggctggggagtgcaggcttgattctggtggccacgcggtgaggtctgcctgagcacccttcctgcatggtacccacatgattctcttgtcacagctgtccccaaacagaatttattatgcatgtaactggtacgtccaggcatagggtggacgccaggtgcagctggatccaggcacagggaaggcgtcctcaggacccactccatcgctgggctgggctttgccctccttgtggtggcttttcccctaggtggggcggtcccagctgctcctggcctcacccaccagccgggccaccccaacaggaagagtcctgggtcgactcaggttggctggcctggggagtgtgggccgtgaggtgggtggggctggagaggggccttcgcggaggcctggtgggcatcacagcctgtccagggctgacaccatccttctgaccagcaccctcttctcccatccccaggatgtggcagccctgaatggcctgtaccgggtccggatcccaaggcgacccggggccctggatggcctggaagctggtggctatgtctcctcctttgtccctgcggtgagttggtgtcggggatgagcccccttctccctcgtcctcctcatcccctaccctggtcctgcttccaccattcgaacccctgtgtttctggagcccgcagaggcctgggagactcagacctggccttgccttccgaggcctcctggtctggaggggtcggtccaggtagcgggtgctttcatggggatagcattgtgaggactcccgggtggggggcggttgaacttgggcctgagggtaacagggagccatgggaaggttttgaaaaatgctccgggggtcctgtggtgggggccgggggaggttagggtggagcccaggcagcaggctccccacctccactgaccccactccccccacagtgctccctggtggagtcgcacctgtcggaccagctgaccctgcacgtggatgtggccggcaacgtggtgggcgtgtcggtggtgacgcaccccgggggctgccggggcca

SEQ ID NO: 22782 - DNA, 1036 bp, Homo sapiens
acagcgagagatgggagagacagggagagagagagagagagagagagagagagagagagagagagaagcgccaaagagaagccaccaggagcgtgtggaggggaagccaggtggaactcactgaaggtgcagggagaggaaggggaggcaggagtgagaggaaagaggagaggcaaatccaagggacagaaactggaggcaaaggaggcagaggagggagggagaccaagggcacaggccctaaccacagtgctgccccttgtccccggcccccttgtctccttctgacacagtcggttgctgtggacgggcacagtgagactggggccccatcagcgcctcctctgggggttgggtacagacgatgaggaaatgacagggcggggatgaggaggaggacctagcgcaggggaaggagagggcagaagacagtggggggtggcagtctggaggacaagggagaagattccagaaaggctgagagccacaaggtggacaatcaggaaaaggtggggctgggtggaagcgtgtggaggactggaatatcgcccaagggaggagcagtgtgtgcaagacctagagaggaggaaacactgaggatccagccgaagagaggacacacagggacagggacagcctgtgtgtgtgtgtgttatggatagggggaggaggaggggggagaggaaagaggaggaggagaaggaagaaggaggaagaggaaagaggaggaagggggaggaggaggaaagggggaggaggggtgaggaggaggaggaaagaggaggaggaaagaggaaggaggaggagggaggaagaagaggaaagagggagaggaggaggaaagggggaggaggggtgaggaggaggagggaggaggaagaggaaagagggaaaggaggaggaaggaggagggagtaagaggaaggaggaagaaggagaaggaaagatgaggaaggaggaaagaggaggaggtggagtaagagggaggaggaggttgcggtgagctgagatcgctccattgcactccagcctgggc

SEQ ID NO: 22783 - DNA, 1030 bp, Homo sapiens
ggcctccctccccttcggcaccccgtcctctggagcagccttgagggggtctgcagtggagagacacactctggattgggccctgttgtgggttgaattgtcacccagaaagggaagcgcagaagtcctgacctccagggcctcagaatgggaccttatttgggaattgggtttttgccaaggatggagctgaggttatactggaggtggaggctcctggtccagtctgacctctgtccttgtaagaggggaggttaggcaggctgcagtggcccacacctatagtcccgacactttgggaggctgaggcaggtggatcacttgaggtcagaagttcgagaccagcctggccaacatggtgaaaccccgtctctactaaaaatacaaaaattagctgggtgtggtggtagtcgcgtgtaatcctagctactcagggggctgagggaggagattcgcttgaacctgggaggcagaggcttcagtgagctgaaattgtgccactgcactccagcctggacaacagagcaagactctgtctcaaaaacaaagaaacaaacaaagaaaacggtcaggcgcggtggctcatgcctgtaatccgagcactttgagaggctgaggtgagtggatcacctgaggttaggagttcgaaaccagcctggccaatgtggtgaaaccccatctctactaaaaatacaaaaattagccaggcctggtggcgcatgcctgtgatcccagttacttgggaggctgaggcaggagaatcacttgaagctgggaagcagaggttgcagtgagctgagatcacaccattgcactccagcctgggcgacaagaataaaactccatctcaattaaaaaataaataaataaaagagggggagttggacacagacggacgcacacagagggaagagatgagaggctacaggggcaggcactggaagactggggtgatgtgatacagccaccagccaggacagcctggggacaccagaagctggcgaggcaggaagctcccctgaggtatccc

SEQ ID NO: 22784 - DNA, 1033 bp, Homo sapiens
ctcctagaaatatatatacacaagtattgaataggtcccctgccaatgtaggacccaagacttttactctgtgacattccatttgtccttggctgtacggaataaaagccctttgacgatggcggcctccaatatcataatccgtatgggtgcggccatgccgtcctccctaccaagtttctgaagttgaatgaaccgcggaataaaggtacgccgttatacgccatgataactgttggcggagcgtagcttcaaaagtgttagtgggcatgcgcgcggttcaacagcgcctacggaaatcctaacgggaatgtaacccaaaccggaagtggcctagagcgaccatttagcttctgttgttaagtggatctaagcctatgtcgcttactggacgctgaagtgattgggaatattagcagtgggggttctgtagggtcaggaaggggcggctggctttgggggagtgatgaggggcttgttgggggtgggggtgcgtgataaagggatttctcggctgaagacgaggctgtgaggtgagtgacgggcttgttttggctgagcgatgaggggtttctggggtgggtgatgggtgctgtggggtaagtggcgtttgctaattttagttggataattagcctgttaattttccctcttttcttgcttattttctgcttgtagtatttttgtgacttaaattccaagtgtactttaatatcggattttatattggtccacgaaacttgctaacttgaggacagtgaacgtgcatcttaagagcgcctttgcggatggtgctggaggacgttcagggaagggattcactgtccgtgggactaggggagtcagtgattgattggcagccaagagcttcagaggttggaggactttgaggatcacactgtaacactctcaggggaccagtgatgggcaacctataggaatcagtagagtggggttgccaggggtagcctatggcagccagttgactggaggcgtagggggtcaatgatggggatttgtgagggtgaatgca

SEQ ID NO: 22785 - DNA, 1038 bp, Homo sapiens
tccagggagggggagccccggaccgcagagccggggaggaggtgacggccggagggagtcggggagaagggaaggaggatggcggggacggcgggaggaaggggagaggccgccgtgcggcgaaggcggggagaggatggagagcgctcggcggcggtggggcccggcctgcgggcccggggcggcggagaagaccccttccctgcgacgcgggagccgcgggagccgtgagtctgcggaaagggagggtggggggctggggcccgcactcctgggtccctgagggaggagcacccgggggcctggatttcagggttcttggaggaggagttgggggtggggagggtggggtggctgggagcccagactcctgaatccttgaaggagggggctgggacctggatcccggggtccagaatctggagaaggctggggacacttcctggattcaagagggaggacagagatgggggctggggctggtaggatcgtggctggaagagactaggggcgagctgcccgagccctcgggggaggtggaggaagactggctttggagtgcctgcggcagcggaagggttaacgtctggctggaggggagggggaggcgcagggatggggctgcggggctttgaggggtcaagggtgagccgtgccagtgggagggggccgaggaggagggggaggttgtctgggctgccagacaggccagggtcagcggcgggggcaggagatgtctggaggaggagaggcccagcatccatgctccctcggggacccgggattccaggtcccagacccctcctccctcagatctgggagtacaccacccagtcccccacccattccagaatccgagcccccagcccccttttttccaggatccaggagtctgagcccccagtctgttctctcagaccagggaatccacactccagcccctaactccttcaaaaccccagagttcagaacctcagcccctcttcccaaggagcgcggcccccaaccctctgttcctctagaacccaagcgttcagg

SEQ ID NO: 22786 - DNA, 1942 bp, Homo sapiens
ggggccgggggcccggactcctgggtcctggcacccacccgtagaaccgaccttgcggggccttcgccgcacacaagctcgtgtctgtgggtccgtgtcgggggctcaccatcgcggctggggcctccccggccctccccctcatccctggtcctcctggtccctgtctgtctgtctgtcgggtctgtccacctgccgcgccccccgggctgaggtaggaggttgtatagttgaggaggacacccaaggagatcactatacggcctcctagctttccccaggctgcgccctgcacgggacggggcccggcggggacccccagccccactcagggacccttagccccactgggctgccccagggaccctgggaggaagagccgggctcttttctgtccttgtccctgcatcccctccttcccctgaaatctgttttccttccctgtctgtctccatctctgctgtgtctctgtggcttctgtgtctctttcacagtggatcctctgactccctcttattctggctttctaggtctctgcccctcccgatatctctctgtgtctctatttctgtcgtttttggtctttctgtctctggctctcagaatgtctctgtgcctatctccatctctgacccccaccccagggtctaccgggccaccgcacaccatgttgccagtctctaggtccctgagaccctttaacctgtgaggacatccagggtcacaggtgaggttcttgggagcctggcgtctggcccaaccacacacctggggaattgctggcctgacttctgacccctgactcctcatacccttcctccagagcatgacatttgaccaccaactgaaacctgacctctgaccccagaccactggcccttcccccgccctgtggtgacttcataaaggttactagcttctcccctggccttgagacccacacgatggccctgctggctctggccagtgccgtcccgtctgccctgctggccctggctgtcttcagggtgcccgcctgggcctgtctcctctgcttcacaacctactctgagcgcctccgcatctgccagatgtttgttgggatgcggagccccaagcttgaagagtgtgaggaggccttcacggccgccttccagggcctctctgacaccgaaatcagtgaggagaccatccacacttcatcagtgtcctggggaaggtgcagagggagggcaggagaggcccagagggtcaggctgagggacagacagagagaaacagtcagaggagaaaggctcaaagaccatgagaacaacagagacttagggacagagagacacagacaggggaagacagcagggcaaagactcagagaggggaggatggagagtcagagaggggaagatggagactcagagagggggaggatggagactcagagagagaggaagatggagactcggaaagatggagactcaggagtatggagagtcagagaggggaggatggacactcgggaggatggagagtcaggaggatggagactcatagaaaggggaggatggagagtcaggagaggttggagactggagagggaatagagacccagagaggggaggatggagactcagagggtggaagatggagactcaaagaggatggaaacccagagagaggaggacagagatgaggcagagactaggggaagcaggatagcgactggtcgggggcagagactcagggaggatagagacttgggagggactcaggaagcatagcgactgtggggcaaagagtcagagaggggaggatacagacttgggagggcagagactcagaaacagaatgttcgcattagggacatggtgttgcggggagctgcctcccccagcccctgctccctccctcaccgccagactatgatgagagaagccacctgcatgacaccttcacccagatgacc

SEQ ID NO: 22787 - DNA, 1028 bp, Homo sapiens
gatgggtaaaggtgagatccttttggatatcttggataagaacccttaaatttatctacagacctgtcaccttggagagctgctactgttttaaagatcctggctcctctgtggtatgctgaattggaacataagatttctcttcatcattccttctcacttggggttaagacccttgtcctctcctatactcagagttccttcccttgatctaataaagatacatccatgttagaaacagtcctgctcacaaggaaaaataaagtggaaatttgccataaagtggctgcctcacagtggaaacccgaagtctgggttatcgggtgattacaacaaatagtttttgagcatctgcactgtggtagacacttgtacacacaggatacactgaagaacaaacataaagtagtggcctgtaacaggatggattcagtacagatgctctacagttaagagtataagaaatgaactcttcttcaacctggacttcagattctctctacttcttgccttgtgaatctgcacatcctatcatagcagtcgtagcatcttactccctgaacacataaatcagggtgcgctactgggcttcccaggcctgtccttgggaccaggtgttgaaatcacctttcagaagttggcatcccagctaaataaatttaactggatactcagttccaggttgcctctttcaaaaggcacatcaccccatgccttcataaaaatggtagccgacatttattaagcatgcggtttgccaaatggtaactgcattatttagtaatttaaaaaaattaaagtttgtttttgtttttgttgtgtttgagacagggtcgtgctctgtcgcccaggctggagtgcagtggcctgatcatggcttactgaagtctggacctcctgggctaaagccatcctcccacctcagcctccagagtggccgggactacaggtgcatgccaccacactctgctaatttttgtatttttgtattttttctgtaaaggcagtgtttcactatatttcccagg

SEQ ID NO: 22788 - DNA, 1049 bp, Homo sapiens
ctgtctgtctgtgctcagctctggcaggaactggggcacagagaggagccagtcctgggctcgctgattatagcctatgttaaggatgtggtaaaggtggcatggaaggagagagagactgagcccagagaaggtgtagcggacatcctagaaatcttccaagaaggggcggctaaactgaatctccaaggataaaaataaatttctggcagagggaacagtgctgaggggagaagctggaccccaaaaaagctctcgttgaccatgctctgcgctttatacacctagtcatatttgctcctcactgtaaccgttgctacgagggagggatggtgaacaccattttacagacgcagaagctgggactcagagaggtggaatcactcagtcagtatttcacacccgctagagggcagaagcaggacttagggctctcttatcccagccaagcctgtaccttaatatctgtggcagcccaggtggagagtgggggagcaagtgggcggatggaagaactgagtgctgacagcctgaggaagcagaatggagtccatgtgttctgagcttgggctggggtcagagttgagatgggatagtcacgaagtctgtcttggttccacagataccatctatgatgaagatgaggtcctcctggccctggcagaacagctgggaaccttcactaccctggtgggaggcccagagtacgtgcactgcctgctggtgagtggaaggcaggaagtcctcttgcccaccccttagggtcggcccatggtcctgccggcctagggcagggaggggagcgtgtcagagagcgtggggatcacgtcagaacagccgggccatggacatccgctttaatccaacaagtcaggagtggcttttaatatcgtgaactcagggtgcagttatcatcctttctgtttagtggtcaggtaggtgcccagtgccaggccttacctgggattctacatagggctgtgggtttagagtcaggttgggttctactgcttatttgctgtgtgacttgtaagagaattacttaccct

SEQ ID NO: 22789 - DNA, 1007 bp, Homo sapiens
aggcggttcacactcttccctaccctgtgtggtctccaggtttgagaacccttgcccccagacttcacagagaggcttcacagtagtgagtcttcactgtgcaaaggcatcaattgcagtttcttaaatgtgtaccttcctgggccctgcctccagatattctgattgttttggtccatgctgggataggcctccgggtgattctgctgcagggtggtcagggatcatcctttgagaactacttcctgcagtaacctacaggagaagagaaccttggcttacataattactgctcagcctctgtcccaggcctccttataacagattgccgtaagttccaccggtagtcacttggcaagtgttgattgagtaccttctctgtgccagcccaggtggtgggagaactgaggtgaacaagaggaactctgtccctgcagtatcccagtcacaccgcacctatggtcacactcccatgatactgtcctgaacttgagacgtcacgatagcatgaggacctgtgacagtgacattatgctggcttgcttagtattacatttttcctttgaatcattcattgcaactatttttaaatgctatttttaaacatttgtttttattcttagttttactgtaaaaatatacatagaatgtgctattttaattattttaaagtgtgtagctctgtggcggtaggtttattcacattgtgcagccattatcaccctccatctccagaatttttcacctcctcaaactgaaattccaaacccattggacatgagctcccccttccctctcccccagcccctggcagccaccgtaggagtttgactgttctagattcctcatataagtggaatcagaaaatatttgtctttatgactattagctaatttcccttggcataacatcttcaaggttcatccatgttgtagcatgtgttacatgagacttctcacatacaagattcttgagtttttttgagggctgcatttggaaaaccagat

SEQ ID NO: 22790 - DNA, 1023 bp, Homo sapiens
agctctttccatcctgtcctgggttgctgtgtgcattgcattctctcagaatccttctttcctctcctcagtgccctgaggtacggctgaacatcatctctaacctggactgtgtgaacgaggtgattggcatccggcagctgtcccagtccctgctccctgccattgtggagctggctgaggacgccaagtggcgggtgcggctggccatcattgagtacatgcccctcctggctggacagctggtgagtgaggaggcctgggggccaggcagtgctgcctcaggggaggtgcagtatgtccagggctgtgatggggaaacggggctttgaaggcttagtggaggctgtgacaactgcctggggagtcgaaggaagggacccaggaaatagggccttaaaagatgcattggattcaataagagagaggagggaaaggagcacctcagacaaagttgagaagtgtccggtctttctagggtgggtgtaggttccatgggatgtggctagcagctccccctgtttgctctcctggaacgcttaccttggaacccttggtttctcctgtagggagtggagttctttgatgagaaacttaactccttgtgcatggcctggcttgtggatcatggtgagtaccttcacaggagcagcaagaggagatgggagctccagaaaggcaggatggattggctggggctgtggcgggcagtggaggaggctagagtcactccccacgccgctggatgctcgtatggaccagctcgcatgcttgttagagtcctagagaagtgttgagtgggaggaggacgaaacagatcacccaggggttgcctggtatagtggagagccagagggccactgagcagccagaccagggttttgaatcctgcccttggggctgtcagatctaaaacaagtcacctgctgtctttgaatgagccccacactcattctttgaaacttcttattctggtgccttggggccattatgagaatggctcattgtttacactaagagagg

SEQ ID NO: 22791 - DNA, 1580 bp, Homo sapiens
cagttttgtattgtgtaaaatgagagttacagtaatacctagattgcagggtgggtggcgaggaccaagtgaattagtacctggaaagtgtgtaacagtttcaacatgagaagtacacaacatgagaagcagagttagctgtacattgccagagaaccccctgtgggccatttcctgtgttcttgaagaagacttgggcttggaccctgtccccaggaggtctcagagtaatcaggacggtactagggagagaactgtggcaagatagatcagttatctcggtatctattctccccttcctaatgtagaagctctgatttttaactgggcagatgactacatggattcaaggtattttcctagtgtctcttgaaattaggtgtggtattgtgaccaaattctagccaaaaagatgttgaacagaagtggtatatgcagcttctaggaagtgttcttaagggggaaggcgtcatcccccacctttcctccttcctgcactctggaatgtggaccagatggctggagtaggagctgccacctggggccagaaaatgatcttaggcgtgaaggtcaagtaaggcaggacaagagagaaggagcctgcctccccgaggctgtgaagagccatgccagtactgtcacctgggagaattaaactggtcaagtgcctgttcgtttagggtttcatcacttgaaggtgaccggaattctaactgatggagggaggggcccagagcaccctggagaaaggagcaagggacgtatggctggtggtgtctgcatggaagggtttcacagaggaaatgatgcttgagcacattttgacccaggtggtggaagggaaatgtggctttgagtgacaaggtgatttcaccagctcagccttcatattaccacatccctaccctttgttagactttattgtgccctaggggatgaggctgaaggagaccaaaaagcatctttagaaatttccatttatgccctgggcgataaactctctcccagttgagaactactgctctagaaatgtgaacacacgtgtaaccaaacgtcaaagtctgacattaaactttgactttccccatggttaacgctgctggtccattgtaacaagagtgcagtggaccagcagcctttgcattctcaggagcttgttagaaatgcagagcctctcgtccctgccccgacctgctcaggcagagccttcattttaacaagatgcccaggttcatctgcacactgaagttagagaagtcctgccttaaatactaacccagtttttctctcttgagagtgaggttaatgctacgtgggtctagggctgaggatgtgctatggctcagaggtggggtctacaattggacatgtgtatgtagacaaggctcagggatatgttgaggctgctagattgggcaagtgatggaatgggattattacaggaggtggaggtgcgatggatacccaggatgtgctgggtaatgaggtgatactcagcgaccacaggagtgagtatgagagacgagggtgaaggatagcttgagttattgaacgctggcagagtcctgagttaaccagga

SEQ ID NO: 22792 - DNA, 1033 bp, Homo sapiens
cttaaaggtctccaattagttttaattcaaataaaacttcagcaagacgtgttgtaataaactgtcaaaaatcaaagacaaaagcacaggggtttttgttttttgttgttttgagccagagtcttgctctgttacccagactggagtgcagtggcaccatcttggctcattgcaacctttgcctcctgggttcaagcgagtctcgtgcctcaggctcccaagtagctgggactacaggtgtgcaccaccgcacctggccaatttttatattttttagtagagacagggtttcaccatgttggccaggctggtcttgaactcctagcctcaagtgatctgcctgccttggcctcccaaagtgctgggattacaggcatgagccaccgcactcggcccaaagacagagttttaaaggcacaaaagaagagagactcatcatttacaatggaactctataaagctatcagcagacttctcagtaaaaactcttagaggccaggaggacagtaggttgatattattacattacagcagaaaaaaaccctggaagctaagaataatttacttagcaatctgtcctttacaaatgaaggacgttgtataaggactttcccatacaaacaaaagctaagcaagtatatcacttctaggcctgtcttacgaaaacgataaagggagtttttttttaatatgaaaaaaaggacattaagtagtaacgtggaaacgtgaaaggatagaactctctgataaaagtaaatgcagaatcaaatttcaggatactctaacactgtaatggaagtatgataatcacttatatattgagtataaagtctaaaaggcaaaactgttaaacataataggcatattaacttgtttagggatatacaatataaaagaagtctaacatcaaaaatataaaatgtgggtggaagaataaaagtgtagtgttttctatgtgatagaagttaactttatcaggttaaaatagccatttataagtaaaatatgttatatgcaagactcatgctaatca

SEQ ID NO: 22793 - DNA, 1048 bp, Homo sapiens
tattttattccagtcccctccctgtgaatgtgaagtgaaagagagatggagagcgaggtagaggaaacagaaaaatttagagagaaaataatgaggaagatccataacaagacggcaacgcagagggagggtgagagatttgcaaagtgaaagaagcaccccaggaagtagcagggagagaaaagcaactcgagaaatgtagagaaaagttctatttctagacagatgaaggacagcaaggtagggagaggggcagcaaagcgggaggctcctcagacaaagttggggagaggaggagggatttggagccagggcagaccgagcagcgtggtgctggcacagcaagagggggcagccggtgacaaggagggcaaagggagaaccaccccagagatctggggttgccagacagtagggacaagggggcgtgacagagaagagggaatttaacaggaggagcacagatgggagaagaaagaggcagaaatatatggagattggagacaatcaaaagattggagagaaagagcaacaagaggaaaaaaattgcaagatggagcagatgaagtggaaaagaaggaatagagggaagaaggggagaaactgcgggagaggagaggggctcaaaatctcggctcactgcaaccttagcctcctgagttcaagcgattctcctgcctcagccacccgagtagctgggactacaggcgcccgccagctcgcctggccaattttgtatttttagtagagacagggtttcaccgtgttggcctgacgggtcgtgaactcctgagacctcaggtgatctgcccacctcggcctcccatagtgctgggataacaggcttgagccaccttgcccggcctcctcacattttattaatttgctggaatggttcccagaactcagagaaaattttacttaggtttactatcagttataaaggttattacaaaggatacaggtggaagagccatcctagcaaatcaaaatagaggagtgtgttttggaaaccgttaattttatccatatctgaggtgaggggcag

SEQ ID NO: 22794 - DNA, 1039 bp, Homo sapiens
acatcacaaaatgcagtcaactctaggacaactctagcttcctctggaagctcctgccatcttggttaggaaagactctgattttcttcatgataatatcttacgttccttttatagttacagatacaggtctcattgcacaatatgattgttgaaaacacttgtgaaatttttttagtaaaattgcctaagatactttttatagtagacaatgaaaattagtgtgtgggtttataataaatataatgtattatataatatgattaaaatatatttgttataaatatgatattactagaagagcatttttccaaaagctatggaaatgtcattttcccgttacagcatcaagcaatatattccatggttcattttcaactctaataaaattatattttgtgtttatatatgcacgtatagacacatatataatattttttttttacttttttctttttctgtacattgcatccagatgctatgcttgtttgtttttttttttgagacagagtcttgctctgtcacccaggctggagtgcagcggtgtgatcttggctcattgcagcctccgcctcccaggctcaagtgattctcctgcctcggcctcccgaatagctgggattacagacatgcaccatcaccacacctggctaatttttgtatttgtaatagagatggggtttcaccatgttggccaggcatggtcttgaactcctgacttcaggtgatccacccgcttcggcctcccaaagtgttgggattacaggcatgagccaccatgcccggccagatgctatgcttaatacattttttccgaatgtcactctagtgaaaattttaggggacacaaaaatgagactgttgtttggagacaatattttttgacaagagtatgcacaagacaatggcaggtataaacgttttattgtaaatatgaaaaaggaaaaaatgctttcactatattagaggacttgaagtaacgtgaagtgattccaaccctttatctttattttatttatttattttattatttattttt

SEQ ID NO: 22795 - DNA, 1032 bp, Homo sapiens
ttttaaaatataacttcttttggaaaagtataataaaacacaattcacaggccagggtggtggctcacacctgtaatcccagcacttagggaggctgagatgtgtggacaagagttcaagaccagcctggccaacgtggtgaaattccatctctactgaaaatacaaaaattagccaggtgtgatggtgtgcacctgtagtcccagctacttgggaggctgaggcacaagaattgattgaacccaggaggcggaggttgcagtgagccgagattgcaccactgcactccagcctgggcaacagagtaagactctgtctcaaaaaaaagaaaaaaaacacatttacagacacataactacatcacagataccttaatggggattcgtcagaacattctcttcaatccagttaatctttacaactcccttctcattttgagtgaagattaataccctttacatatcctgttggtgaaatgtggttttcattttagggacacttaacattcagggacgtggccatagaattctctcaggcggagtggaaatgcctggaccctgcacagagggctttatacaaggatgtgatgttggagaactacaggaacctggtctccctgggtgaggatcatgcccctgcagaagccgggatctgcccttggttatttcagcattttcccttgtgtgcctcctgggagcccctgcattgtttgactgacattaagcaggagaatcacttgaacctgggaggcagaggttttggtgagccgagatcacgtcattgccagcctgccaacagagtgaaactccgtcccaaaaaaaaaaaaaaaaaaaaaaaaaccaaaaaaacccttattgactcaggctgggatccgtggctcacacctgtaatcccagcactttgggaggccaaggcaggaggatcacttgaggtcaggagtttgagaccagcctggccaacatggtgaaaccccatctctactaaaaatacaaaaattagccgggcatggtggtgggagcctgtaatcccagc

SEQ ID NO: 22796 - DNA, 1035 bp, Homo sapiens
tatcctctcatttgggttaccagtactgtctggaatccttttatttcattttgaagggctccctgtagcatttcttgttggacaggtctagagtagtaatgaactttcttagctcttctttatcgaggaaaatctaaatttctcctttatttttgcaggtgacttttgctaaatatagtattcttggttgattttaagcactttcaatatgtcatctcactgccttctggcaggcaaagtttccgctggagaaagtacatagtcttataccttttcctctaaatggcaaatatcttttttgttgctcctgtcaaaattcttcctctgtctttgatgtttgataatttgcttataatgtatctctgtgtgaatgtccttgggttcattttaatttgaatggtcaagcttcttgaattgtatattcaggtctttcttcagaattgggatttggacaattatttggacattatttcttcagttgcaatttctgatcctctgtcttctccttgtgaacctctaataatttgtatgttgttgtgcttgagagcatccgaaaaatgtattagcgtttatttgcttttcttctctgttttttgtttttggtctttgtagctgatactgtgttttttttttttttttttttttttaaattagagtcttgctctgtagcccaggctggagtgtaatggctccatcttggctcactgcaatctctgcctcccaggttcaagcgattctcctgccacagcctcctgagtagctgggattacaggtgcatgcccccatgtccatctaatttttgtatttttagtagagacaggctttcaccatgttggtcaggctggtctcaaactcctgacctagtgatcctcctgccttggcctcccaaagtgctgggattacaagcgtgagccactgtgcctggtggagctgatacttttgaataactgacctttaagtttgctcattctttttggtgctctatccatctgctgttgagcacctaatgaatttttactttatttattgtgtttc

SEQ ID NO: 22797 - DNA, 1050 bp, Homo sapiens
ctcagcttcccgagtagctgggattacaggtatgaaccactatgcccggctaactttgttttttttttttagaaattaaaccttttttcagcttaatgacccaggggtgtatttttgaaggacttgggagctctctttgaaaggcaaacaacaagggaaacagtacctttatctcagtaggaaattaaataattcaaacatcaaataacttcaatttaaggctatggactttgagataattctgagccttgagaggaatgtggtcaggcaacctgagtccagtggaatgcaggtgcaacttctaagagttttcctgtaagtaattaagaagactaagtagccccagagataagacctcctcggatcattgtcccttcttatgtagtgataaagtaaccttccttgaagtgtatctatccgtaatcaatcaagttgctgcagcctatgcactggcccagaataaaaaacgtggtgattctgctaaagcttctctgtctttccctgtgtgtgaaatcttaacgtctctacttgggaacgctgatcccattcatttagagttgatgtttccacgtggctatttccaagctttgccttcaaataaattctgtacttaatcatatattctaaattttattatttactgctgacatcagtttctgtcggattgtaggagcctcaccagagagggcccctgtcgccatgttgtaaaactcacacttgccaaaagttgtgggttagggtttctccccctccctcaggatgacgctagttagctgacacagatggtcacctccattaccaagtagagtcaggatgaactatgtgtgactgttcaactatgtgtcctcttccctgaggactgattagtgtttatcttgaaaacatgtccttaatgggttgtatagaacactgaagcatctgatttcaaactcttagctcttttcctctatttcccatcacattctggtctaaggcttatttattaataaaatgatttttatttctttattatcgtggagatgatttttcatttgggggaagatcattttg

SEQ ID NO: 22798 - DNA, 1044 bp, Homo sapiens
ccgcccttcctcgcccgggccccgcccaccttatcagggttcctcccaggcctggctcctgtcctgcgcagattcgcacagacacggcagcggatcacctcagtgaaggtcacactgcagcgcctgagtttggctctgtctctagttaagtcggcccttcgcaggcccctggctctgctatacttgggacgtggggtccccagagacctggaaattcccacccccttttctccaaatagagcatattgagacttccctgtgagggtctgcaggtcgcttccttttggggttttttttgcagagacagagtctcactctgtcgcccaggctagagtgcggtggcgcaatcttggctcaccatgacctctgcagcccaggttcaagcaattctcctgcctcagcctcctgagtagccaggactacaggcacctgccaccgtgcctggataatttttgtagtttttggtatagacagggtttcaccatcttggccaggctggtcttgaactccttgtcaggcctctgagcccaagctaagccatcgtatcccctgtgacctgcacgtgtacatccagatggcctgaagcaactgaagatccacaaaaaagtgaaaataaccggttcctgccttaactgatgacattaccttgtgacattccttctcctggacaatgagtcttagaagctccccactgagtaaaaggatattaaccccagaggcaacaaaagaaattaaattagtggaagaaaaaattcagtcagcacaaataaatagatcccttagtctcactccaacttttgatttttgctactgcacattctccaacaggcatcattgttcaaaatactgatcttgtggagtggtcattccttcctcacagtacaattaagacttttacattgtacgtggatcaaatagctacattaattggtcagaaaaggttatgaatagtaaaattgtgtggaaatgacccagacaaaatagttgttcctttaaacaaggaacaggttagacaagcctttatcaattctggtgcatggcaga

SEQ ID NO: 22799 - DNA, 1106 bp, Homo sapiens
gggcttttgagtccatgcgtcagccttcctgggcggtctcaccttcaccacccgaaaacaggtgctaggagagaagctgagaggagcaccggtcacgccccggccccgccctctgccggctctaaagcgcaaggtctctccgcctcgcgccccgcccctgcctcgtccaggccccgcccacctccttgcgggtcccgcccaggcctggcttctgctctgcgcgcgcagattcgtgcagaccaggaagcggatagcgtggagtgacggtgccaccgcggcgcgtgagtttcgccctgtcttgtattaagtctgctcttccaggttcctggcgcttctgtacctgggacttgggatccccacaaacctggaaattctcagccgtcttccttcactcagagcaaattgagacgacctcgtgagaggccgtgggtcggttccttttgggtttaaggtccccctgaggctggtcccgtcccgggtgtttctgctacagggcaatgtatacactttctaacctgtagttttcctgctgtaaacctttttctgactcctcccgccccgcgctttttaaagtcctcacctgagaggtggattctcgcctttgtcggcccctggagcccagcgccgctgccccagtcccggaaaggccgcgtcctctgcctggtcctaggatcctgcagaccccacccttgccttaaggtgctgtcgccccttcacctccctccttgtgccgggccctgctgctccacgggtttcgcctccacaatcaccgcttcccctgagcccgcgttggggaggtgcccggggcctgtcctgtgacgcggggtgttactgcctgcccagctccagcccctggaaaatgcgctcccccgggatgcaggcgtcttactccaaaccctcctgtgactgtgtgggccaaagggatcaggagacggacagagagcagtggaaaacctgagacagaaaagaagaatgagaaagacctataacagatggcaaagtagaggatgggtgagggatttgccaagagacagcaaaagtgaaaagaaaacgataagaaagcaggaggagaaaagcaagtgcagaaatgtagagaaaagctggat

SEQ ID NO: 22800 - DNA, 1007 bp, Homo sapiens
tctttttgcctaggattgtcttagcaatgcgggctcttttttggttccatatgaactttaaagtagttttttccaattctgtgaagaaagtcattggtagcttgatggggatggcattgaatctataaattaccttgggcggtatggccattttcacgatattgattcttcctgtccatgatcatggaattccatttgtttcctcttttattttgttgagcagtggtttgtagttctccttgaagaggtccttcacatcccttgtaaattggattcctaggtattttattttctttgtagcaattgtgaatgggagttcactcatgatttggctctctgtttgtctgttattggtgtataggaatgcttgtgacttttgcacattgattttgtaagggatactattgattttttaatgttgacgttgcatactacaactttactgaattcatttattatttctagtcattttttgatggagcttttagggttttttatatgtataagatcatgtcatctgcaaacaggaacagtataacttcttcacttcctatttgattggcttttctttttgttgcctaattgctctgcctaaggcttctagtactacattgattagaagtggtaagagtgggaatcctcgtcttgttcctgatatttcaacttttcaccattgattatgatgttagctatgtgcttgtgttatatcacctatattatattgaggtacattcctcaatacctaatctgttgagagtttttgttaggaaagcctgttgaattttgtcagatgctttttctggatctattgtgatgatcatatggattttatccttcattctgttaatgtgctatatcagatttatagatttgtatatgttgaaccatccttgcattcctgggataaatcccgcttgatcatgttgaatgatcctttttatatgctactgagttcagtttgctagtatcttgctgaggatttttgcttttaggtttatcaaaggtac

SEQ ID NO: 22801 - DNA, 1480 bp, Homo sapiens
gaggagggtgaaatgcattaacacgcataaaacccatagacgcgcacccctgagtgggagtgcacagtgagtgctgctgttttgtgctaagtctggatgtctgtacatcaggagcaacgtacatatgaaggtaactgggatgggtgtttgcaggttcacaaaatgaaccacagcctcaaatggcctagaactgttatccttaacctgagggcctgcctttaactccacttacaactttccaagggacattctgtgtatatttactgtatgtgattatcagtgttagtgtatctgtcccccaccaccaccaccctaaggagatactctgtaatttcatggcattaagaaggatggacatgccccaaagacatttagacccattggtctacaatcgaaggctgtgtaccttgaccacaattattgttcaggatggtggaaatggttaagtaattataccacgttcatttcatggaatactctgcagctacaaagaagtaagtttagttataaccgtaagaaagaaaaatgcacctgacataatattaaacactactaatagttattaacaatagtaaatgaaggaaatgcttcagttgcctacaaattccattgaataagatttttgtaaataccttatccaacatgacattttagtatattatttaggattattcatgaatccttcaaaagagaggagcctggccacatttattgagcgcatttttgtaccatactctattgtgttttgcacacactccttaatttattcttaccttagtctgtaacaaagtaccatagaccggtggctgaaaccacaaacatttattgctcacagttctggaggctggaagtctgagaagagggtaccagcatggtcaggttctgatgagggcccttttccaggttggagactgtcaccatcttgctgtgtcctctcacggaggacatgtgtgtgcttggaggctctttggcagagctctaggaggtgtgtgtgcttggaggctctaggagatagtctttttttttctgtaattgagatggaggcttgctctgttgcccatgctggagcgcagtggcacaatcttggctcactgcaacctccacctcccagattcaagtgattctcccgcctcagcctcccgagtagctgggattacaggcacatgtcaccatccgcagctaatttttgtatttttagtggaaacagggtttctccttgttgatcaggctggtctcgaactcctgacctcaggtgattaattagccggcctcagcctcccaaagtgcgggattacaggtgtgagccaccgagcctgccctgtgggaggtattttatgtccttgcttttgctggcttctagacactgccccacatgccttggtttgtgaccccttcttccatcatcaaagctgcaaagacaggccaagtcccttttccatcacgtcactctgaccctacttctttctgttcatctcaccct

SEQ ID NO: 22802 - DNA, 1067 bp, Homo sapiens
gaaaatatgttcttttttcccagatttggagtcagcatatgaaaataagagtttacctacagaaaaaaacattcatgaaataagggcttccaaaaggaattcagatagaagaagtaaatcccttggccgtaactggatatgtgaaggtacgcttgaaagaccacagcgctccagagggaggtatgtcaatcagatgatcatcaattatgtcaaaagacctgctactagagaaggcacccctcctagaacacatcagagacatcataaggagaattcctttgaatgtaaggactgtgggaaggcctttagtcgtggctatcaacttagtcaacatcagaaaatccatactggtgagaaaccttatgaatgtaaagaatgtaagaaggccttccgttggggcaatcagcttactcaacatcaaaaaattcatactggggagaagccctacgaatgtaaagactgtgggaaggcttttcgatggggctcaagcctcgttattcataagaggattcatactggtgaaaaaccctatgaatgtaaagactgtggaaaggcctttcggcgtggtgatgagctcactcagcaccagagattccacactggggagaaagactacgaatgcaaagactgtgggaagacctttagccgtgtgtataaacttattcagcacaagagaattcatagtggggagaagccttacgagtgtaaagactgtgggaaggcttttatttgtggttcaagcctcattcagcataaaagaattcacacaggtgagaaaccctatgaatgtcaagaatgtgggaaggcctttactcgagtcaattaccttactcagcatcagaagatccacaccggtgagaagcctcacgaatgtaaggagtgtgggaaggcctttcgctggggttcgagcctcgttaagcacgagaggatacatacgggcgagaagccgtacaagtgcacagaatgtgggaaggccttcaattgtggctatcacctcactcagcacgagagaatccacacaggcgaaaccccgtataaatgtaaggagtgtgggaaggctttcattt

SEQ ID NO: 22803 - DNA, 1046 bp, Homo sapiens
tttgctctgtcacccaggctggcgtgcagtggtaagaccatagctcactgcagccttgaacccctgaacccaagccgtcctcttgcctcagcctcccaaatagctagaactacaggcacatgcccccattttttgtagacacagggtctcactatattgcccaggctggtctcaaactcctgggctcaagcaatcctccggcctcagcctcccgatgtgttgggattacagatgtcagccactgcacccggcctcacggcttcttatacatcccagaaagcactttgctttagattcggagatgggagccgttgaaggttcttgagcagaggagtcacacgagctgacttacatttttgcggtatgtttcttgctgctgtgttaacaaatgaccgaggggaaggcaaatgagacaacgagaggctcatctagggtgggggcagcagggtttgggaagttgtttgaattttgagtatattctggagctaccgtgggcaggagttgctgatggagcagttgtaggatatgagagagaagagccaggggcgtctccaaagcagggtttttccaccgcagcatggttgatattttggggtggataattctgtgtggaggggccgtcctatgcattgtaggatgctgagcaacagccttgatctctcctactaggatgccagcagcgcccttcccagtcgtgacaaccaaaattgtaaattgtgtctaaacattgtcagctgtctcctgggggataaaatcgccctgagttgagaatcaccgctctaaggctttggcctgagctcctgagaataggggagccattcataagatgaaacagcagctgttttatttattttctcttatcaaatttattatgaaggagagggaccatgggctcagttttgggcatgttaaatttacgatgcccattaacagataacatctggacagaggtcagcacagtgaaggtcctataaagtgccatatagtaaagatttcaggctttgtggagcagtctctatcacgactactcgtgaaaacgaccaaga

SEQ ID NO: 22804 - DNA, 1047 bp, Homo sapiens
atttaaaaattagctggaagtgctggtgcgtgcctgtggtcccagctactcaggaggcttaggtgggaggattgcttaaacccaggaagtcgaggctaaagtgagacatgatcataccactacactccagtctgggcgacagggcaagaccccatctcaaaaaaaacaaaaaaaaaaagagagagaagagaccagaacaaatgataaaatgtccttatgtcattgaaggcttaagctttcggccagtctactattaaaatgtgagggagatggccgggcgcggtggctcacgcctgtaattccagcactttgggaggctgagacaggcggatcacgaggtcaggagttcgagaccagcctgaccaacatggtgaaaccctgtctctactaaaaatacaaaaattagccgggcgtggtggcgtgtacctataatcccagctactcgggaggctgaggcaggagaatccctttaaccctggaggtggaggtttgcagtgagctgagatcgtgccactgcactccagcttgggcaacagagtgagactctatctcaaaaaaaaaaaaaaaaaaaaaaagggagggaggtgagaagtcaccaaaggagtggagaaaggagtggccacaggtttggggaaaaacaggtccttggatgtcttggaagccaaaggaagttagcgtttcaaggagaggaggaatgaaggctgactctgttgttgttgtaattgtcattcatttgtcactgaatgcgcacaataaccctgcaaagtaggtactttatttatttatttttattaattttgttttcgagacagattcttgctctgtcacccaggctggagtgcagaggcgcgatctcaacccactgcaacctccacatcccgggttcaagcaattctcccgcctcagcctcctgagtagctgggattacaggtacccaccaccacacccggctaatttttgtacttttagtagagacggggtttcaccatgttgaccaggctgatctcaaactccggcctcaggtgatctgcccgccttggcctccca

SEQ ID NO: 22805 - DNA, 1013 bp, Homo sapiens
gaccagcctgggcaacatagggagaccccgcctgtgtaaaaaattaaaaattagttgggcatggtgatacatgcctgtagtccccactactagggaggctgaggtagaaggattgcttgagcccagaaggtcgaggctgcagtgagctgtgattgtgccactgcactccagcctgggtgatagagcaagaccctatctcaaaaaaaaaaaaaaagaaaagaaaagaaaagaaaaaaagaaatataacatgggtgaccatatatagttaaaatttttaggctgggcacggtggctcacgcctgtaatcccagcactttgggaggccgaggtgggtggatcacgtgaggtcgggagttggagaccagcctggccaacatggtgaaaccccgtctctactaaaaaaacaaaatttagccaggtgcagtggtgggcaactgtaattccagctactcgggaggctgaggcaggagaattgcttgaactcgggaggtggagtttgcagtgagccaagattgtgccactgctctccagcctgggcaacagattgaggccctgtctcaaaaaaaaaaaaagaaaattaaaatttttctagtagctacattaaaataaataaaaaggaacaggtacccagcatagccaagatattatcacttgaacatgtaatcaatataaaaattattaatgaaatattatacatagacactctctctccctttttccccatcctgagtctgaaacccagtaaatattttaccctcacagaacctctccattgccacatttcaagtgttgggagctggaggcatctgcatgggacagcccagcttgtgccccctcctcagggatttcagccacaccccgaggtcttctctcaggactcaagagtctgggcccacagccctatttattagtgccgaccatacagagcccctttgctagcactttgccctgcttattatctcattaagccctcgccactttgccaggggaatgtattattagcaggaatctga

SEQ ID NO: 22806 - DNA, 1030 bp, Homo sapiens
ggcttacccctgtactcccagcactttggaaggccgaggcaggaggatcgcctgaggtcgggagatcgagaccatcctggctaacacagtgaaaccccgtctctactaaaaatacaaaaattagctgggcatggtggcacacgcctgtaatcccagctactcaggagctgaggcaagagaatggcttgaacccaggaggtggaagttgcagtgagccgaaatcgagccattgcactccagcctggtcgacagagtgagactccatcccaaaaaaaaagaaagaaaggagggacattgagcttgtcatcttacctaccacaccatggtggaggtgctgatgggttaagagtttgtatgtgggagttgtatattcattcactcattcactcattcattcgttcattcattttgataattgtagtaaattatacataacataaatttaccatcttcatcatttttaagtatgcatttcagtagtggtaagtgcaaccaatttccagaactcttttcgtcttgcaaaatggaaactcagtacccgttaaataactccacatccccccaccctccagccctggcaactaccatgacactttgtctctatgaatttgattattccaggaatttcatataagtggaatgacacagtatttgtctttttgttactggcttatttcactgagtataatgtcttcaaggtttatctatgtttatagcatgtatcagaatttgcttccctttgaaggctgaataatattccattgtatgtacatagcacatgttgtttatcctttcatctgtcaacgggcactggggtgtttccgctttttggctattgtgaaaaatgctactatgaacacgagtgtatgaatatctatttgagtgcctgcttttaattcttttgggtctatcaccagtactggcattgctggatcatatgatgattctatttgtagtttttgaggaacctcgacactgtttcccatagccactgcaccattttatatttctaccaacagtgcacaaggtt

SEQ ID NO: 22807 - DNA, 1070 bp, Homo sapiens
cctgggttcaagtggttctcctgcctcagcctcccgagtagctgggattacaggcacccgccaccatgcccagctaatttttgtatttttagtagagatagggtttcaccatgttggtcaggctggtcttgaactcccgacctcaagtgatccacccgccttggcctcccaaagtgcagggattacaggtgtgagccaccgtgcccggcctcagcccttatttcttgaggtctcccgtgtgccaggcctactgccaagaaatgctgggacacacagaggaatcggactcccatgccctaccccctccaggaactctcagcttaccgaggacgaagaagatcatctaccaactaatgcatgtcctacggggcacctcagagcaggaaactgacccaagttcggtgggaggaatgagtgtgcatgtgtgtctgtgtgtgtctagggaaagcctcctcaagaaggtgcctcctgagctgcctgctgcaggtaaagtactacatcagcaaagaatgtgagctggaatgttccacagcatgggcagaggtctgcagaactggacagagctgggcagttgaggaaactacattgtttatacttatatttttaatttttttctccagctatgtgctagaggtggtaaaacattaactgttcccaaggatgagaaaatagctgaggatgagcatcttaggaggggaaggagatgaggatgcatgacccctagaggcatactccacccctcacacacctctgcttgcttcaactactccatttctctccagaaggttccaggttccctgcagaaagagactggaacctctctctccccatccccacaggactagagactacaactcccatgatccactgcggctgctcttctcacaactggactccagacttcacggggtctcatgggaaatgtagtcctcatcggcttccgcatcactttccttgttttttttcccacgcatttccagacttttcaaccaattgagaggtgggaagcgccttgctattattgaagccaacaacaccctctttcttacagaggtgggagccggaagtcc

SEQ ID NO: 22808 - DNA, 1038 bp, Homo sapiens
gagcgaaactccgtctcaaaaaaaaaataaaaaataaaaaattgcattgcaatatgactttatctttattttgtgacccctccccctctatcactcttttaaaaaacttgcatggagactatttcttttctttcttttttttttttttttgttgcccaggctggagtgcaatggcgtgatcttggctcaccacaacctccgcctcccaggttcaagcaattctcctgcctcagcctcccgagtagctgggattacaggtgcacaccaccacgcccagctaattttgtagtagagatagggtttcttcatgttggtcaggctggtcttgaactcctgacctcaggtgatccacccgcctcggcctcccaaagtgctgggattacaggcgtgagtcactgtgcccggcccaatttttgtatttttagtagagatgggatttcaccttgttggccaggccagtctcaaactcctggcctctagtgatccaatcgcttcagtctcccaaagtgctgggattgtaggtgtgcctggccgctaatggagtcttaatttgaattttgtgttttctgattcctgtgtttgctttaagaaaaaaaagttgtgggaaaatgtgctaaacataaaatgtgtaattttaaccatttcccctttttattttcaatttttatttatttatatatttttaagaattgggatcttgctgtgttgtccaggctggagtgtactggtgtgatcacggttcactgctgcctcatccttctgggctcaaatgatcctcccacctcagcctcctgagtagctgggactacaagcgtgcaccaccacacctggctaattttttaaaattttttttttgtagagatggagtcttgctatgttgcccaggctggtctcaaaatcctggcctcaggcaatccttcgtcctcggcgtcccaaagcgcttggattacaggtgtgagccacagcacccagcctcctcttttatttttagttgacatgtagtacttgtacatatctgtgggaaacagaaggatggtt

SEQ ID NO: 22809 - DNA, 1047 bp, Homo sapiens
tcggatgcaggtgcccccggctcatgcttccaaaaccccctcttgatttgtcactgtatggggtaaggcatagtttcctggctgtgtggatgtaagatacctgagtctcaagcgggagactccactgtagaccctgtccctgggaccagagacttctctggtgtagactttccaaggtgggagattccagccccccacccttggcatggggcatctcagtggagatgactacctctaccccaggccctaacgcatccttcttctggagtctcagagcctctgtgtggccacgtcagcagccacctgggttaaggatcacccttcaacatcacttctcagagctccttgctgcagaggcggaagctctcccagatcaaaggtgcctcatgacaaagaccactctgtgggcacatgacggcccccaaggttaaggaccacccggtgttagtttcccagggctgacctcctgcccctccctcctcgagtctttgtgtggtggtatcatcttccctgagatgaagtctggggggctcttctttactggttttggctctgattttagcgtgttggctcctgtgaggctggtgtcctgctcacctccccccgccccgccacccgccttgtgggtcccttccctgtggggatgtgtgttcctcttgggtaagtctcctcctgggccgaggttcccagattcctcagtgctcttggagagcctttgctgctggagcacaggttcttcacgcctgagagtggacctgcgatcaccaccttccttggaggatcttggtggatgcccccctgactacagcaaatggggctctttcttctctggcggcgtctctgcttcgagactcaggctccagcttcccttctctctggtcctttgctggggggaccagaggtacagataccctcatgatataaggattttcttagcggggaaggtgttgtctctactgtggctaaggctccagcctctctaggggacaagtaccctgggcctctggcacttgccccttctctgtggaggagctgcctcctcactgg

SEQ ID NO: 22810 - DNA, 1031 bp, Homo sapiens
tggagcagtttgaagatatttggcagaaggtacaggggctgagaccctaataatctgggtcttcagagaggagggcacaggaaggcggctcaggacctctgggtgttgaccagcgggaggggctacatatgcagatgctgaggacctaagagaatcagctctaagatggattgggggtaggggttggggggggtcctcgagtccctagcataaggaagaatcactggagtgggtactgggacatcccctcccacactgacttctcaattctctccatccctcagctccacaatgcagccaacgcgaaccagaaagaaaagtatgaggctgacctaaagaaggagattaagaagctacaagtgagggggctgggggcctggacgcctttgtcctgagggtagagggaactgggagagtggactgctgggtcccagggagaaggagctgtgggccccagttcctgggtcctgaggtctgactttcttgcttttcccatctgcagcggctgagggaccaaatcaagacatgggtagcgtccaacgagatcaaggacaagaggcagcttatagacaaccgcaagctcattgagacggtaggagcccagagcctgagtcccagagaggtgggaaggtcaccagattcttgagatcccaaggggcggaggcagagcggccagaccccagaggtcctcaagagaagtaaggtttctgcacctaagggaagtgaagaggcagcggactcagagctcagaaagtagggtcacgaggctcaggtcggagtgtctgctggcccttagtcagctcctttcccacctttgagagcccccctgccaactgcactctctacagcaaatggaacggttcaaagttgtggaacgagagaccaaaaccaaagcttacagcaaagagggcctgggcctggcccagaaggtagatcctgcccagaaggagaaggaagaggttggccagtggctcacggtgagttggggtagagaagaggaggtgaactctgaggatcctgagccctgggtg

SEQ ID NO: 22811 - DNA, 1051 bp, Homo sapiens
actcgaacctctgtgtctcaattaacttatctgtaaaaatggggggaagaccacctacctaatgcagttgttatgaagattaaatgagttaataacatgtaagtacttaatggtgactgctacatagtcagtgtcatggattttttttttcaaattactttcagttggtgtgttctacagtgatgtttttttccaccaaatacttccctgatgccgagccccttcatggggatgaagtagtacaaggtccttgtcctcagagaactcagtcccctctcctggttctcccaggttgccatctttgaagcacttaagacattcatttagaacctaggtcctctcccattgtgtcctcagatgttaaccacagacttcctgtcctttcctggtttggcccaaaaccatcctccaagttagtacatttcagggcatccagtcattcagaaattcccacaccacttccgtcaccaataaaatgtccctgcagagtgcttggatttagactctgagactgttccattctctagaacaagggtgacagtacccactgcctcgaggtctttgtgaagattaaatgctaggctgtgcatcctgtactcacgtgagaggtgctcaaaagccacagccctcgaggaaacgaaggctgtgcactcacacctggggctggggccccgttctggcagctggcttcggtggaacctctgcggccccctccgtttcctcctcgctgaagtggcatgataacatttcctacccaagaagaaccttgtgaggatggatgagagtgtgtgcgtgcagggcagctggcccggtgcctgacacatccacagccctaagaattgtcccctttgtctgttggtccggcccagatcccagaccacctcctcgtccactcactgaccgccttctcccccggccagggcacctacatctactttgactacgagaagtggggccagcggaagaaggaaggcttcacctttgagtaccgctacctggaggaccgggacctccagtgacaccggcccctccctctacccacccccttccc

SEQ ID NO: 22812 - DNA, 1177 bp, Homo sapiens
tctggagggtcaaatttaccctggccaagatccgcaaggccgcccgggaactgctgacgcttgatgagaaggacccacggcgtctgttcgaaggtgcgtatgggagtccacagcagagggatggggtgcagggcttgtgaggttcattctcccttctgttgcctctgttccagtgatgagagttgtgtcattggataaatggaaccagccttctaacttttagtggcacttgtgaagtaggaaaagtgtatctggatcagtctttgccctgtttcttaggtgtgtggcttttttgcccagttattggaccttcagtttagtaatgaccagagctaaagataggcctggcacacctgggcacccgtctatatctttatattctgtttatgtggcctgtttgctagtggatgagagtagactatgaagtggaatttctgggctaagtgatggtgataacagggtttgcacatttgcttggtttattgtttttttaattaagttttctcgttttatttagtcttttgagacggagtcttgctctgttgcccaggctggagtgccgtggcgccatttcggcttactgcaacccccgcctcctgggttcaaacaattctcctatcttagcctcccaagtagctgggactacagacaggcgcacgccaccacacctggctaattttacttttgagacggagtctcgctccattgcccatgctggagtgtagttgtcgcaatcttggctcactgcaaactccgcctccagagttcaagcgattctcctgtcttagcctcctaagtagctggaatcacaggcatgggccaccaagcctggctaattttctattattagtggagatgggttttcaccatgttgtccaggctggtgcttgtttttttaagctggtcaaggacatttaggtggtatttagcaaaggcctgaacaggagagaacctgtaaaatgtctcagggaacagcatttcaggtgatgactttaggagggcatgcagatcacatagacttaggcttactttactaattgtggtgaaatacacattaaattgaaaatgtaccatcttaaccatcttgttttaaaatctactctgagatgcggtgttattggagtgctttctacagcagattggcatgaccaagattggcatttgtatatcctgagac

SEQ ID NO: 22813 - DNA, 1026 bp, Homo sapiens
gaagatggacagagtctcagccctgggaacattagaactcccattctacacatgcaacttgagggaaagaaggaaaactaaaaatattcctgcatggatgttccaaatattttatgagatagaaaaaaactcccatgaatactgaagtttgtaaatgcgtattgaaattacgtgcccctggaaccggttttctaaactgacacccctgtgtgtttgggttccctctggctggtgccctgagcccaccctcggtcgacccatgggtcccccgcttccctactcaccagatgtcctgtgtttgctgtgacgctgacgtcggaggaggaggaagaggaggaggaagagcagcaggacgaaggccaccgagaccccaatcaaaacctccaggtatcttcccagaccttgacatgaggacgtcaggagtgggaatgatgtcattgatgtgagcacctactgtgtgcaggcgcgagccaggtctttccttcgtgacctccaaccctcacaagcagtcgtgcaacatggaattgccacccgtacaacccatttcacagatgcacaaactgaggctcagagcagggagtcgcctgccccaggcctccagcgaggaagcggcagagctgggaagggagcccgggagtctgacctgcagcccttgttcctgcaccagagccgagacccggagctgcagggaaagagcctgaccgtcctgaaccacggccctgctcccctcccctgccccaggtcaccgtcactgctgcaggtgggacgggacaggcccctgtggaatcgggtctgggaggttccctgggaggcctcctctcccaggaggtcacagctgggggtcagagctgaaaggaactttcccacccacaggcctctctcctttacacttggagaaactgaggcccaggcaggggaggggcctgtccacatcaccacctccagaggagcctgaacctaggacagaacccacccctgcctcccctggaccccgcccatctcccactcagagcccctcactcacga

SEQ ID NO: 22814 - DNA, 1042 bp, Homo sapiens
aaatgcattagacagacatcgtgaaggtgaaaaactatattaaattaacgccattaaaaaggaatttatgtctgggcgtggtagttcatgcctgtaatcccagcactttgggaggtggaggcgggcagatcacttgaggctaggagttcgagaccagcctgggtgacatggtgaaaccccatctctactaaaaatacaaaaaattatctgggcgtggtggtgagtgcctgtaatcccagctactcgggaggctgaggcaggagaatctcttgaacctggaagatggaggctgctgtgtgctgagattgcgcccctgtacttcagctgggacaacaggagcgaaactgtgtctcaaaaaaagaagcaatttactaaccatatatacctaccatgcaaacataacaaaatcaaagcataatttaatccagggcaagacagctgaaataataaatatatacattgggataaaatattcatgaaattttccagactgtatcatggaaagaacagaaattgaacaatagaaaatattgatatatacacgaagttgaatgagaagaaagaacgtgtctgtcacggtttcagaatgaaagaaggaagaaggatgttagttcatgatatgcatgaagagctaatggttgaaatttttacagaactgaagagaaaacatcagtttataactaaattgaatatctcgatcatggtaaagtgaaaaccatgaggcattaatttaaaataatcataaaactaccagagaaaatgtaaattacccttgaatgaatgacaagctcgtcgggactggagttccaaagagcaaacagcagccccagaagatacaggagaaacaaccacaagcgtttaactgtgaggagagagttctgtgctgggcctaattattactattataattatttattattattattattattatcttttgagatgcaatttcgctcttgttgcccaggctggagtgcaatggcgcgatctcggctcaccgcaacctggcctagttattattaaaggaccgagttgcagtgtc

SEQ ID NO: 22815 - DNA, 1045 bp, Homo sapiens
catccatcctcttggttcaggttcctttcacaacccgtactccttagcttttttttttttttttttttgagacagagtttcgctcttgttgcccaggctggagagcaatggcgcagtctcagcttaccgccctccacctcccgtgttcaagcgattctcctgcctcggcctccctagtagctgggattacaggcatatgccaccatgcccagctaatttggtatttttagtagagacgtggttactccatgttggttaggctggtctcgaactcccgacctcaggtgacctgcccgccttggcctctcaaagtgctgggattacaggcgtgagccaccgcgcctggcccctagaattttttgtagaccttttccccttgatggaggcacccctaccctctggacctttcatcacagcctctctttgctcacatgggtttcagacccttctcctttcctttgggaagtctgctctggcttccctgtttccaaatccttcgttttccacctggagctctacaaaggggccaggggcttcccctcactccagcctttctagtccacacccagaactcttcagatccttgaccccagtggcttttcagtcagcctccccttttctgcccagcttctcttgagtccatctacttttcttccccactttgtgacgtgtttttagctcccccttaagtctccctaactcattctttttctcataggcagtgaaaaagcagtctggctcccgaggtccaccccttataccccaaggtccagatggcggccaacgtgggtgatcaacgtagcacagattggttagtgaggcgagagggacggaggccagtcgggagggaaagaggaagcaagacccagtgctgtcctctggggtgggacctcccgtggccttaggggaggtgatgccacaatccctgtgggtgggggtggtggtaaggcaaacacagagggaagcatttggttgtggtgtggagaggggcaagctttcacctctctgagctttcgtttttcacagtacagcgcttgctttgcag

SEQ ID NO: 22816 - DNA, 1048 bp, Homo sapiens
tctctcctcatgctcattctgccatggccatcgaagcagagacctccttgatgcccgcacccgccaggcccgctctcgctttgccctggctgcagtgctccctgtgttgccgcctcttggaggtctctgctcagatgccgccttcagagagcctctacctgacacactgattgaaagtagcattcctgcctcgcagcctgtccctctccctttctttgccatcttattgtttcatgatccttattgctggatgtattacatgttgatgtctccagccggacatgtaattccagcacaagcttcattacagcatgggttttccttttgttctgtcgtagtgcttagaagagttggcactcagtatcgttgattatattcttccgagaactagctaagtgagatgtgggattgatagaggtttttcttttcctaatatatgagaggatgtggtgcattaatatagtggagagagaaaggggtgagggattggtagagggtcatggctggtgtagttcctgagcaggctggggaagcggaaagggtaggcctcccactaaaccctccctccctgcgcctttgcagagcatgtaccagagctatggctccccttcccagtatgggatggccggctcctatggctcagccacaccccagcagccatccgcaccccaacaccaagggactctgaaccaggtaacatcctagcccagctcccataccctgctcaagcagaggaagtgtagatttttgaatgagctgtcaatgaggaatggcttgtactccttaagctgcttttttccttccaagcaactcctgatctgaaaatgaggaggacagagcatagtgtttgaacctggggtgggtttaaggctgagccaaggccagggctgagatgttgaaagacatctcatctttttccctagcatggtcacccacaggcgtgcacacaccggctgggttttgcattgaatgtgcagcttggaggaatggccgggctagtgcacaggaggcaggtagacctgggtttgaatcccagctgtcccacccc

SEQ ID NO: 22817 - DNA, 1033 bp, Homo sapiens
attgactggagccgggagcccttgccggggttagtctgggtgggggacataggtgggagggtggtgctgtgagaggcatgggctgggtatggaggtaggagagttgcgggtcccaggtaccaggagctccaaagagaaatgaaccggaaagttggatcctggggggatgaagtcctggttggagggaggccggtggggtggggtggggaccatgggtgctggagaggcgtgcattgctcagtggttaagcgcaccctctggagacggaaaacctgggttcgcgtctcatttctgcactgtagtagctgagccgcctggggtaagtgcctttcctttcggaggcgggtcggtaccttgagggaggtggtggcggctgtcctgccagtgtctggcggggttggtgacgccctgccctgctgtattctcaggctgacccgggagcctgtggctgagagccctaagaagaagcggtgggaggccgctagcagccttcaccctcctagaggggcaggctcggcgacaaggggcgggggtgccccgtcccagcgagggacgcccggggctgggggtgccggtcgagcccggggcaacagcttcaccaagtttggcaaccgcaacgtcttcatgaaggacaacagctcttcttccagcacagactcccgctcccgctcctcctccaggtccccgacgcgccacttccgcagaaggtactgaggctcccggctggggctgtgtgtgagggagggggaggcgtttcaggcctgaccctcctgcttcttcctgcagtgactcccactcagactccgacagctcctactcagggaatgagtgtcaccctgtgggccgcaggaacccgccccctaagggccggggcggtcgaggggcccatatggatcggggccgaggcagggcgcagcgtgggaagaggtgagactgtgtgagggctcgacacacgggccagggtggaggagggtactggggacccatgggagaaggaggaggagggccggacaggtggacagccagctgccaa

SEQ ID NO: 22818 - DNA, 1471 bp, Homo sapiens
cccaggtgcagggcatccgcaccgagttcacggtggaggtgtacgagacccatgcccggatcgccttggagaaggtgagctggcctctgcgggcctccccagcccctttcctgctgccgttctgccctcagcaccctcactctgctctcctccctcggtgcctctgccttccagggtgaccatgaagagtttaaccagtgccagacgcagctcaagtcgctgtacgccgagaacttgcctggcaatgtgggcgagtttactgcctaccgaatcctctactacatcttcaccaagaactcgggaggtgaggcccagtccccaggacagaggccatggtacccagggttgagccctgctgacttcaccctctttgtcttggtgctagacatcaccacggagctggcatacctcacacgagaactgaaggcagatccttgcgtggcccacgccttggcattaaggacagcctgggccctgggcaactaccaccgctttttccggctctactgccatgcaccctgcatgtctggctacctcgtggacaagtttgcagatcgggagcgcaaggtcgccctcaaggccatgatcaaaacgtatgtggtgccaagctcccttctgcctttgctcttcccatccttccgcctcgcaccgcccctcagaccagctcctggccgcaggcctcccccagcccccaacccttgtcctggtccttgcttccccatcatctttctccattcagccctcccctctccagttcctcttgctctccttgttggtcacctctgtgttccgggtcactcctctccctctccccactgttcccagctcactgcctctggggcctcttctccaccccatctgtgtgtctcttcctcctgttctctcctgcctggaccccctagttcactccttgccctgggcttcctcagaaccctgaggtctctgctttctcagcttgtcgctgtgctcccaccatagagaccatctagacagcctctggtctaccaggacaaggcccagtcccactcagctcctttgagagcaccagaaacgcttagggagacacctgtgttgaggccacactgggcgcggtgccagaggcccctggtcaggccatgcccctgcagtgtccttcgttcactagacattgcgcctggcttgctgtgggtggggatgagttgcttgactcatgtttagacgcatggttctgtctggtgattgaggtgcccaggcgacgctgggcaatgtcaagagaggttttggcttgtcacagcaaggggatgctcttggcatctagtgagtggaggccagggatgctgccctgccactgccattgggcctcagagctcagtcttgccaaggtggagaaattctggtcgaagaggttgaccggtagactgaagaggccttgagagcctggccaggtggctgtccacgtgaggtcatagtcacagcatggaggccttgagag

SEQ ID NO: 22819 - DNA, 1135 bp, Homo sapiens
tggtcacagcatagtttggagctagggagggactgtcagcctggaggtttggagactcattctggaatctagtgtgggtcaagccaacttcagggagaggctgagccagggtaggagtcacaggagcagacgaggatgtggggtgccgtgcacagagctccatgaccagcttgggaagttagaaggaaggggaggcaggaggctgcttagtctgctgccatgatgggccccatgaatggtggctctcaagcttctgtgctacacaggggtgtgtggttgggcgagtgtccttgttaattgatacctaattggccttggttgggaacatagccatgagtgcccctcgtgggtggggcgccagtctgtcattgacctcattgtgtcagcaccttcccctcaaggaggctgaccctgccctgccagctgagactgggagacggagtgggctctgatcccagggcttccaggaaagctctggctttggagcagaagcgggttctaggacttagtgcccctcactcggtgcctgggttcctgtgtgtgtggaaagggtagggctgcaccctgtggaagagggttcagggagctctgaggacctggctcgtgctagatgctcagtcagtagtgtgttttagcagcagccggaagtgactgctttcagtgtgtagtggtgagtgctagctggcacccctgcgcctggcttcccagacactgtaacgcagggcaggggaggcagcgagggctgggtccccacggtggccctggcagccccgccatccccatcccctgccacgtgctgctccctccatctggtccctgcccctcagccagcggaggagcccgctgggcccttccctgcccgtccccgctcctccctggcccccgcacaggtaagtgagggtgaggggggcacaggggactggggtcactaacccccccccgggccccccccgagcccctgaggtggggaggctgggaggcgggtggggagccagcaggcactgtgctgaggaaatcctgtgggcacccgaatgggggggcctccccgctcgtggggccctcccctgccctcccgcccgcccgcctcatcaccttctcctcttgtctccatagcttccgccctgcgctgccagtc

SEQ ID NO: 22820 - DNA, 1500 bp, Homo sapiens
gactgccgcctcagcctggcgcagctgtcagccttctgagcacccagcgaggaggggcgggggcaggggctgcagcccccagcgctgcctttgcggattctgtttttgagccgtggacttgggttgtaaatttatttgtggggagtgcgctccaggaagagccaccatccctgcccccgttttcccaccggggagtctgtacagagatttttctacgtttttattttttgcctcagagggatgggattggggaggaggggatgggcagcggagggttgggggcatggtctgcaggctcatctgtgtccgcctttcactccactaatgctgtctcagtgttttctctctctctctttcgagcttgcactccggtacccgacccggcgccctggcccatcccatgccggggggccagtggaaagaagacaggccgtccagcccgtgcccgcctgcggcgggggcacccagcaagcccgcccaccgcccgctgcctcacctgcttcgccacagactcttgttcccagccccttggggcctccgtgtttggggtgggggagctgcttagagactgtgcccgtcctcggccccccaccctgaagtgccagcaccaccagcaccagatcctccgccgccacaccgcactgaggacacgccggccgggccgcctcgtctcaagttgtataaagttgtctccgtgtcccctcctccctctgcccccagtgtttcttctgatttttttttcccctttccctccctccctctccgcattcttcccttggttcagcacaggtaaaacggttcccctccctccctgccttcatggatcaccagctcacgtcatgttgccttctcttttctttgtgtgtgtgtttatttaagttatttttcttcctcctctcccttttctttttggccctccctccctccctcttctgccatgtaactggaggatgtgctatgagtttgcaaacagctggactgtcaggctgctttttttccagatgttcctcctctgcctccccttcccctcctctcccctccttttccttccttccttcctttccttggagcactgagcaccatttggaagcttgagagaaaccaaaattaaagagagaaagagagagcgtgcacgctcctgctttgtctttcctgtgtgggctgtttgcatccattgtctcctccagaggtctgggggtgtcactccaggcggatctcagccaggggctggaaaggcccccctgtcctccctatacggcacagccagagtgtctgcaggggctggcaccccacttcctggctgagggtgaactccagcttggggaggtggacctgggaaccatggggcaccttggccacggtgaggtgggggtgcagctgccctggagactgtagtgtactcagcccctcggcttccagcctctggctcagcacttgtgccatgctttccagtgtgggagagggtggggcacacagcacatgcgggcccaggaggaccag

SEQ ID NO: 22821 - DNA, 1113 bp, Homo sapiens
caagaggaataagcagacctacagcactgtaagtggggcccggatgcgtggctcctgcgggaggagggtcctgagtctcttgactctgggtcagagggcgggaccttcgcatgtctccgggtcccttattcacgatgccttgtgccgcctccttcccaggagcccaataacttgaaggcccgcaattccttccgctacaacggactgattcaccgcaagactgtgggcgtggagccggcagccgacggcaaaggtgtcgtggtggtcattaagcggagatccggtgagttttgtctggtttgggccagagagcggcccctttcccgggtctgggagctgtgattttttactgtcaggcaggaagagcggtaactgccatcgcggcgggcatccctggcgccagggtgttggtctgggtaccggcttccctctcggccgacttgtcagctctgtgagccgcgcgcgtctgagcccgtgtcctcacctgtaaagtggagaaatgaaaaaggacctgaacttcctcggtggttgttgagagttaaggcacggggttgatgttttcagatgaaattctcaaagcaagtcagggtggggatggatggtttcatcccacaggtgggaagattgaggcacaacaggggaggggccctcgctaccacacttaggaggggacaggctgggttggttgcagccatttgattcccattttgcctgtgtaggttagagaagaggtcttggggaccccactccatacattgtgctgtcaggtgcaggcctttttggggattccctgaatgttcgtgtgagtcgggggtctctaatggaggagtccagcttcacatgtgttcttgacagggctgtattttctttttagagtgagtttttctcaggtccttgattggaactgcctcagagccaagggtccttttactcagtggcagcaacaaacgcagtctgttggctagtgatcctcctgtctcagggacacgtagtccagggagcagccaattgcttggcacttggggaccccgttctggggagtcctgaaagctttcacctcttggattgccgaatacatgggtggcccttcctagactaagggactggcctgag

SEQ ID NO: 22822 - DNA, 1048 bp, Homo sapiens
aaaacagctacctgctggcctgcccaggcacccgccacgggcccacgctgctcagcttctcaatgtgagactgtccacacctgcgaggtgtgctaaaggtgcaggttaggtggactgaccccaggacctccctgacccccaaccaggccagcggaagcctgccacctcctatgtgcggaccaccatcaacaagaatgctcgcgccacgctcagcagcatcagacacatgatccgcaagaacaagtaccgccccgacctgcgcatggtgagctggggtttggggatcaggcttggggagactggccagtgctgtggggaagggcctcccactactggttgcaatatgggctggagagggatggattcttgctttcagcctactccccacacccagcattggcctagggggcggcttgtggagtgtatgggctgagccttgctctgctcccccgcccccaggcagccatccgcagggccagcgccatcctgcgcagccagaagcctgtgatggtgaagaggaagcggacccgccccaccaagagctcctgagccccctgcccccagagcaataaagtcagctggctttctcacctgcctcgactgggcctccctttttgaaacgctctggggagctctggccctgtgtgttgtcattcaggccatgtcatcaaaactctgcatgtcaccttgtccatctggaggtgatgtcaatggctggccatgcaggaggggtggggtagctgccttgtccctggtgagggcaagggtcactgtcttcacagaaaaagtttgctgacttgtgattgagacctactgtcccattgtgaggtggcctgaagaatcccagctggggcagtggcttccattcagaagaagaaaggccttttctagcccagaagggtgcaggctgagggctgggccctgggccctggtgctgtagcacggtttggggacttggggtgttcccaagacctgggggacgacagacatcacgggaggaagatgagatgacttttgcatccagggagtgggtgcagccacatttgga

SEQ ID NO: 22823 - DNA, 1027 bp, Homo sapiens
gcagtggggacacatccagagtgctgaaagaacctcccccaggtcatcctatccccaagagtgatgcccggcagcattcccagctcagggctaatggttcacggaagccaggaatcaaactgcctgggttccagtcccagctctgccagttatgcccagctgtggggacttgggcagctcgtttagtagcaccgtgcctcagtttcccatatgtaaaaggccattttgagtgcctttcacagccctgcataaggcaggtgtctcagtgttcactgctgtctctccagctcttagtccagtagctgcatggtgagtgagcgtagggcgcaccctggaaggctgccaagcccaaagttgtgcagagcgctggggactccagactccccacagcagcagagactcgggactgaggcatcctctgttcacaggacatgctggcatctactgggtcagggctctgctgctcggtggctgtgcaaccttgggcaagttcctcaacctctctgtgtcttcgtaccctcatctgtaacatgcgtgtcgatagaccctactactcagggttgatgagaagattaaatgtgcaaaacctgcttgactgtgcccacaaatcctgattgtaggaataaattaatgactttttataaatattttgatcagatggactcatgatcacagatgtcttcacatgcctatgactaatttgtacacaaactaatgctcgtgtttcccaagcacctggaagacatgccagatccatgtgcagtaatgcctggtggctccaggtctgccccgccgtcctgtggggctgtgagctttcccagcctcctgcccgtgtttgtgaatatcattctgtcctcagctgcatttccagcccaggctgtttggcgctgcccaggaatggtatcaattcccctgtttctcttgtagccagttactagaataaaatcatctactttaaaatctttcattatgaaatatgcatgtggtcttgaaaaactgcaaatgaaagaagagtatgcaggggaag

SEQ ID NO: 22824 - DNA, 1046 bp, Homo sapiens
aatgaaacaagccacataaggcacctaagtacaatgcttgttagaggtcaacaaatgttggtgacttgttctggtcttgggtcaagccaagagacttgggatttgttggcagggagatgggtggagcaatgcatgtttccagtatgaagtgggattgggggcgggggtcctccttcattttggagggagaaataccgaaagacagcatgtgatgggactctggagccttgctgcctttcttcaaccactggccctgccactagttaacaatgtgactttagaagtttgtttgtttgtttttgagaaacagagtctcactctgtcacccaggctggagtgcagtggcgtgagctcactgcaacctctgtgtcctgggttcaagcaattatcctgcctcagcttccccactagctggaactacaggtgtgcaccaccacacccggctaatttttttatttttagtagagacggggtttcactatatattggccaggctagtctcgaactcctgactatagttgatccacccacctcggcctcccaaagtgctggcattacaggcatgagccaccatgcctggcctgactttggaagtttaatttatctctctggccctcagtctcttcctttgtatttcagagtcaatgcttgtaaccatcttctagggttactgggaggattcgttgagctcacacacatcagagttacaagagtgctgggctggtagaaagcacacatccagtgttatatgcgcacgttactctttattaacaaaccagaatttcatcacaaggcagcgttgttgcagcagaacggcccacagtctggcatcagaaagacctggaatcagttacctgctttcctctttattggccacatgaccttggaggaatgccttccccatgctgctcctcagtttccccacttataagatgggcccagtcatggtacaggactgtgctgcctccaggcaataacaaatatcaaactggtcaaacaataaatgtgaaccgttaatacacttgctgtgggactcctgtcccttg

SEQ ID NO: 22825 - DNA, 1035 bp, Homo sapiens
caagaccttccgctaccgctccaacctgctggagcaccagcggctgcacctgggcgagcgcgcctaccgctgtgagcactgcggcaagggcttcttctacctgagctccgtgctgcgccaccagcgcgcccatgagccgccgcggcccgagctccgctgccccgcctgcctcaaggccttcaaggatcccggctacttccgtaagcacctggctgcccaccagggcggccggcccttccgctgctcctcctgcggcgagggcttcgccaacacctacggcctcaagaaacaccgcctggcgcacaaggccgagaacctcggggggcctggagcaggggcgggcaccttggccgggaaggatgcctgaccgaggggttcccatcccactcccatcaaaagcccccttctggactcccacctcccaggactgatcagactcttcccccctcctcgctgttgccccatccttcagaacttcacacggactggcgaccttcagggcgcacgcccgacaggctcaagactgaatcactcccatcctcgacctctctgccctcccctcatcccatcagacactgaaccctatcctccgtccaaccctcgtttgtgacccgcatcagcccccgccccagcagcactctgcccccagtaagttttggcggagatgggtctgaaccgcccctccccctcctttggaatctggctggacagtggagtatgagcagagttgggagggcacaagggagtgctgggtgctttttggggtgggggggtggggggcggggtggcagacgcggcttgtacagagcggagaataataaatcttaccatgagggccgctggagtccatccttgcatcccacccagggagagtggggatcacatggtggcaaagcacaaagttaaaacttgtttcctctgcagttttgatgccgggcgcctctgtctctcactcactctcattcaacagggacttactgaggatttgctgtattcccagcgttagtctgagctgggcaaatggagatggacaag

SEQ ID NO: 22826 - DNA, 1912 bp, Homo sapiens
gccattttctccctcgcttccccccacttcacggccgcgcggcgccccccaaccctggttccgtggcgcgcgcctcgttcacgtgacgtccccagcgttccgccgcgcgctaggcgaggggaagggggcggcggggcgcgggcccgtgacgcatgcgcacggcggctgtccctgcgccccacgtggtcctggcggaggtggcgcgggggacgcggcacgagcgcgccagatgcctcgacgtgaacttttgttttttaaaatctttttggtttctctgaaaaggagattatgttagtccccgtaatctcttttctcccgctgccttggcacttccgcttccggtcgggcccacggcagcgtctccacgccccctttgtttccaaaatggcggttgtgagaacttggtgggggggcccctttccttccttcacgtggatgagggcagagccgtttcggcggatgcttggaggccacgggcccctcgcgtaccccttttcctttttgctgatttgctctgatctctcccgccaggtggtttctgccccgtctgttggtagtggggcgcctcatattaacgtgtttggcacatgttgcctaaaagcatctgcattctttgagtgtccgcacgcacacatcctgcatatgcggggcttttggcggtcccgagaatcgcgatatggagtgtttgagacaaacctcaaatcatttacaatcccaatctcagggcacctgataatactcagtctcagatctcaatatagagataagaaaacaggttctgagggaggaagagggatctggcccactgcgctaaactcttcacttacggggaaggtgggaggcaggttcccttcagggtatcgaaaattgtgatgggttagaacaaaaagcctggggccctgatcttagggattccaataatattagaagtgggagagttgttaagacgctttaaaaatcctccgtgtttcagtttgtgaagaaatacaggaccagggaagattggagacttgtttcttttcaggcttcagctgcccatgttcctagctcgttcggaggacgaaatgagggctgaggaattttcctttgaacccgggctagagttgggtaggggctgtattaggaaacagtgtcctggggaagcaataacgtttactgagggtctgactctgtcttagttgatggactgctcaagagcataggctttggagttgagcacatcaggaagtttagatacctgctttgtcgtttagtaactgcttttaatacgtttatatatttttttccatttgtagactgattattattttcttgttaccggattttgagaagattaaaaaggatgatagtaacgatagatgtagttaaactctgagcgcttaccgtgtgccaggctcttcgctaaactcttagcatgttttactaagtggatccttttaacagccttgtgaggccaaaatgatttccacctctactggggaggaaactgagggctcagaaaagttaaaaactttctcagggctcagctagtcagaggcagagctgagattaaatggggtaacatgtaaagtgtgtggcatgtggctttgcgtacactgggtgtgcagtaagcgatatttgcaattgtaaaattccatgcttagagaggagggtcttccgctcacagagattgtgtcagagttgggaaagggcaggaaaaggtgctttccaaatgtcattctgccacacaacacctggatggagtagatacgaccctcgtttaaagagaaaaccaagtcttaaaggctaagttgcttttgcatggtttttgttgttcataagcagaaaagcaggtactgattctgagctctggctgcaaggccaagttccactctgctggaccaagtggagctgattgggcggttctttgagg

SEQ ID NO: 22827 - DNA, 1106 bp, Homo sapiens
cccgcgtgtcactgcctgtagtctttgtctctgcggaggacgggccagcttctgtacgtgtcgccttctgcttcagtcctttcctctgctacctgtatctacagggaatttccttgtctatatcccaggcacccagcgggcatcattgctttctctgcgtgggttcctgtctgcctgcttgcctgtttcagagccttagcagcagaaagggctcttggggctcacagcctgtccatcttataagcgaggagctgtgcccagtgccgtgcctgtgtgcccgctgctctacactgctggcctgtcctgccgattgttcctcccaatttcagtttttgattttggggtttttggccttcaaggggacaattatattgtcattaatggttctagccagacctgagtgttctgcctgatccacattcgagagtatggcctcgtgcttaactcactgatgtcagagtgtttaaattctggtgtcaccatttcctagctgtttgaccttggtaattgtgatctctctataccttagtttccttacccattatgtcagcccccagcagtgtttttccgaagcagtagtgaggattaagaacaaacaaaacaatttagtacagattccggttgtaggaagcatctcaatatttgttgctgtttttttccctgctgggtgcatatttttctgagtgttggtggttttggaattgtgatgcttttccagacattcacattgcatcgcaaaaacgtgagacaaaacactgtgggtgaggctgaagtttaacatcctccctcagtgccctttcctcctcttgtccccagggatgatcactccaggagatgcgtgttaacatatataagcaccttaacgtgtgcatctgttttgtgtgtgtgcttcatggctagctgagaaatctgggtgtctttgaattaaggaaatggtgtggcggtgctcatgaacccccccgcccccccatgctcatggtttatcctccatcttgaagggccggtctctcttcaggggttgaagggtctggtgagagcagaggtttctgtggttttgccagtgaggctccgttcctagtggctacctcaggcaaatagagggttga

SEQ ID NO: 22828 - DNA, 1022 bp, Homo sapiens
tctacacccccacccatattccactgttccttccccccctcctccctcccctcatccctctccccttacccccaaacccctctgtgtctccctctctcacccttcccctcctctctccacctcccttcccccgcccccccccttgtctcctattccctctgcaggaggccatgatggatttcttcaacgcccagatgcgcctgggggggctgacccaggcccctggcaacccagtgttggctgtgcagattaaccaggacaagaattttgcctttttggaggtgagctgggggagtgagtgaggtccaggaaacgtgtgtgatgtgagggcccagcccttaggctgatgttgtgtggagctgccttgtgctgtttccaccaggccctctgcagcctcttctccacccggtcgctgaagtgagccctgttatagcattacagatctgatcctactttctgccttccatttgctttctgtgtgacctgagaggcctgtttggcctctgtagacctctttggccttttccagaccattccggcccagtcctctctgcactctggccacactgaccttcccagaacctaccatgctcctgcctgcttggctagagttctttacaccagctaactgatgttcctaactagtcttctgttaccccagctaactgatgttcctaactagtcttctgtgtctgtgtttctcaactgtcgggaaaaggccttggtttttgattttcgactcttggtggactgataactctcatgaagtattgtgaaggtgtgggcagtgttagcttactgcagagatttctgagcactccctctcactgtctgagcactccctctcactctgtccctctcactctgtctttgcctcactgcagtccacttgcagttgcattgctccggagatgggctgaaatgtccccctcaccagaaagactccagtactgtcatctccccgttcaactaacctttcccgtaacatcccttttcagcactttgtccctcttccgtgtcat

SEQ ID NO: 22829 - DNA, 1082 bp, Homo sapiens
cagggcctgacgggccgcaagttcgccaacagagtggttgtcacaaaatactgtgaccccgactcttatcaccgccgggacttctggtagaggcggctgggggagggtgggggcagggctggctgggggcttctccccactcccgccccccccttatccccctctgaagacgatgggcagaggagtgacagccgcagacacacgacagccggcagcaactggaatggcagcaattaagggtggggggcgggggttggggggttggggggttagggcagggaggggactggggaagtgcgcacacagcccacacagacaacacgcacccacacagacacagagggaaggggttgggatggggacagggtgcacagcagggcggggtaggaccccagcccctcccaaaacagcctctccttctcccatagacccctttcttctccccttccccacggtaggaacatagcgtgtttatattttatggccaaactattttgaattttgttgtccggccctcagtgccctgccctctcccttaccaggaccacagctctgttccttcggcctctggtcctctctggtcccctcctgggtttcttacgtagttgatttttcctctttagtctcccccgacctgcgcccagccccgtggcccctgcccctctcctactctctgtggcagtttcatatttgctaagacgaatttgctcattaaacattttgttgtattttactttatggagcggctgtgtgtccagtatgtccgaccctcttcctcggttctgggctcgggtgggggttcccttggcaaactgcgggcccctggctgggacgcccctgctgccggcgccggcagcctcgaggccttccctgcttgcgcggtgcccttctcggggtcggcacaggcacagccccgggggacgtgaggttcccgagtgctctcccaccccgccgacaggagggatggtggccgagcgggccggggcgggcgtggcgtgggtgtgccaggagctccgcggttgccgccaagcgagctggagctgactctcggcgttccgtgagcaccgcgcggatcccccgct

SEQ ID NO: 22830 - DNA, 1053 bp, Homo sapiens
attaagatagtgccttttctgccgccacccttttggaaatgttctctgttttttctctgataataatagcagccagtgttattgagcgcctactatctgtggggcacagagccaagcactgcatgtacccatcttatttaatcaacaggcctaccaggtaggaattctttcatttcagagttgagcaaactgtgtctcaaggaggtgtgcgctgcaggtagctgatgtggccaggatttgaacccacattttatattctttgccattagattccatttttcttatctcttatttctcagcgccaggtctctttttgtttctgggcctctttcttccttggcctcctgcctccctgtcttcccatgttcttgtatctgctgctgcctgtgtttttctcattgtgtctctgcctagctccctctgcccaggtttctatgtgtctctttctgtcagaactgtcttctatttcttctcagtccccttctctgcatttgttacatcatctcttcatcttaatgtattaggctggggctgttttgggactccagagagttactttttaactagctacatctgtcttcaggtgcctggctttctggcctgaggtggaagcagaggccagcctctctccgtcatccctatctcccctgggcttacatcatggcggggctttgaaaatctccctctgtggcttcttggagccgcatagatgggtgatcagagctggctctggaaccaggctgctccaggagtaaggtgtgtgtccctgggcaaggggctgaacctctgtgtctcagtttccaccctgtgaggtggctatgaatcatggggttgtttcaaggattaactgagttaatacatgtaaagcacttaaaacagtgcctggcatgggataagagcagtgcgagtgtctgctggtgtcatcatcatttgcttgactctcttgtttctcgtcaccagtctcgggatgggttaatttaatttaggttaatttaaaagtatgagttttggagttcaggtgggcctcgggttgagtctgccctgccattcctg

SEQ ID NO: 22831 - DNA, 1050 bp, Homo sapiens
cagtcgctctcacacgtacctctcgcgggctcttactcgtggtcccggtctcctcctggtccccaccttccagcccagcgcgcacactagacggcacgtgctctccacgctctttctccagcgccccttgctcacccgccccccgttggagtggcccatcctctccgcttagacacctgcagtcactgtcactagctgaactgcgccctcctgaaagctctatgttgaaaccctaccccccaccctgcaccgaccccgtaccccagaatggggctgtatttggagacagggcctttacaaggtaagtaaggttaaaatgaggacattagggtgggtcctaatccaatctgactgttatatagtggggttgcaccttcatgtgaggacgccgggagaagacagccgtctgggagccaaggagagaggccttggcggaagccaaccctgcagcaccttcatcttgaatttctggtttccagaactgtgagaaaatccattgacgttctatagcgctcccagctggcggtactttgttatgacagccctaacatgaatgcagccatccacactgtctgggggaaggcacacacaccccacagcacccttgctgtctcaccccgtatcgcaaaagctcacgcatgtgtctctcccgagtccctggagggtcctgccacctacatctctctccttggcctgccgcctgtgatgctcctgggccccctgctccagcaccgctcccttccttctgtaatacagacaacagagacaggagatggcctggccccacttcatttctgttccctgggaaataagcatcgcaagtgatccgtagaatggtagacatcatccacttcccaagcatctctggctgaatgctgttctcatccacttcccaagcatctctggctgaatgctgttctacacatgcacgtgggaggcaccagggagcccagaagaaatgaaaagcctgggcagactcgcagttctgccacacagtgaatgtgctactcaagccactcagcctgggctgcagaggttggaagcctcact

SEQ ID NO: 22832 - DNA, 1107 bp, Homo sapiens
gccccgggcccgcgctgcgccctctgcccgcccgtgagaagccccacgcgtgctgcgagtgtggcaagaccttctactggcgcgagcacctggtgcgccaccgcaagacgcactcgggagcgcggccctttgcctgctgggagtgtggcaagggcttcgggcgccgcgagcacgtgctgcgccaccagcgcatccacggccgggcagcggccagcgcgcagggggcggtagctccgggcccggatggtggaggccccttcccgccctggcccttgggttagccgcctcccggccagcgccatctcccgcccttggtgctgcccccgggcggtacctgctctctcccagcgccacttggcctcttcctctcctccttccctcccatcgtcctcctccacctgcgcctcccttgtctgaacttcccaacgccttcctattcctttccaactccttttcccccaaatttcactttccttctcaggtctcacctcagccccccccttctccctgatttctcggcctctctctctgtgtgaaggggcctctccctaatgtctcctccttcccccctcttctctctcctgcggcccagcctccctctccctcctccattcctctctccctgcccttttcctgcctgaagagcagaggtgaggacctgggacccctgaggggcaggccaggaggagctcgggcgcaggccaggcccccttggtgaagcagaggctgaaggaaaggggtctgggtcttgtccctaggaattctcctccctcaggagattgggggttgggggaggcagcgggtgatggctctgaagctgaacccagggcctggctgtggtcttcttggtcttgctgccccctgtgacccaaaggcatgggatggacagagatgcctgcccccgtgaagctggttggggagggcagttcaccagcatccatagagtaataaagtcactgtgtgtagacccggagtctgagctctgtctggagtctgtccggcacagccaccctcccagggccgagcgtctggggtgcccggggcttctggggtcagctgtcttggctcccaccacagactctcttggcatgagagaggctctgggag

SEQ ID NO: 22833 - DNA, 1049 bp, Homo sapiens
ttttttttccattaaaaaggtttctaaataaaatcactgatgtatttgagtatttcttcaataggagcattactctgcaaagagtcatataagagtaggggtgatgttcatatttgacaaccaacaaggcaaaggcacacagcagaacttatcctagctgggatcctggagtttgctgccatgctgggcattaatcttcagttgctgaattccttatggagaaatctggtgtggtcactagcagcactcagtgaagtagctgtttatcaatgagtgtggcagtatttcagtatttaagaaatcagtatgttcaggtgtgtaccattgaatgccatctctatgtcagcccagcttaagagcaggctctgtgacatgtcaaaaccaagatgcatatgcctaaccatacaacaagccctgataagtcttgagctgatttatcttgttaggaagaagacccatttttaatttttagggagcaaactaggtcttgttccgtgttatcttaaagatccttaattcaacattcggtagtattatttgggagctgtactgtaacatttttaaaactctcttgctcatcaaacaggcacaattgtgtatgtttctctagtgagagctgtagatattttttgatgcattttattatcagacttggagacattcactaagtaaattaatagtgcttaaattactattattttgtctcatgtagcatgattataagttaccaactatctttacaacttagtggggttatcaagagctgttaggcaatcatttgtcgcctcttacacacagtctcaggaaaatttttatttccaatgaacatttgtcccatattgaagtaacttttattgtacttctttgattccttcttatcaagtactgattatacagattcaaacatttattgtaatatcactcttcttcttctcaagacattagaagtcatagtctttgagatcaacttcattttatctgtgacaaattttttcttgttttgattcagatacctttttgtttgtttgtctttagaaacggggtctcac

SEQ ID NO: 22834 - DNA, 1056 bp, Homo sapiens
aaagaaattaaaaggactgaatagtgctggtgataatgtcaaaaggtgacttgtgataatgctttgtgttctctgatcttcctagatctgtggtttggtgtttgttttcttgcttttagagacaaggtcttgctttgttgcccaggagggagtgcagtggcaggataatggcttgctcaagcaatcctcccacctcagcttctcgagtagttgggactacaattacacagcaccacacccggctaatttttgtatttttttaaagatggggtctcactatgttgcccaggctggtctcaatctcctgggctcaagcaatcctcccactttggccccccaaagtgctggtatgtatcacaggcatgagccaccacactggcctggtgtcctgtcattaattttagaaaattctcagtcattattcaaatattttctctcctttctctcttcccctcctggtattccagttacgcatatatttcaccttctgtaattgtcccatggttcttggatattctgttctttttcttttttcattctttttttttcctctttgtatttcagtttgggaaatttctattaacatatcttcaagctcacccattcatttctcagagtgtcttagtctgaggggctcactaaaggtaatcttcatgtctgttacaatggttttcaattgctaggatttccttttgattccttcttacagtttgcatctctctgcttacattacccatctgttcttgcatgttgtctactttttccaagatgcttctccttctgtgggcttccctaagaactccttcttaaatagagtctgtgccttgcagttttctctgttgtaatctactgttattgaccagagccccattagtgtggcagtgaggtacagtggggagggaagcattctataatcttattattaaatactatttttctagtgggcttgaggccttggactgtgatcttcagaagcacttcttagcctttcaaaaatcctgccttactgagacagacaggctatagagggactggagctggccaattgcctctccc

SEQ ID NO: 22835 - DNA, 1033 bp, Homo sapiens
tcggcgacccagactccgggctgagaggcctcctaatccaaccaggaggaccaggagaggcccaaaaggggacacagggcagtgaccgccaggcttggagaggagccgctcctggcaaagccagcgccctatttctgaacgccgcctccgttccggactacacttcccaggggctattgcagcggaggacacgcccacttccggaaaggacccaaagccgggcgagtgcacgtcccgccggttgctgaggagaagggaggtctgggcggggcagcggccgaggctggactggggcgcggcgggggcggtgtcctggttcctgtgtgggcggcgggcgtgagcgtgcgcgtgtggcctggtggctgtgagtgcccatacgtggtgagcgtgcggtgctgtgctgaggaggggcgagcgcgcgcggggatggcggcccggtgtgtgactgtccggtgcgtggccgcgaatctgcgcctgcgtgcatggcccggcggcgtgcggaaggcggtgtgtgttggaatgagtgaagcactttaagtggccaagagcaggaaacccggccggaggaggcttaccccgttctcccctgtatcgactgcgtagagcccagtgtgggcaaagtcctagagcccggggaagttgcccgggcggggcagcctcggctgaagcatttcctgtcagccctatctggaaggggcagagcccaggacagggctccatgtccacaggacggcgaggagcgaagaccatggggactgagtacacaggtaagagtgacagatgacggatgtggctgccggagtggacattgaggttttgggtgctgtctttcggggttcaggtgctggaggaggatgtcccccgtttctaaggctagtggacctggaagtcgaaagatttggagggtcaccttgggtcagagtggagctgggtttagttagggagggaccttgacttggccagagacacctaaccagataacctgactcaggtccttggtatatcactaagggcccatgggagagaacactac

SEQ ID NO: 22836 - DNA, 1061 bp, Homo sapiens
atgttggatatatttagattggtgcaatattgcaccatgataataaatgataaatggatataaatgacaaatgctataaaccatgatgagcctgataggggacaaatggtgccacgtgatttatttctgagtagcattgtttgtattattagtgaagttcaagtcttagaaaatgtttactagccatttctgtgggcagggaaatgatccatcttgtgctttagcagtctacaggaatctgagtatgctttaaagactttacagaagcaaatgtgtgtgtgtaaatatttgtggcaaatattcttcccagatttgctttttgtttctttattttactttattttttctgtataaaagcatttcatatttttaaaatcaaatctgttggtttctcccactgtggtgtctttcttcatctttaagctgtgaaagggtttctccatccacaggtcacatagcagctatattttcttccttttcaccatttgtcatttgaatgttaacaatgaacttttgaatctacctgtaattgattttgctatataaatgtgtcagtagacttatttgggagctttggtttattctgtcttcatttgtttggtacctttgttgaggtacacatcacgtatcacaaagtgtacaattcactgattttgggtacattcatagagtcgcgttaaccatcaccacagtccatttcagaatattttcatcatcctgaaaaagagccgagtacccattggcactcatttccattttcccccatcagtccacggcccctggcaaccagtaatcagctttctgtctctatgaatttgactgttctggacatttcaaataaatggaatcatacatggtgtggtcttttgtgactggcttctttcactcagcataatatttgcaaggttcaaccatgtggtagcacatatagagcttcattcctttttttgactgaataatattccagtgtgtgtttctacatattttatttatcctttcatcagttgatggacatttgggttgtttccactttttggctattatgaataatgctgctatga

SEQ ID NO: 22837 - DNA, 1018 bp, Homo sapiens
aagggagactccctttcccggtctgctaagtagcgggtgttttcctttgacacttacgctaccgctagaccacggtccgcctggcaacgggcgggcgtcttcccagacactggcattaccactagaccaaggagccctctggtggccctgtctgggcataacagaaggctcgcactcttgtcttctggtcacttcccactatgtcccctcagctcctatctctgtatggcctggtttttcctaggttatgataatagagcgaggattattataatattggaataaagagtaattgctacaaactgatgattaatgacattcatatataatcatatctaagatctatatctggtataactattcttgttttatattttattatactggaacggctggtgtccttggtctcttgcctcggcacctgggtggcttgccacccacgtatttcaggaataaataaaagccaaattttgttgtgttgtaaccaagaagagaaagccccaatttggtcatgtcctgcccacagccccacataaagatgagttaggtgtgtgtttctcacatcaacagccccttagcatgtgccatgtgttatggatactgctgggatggaggaaagatggcagaaatagtgcatatataatcctgcattcaaaactcctcacagtctgtgtgatagaaagaatgaatggcagggcgctgtagctcatgcctgtaatcccagcactttgggaggctgaggtgggggatcacttgaggtcaggagttcgagaccaacctggccaacatggtgaaaccccgtctctactaaaaatacaaaaattagccgggcttggtggtgggtgcctgtagtcccagctattcaggaggctgaggcaggagaatcgcttgaatccgagaggtgcaggttgcagtgaaccgagatggcgccactgcaatccagcctgggtgacagagcaagactctgtctcaaaagaaagaaaagaagagaaaaggaaaagaagaggaagaaaacaaa

SEQ ID NO: 22838 - DNA, 1043 bp, Homo sapiens
tagggggttgtgggaaccccaattctaatgtagttggtcaaaagcacaggccacaaccaggtgattgtgactggcatctgaagtgaagggcaattctgtgggacttagtcctcaacctatgggatgtgacacttccttcaagtagatagtgtcagatttgaattataggacacctactggtgtctcctggaaaactgggatggatgaaaaaacctccactcatttggtcacacaaatgttctgttttgagtgagttgaaagaaaagaacagttagtttttttgctttagatgtggtgtcagaaatgggatgttgaatgattgtgtaagagtgggagcacttggcagagaagtcaaagatggcggctgtagctgctgttcgctggctggggctctgcagcaggcttgaccagccactgacgggtcagccagcaggtctatgtgaacaagcacacagctgagattttattctggaagtgcaaccctctcaaatattgaaggaactgatataacagggattgaagaagtagtaattccaaaaaagaaaacttgggataaagtagccgttcttcaggctcttgcatccacagtaaacagggttcccacggctgtaccttgcgtgtttcaagataatccttacctcataccaacatcctcttcagaatctcgttcatttttactggcaaagaaatccggggagaatacggccaagttcattattaattcatactccaaatattttcagaaagacatagctgaacctcatacactgtgtttaatgcctgagtactttgaacctcagatcaaagacataagtgaagccactctcaaggaatgaatcaagctcagaaaagtcaaagtctctgtggacatgtttgatgagcttttgcaagcaggaaccactgtgtctcttgtaacaacatatagtctcttggatttattgtgttactatggtgaccaggagccctcaactgattatcagtttcaacaaattgaacagtcagaagaattggaagaggaaaataataagaggtctaggaggaaa

SEQ ID NO: 22839 - DNA, 1321 bp, Homo sapiens
tgtggtcccagctattcaggaggctgaggtgggaggatctcttgagcccaggaggtcgaggctgaagtgatcttattcatgccactgcactccagcctgggtgacagtgagctcctgtgtcaaaaaaataaataaataaaaataattcatgagagaccatgaaccagaggcaaaaaaaaattaataataattttctatgtttcattcacagaaacagtgatactgtggatattcatatatgtatttcattttccacttgtggaggtgcattttttgatcattcttggagtgaaattattggtttgtaggctatgcaaatgctcaagtttgcaagatcattccctttgttttctaaagagcttatgccaatttgcacttaaccaggaaagagaggttccgttgacccatatcctttccattataaggcttatcaatgtttgctcatcaaatggacacagaatagtctcgtgttcttgatttccctttctttcactgctgtaatgttttagcaacttactatgatttttggttgatttatattttcttctgtgaaaatagaaatcattttttattttatgatgaatgcctatttccattaacctgttttcctttcactgcttggtaggggttcttagtacattcttatccttaccttttatcacttatatatgctgaaaaatattttctagtttttaattttgttctcttactctctttaaagtatctttctccaaaaggtcttaatttactgtagtctaacttatgacttttcttatataattaatgatttttttgtcttgtataaaaaatgttggtttacctcaatattaaaaatatattttattctaaaagttttaaaacttggcatttgacattttttcagtgaggttgatttggaatatatagtgtgatagcaatgcagttattttcgttctccatgtggctacccaatttttctagcttcgtttccttaatttaacagaccatcaagttccatagttaagtatagttggtattttacagggaattatattgaatttatataatttgggtcgaattgtcagttcgtattattaaattcttcattgatctagatcatctttattgtcttcaaataagattttataattttcttcatcttgatcatgtgtatttggggttttttgtttgttttaagagaaaaggtcttgctctgttgcccaagctgggtgcagtggcacagtcatactttgctgcagtcttgaattttgcggctgaagcaatcctcccatgtcagcctcccgagtagttgggactacacaggcttgcaccaccatgcctg

SEQ ID NO: 22840 - DNA, 1098 bp, Homo sapiens
acagaatgtggccaagtctttcgacataggccaggctttctccggcactatgttgtccacagtggtgagaatccctatgagtgcttggagtgtggcaaggtcttcaaacacaggtcatatctcatgtggcaccagcagactcataccggggagaagccctatgagtgcagtgaatgtgggaaggtcttcttggagagtgcagccctgattcaccactatgtcatccacactggagagaagccctttgagtgcctcgagtgtgggaaggctttcaaccaccgatcctacctcaagaggcaccagcggattcacactggggagaagcccttcgtgtgcagtgaatgtggaaaggccttcacccactgctctacttttatcttgcataaaagggcccacactggagaaaagcctttcgagtgcaaagagtgtgggaaagcctttagcaatcggaaggacctcattcgccacttcagcatccacactggagagaagccctatgagtgcgtggagtgtggaaaggccttcacccgcatgtcgggcctcacgaggcacaagcggattcatagtggagagaagccctatgaatgtgttgagtgtgggaaatcgttttgctggagcacaaacctcattcgacatgccattatccacactggagagaagccctataaatgtagtgaatgtggaaaggccttcagtcgcagctcgtccctcactcagcatcaaaggatgcatactgggaaaaatcccatcagtgtaacagatgtgggaagaccttttacaagtggacaaacctcagttacccttcgagaacttcttttagggaaggactttttgaatgtaaccactgaggcaaatattttgccagaggaaacatcttcctctgcatctgatcaaccataccaaagagaaaccccacaagtgtcttcactgtgagaaaaccttctgttgctgaatattacttgtcatctgaagagtcatattagaaattcgttcagtctagagccttattctccatctgataatttatcctggagagagacccagtggttattgtgcacataggagaaccttcagctgcatctttctccttagtttaca

SEQ ID NO: 22841 - DNA, 1029 bp, Homo sapiens
gtcattatgctattttccttctacatcctattgatggaatgtattgctttgatcaagttttgaatattgagccagccttgcatccttagaataaaccatacttgtttgtagagtataattgtttttatatatcatttgacatcattccctttgtttgtattttgttgaggaaatattcctctaatttattggctaataatgtgtagttcttttttcttttgtttcttatgttctaaatgtcttatgtgtggttttgatgtctaggtgatcttgacctttcaacatgaattggaaggagttctcttctaatttttggaagactgtgtagaattggtgttatttgttcttgtcatgtttgatgacctctagtcaaccattgggccagagatttttcttctggaggcttttaaattacatatttattttattggataggtagaactattcgaagtatctatttcttgtgtaataaattttgatagtctgtcctgttgaaggaatatttcatctgtatttgtagcactcccttattcttttgatagcaggatctgcacttctttttatttttaatatttaaaatgtgcatactcattttatgattgagtcttcttagacatttatcagttttattgcgcatcatgctgaaagatgtaatttttgcttcatctctcacttcagagaactagcactttatattaatgatttgtctctattcttgatttctttgatttctgctctgatcggtattatattccacttgctttggttgtatttggctctttctaacttttcaaggtggggttttagattattgatttgagatttttttgcttttttaatgtaagcattacattgtataaatttacctcatatcactattggtttgatcccacaagttttaatgttttcattacattttaattctaatagtttttattttttgagacattctctcttagccatgaattatttaatagtatgcttaattttctggtgtttggcatatttgttactgatttctaatttgtt

SEQ ID NO: 22842 - DNA, 1049 bp, Homo sapiens
attttaaatatagaaatgtcatttgcaatttgggacagttttatttcttgcttcccatctgtataccttttatttgcttttctcatgttattgtactaggtaggatttccagtgtgatgttgaatacgaatagtgacaagttatccatgccttgttcctgatattagggggaaatgttcagtttctcattattatgatgttgaaagttgcttccaaagagtttctctatcgagtttagaaagtttccctctattcctaatttgctgggatttttttggttattattaataagtgttgaattttgtcatatgctttttctccaccaattgatttaattatgtgatgttacttctatagtcagttgatatgatgtgttaccttgattgagtttcaagtattgaaccagcctcacatctttgtgataagccctacttgatcatggagtataattttgtttgtgtactatgctacagtatttcatttgctagtattttgttgaggaagctttcctctgatttcatgagtgataatctgtagttttctttcttcaactgttactgtttggttttgatgtctagatgataactaacctcctaacatgaattggaaggaattctcttctgtttttttggaagatcatgtgtagaattggtgttatttgttcctttaatgtttggtagctttctccagtgaagaagtgggacctggagattttccttttgaatgctttttaattatgtatttattttatttaataggtatagaactattcagagtatttcatattggatgaatttttatagattttcttaaggaagtgttcattttatgtaaatgttctaatttgtagcattctttgaaatatttccttttatcctcttgatggcagcaggatctgtacttatgttccttgttgtattcttgatattggaaatgtatcacttattattgtcagtctttgtagacatatgtcaatttcattgatcatttcaaagaaatagcactttatatcactgatttttctccagtctctgttcttaatttcactg

SEQ ID NO: 22843 - DNA, 1025 bp, Homo sapiens
caattacctgccttacatcactgtagctcttaagtttcttaagtcagaaactaacaactggtgtgtctaacatcatagcctgtgtttttaccctcttctttacccgcagtggttagggaggcctgggggtgagacctaaagtaacctttgcaagatgaggcctccttctagccagtgatcttgggcatgaggagtcatggcctttcatactggtggaactgtgtagacttaaaaaatggtatattggttgtttaaggagttctcaggggacctgtgtggcttccacggtggttttatatgtggttccccttactcccttacctgctgacatattctgagagggcacgtttgtatggttatgttgctgaatgtaccctcctactcagccaggatagatgtaatctccagatgggcccatattgtcttggctacaacctgctgtgccctctatgactcttgttgcttgctcatggaatcttctggcctcagggatgcctgctagtaggacttaggtagaaaaggaagcgatggctcattgtgaattctccctggaagcaggtccaggccctaacacctgatcaggtgtcaccacgtcaggtgattctttggtgaggtggatgatgatgactacacttctctgcccttgtccatgggagtggctgaaatgtatatgtggatttgaaatgcttcattctcattaactgcattaactttgctaatagagaaatgtcaggttacataatcagaccagagggccctgggcttaaatcctgcctctgttgataagacctgtgactttgggctgggcttggtggctcacacctgtaaaccctgcactttgggaggctgaggtaggtggactgcttgagcccaggagttcaagaccagcctgggcaacatgggaaaaccctgtctctacaaaaagtacaaaaaattagaccggcatggcatcatgtgcctgtagtcccagctgtgcaggaggctgaggtgggaggatcactagatcacaggaggtcagggttgca

SEQ ID NO: 22844 - DNA, 1036 bp, Homo sapiens
aaatttaaaaattagctaggtgtggtggcaggtgcctatcatctgagctactcaggaggctgaggtaggagaattgcttgaacctgggaggtggaggttgcagtgagccaagatcacaccactgtactccagactggacgacagagcgagaccccatctcaaaaaaacaaacaaacaaaaaaaaccatcatttcattttactgtttgagtccctgtggtaggtttctctatatcacagcacagaaaccattgtaaggtcactcctttcattcctaattttcaaatacaacagtgaccataatgataactgatgatggcccacaatttaccgatctcttatgtagtgtctagcactgtgccaagtgctttatagaaattttccccttttttaagagacagggtcttcctctgtcgcccaggctggagcgcagtggcaccatcatagctcactgtagcctcaaactcctgggctcaagcagttctcctacagagtagctggaactacaggctcatgctacaacgtccggctaatttattaatttttttgtagagatgggatattgctatattgcccaggctactcttgaactctgggcctcaagcaattcttctgccttagtctcccaaatgtaacgggattacaggcatgagccaccgtgcccagccaagaattttcctatttaaccctcatcacagcctatgaaacagaatctgagagtttctgtttttcagatgaggaagtggagactaggatcaactaaatcatttctctggcatcagctgacttggtacaggcaagatttgaactgagatgttctgactccagagctacactcttaacctcccttcaatatgaactcacgattcagcacagagttttcatattttgtgcttgagcattgggccgtcttagattctctttctctgttctcactgggctttggttctctttttactctgatcttcacttttatgttggcttcatcagttatctcatagcccatcctttttactcttacatactctccaaggctaa

SEQ ID NO: 22845 - DNA, 1042 bp, Homo sapiens
ccaggattctgttcaccctctgtcctaggagctctgtcctaagagtagctgtggccatcactagctgtccctcaggcagaatcttgagcatcagcttcgtctccgccccttcctgtctctgaatcctgatcaaccttaacttcttatggggctgcctcctctcactgcagtcctctggattcgctgaagactctgtgtctttgtatattctatgtcctaaggctaatatgtccttctaactttaagctcatgaagcatcctctctgggaagcctccttgacctcttcctgtccctgccccttctaggctacattaagtgccccttccctggcctcttgtagctccttgacatgttcttgagcaagcttatgatagagtgtcatcattatgatgtccacctagtctcatcttgactgtgagtggggatctctattccagaccatctgtactctgcttgagcttctccctctgggtttctctttaaaaatttcaagagttggccaggcacggtgggtcacgcctgtaatcccagcactttggaggcagaggtgggcggattacttgagcccaggagttcgagaccagcttgggcaacatggtgaaaccccatctctattttaaaaatacaaaaaatttagccaggcggggtggctcacacctgtaattctagcattttggaaggccgaggcaggcagatcacctgagttcaggggttctagaccagtctggccaacatggtgagacctcatctgtaaaaatacaaaaaaattagcccagcatggtggcgcacacctgtaatcccagccacttgggaggctgattcaggagaattgcttgaacccaggaggcagaagttgcagtgagctgagatcatgccactgcactccagcctaggcaacagagtgaaattccatctaaaaaaaaataaacaaaaaaaagccaagcgtggtagcatatgcctgtagtccagctaccttggaagctgaggtgggcagatcccgggtgatccgcctcagcctcccaaaccaaagtgctgggatta

SEQ ID NO: 22846 - DNA, 1971 bp, Homo sapiens
tcatagggaagagaaagaaatggaagcacagcttctttcagacttccctgacaagcccatggcaatttgtcatcccctccttattttatttgggagagggaaatgtttcagaaacaaaagggcctcatcccctttattttccctgtgtatacattcactgctgtccagtgctgtagacaaacggtttgtttgaaaacattttgtgaaagcctgctttgttccacagcattgtctccactcttgaggagcagaagcatatatctttatgagaaagatggaggcttgagttatgaaatacttttacatttaaggagataaaggatgtacatatgaatgggcacattttactgcacacttcagacgctttgacttttttaaaaaaattgtttctccgtgtgtctttaaccacccagtaccatacttttttcttgatctggatctacttgtcaatttcttctttatttttctgtaggatggagatgatattgtagctgtttgtacataatgtaatccagggagtcctaattcttccctctgattgtggtttctcagcttttttactgctctttagagagagtaaatagttcaaaattcacctcaacaattttctagaggtcaatttggaaccaaaaatgaaataagacatgtagctaaagtaagttaaaagattatgataaactcagaaaataaacacagagaaggaatctcatttttcagtcttacagaagattgtgtgaaggctgactatacataaagtgactggaattttaacaggtgaacctgcatatgtatatgcaggtagttgtcaccatggattgagtccagtcgtagtaattaatatgtttaatcagaatattttggaatttctcttttggtattctttttgtttcttttattgtttttaattgacaatgtttatggggtttggtgtgatatttcaatacatgtgtgctaagagtaatgatcaaatcagggtaattagcatatccatctcaatcatttatcatttctttgtgtttagaaacattcacagtctgcttttctagctatttgaaaatataaaatgtattattgccaattgtactcattctgcagtgccacagaacactacaacttattcaaatggaatcttacttgctgtaattttgtatttgttaaccaatctctatctgcctctctgctgtccttcccagcctctggttaccaccattctcaaccttttatgcttgcatatgagtagaaacatggagtatttctctttctgtgtctagcttatttcacttaatgtctttcaagctcattcatgttgctgtgaatgacaggtttatttttcatggctgagtagtattccattgtgtatatatgccatgttttctttcttcattcatctgataatggacacttagactgatttcttagctattatgaatagtgcttcaataaacataggagtgtagatctctctttgacgtatagatatatttgtttttgcatatatgcccagtagtggtatagatcattaccagtggatcatatggtagttgtatttttaacttttgtttatttttcattttttaaaatggggtcttgctgtgttattcaggctggtctcagactcctgggctcaagcagtcctgcacctcagcctcctgagtagctgggactacaggcacacaccaccgtgcctggctatagttttagatttttgaggaacattcatactgttttccatatggctatactaattagcattcctaccagccatatataagagttcccccttttccatgttctcagcagcattttttattttttatctttggtaatagccatcctaactgaggtgaaattatatctcattgtggttttgatttgcatttccctgattagtgatgttgagcattttttcatatacttggccatttgtatgtctccttttgagggatgtctattcaccttatttacccattt

SEQ ID NO: 22847 - DNA, 2663 bp, Homo sapiens
ttattattataattttttttaattttttttttgagatggagtctcgctctgtcgcccagctggagtgcagtggcatgatctcagctcactgcaagctccgccttctgggttcacaccattctcctgcctcagcctcccaagtagctggaactacaggtgcccaccaccatgcctggctaattttttgtatttttagtagagatgggttttcaccatgttagccaggatgatcttgatctcctgacctcgtgatccgcccgcctcggcctcccaaagtgctgggattacaggtgtaagccaccgcggccggcccattctttctattattatgtgtaatttgttaagagttttcatcatgaggggatattgaatgttaccagaggctttttctccacctatggagataatcacattttttgttcttcattctgttgatttatcatgtttattgttttgtgtatgttgaacccattcttgcatccctagaatgaattccacttggtcatggtaaacaatctttttgatgtacttttggatttggttggctagtattttgttgaggagttttgcatttatgttcatcaggaatattggcctgtagttttcttttgcatgtgtgtgtccttatctggtgcttgtgtcatggtaatgctggcttgtggagtgagtttagaataattccctcctcttcattattctgggaaagtttgagaagaattcatatttaattcccctaaaatgtttggtagaattcagcagtgaagccatgagatcatggactttcctttgatgggtgactttttattactgcttaaatcttgttactcagaattggtcaattgaaattttctgtttcttctaggttcaatcctgatgggttgtatgtgtctaggaatttattttctgtaggttttccaactttttggtttgtagttgttcataatagtctctaatgactctgtatttttgtggtatcagttgcagtgtcatttttgtatgtgtttgattttgagtcttttctcttggttagtctaatggtttcttttcaaaaaatgaacttttcattttgttgatcctttgaatttttttttaagtctcagttttatttattactcttctgatctttattaattctttccttgtaattttgggtctgatgtgttcttttctagttccttgagaagcattgttagatttttcttttttctttttttctttttttaagagacagggtcttactgtgttacgtaggctggagtgtaatggtacaatcaactcaaactcctgggctcaagtgatcctcacacctcagttttgaattcttgggctcaagcagttctcccacctctgcctccagaatagctaggactactggtatgcgctatcatgaccagctaatcttttttttttttttttttttttttttttttttttttttagagataaggtcttgctatatatatggcccaggctggtcttgacccagcatcaagtcgtcctcctgccttgcgctcccaaagcactgggattacaggtgtgagccaccatgcccagccagatctttcttgtttttgatgtaggtgtttattactaaatacttccctcttaaaactgctcttgctgcatcccatacatttttatatgttgtgtttctgttttcactcattttaagacatttaaattttgtttcttaatttcttcattacccattggtcattcagaatcatgttatttaatttccatttatttgtgctgctttaaaagttcctcttgttattgatttctaggtttatttcattgtggtcagaaaggtacttgatgtgattttaattcttttaatttttgtgatttgttttgtggtttaacatgtggcctctccttgaaaatattgcatgtgcttatgaaaaaaaatatgtattctgtagctgttggatgaaaagatctgttagtgtcttttaagtccatttggtctaaagtcagtttaaacttggtgtttctttgttgattttctatgtatatgatctgtccattgctgaaagtagggtgttgaagtccacaagtattattgtattattgtattgtcttcccctttagatctaataatatttgccttacatatctgggtgctctgatattgggtgcatatatatttacaatttttgtatcctcttcctgatttcatccctactgtgtttgatacaaagtctcttatcgtaagtatagctactccttatatagtcatgattgtggtaaaaaaaaaaaaaaaagaaaagaaaaaagaaaaaaaatgtatagctactcctgcttgcttttggtttccatttgcatggaatatattctattccttcgctttcagtctgtgtcttttttttttttttttttttccagacatagtctcgctctgtcacccaggctggagtgcagtggtgctatcttggctcactgcaacctctgactcctgggtttaagcatttctcctgcctcaccctcccgagtagctgggactacaggtgtgcgccaccacacccggctaatttttgtatttttagtagagatggggtttcactatgttggccaggctggtctcgaactgacctcaggtgatccacccgcctcagcctcccaaagtgctgggattacaggtgtgagtcactgcgcctggc

SEQ ID NO: 22848 - DNA, 1023 bp, Homo sapiens
gggtgtgactgctctggatggttaatgcactgttttcccaggatgcctggcattgcttcagctctggcctagaggggcaggatgtagcagcatctgggaggggtaggtggaggagcttcgccaaggcatcctttcctcaggaggcaatgtgcagcttcagctcaggtccctggaagcagggcagttttgggagaagtagactgagaggtagacagtgagaggtggatgttgcacatctgccagagcattgttttcccaggagggagtgcacagcttcagctctagtcgaaggtgacaggacacagcctagcatagggacttgaggggtaggtggtgcagctctcccactgcatggccctacatgggaaggtggaaaagctgcttgtagatgttgggccaccaggtgggggtggatggtgatggcttatcctcagggatgaagaggtgccatggaaccagacagaactccagccgttccaaaataacagcacagtagctgtatgggccactgggggcaggacagtgtcagctccttcctcaggagcacagctgtatggactccaggcgggtccgtcagctaagcttagtgcctgtgagggctgtaggggaccccagtggtgagtactgtaggtgtccaaggtggtgatgtacgctgctggtatgctattgctcactttttccacatacggagaaattccttctggttttcagctgatcttggctgggggatggggttgtggagaccaggtgttccattctctgcttggctatcctgagtttctgtgctcaccagagtttttgttattactttgacatattctggtgctttcctttagttatttgcattaaaatgtatttgcttatttattttggctctgtgggggtggggagaacagcatttacggactgctaatctgccttcttgctgaagtcactctcttgctacagatatttggttggaaacattttcgtttgtattctgtaaataactaggagtagaattgctgtgtcatatgatatgtg

SEQ ID NO: 22849 - DNA, 1662 bp, Homo sapiens
aatttgtgcctgagaagctattgggaatgttctctctctttgcattactaggaattacatgggaaacacatgtagacagtcttcaggctattaagatttgtccacttaatctttacttatacatgaataaaaaatgggaaaacatgataaatataataaactaatacactcaaccctgccccttgattatataatagaacaaaatcagcatgcccggcatgagcctgccagattgccaattccatcctccaccttcagaggatgccgccatccagaattttgccttactcattttactttcttcatagttcgacaccttaaatgtatattactaatagtagctttgcatttttggctgatttaaaaattgatataaatgaaataatgctgtagagatgctttttggtattaagtggatatactgttattcttaaagatgtttgaaatgaatatacctttctaaatatctttttaaaataatacattaaatgatactgctttagaattcatgaactgcatctcatgagaatatgtagagatgacgtgggcaggtaaagtaaaacttcaggttgaatatcctatgataatttaaaaatgacaaaatagtgtggtgaataatagagcttgagcactttaaggcaccgtagggaccccttcaatgtaatgatgacagtgctgaggtgcagagaagttaggtaatcagcccaagccactactctaaggacagaccctatctacttttcctaatttgtcagaagactgcctatgatactactaataaaaagtcctatgaaattggtattgtcattattttacaaataaaataatcttcaatttttgtttcctctatgcatgggttacttagtattttgtaatttgaatttcaagcataattaaaaagaaatcaggtatctaggctgggcatgatggctcaagcctgtaatctcaacattttgggaggctgaggcaagaggatcacttgaggccaggagtttgaggtatcttttgttgatctctacactgattgtattctctcttttattctatgaaagttaaagattttttctgatactacatattgtcagttttttaaatactcagtttgtgctaaaagaaaacattcggcaactgatatctgctgttctgtatgtatctgtcagtccagatttgtccattatggtgtatgaatctaatagaacctcaccaatgttatacctgccttcttgaaatcattactgagatagctaatattaaaatatcctggtttgtctgtatatttaattctttactctcattatactaaatttttttaatgtaatttgaattgatggtaaaaattgtatacaggccgggtgcagtggctcactcctataatcccagcattttggaagtcctatgcaggaggattgccagaggccaggaatttgagatcagcctgggcaacatagtgaaactctcatctttataaaaagtaatattaaaatttttaaaagtgtataaactgtaaagtatattttactggtgttttcttccttattcctacttgtcagatgcaaatacacatttttgtgtgtttgtgtttagtaattataagtatacatatttcattcttctatttcatatatttctatgacattatatcttagatgtgtaatttatgaa

SEQ ID NO: 22850 - DNA, 1046 bp, Homo sapiens
accactctattttgattactattgctatctactaaattttaaaatagggtaaacttattcctcactctttattctttttaaaaattgatttggggccaggcatggtggctcacgcctgtaatcccaacactttcggaggccaaggtgggcagattacatgaggtcaggagttcaagacctgcctggccaatatgatgaaaactcgtctctatttaaaaaatacaaaacctagccaggcaaggttgcaggcgcctgtagtcccagctactcgggaggctgaggcagaagaattgtttgaacccgggaggtggaagttgcagtgagctgagatggtgccactacactccagcctgggtgacagagtgagaccctgtctcaaaaaataaataaaaaataaaaattgatttggctttcatatcaattgtttcctttggctttgtatatacattttattgcatgtttgtctctatgaaatatgttgctgggattttgatataaattgccttaaatctaaagatcgttttggtgggaattgacatcttgttgagtcttgcagttcatgaatatggtacgtccctctgtttattgaggtcctcgttgatttatttcataagggttttgtaattttcagcttatagattatggacatattttaaaaatctagacagtttcttagagggccattatatgttgtattgagttttaaatttcagtttgcacttgatacttgcaattatagagaaatatataaattagaatttttatatgtattctgtgactttgctgaagtcagtagttccagcaacattttttaatagctttcttaggattttcttcataaatattaatgttattagcaaacatcaaacatcttacttctactttttttttttttttttgacactcttgttctgtcacctaagctggagtacagtggtgcgatcttggctcactgcaacctctgcctctcgggttcaaggaatttttaccctcagcctctcgagtagctgggattactagcacactccactatgcccagctaatat

SEQ ID NO: 22851 - DNA, 1067 bp, Homo sapiens
aggagaactggtgtagattcttcaaaagaatagagggtggccgggcgtggtggctcacgccggtaatcccagcactttgggaggccaaggcgagcggatcacaaggtcaggcgttcaagaccagcctgaccaacatggtgaaaccccgtctttagtaaaaatacaaaaattagccgggggtggtgacgcgcgcctgtaatcccagctattcgggaggctgaggcaggagaattgcctgaacccaggaggtggagattgcagtgagccaagatcgcgccattgcactccagcctgggcgacagagcgagattccgtgtcaaaaaaaggtgcggagcgcgggtctcttccgcggaaactgacattgcgtttccgttgtcggcctcccgctgcaggagccatatattgaagaccatgtctggaagcttctactttgtaattgttggtcaccatgataatccagtttttgaaatggagtttttgccagctgggaaggcagaatccaaagacgaccatcgtcatctgaaccagttcatagctcatgctgctctcgacctcgtagatgagaacatgtggctgtcgaacaacatgtacttgaaaactgtggacaagttcaacgagtggtttgtgtcagcatttgtcaccgcggggcatatgaggtttattatgcttcatgacataagacaagaagatggaataaagaacttctttactgatgtttatgatttatatataaaattttcaatgaatccattttatgaacccaattctcctattcgatcaagtgcatttgacagaaaagttcagtttcttgggaagaaacaccttttaagctgaatggagaaaattccaaaataaattatatcaccacaatggtgtatactcaggaatgtgtacattgtaaattacttgattaaatagcctggaaatcttttgtgtattctcagcttatctaaacttaatgaaatttcttttatatttaaaaatagtacattctgtctcatgtcacatatcagtagatcaattagtatttccttgtgaacaatgttatttataaagaactcattatc

SEQ ID NO: 22852 - DNA, 1069 bp, Homo sapiens
caccagaaaatccacagtgaagagaggcttgtgtgctccatgaatgtggggaattctttagctaaaactccaacctcattaaacatcagagatttcacaatggagaaagtttaccattgactattgtaattgggtagtaatgttatataaattccacatttttatgcaactaatctccagaacatttttcctcttaccaagaagtaaaatgctgtacccattaacaacaactcattccccttccctacttccccagaaatgtctcaactatatttctatactctatggtacttatatgaggtaccaatagatatctatgaatttgatatatatttgtacctcatataagtggattctacagtatttatcttttgagactggcttatttcacttaggataaggtcttcacggttcacccatgttgtataatgtgtcagaatatccttcctttttaggtgaaataatattctatggtatttatataccacatttatttatccattcatctgttagtggatacttgggctacttccaccttttgcctattgaaataatgctgctatgaagatgagtgtacaagtgtctattcaagattctactttcaattcttatagggtatatactcagaaatggtggtgctggatcatataggatttctattttttttttttgtttgtttttgagacagagtcttgctctgtcacccaggctggagtgcagtgctgtgatcttggctcactgcaagctccgcctcccaggttcatgccattctcctgcctcaccctcccgagtagctgggactacaggtgcctgccaccacgcctggctaatttttttgtatttttagtagagacggggtttcaccgtgttagccaggatggtcctgatctcctgaccttgtgatctgcctgccttggcctctcaaagtgctgggattacgggcgtgagccaccgcgcctggccaggatttctatttttaatatttttgggaaaatttttccatagtacctgtgccattttacattcccaccagcagtgcacaaggattgcaatctatatacatcctcac

SEQ ID NO: 22853 - DNA, 1021 bp, Homo sapiens
ttcacactccagactgctgtattccagcccaaattactcaaattagccaatccatggggaacatggaaaacgtagctaatgcaatccgcttgccttacctaagttgtcccctgcagcctcaggttgctgttactgtgtttcagatgcaaccctctgtgggaccctacccaagttctctcattcttagctataggtaataaattgttctgattttgtgtatccaagtgacattgggttgtttcttgctatcagaagaacccagaaaagtattatgaatctagtgaatgttggaaaatctttagccattagcataacctcatttcgtgccagcatgttcaccctagagaaaagtagaagtgaaggcaatgtcatctttccttgttaacatgataactcagtagagcaatgctttggagattagctttttagggagagagccagcagttgagcctcctgcatctgaacatccacactagggatattgtctgtactgccagatatatgggaagattttgtgaactgtgttgcagttttcaacttgactggggcctttcccagagttatgcccctgccagtgcctatttaaaaatgtcatctcttttctaccaactggcaaagagccatggtgtgtagcattttagtcacattaaaatgcagttatggcagcatgctgtgttctctatctgaagaattcactagtcacttgaacactttggagtcctcacccccctcctatgattgattagggcatagacatcagccttggacagaagacatggactggctttggcaggcagattgcagaaatttcctttctccaggggaaagtattggttatctcattgatagtggtaggaggcagatacattgctaggcagactaaggacgggtccctggtgaaacccaaacttcaagccaacgacagtttaaagcctgaaaattgagctgccagttccaagtagagtccatgactggagtgagaacttcctcaatgccttttagccaatcaaatggtgctttt

SEQ ID NO: 22854 - DNA, 1100 bp, Homo sapiens
tgcctcagccttccgagtagctgggactataggtgcacgccaccacacccggctaatttttgtatttttattagagatggggtttcaccatattatattggccaggctagtctcaaactcctgacctcgtgatccgcccacctcagcctcccaaagtgccaggattacaggagtgagccactgcacctggccagaagccatattctataataaatagtggttggattaataggacatgggagagactgcagtagagtggatgagtcccctctaaaggagcactcacaaatgccctggtagctatggctgtgtggggtggggtattacaggaattccaaagacctaaggagctgtgtacctcctgtagccaaggtcaatgtcagaacaactaaatcaatgattttatgaattcctgtagcctccctggactataaatttcaaaccatagttgcatcatctacatagtgatgggccttgagccttccctaaagataaaaagcctacatagcccgtgctgccccatcacctgtgtgtcggaacatcttccttgtttcaagctacatgagtgcttttttattctgttgaagtgtgtcatgtcatgcctggtgaattaataaatctgtcctctgcaactgacagggttcttccactgtgaaacaagagggttgtatataggttgcgtttaactaacagagttaattaaacctttttactttaaaaattactcagtcttgggccaggcgcggtggctcacgcctgtaatcccagcactttgggaggccgaggcaggcggatcacgatgtcaggagatcgagaccatcctggctaacacagtgaaaccccgtctctactaaaaatacaaaaattagctgggcgtggtggcaggcacctgtaatcccagctactcaggaggctgaggcaggagaatcacttgagcccaggagttggagattgtggcgagccgagattgcgccattgcactacagcctgggcaacaagagtgaaactccatcttttttttttttttttttttttttgacacagagtcttgcactgtcacccaggctggagtgcagtggtgtgatctcagctcactgcaa

SEQ ID NO: 22855 - DNA, 1070 bp, Homo sapiens
atctgtgggtcagatttaggaatagacatctttagattctggaggcaatgctgttagggagaaggaaggggaaggaaggggctgaggactggatctttctgttgggcacctggatggggttgctgggcatcacaaagacagatgagggagtggatggactgaggatatgtgtgtgtgtatttgtgtgtttatgttggagatggcctttggaaaataaaggcttttgagggggagagtgcacataaaagttggatggtgaggcatctccacaaaagaggtgagatgatagtgaggtctgggaggggcttagtaccctattatggactcaacagggttttgtggcaaatattggttgtacctgggtagtttcacgcgaactctgagactattttggcagaagatgggatcatctagaagcattgctagtcctggggtggggatggtgttggggaggtcagtgtatctgggctttggattagagttgggggatagagaaagtcgtgactgcttatgggacaacatatacatgtagaagggggagacagccaagatctggaactcaaaggaggtgtgcaagaatatgtgggtttggaaagctgaggtcaaagaaagaaacaggattgggttgggagacgttcaaagcaatgtttcctaaacattgcattctggtcattctaggggcaaatacgattctggttgcatttgtcatgcactgcaggatttcatgtgcagagtggcatggtaacacgccatggaaatactcccagttgggctgtggtggttgttagtgttgccaagagtggaggtgttggatacatgagggaggtgccatccaaagcctgagtggaggagcatgaatagatggttccacctctggcactgggcacttaagggaggagggtgagtccaagtttggttatctgagaggcaagatctgggtgactctagggaaattgagtgacaaaagaaaggtaggcccccatgtgccaggtgttttttttgttttgttttgttttttgagatggagtctagctctgttgcccaggatggagtgcagtggcgcgatctcg

SEQ ID NO: 22856 - DNA, 1057 bp, Homo sapiens
tgacctgtactttaggtgttatgaggtctgcgtgtatccttcagtagtccatgaatactcgctctcacacaatcagatctctctggatctggacacaaccgtcatggcctgttgaaagccatttatagaggagtgagttggagaccccacctgccctccctgcatggtacttctcccttgtgtccttaccaccaggattcccccactacacacacttcacaggcccacctctgaacactgggccttcctctcactggccttatttccttgcctgtgaccagtcctgtgccctcatttgtgggtgtgtctcacagacatttgtgatggggctgtctcctccctccggagttcacgtgcacttcaccagcatttctgttcttacaggttgttggcatggagccaaggatgaggaggtaccttccaagcagtgtgtttctgtaagagtgttacaggtcacaattccaaagccagctttgtccaccctgaaggcccagccctgcaagatgtgtagctcaattctgaaggacattctgcacctggctgagcacgatggaacacaccctgagcaagggctgtacacatgtgcagcagagcatgacctgcaccaaaaggagcagattagagagaagctcaccagaagtgatgagtggaggccttcatttgtgaaccacagtgctcacgtgggagagaggaacttcacatgcacgcagggtggcaaggattttactgccagctcagaccttctccagcaacaggtcttaaacagtgggtggaagctgtacagggatacccaggatggggaagcctttcaaggtgaacagaatgatttcaactccagccaaggtgggaaagacttttgccaccaacatgggctgtttgagcaccaaaaaacccataatggggagaggccttatgagttcagtgaatgtggggaattgtttaggtacaactccaaccttattaaatatcagcaaaatcatgctggagaaaggccttatgagggcactgaatatggaaagacctttattagaaagtccaacctagttcagcaccagaa

SEQ ID NO: 22857 - DNA, 1033 bp, Homo sapiens
ttcacctcctgtcagatgagcagcattagattctcatagcagcctgagccctattgtgaactgtgcctgtgagggatctaggttgtgtgctccttatgagaatctaactaatacctgatgatctgaggtgggacagttttattctgaaactgtctgccccctcctctgtccctgatgcgtggaaaaattggcttccatgaaaccagtccctggtgccaaagaggttggggaccgctgctttaaactactcctcttcctcattccctacgccaaccagcccctgacaatactactgtatgaattttactataaatatctcatatgaggaaacttaagttttagtcttttgtgacttattttgaggcttatttccctaaatgtcttcaaggtttatccatgttgtagcatagcttatgattttcatcttttttaaaggccgaataaaatcccattgtagtcatgtgtcgcctaacaagaggactgtgttctgagtaatcatcttaaggtgattttgtcattgtgtgaacaaagagtgtacttacacaaacctgaagggcacagcctattacgcacctaggctatatgatatggtccattgcgcctcagatataaaccttaacagcatgttacagtattgaatattgtaggtaattgaaacacaatgataagtaaatgtgtatctaaacatatctaagtttccaaaaggtactgtaaaaatgtatgaaaaatggtaaaaactttatagggcactaacatgaacgaagcttgcgggacccctctggttgagtcagggagtgagttgtgagtgaatgtgaagctctaggacattactgtaccctattgtagatgttataaacattgtacacttaggctactctaaattaattttttctttagtaataaattaaccttagtctactgtaacgtttttacttcatgaacttttaaaattttaaaaagctttttgactcttttgtaataatagcttaaaacacaaacacattatacagcctgtatagaagtactcctttat

SEQ ID NO: 22858 - DNA, 1049 bp, Homo sapiens
tattattattattttgagacggagtcttgctctgtcacccaggctggagttcagtggcacaatctcggctcactgcaagctccgcctcccgggttcacgccattctcctgcctcagcctcccaagtagctgggactacaggtgcccgccaccacgcccggctaattttttgtatttttagtagagacggggtttcaccgtgttagccaggatggtcttgatcttcctgactttgtgatccatccgcctcagcctcccaaagtgctgggattacaggcgtgagccaccacgcctggccacttcccgttaattctattttaaattgtggggggaattattttccatagcagctgcaccattttacattctcaccagtgcaggggttctagtttttcacattattgccaacactttgttttttaatcatgatgggtgtaagatgttattttattatggttttttaatttgcatttcagtattggtgttgagcatcttttcatttgcttgttgactaattgtataggttctttggagaaatatctgttaaatgtctttgcccattgaagaaagtttttgtaaattttcagataacattgtatgcttttgttgtgtacaacatgatgtgaagtatatatactttgttgagtggttaacatgtacgtattatatatgtacatattctgtatacgtattttaaatattaaccccttgcagatatgtgtttttcaaatactgtctaccattcagtctgcttccttttcattctgttcatgtcttttttttttttttttgcacaggagttttcaaatttcaatggagtccaatatatgttatgtttgtttcctatgcttttggtattatacccaagaaattattgctaaatccagtgtcatgaaccttttttcatgttattttctaggagttttatagttttaagttgtacttttatgtctgatttatttcagtttgttttagtaaatggaggaaggtaagagttcaacttcattcttttgcatatagatatccagctttttgaaagtcatttgttga

SEQ ID NO: 22859 - DNA, 1013 bp, Homo sapiens
tacagggcatcacatggtgaggctgctgagtgtgctcacatgttaacgtgctagcgcaaatcattctctctcttttttttttttttttttgagacggagtttcgctcttatcgcccaggctggagtgcaatggcgcgatcttggctcactgcacctccgcttcctgggttggctcaccgcaacctctgcctcccgggttcaagcaattcttctgtctcagcctcttgagtagctgggattacaggcatgtgccaccacaccccgctaagtttttatttttagtagagcagggtttctcccatgttgatcaggctggtctcgaactcctgacctcaggtgatctgcccgccttggccccccaaagtgctgggattacaggcaagagccacggcccctggccctttctcttcttataaaaccaccagttctcccaggataacccattagtctatcaacccataaattgattaattcattcctgaggatagagccctcatgattcaatcacctcttaaaggtcgcacctctcagtactaccacactgtagattaagcttcaatgtgacttttggaggagatggtcaaaccatagcaagcagtttgggaaccatagtctgtacagaaacagtgattgtattaatatgaagtatgagacaccagcaaactagagtggaatggatgagcgccttgtaaagagacatccatgaatgtttcagtaactatggctatgtgagatgagggtatacagaaactctgaggacctacagacgtgtgtatctcctgtaggcaaagtcattgtcagagcaagtaatccaaaggtgttatggattcttgtgtctctggcgttataaaacgtatgttgaattttaattgccattttaacagtgtggagaaatgggacctttaagaggtgattaggtcatgatggctctgcccttataaaggaatcaatgcctttatcataagagtgggtttgttaacccgagagtgacgtttttataaaatcagctgtct

SEQ ID NO: 22860 - DNA, 1048 bp, Homo sapiens
ctactgggactgggccacagaggaggggaagtgatcagatcttggatggatatcaaaaactgaacagacaggaattcctgttgcatcagatgtgactgaaagaaagggaatgaagagccattctggatttttatttgtatttttgtttgtttgttcctgaatatcaggaaggatggagatgggtaaggctgtgcagggagtaggttttggacatggtaatcctgagatgacccagagtggaggtgtcgtgtccacatgggcagcttgcccactcacatctggaagtttggggagggatctgggctggagatatggtagatatgggctggttgggtagaggcctggactagggtaagtcctggggctcctatttaggagggagaatcttaaggttccctttcagatgggccctaaggtgagagaagggagagatggccctgtaggacggggctgcctctatagcatggagttttgtggtcagaagtggttctgtctggtgtctgccggaatggagggttatagagtatgaagacccaggactgcatggagactgcagtgttgagtagtatataggtttgccactccaggctcagcagttcctcatgtacagtccgtatggacaaaaggaaacgtcagccaggctgctggagcagcccctttggtgcctaagtttccctagccgtcagcacaggagggatgatcaactgctccagtagaagggctctcagcaggatggtcttcaggggagtatatagcaggcagccaggttgccaaaaggaatggtatgtgctcaggtttctcagacccaggtcccagtttattaacttgtgaatttatgaggtaagtatttaagcactaattgatcatagttcatatacacacaggggcaaataaaacaacacggatttattaagttaaactgatgtaagcacttcataattggttgtaaagttagtatactggaaagtatttgattaaaataaagcaccttaagtatcacattcttaatttaaaagtaagtttaagaaacccatattttctttttctt

SEQ ID NO: 22861 - DNA, 1049 bp, Homo sapiens
actgtgttggtggtttcatgacagtacagctgacccttaaataacacaggtttgaaatgtacaggtccaattatatgtgaattttatttcaataaatatattggaaagttttttgaatatttgagacaatttccaaaaaccagaattcattgaaataagtatgtcaagaatgcataatacaaaatatatgtaggtactattttatcatttactaccataaaatatacataaatctattatacaaggttaaaattagtcaagagtcacataaacacagactgtacttggtgcttccagagaaatgtaaacaaacacaagatgcagtattttttttttttttttttttttgagatggagtctctctctgtcaccaggctggagtgcagtggcatgatcttggctcaccgcaacctctgcctcccaagttcaagtgattctcctgtctcagtctcctgagtagctggaactacaggtgtgcaccaccacgctgagctaatttttgtattttttagtagagacagggtttcaccacgttggtctgtgttggaggtcaaaagaattagggtcatgaccaactcagtatgccactggagactatatgagcaaacaacaaactagtctcatgaatgcagtatgttggcaagcctacaactgtgtctgcagccagatggaatgctaagggcagtcacaccccaggtgcagtgttccttgtggttatctacaggaacatctggagtctgttgtataaagaaagcaattatgtgagcctgtgataaatcaagcagctgaccaactgttacgtcttcctctctgtggattctacctaataaatacaaagggctgtagaagctcagggcccttgttccctagaagcaaggagccctctgaccccttctttaaaacagatctttttgtcttcatttctgcatttgtccttcttcattcagtcccgaaccgacagccacaagtggcgcccgaacagggacgtgagtgaagaaggtctgctggagcagagaaagtgaaactgaccagaagaatgagaaacccca

SEQ ID NO: 22862 - DNA, 1108 bp, Homo sapiens
ctgagactgcctctgacttgggtctaacaaagatgtgaggtggtgctggatccttgttgcatttagcaagcgctgcctggatcccttgagcagagtggcatgtggagaagccaggtgaagtacctgtgtcatggatgctgagggcagtggagttcaaggtgtagcagtcacgatctggagatgtgttcccatgaatggtgtgcaaccggggagggagtatggctgtactcaggatcctcgtactggcactttaaaccaagatggtaagcacaggtttcagtatctgggtctccagggaggtgaactagcaggagcatggatgagattccatgatgtaaggcccagagcccagtgggagacaccataaggacctggtatctcctctgagttggagaactagggaggagcgagatttactggggttcctggggattgagtctgctcatgatttcatctgcccccatcatgcagggccatgtgacctttgaggatattgctgtgtacttctcccaggaggagtggggcctccttgatgaagctcaaaggtgcctgtatcatgatgtgatgctggagaacttttcgcttatggcctcagtaggtaagatctcttaaaaccacaccatcaacctctgctggactctgctcttcccctttttccaggagtttcctgtctttcccagagttggacatgggcccttcttctttccttggttcttgacctgtggaagacataggcgttgtggttgccaggcctgggttttttctgccccaacatctactgtcctgaagccttttagttaagagtttgggttcagactcttgtaacttgcccaaccgacaccacttggttttgccactccttgctaaggtgactgttcagttctgtggtggacctgtgttacaggttctccccctgcctttagtagacgtgtctttggacctgcctttctcaggaattacaggtacttacatggttgctatttgtagggaaccctagactatgacagcaagaccccctcccaagggtttttttgtaataaatttccctcctgtagtctgtcatgggttggcgcaccctgggccagtgttgttgacccacctccctgtt

SEQ ID NO: 22863 - DNA, 1033 bp, Homo sapiens
gacaggtataggtatggatatgacccatttttagccaagagggtctgagctgtatctgctggtggcttatacaaaaagtttactttcttcatggatattcttggtctcacatacttgtaatcaagtttttccagcctccaagtcacctggcctgggaaagtacttgcctcatgttgctctggtttgtgataataaaggctttacagtttaagccacatttaatcttggggcttcttcttatggtctggggtggattgaaaacaggctctgccaaactgaagacagcctttgtgcggtgcctccaactttgcctcaaatgggacagtgggttgagggagaacagttcttagtccagttttgatgttaacttccatagctgacaaagcttgttaagtaagaattaagatcttgtgtagacctgatttgtctggattttagagttatttgagagcccatatttcaccttgaggagggtgctgctgctgtgacagcctgcagtgttttgaaacagcatggattgggtgtcttgtttgcagcatgtgtcccatgttccccaacactgttgagggaaagctgttcctcaggacctgctgagtggccatattccctgaaggcctgaatctgtttcacaggccactgttggtaagatctaaagcatccagtagggaaacaaaattgataaatattgagtgtgagtaattgggattggggagattgtggcaaactagaggggaagtgcccattgtaaaaacacatccacagacagtccaggcactaaggctgaatgggatcagggtatccagaaatctcaggatctccagggccatgttactgttaggtcaaggtcactggtgcagcaacgaatgtagtttttctagattcctctccctccctgggctctttacctaatgtctttgcggcacaggcggtaaccctgggagtaaagaggtgtggtccaaggaagtagcttttgtgaccagctggagtttctggtgactcttttggcaatggtcctcattgtttgccagttttt

SEQ ID NO: 22864 - DNA, 1051 bp, Homo sapiens
atttataatcagatatttcgttaaaggcataaagtcttcagattgcatttctaaaatttaaagaccgtttcgtaactataagattaacatacaaaataaaaattgtatgtgtacaaaattataaatgttttatatacagtactgaattgtatcaactgctgcttatttaagacagattgctatcagcatacaaaatatatttgatgtttagtaggtgtgtctttgagtttattaacctatacgtactgcttacttctttaatatttatgtaacgttgctaaactgcttgtccattagcttcccacattgtgctgggcgcagtggctcatgcctgtaatcccagcactttgggaggccgaggcggacggatcacgaggtcaggagatcgagaccacggtgaaaccccgtctctactaaaaatacaaaaaattagccgggcatggtggcgggcgcctgtagtcccagctactgggaaggctgaggcaggagaatggcgtgaacctgagaggcggagcttgcagtgagccgagatcgtgccattgcactgcagcctgggtgacagagcgagactccgtctcaaaaaaaaaaaacaaaacgaacttcccacattgttgatttggcttattaaatctcagattctgttcagtgtgttcaccgctcactccgccccccattccccagtatttcctgtatactagatattgatgaaatgagtgattaagatctgttccaagtggacaggtttatgttggtgacaaacctggaaacacagtgtgccttttgctaccacaacatgagcagcctggaaataaacattacaggtattgtgtgtgctggttgtgagacaggtgtgcagtagtgacagcacatcctagcaagatacacatacatctgtggcatacattgacagatgtaggaaactgacaccccccagcacagcctggagccatttgtgtatgccacatccgcaacagaaaagatgtatgacaaacctgaaacacacacacaggtatgtgcaaaacacgcaaggatcctgtgagacgggatggag

SEQ ID NO: 22865 - DNA, 1039 bp, Homo sapiens
tggtttaatgcttaataaaagcgttttctgtctctaccttcgtggagaggatttctgggttgggagaaggttttgtatttatttcactgttgccatcacacacctgtctgctgggacaaaatctcaatcaccgatttcatcaacatctagtgtacaagttaaacaatgttagagattcaataagccacatctagaatacagcaaattctaattaaaaaatgactcagcaacttcaagaaataagaaaacaaaggtaaatggaacctgtaggttacagacttatgagatacaactactgaaagctattaaatatacatttggatcctgaataaaaatgatcttccttaagaaacacattgttttagacaactgagaaaacagaagcgataaaatatttacattttaaaatatatttgtgtgattttttggggggttataaaagagcctttacattttaaaattgcattctgaagaggctatgcattaaataatatgatatccgggagtataagtaaaataacgcactagtacacatgaggaccgatgaaacataaatgactatgaaatgataaatggtgaaggaaaaaaaaatagtgaaggaagactggagaaaggttcatctggcttcataacagtcttttccatctttttttgtaattgaacacagctgtaacaggagacaaaatatgtcattgtaccagtaattttacacaatgaaaattaattttatatgttgagaatgaactaaaaagacagaaggaaactgcgttccagggtgtaagcatgtatgaaaatatcaaaatatgcattttaaatataagcactttaagttccattatacctcaaactactttaaaaaactactcaaaatatccataacaaatgaatgaatgaataaacgaatactggtatatccacagaacatcatacttctcagcaatacaaaaaaaagaaactactcatagaggtataatgatgaatctcaaaataaatacgtgactatacccagggattaaaaaagagtaaatacattatggtt

SEQ ID NO: 22866 - DNA, 1052 bp, Homo sapiens
gtctcaataccagggccctgcagctgtcacttactccctttccagatgcacatcattcttcagaatacacatccctcctatctccagacaccacagccccaagcccagggctgccacctcactgcccacaccataggcatctccctgctcttacctcccatgtcactgttttaatctcttcctctttaccccattagcgaaggcaggattgccacactagggttatggatatggacaaacacacaatacctgacactagaaagacgatacagcagttgggtatggtggctcatgcctgtaatcccagcactttgggaggccaagacgggtggatcacgaggtcaggagttcaagaccagcctgaccaatatggcgaaaccccatctctactaaaaatacaaaaattagccgggcgtggtgaagcacacctgtaatcccagctactcaggaggctgaggcaggagaattgcttgaacccaggaggcggaggttgcagtgagccaagattgcgaaactgcactccagtctgggcgacagagcgagactccgtctcaaaaaaaaaaaaaaaagaaagatgatatagcagtttattaatcatatgtacatagaacctgggagatgaggacaacatgtaccacacagggtcacatgggggtctagtccagaaaaaaagtgaataaccaaaaactgtgggatgcaagcactttgagaacaaaaggatcaactgccccctggttcccacaatgggcttgtttggaaaactccatgacctggtagggagctgaaatctgctacaaagtgataggcagaaattgtgcctggtctccttgattaaaagggttgtctgtttgggagaagagtagggagggaaacttgtactcaggccatttgatgccaccctgatttcaccagatgtcatactgggccttaattttagactttacaccataacttagcacacagcgtccagagtatgctcgacagattcaaacggatctaatactaccctagatctcccagggcatccactagtggtagcagccccaaatcct

SEQ ID NO: 22867 - DNA, 1898 bp, Homo sapiens
actctggcctgggcaacaagagagacactccatctcaaaaaaaaaaaaaaaaaatagaacaacccttctaaatgtaatccacagctcactcaccttagtccacacaatgaccaccacattttggatgtctccattctgaagcactccccagatttccagacctgggtgttcagccacctacttaatgcctacttaatgtctctgaaacatctcaaactcttacatgaccaaataaagctcctgttgtctccagtgaatattactgttaataccaacttctccatctcagttgaagaaccatggggtcatcgctgaatcctgtttcactccctcgctgtctacatcagaaaatttagttgctccctttaaaaatttgcatccagaatgcaacacatctcctaatcaatgactctggtccattaccctggactggctgtagcttccactctgatcttctttcctcttccctcaaccccacagtctgctctccacgctaacgggatggaccctgttaggactttggtaagatcacctccctcttgtaacccaaatctctcattacctccagaataggtacccaacttctcaggcagccactgcagtcctgactccttccccctgctctttgttcccagctaaaaggaaacagatctatggtttcctcaaaaatctcagcttagttttactaagcacttgcgcctcctgataccagtgccagagataacctttcacaagtttccactggctgacaaaaatgggaacacctcagtataacccctgtaacctctggcatggacttaagagccctgggcttggaatttctccagggcaccagacccaggattggggtaacagcacttaagaatactaggaaaccacaatcccaagaacatgggggtagaggctactgagggaccgaacactctccacttccctatgtgagttccatacgcccttctacaactgggagaaccagggaaagaggaatgcatccctggtgaggctagatgagctcaagcctccctgtagccctgcctggccctgaactcaggctggctgttttactttctggtctcagtgctgtcacctcttgccaactgtagggcaatgaaaaaaagatgtagcctcccactatctcaatgtcctcatcgccccatcgctgctcttcctgtgaacagtctttggaaaagtttttaaaccctaacatagggcgggcacggtggctcacgcctgtaatcccagcactttgggaggccgaggcaggaggatcacttgtcaggagttccagaccagtctggccaaaatggtgaaatcccgtctctactaaaaatacaaaaaattagccggacgttgtaatcccagctgcaggcttgtaatcccagctgctggggaggctgaggcaggagaatcgcttgaacccgggagtcggaggttgcagtgacccgagatcgcgtcattgcactccagcctgggcgataagagcgaaactccgtctcaaagaaaaaaaaactaacataaatggcgtccctcctttgttcagaactctccgtggcttctagcatcctcacaatgacagtacaaccctaggagtaactccgcctcatattcttcgttccctgcagaaaacagctttccgaattctcctggctcagtcgcgcctcaacctttgcacgcgccggttcctccgcctgtcacgctctcccacacctcgtcacacgcagtgtcaaaaaaagggccccacccacgaacgcctcagtgtccccgaccctgggcagcggggactcgagcaggcgcccctcactgatggctttagaacgtgggtgggggaaggtgtgtgaggacgggaagacgccgcactcacctgagttggcgtcctcagagtggccgctgccatcaga

SEQ ID NO: 22868 - DNA, 1101 bp, Homo sapiens
aagtagctgggactacaggcgcacgccatgacacccagctaatttttgtatttttagaagagacggggtttcaccatgttggccaggctggtctcgaaccactgacctcaggtgatccacgcatctcggcttcccaaagtgctgggattacaggcatgagccaccgagcctggccgagaaatctctgctgctttgttataaagttttggagccgcaaaataaatagcactcgaatataaaattttctttttaattctcagcaaggtaatgtacttttttttttttttttttttttgagatggaatcttgctctgtcacccaggttggagtgcagtggcgcgatctcggctcactgcaagctccgcctcccaggttcacgccattctcctgcctcagcctcccgagtagctgggactacagttgcccaccaccatgcctagctaattttttgtatttttagtagagacagggtttcaccatcttggccaggctagtcttgaactcctgacctcatgatccacccacctcggcctctcgaggtgctggaattacaggcgtgagccactgcgtccggccccaacatttattttaatgttcagattctcccagatgtttggacagtgggaactcattaaagctgtgctctctgcttttttatgtcaatattattgataatttcattactttctaatccaaaaatattttcaggctcatgttgtacccttgctatcccagccccagaatcagcctctttttcaaggagctctggttttcttcaatagataacaatgcttgtaaatattagtaagcattagctgtgctcttttctactggtaaatcattgattattaggtcctcttggagagaaagcagatacatacacatgcacgcacacatttttttttttttttttgagacagagtcttgctctgtcgcccaggctggagtgcagtggcacgatctcggctcactgcaagctcagcctccgaggttcacgccattctcctgcctcaggctcctgagtagctgggactacgggcgcctgccaccacgcccggctaattttttgtatatttttagtagagacagagtttcaccgtg

SEQ ID NO: 22869 - DNA, 1334 bp, Homo sapiens
ccagggaagccaaaagattggacacccctgatttaaagtgagagatgtgtaactactcctttaacttgaactcttagaggccactgtagggttattaactgacctgatttcaatattgctgtgtgtcagggaataggaacgcttaaagagagggagaaggatggggatcagctggtcagtgaggcagtcagaagacacataacaatttttttttttttttttagacagattcttgcactgttgcccaggctggagtgcagtggcacgatcttggctcactgcaagctccatctcccaggttcacaccattctcctgcctcagcctcccgagtagccgggactacaggcgcccaccaccatgcccggctaattttttgtattttcagtagagacaaggtttcaccatgttagccaggatggtcttgatctcctgacctcgtgatccacccgcctcggcctcccaaagtgctgggattacaggtgtgagccactgcgcctggccgactttaggcatttgacacagatctctaactaacttaatgcaggcagcaggagataaatacccatgctcagctgcatcatgaaaacggaagaaactggaacacattcaacaccctcaacacattccagctacatcaaaagagtctggttcctaccttctggccttaggataatgacagaatgtagtacatcctaagttccagagagttaccaaaaacagagacagcattctggacaaacacaaagattagagaagcaccttaaatctttggccagatggattcgtgagatccttctactacactaggcaagactgggagaagtagtgaacttttttttttttttgaaatggggtctcagccaagcatgatgactcacacctgtaatcccagcactttgggaggccgaggcgggtggatctcctgagggcaggagttcgagaccagcctggccaacatcgtgaaaccccgtctctaccaaaaatacaaacaaattagctgggcgtggtggcgggtgcctgtaattccagctactcaggaggcagacaagagaattgcttgaacccagaaggcagaggttgcggtgagccgagattgtgccactgcactccagcctaggaaacgtggtgaaaccccgtctctactaaaaatggaaaaattagcggggtgtggtggtgggcacctgtaatcccagctactcgggaggctgaggtaggagaactgcttgaacccaggagacaggttgcagtgagccgagatcgcgccactgcactccagcctgggtgacaagagcaagactccatctcaaaaaaacaaaacaaaacaaaacctggc

SEQ ID NO: 22870 - DNA, 1070 bp, Homo sapiens
caaaagggcagtctcattcaacatcagcagatccactctggagaaaggccacatgagtgtggagaatgtgggaaatgttttcatcaaaagggcagtctcattcgacatcagcagattcactctggagaaaggccacatgagtgtggagaatgtggaaagtgttttcgtcaaaagggaaacctcattaaacatcaacgagttcacacgggagaaagacatcatgaatgttgaaaatttggcagatctgttggtaaaaagagcaccctcattcaacattcgtgagatcacactggaaagcacttatgagtatggagaatgtgcaaaatcatctagccaaaaggttggcctcattcaacaatagcaagatcacactggggaaaggctttctgagtgtagagaatgtatgaaatcctgtacatagaagttttgcctcaccaaataccagaagggtcacactggagaaagaccctatagttatggggaatttgggaaattacctaacaagaagtcccacctcactgaacactactgagttcacagttgagaaaggccatatgactgtaaggaatttgtaaaattatttagccagaagagctgcattactattcatcagataatttacaatggagaaaggccacataataatttctcacataataaatgtgagaaatcatttccgtacagctctgcgctccatgttcgtaagagttcacactggacaaagccttatgagagcagcgagtagaaaatcctttgtgggaaaactctggtttcattaaacacaggagagttcatgctagagaaaggcctcaacagtgtagcaaatatggaaagacattcactagaagctctgccctgcaagttcacactagagaaagcccttctcagtgaagtaaatttggaaaattgattagtcaaacctctatgctccttcaaaatcagagttcacactggatcaaggctttatggtgtgacaaatatggcacattctttatctaaatgtctaacatattatgcacagacaagctcctgctgtggaagtgccttttgagtgcagagcatttgcgagg

SEQ ID NO: 22871 - DNA, 1068 bp, Homo sapiens
aaaaaaaaaaaaaaaaaaagtcagccgggcgcggtggctcacacctgtaatcccagcactttcggaggctgaggtgggcggatcacttgaggtcgggagttggagaccagcctgaccaacatggagaaaccccgtctctactaaaaaatataaaattagccaggcgtggtggctaatgcctctaatcccagctactcgggaggctgaggcaggagaatcacttgaacctgggaggtggaggttgcggtgagctgagatcgcgccattgcactccagcctgggcaacaagagtgaaactccatctcaaaaatataaataaataaataaataaataaataaataaataaataaataaaaagtcatagtttctgaggatagcaaatgcagcacagaagtggaatagaaccataaatatctgaaaatgctagtggttctttttgtctgtggatttatgcatggagggcgtcagaatgatttggggctaccattgctattgagaaacattggaattctgtggtaattttggattcctttttaatttaccaagactactgtggatgatgtcagccacattatggtgtaagccctaaagttaaggtcagtatcatgtgctaccttcatgtctggtgataccagtactacctcacatggtctgagtgcaaatctccctccccactctgctctttgggataatgtgtcctagcttaactacccttttaatcaagaggactagacagagttcctggttattatttatttgtagcaggtttcagtttctttttttcttttttttttttttgagacggagtctcgctctgtcgcccaggctggagtacagtggcagatctcatctcactgcaagctccgcctcctgggttcatgattctcccgcctcagcctcctgagtacctgggactacaggcacccgccaccacacccggctaatttttgtatttttagtagagacggggtttcacaatgttagccaggatggtctcgatctcctgacctcgtgatctgcccacctcggcctcccaaagtgcagggattataggcgtgggcgtgagc

SEQ ID NO: 22872 - DNA, 1049 bp, Homo sapiens
ccactatgctccagcaggagtgacagaacaagaccctgtctcaaaaattaaaaataaaaacaagccagttgcattcttttatgggaatcagggactatcacaccctcttgattgagcaaagcttacataccacaatccctggttgctcttttttttttttttttttttgagacagggtcttgctccgttgcccaggctagagtgcagtggtgccatctaggctcactgcaacctccatctcctgggttcaaatgattctcctgtctcaggctcctgagtagctgggactacaggtgcatgccaccatacccagccaatttttgtattttagtagagacggggtttcaccttgttggtcaggctggtctcgaactcctgacctcaggtgatccacccgcctcggcgtcccaaattactgggattacaggcgtgcgccaccgcgcccggccactctctcttatgcatagtgcaacccccatgtggctctctgtggtgagtggtgtcctcttctctcaagcgctgagcatatttgattaatgaactttcgtgatgacttgtgttcagcgtcaggtgttgtgtttggccatcatcataaccctagggtgaaactcctactctttaccagtagaagaaagggggattaaaatactgtaacttctggcaagaccagagagaggcctatagtgtgggcagttaggtggtggtggcaattggcatgtgtctgtggtgtccaaagatgggaaggatgtgtacgtacataaggattatgtttgaaaggcctcaggcactgcactgggattcatgtgacctttgctgtaccaggggaattgctagaaaggagaggatggaaccctttatttcaggaccacagcatagatacctgtgtgcttatctgcctcttgttgctgacggctatgtgtcatgattaatggtcccatgaggacacagtggcactagtgggcaaaatttctcctctgagttggggatcctgggaggaggaggatgggcaagggtagatatgttggggaagtggactgtgggtcttcagc

SEQ ID NO: 22873 - DNA, 1805 bp, Homo sapiens
ggctaatttttggggtatttttagtaaagatagggttttaccatgctggcaaggctggtcttgaactgacctcaggtgatccacgcccctcaacttcccaaagtgctgggattacaggtgtgagccaccgcgcccagcctctatggagtatataatcttttttttttttttttcttgagacagtttgctctgttgcccacgctggagtgcagtggcacagtctaggctcactgcaacctccgcctcccaggttcaagcaagtctcctgcctcagcctcccgagtatctggtattacaggtgcatgccaccacacctggctaacttttatttttagtagagatggggttttgccatgttggttgttgaccaggctggtctcaaacccctgaccttgtgatccacccacctcggcctcgcaaagtgctgggattagaggcatgagccacggttctcggccacgtatatacctattcttaacagtccctgaccaaaggatgttgtgctctagtcatgttggggggggcctggacatatttatatagtactcacacgtcatcagcaaataaggttccacaggcaagttgtttgcaaatgaaggagttatagaccctgcctttattctgtctgttgactcatttagtcatgcccttgacaatatgaggccttctatatctgtgataatgctaagcagccccaacctcaacctgaacccaactccctgtttgtgcaaataattccatagactagttttttggtttgtcagatactcttgtgggtaggctgcatactcaacaaagtcaacatgtacctcaccagcatttctttgcttttaggttgttggcatggaggggaagatgaggcagcaccttctaagcagagcacgtgtatacatatatacaaagaccagggaggtcatagtggagaaaggccttatgagtgtggggaatataggaaattatttaagaacaagtcctgcctcactgaacccagaagagatcacaaacacaggaatgttcgcactggagaaaggccttatgagtgcagcaaatatgggaaattatttcaccaaaagcctacactccatattcatgagagatttcatactgggcaaaagacctatgagtgcagtgagtgtggaaaatcatttcaccaaagctcttcactcttgcagcgtcagacacttcacactagagaaaggccttatgagtgtattgaatgtgggaaagcctttgctgaaaagtccagtctcattaaccacaggaaagttcactctggagcaaagcgttatgaatgcaatgaatgtgggaagtcctttgcttatacatctagtctcattaaacacaggaggattcacactggagagaggccttatgagtgcagtgaatgtgggagatcctttgctgaaaactccagtcttattaaacacttgagagttcacacaggagaaaggccttatgaatgcgttgagtgtggaaaatcatttcgccgaagctcttcactcttgcagcatcagagagttcacactagagaaaggccttatgaatgtagtgaatgtgggaaatcctttagcttaaggtccaacctcattcaccatcagcgagttcatactggagaaaggcatgagtgcgggcagtgtgggaaatcctttagccgaaaatctagccttattatacatctgagagttcacactggagaaaggccttatgagtgcagtgactgtgggaaatcctttgctgaaaactccagccttattaaacacttgagagttcacactggagaaaggccatatgaatgcattgattgt

SEQ ID NO: 22874 - DNA, 1058 bp, Homo sapiens
ttgcagatgggcatggtggctcatgcctgtgataccagcactttgggaggccgaggcagaagggtcagttgaggtcaggagttccagaccagcctggccaacatgctgaaaccccatctctactaaaaatacaaaattagccaggcatcgtggcattcgcctataatcccagctacttgggaggctgaggcacaagaatcactttaacctgggaggtggaggctgcagtgagctcaggtaatgccaccccataccaggatgagcaacaagagcgaaactatctcaaaaataccataattttggggttcataggtcaacctgaaagggtggcagttttcatcacaatctctggtgcttctgagagcaacatgaaattgttctctacttcacaagggatggtgcattatgtttcagtgctgttgagggtaccttcacaggttgtgaggttatagtggaaatgataagtttttcggaattactgcattttaaaagggcttctactatgatccagacatggctgtgaaggatgaatacaaacagaaattctcaggaccttcttaattgaatcttatgtggctaaggtcactgctggagagaataacctaaagattttgttatttgtggtagtccttctagtctaattgacctaaaggtcattcctgcataggcaggaggaagaagaaagggagcagggatgtccattagaccactacgtggcccatcatgtgaccagccgtcattctttctgaatcatctggaaatggtctttattgttcgtcatgtttttgttaccatgaaggctagttgcctcactcaggttgaggagatgatacagcaatagttaataaacctcttggaaaaatcaagtccagatttttaaaattacatttttaaagctgtaataagaaataaatcacttttttttttctttgagatggagtctcgctcttgttgcccaggctggaattcagtggcacgatcttgggtcactgcaacctctgcctcccaggttcaagcgattcccctgccttagcctcccgagtagctgggattacagg

SEQ ID NO: 22875 - DNA, 1046 bp, Homo sapiens
aataactggggggtcttttttatttatgttaattttttttttttttttgagacggagtctagctccgtcacccaggctacagtgcagtggcgcgatgtcagctcactgcaacctccgcctcccgggttcaagcaattctcctgcttccgcctcccaagtagctaggattacaggcacccacctccgcgcccggctaatttttgtatttttagtagagatggggtttcaccatcttgcccaggctggtctcaaactcctgacctcaggtgatccaccagcctcggcctcccaaagtgctgggattacagtcatgagccaccacgcccagcctacttatgttaatttttataccatagaagcgactaagggcgtgtctagagttccttaaggtggaggtggtgataaagagaaagacagggttatattgacaaggctgacagtaagaaggggtagtccttttagtgaaatagatgaggggttttaggtctgcacaaacctttttgtggaagtctaactttgctattgggtagtttgagtgatgcagtcctatttactacaatgttgccaggcagtaggagcagaaaattggtgtcttggctgcaggtcattacaacaatgagtgctaggaataactgtgtcaattaaagggctgggatataaatatttgtgtgaaaaggctagctgctgttgatcttttacatttctacaaggtatgacaaagcaagcattaaaggcaatagtctgagtgagtcagacttagttacattaataacaaaggagctaataacagaataagaaaaggaagcagtatagaaggtatatgaaaattaatctttctttaacttagtagggcttgatcctagtacagtaacccatgattctgagaggaagatgttttcttgacttgagtgtggtgggtccatttttttttttcctcagctgtgtggacggcagtctcaggggttaacagcgtaaaatagggttcttcccaggctggtttgagttttttctttctagcttttgatgaggacgtggttttcaggctg

SEQ ID NO: 22876 - DNA, 1065 bp, Homo sapiens
gccgcctcatcttccactccacaccaacaacctgaaagcaagaaaatgctggtgaagtgcatgttaactctggtgggaaggcacagaccacccacaagtgtatctgaaaaactgaggaattactccaaggaagtacttggaggaacaggatgttggcttcaggtggaagatggtgctatgtattattactggactataatggtcacagaatgtaggaggcctcataacataaaggacacaaccatgtatgtaacacagggagtagaggcagggtctacaatccctgcatctgcaaaccactcatctgcagaatttatgtcctcatgacatgcgagtgctgtagagagggatttgtccaggccaaggaaaacacaagcacaacacagcagcttctgcttgaggacagtttaacaaagtgtacacatttgctaacacaaaacctgtatgctaatactggaaaccactgcagatgaagatgtgaataaaattaagatgtgaggtccagagatgtgaagattattcaggggaataaatatcagactacaagctcatgtacaaatcagttaaaggatttaaaaaaaaaaaaagtacaactgacaaggagtacaactgacaattctgaggttcttaacaatggggaagaggccagtaccagtggctcacagctgtaaacccaatgtaggaagatcacctgagcccagaaatccaagaccagcctgggaaacatggtgagaccctgtctctacagaaattatttttaaaatggccaagcatggtgactcatgcctacaatcccagcactttgggaggctaaggcaaagggatcactcaggcccaggagatcaagaccagcctgagcaacacagcaaaacctctctacaaacattagccaggtgtgatggtgtgcacctgcagtcctagctactcaggagactgaggctggaggatcacttgagcccaggaggttgaggctgtgtgaactatattcacaccactgcactccaggtaacaaaaatgacagtgtgagaacctgtctcaaaaaagaaaagagaagaggagaggaga

SEQ ID NO: 22877 - DNA, 1033 bp, Homo sapiens
agtctacaaacagcatcttcaatttaaactgtcagttaaagttcttaagatttaggaaatgatggagcttggaaagttatgagattacaaaattccggaaagtccattagaaaaaccacaggatggaaaaaaaaataagccaggcaacaaagcttcagaggtccctgctggcccagggagagatacctgcagtgtccagcatctcagtgaacatgatctactttcaaaggcaggggcttaaagcgagggaagggggggaactggtggaagcaaaggctctccccatcaccaccttggttttaggtagggattttaatttaactgaaggacatctctcaacttggacaataattaatccctcaacagcacctcatatctgctatgactttgcagcgcagcagaaagaatgtttagtatctaatagataaaaatttcatcgaaaaaattaaaatattcttgcaacacccccccaacaccaattcctattctaaagtgaatctatcacttgtgctgttgatacttgaccatgtacttaattggaaacctagatgcaaaagactgaaactgaatcttcaccccaaaatgaaaacaaaataaaatgagtaacttgaggtttatggcatatagtttaggtaaacacacacacaaggagaagggggaagaggaaatggaaggtgtcggaagcaaagctgagtgacagaacacattcagtcagggcagatgtctatacagagtgtagtggaacctcaggaaaagcttcatatggattcatgcgcacgcgtctggaggcaccagatccctccatggcagatccaagaacagggagctgagggagaaggccattcccttcattccagttttaggagctccacatcgaagacgagagtggcgtgtggtgggatgatgcctgggtgcccagtggcaccgtaggcagaatctggagatatagtcagttgggctgtctgacccacactcatctaagcaaccctttcttcccagcctcggatcacctcctgctaaaaattaaggggct

SEQ ID NO: 22878 - DNA, 1055 bp, Homo sapiens
tctgtcgcccaggctagagtgcagtggcacaatctcagctcaccgcaacctctgactcctgggttcaggagattctcctgcctcagcctcctgagtagctgggattatatgcatatgccatcatgccaagctaatttttgtatttttagtagaggcggggtttcaccatgttggccagactggacttgaactcctgacctcaggtgatccacccgcctcagcctcccaaagtgctgggattacaggcgtgagccacccacacccagcccttatttttattttttagagaagaggtcttgctctgttgcccaggctggagtgcagtggcacgatctcggcttaccgcagcttcaaactcctgagctcaagcgattctccctccttcaggctccctaaccctaaccccaaccttggggcagctgggaccactggcctgcctgacctcaccccactaatattttttattttttgcagagacaggatatggggaaaagaaatcagattgttactgtgtctatgtagaaaaggaagccataagaaactccattttgatctgtattaagaaaaattgttctgctttgagatgctgttaatctgtaactttagccccaaccctgtgctcacagaaacgtactgtattgaatcaaggtttaatggatttagggctgtgcagcatgtgccttgttaacaatatgtttgcaggcagtatgcttggtaaaagtcatcgccattctccattctctattaaccagggacacaatgcactgcggaaagctgcagggacctctgcctgagaaagcctgggtattgtccaaggtttcccccactgagacagcctgagatatggcctcatgggaaaggaaagaccttacatcccccagccggacacccttaaagggtctgtgctgaggaggaggagtgaaagagggaggcctctttgcagttgagataagagtaaggcttctgtctcctgctcattcctgggaatggaatgtcatggtgtaaagccaaccattcccattcgttgtattctgaaataggagaaaactaccctg

SEQ ID NO: 22879 - DNA, 1128 bp, Homo sapiens
gaggttgcagtgagccgagattgtgccactgcactccagcctggcagcagagggagactccatctcaaacaaacaaacaaacaaaaaaagatactttaagttgtttaaaggccagagagaggccagtggtgtgtggcagtcagctggggatggacatggaatgtacctggaagtctaaagaatgaggtgcgttcagagagggtatctctgctgtgctgaaggtgccacattgggcttcccatgacctcggccatactagggaaagtgcctgtcaggagtgggtggactttatgtcacagccactgcacagatacctatttgttcaactaactattgttggtggctgtaccccatgaccagtgggcctagtttctcctatgtttgaggaccttgagaggaggatgtgcgagagtagatgtgtgggagagatggattgtgatacctcagcataggggtggtttgtggtttcatctgtcaacatcataacagggcacagtgacttttgaagacgtggctgtgaaatttacccaggaggaatggaatctccttagtgaggctcagagatgcctgtaccgtgatgtgactctggagaacctggcacttatgtcctccctgggtaagttgctcacactcaccctgtgacttgagctagtctctgttttcccctgtctttccccattggcaagactttctcatgtcaggagcatggacacagcttcctgcttcagttctatgggtaggttcttggttgtaggactgaggtgtacatactgccctactcctttcttggagcagccccagcacctgctttactgcaggctcccagggagggattcccagtcagaagcccaccttgttagtcctgtggatgtttgggtgtccttgtccagatttcaggttcctgtgtacccacagtctacttcctttctctagctgctattttcttatgccttcctgtggcaggaattgccttcacagactacatcactgcctatatagaccagaggctgttcttgcaagatcttctttagaaattctccttcaaatactcagtttttttctctcatgggctgagttgttctgagacaatgttggctgttcccttgttctgtctttcccttagtctgt

SEQ ID NO: 22880 - DNA, 1746 bp, Homo sapiens
tttttttttttttgagacacagtctcactctgtcacccaggctagagtgctgttgcaccatctcggctcactgcaacctgtgccttctgggttcaagcgattctcccacctcagtcacccaagtagctagaattacaggtgcatgccaccacaccactaatgttttgtggttttagtagagacgggtttcaccgtgttgcacagactggtcttgaattcaactcttgagctcaggtgatctgctcacctccgccttccaaagtgctgggactacaggtgtgggccgctgtgtttggctgaaatgtatgtcttttaaaggagtgtccacagttatccagtcactgtgtctgtgatggataagcagatacagaaattctcaagacttccataataatgaatgttgtgtagctaagctttggtcagaggaaataatctaaaggttttgtgaattcatgtaaccttttgggctgctcaccttaaggtaactcctgtattaacaggaggaacagaatagggaaaaagatctcagttcagtgatgtagctttgtgaccagccagtgatccagttcaatcaggtagaaatgaccttcctgctacatcaatatttgcttctatggaggctagtttccccacttagggcatgagaagaattggtaaagtcaacataaaattgccaaacctgtcaccaaaaatgatggcaaatctgtatttttctcttaaaccgtgttataaaagctgtaataaggtataggctgagcatcatggctcatgcctgtattcccagcactttgggaggccagattccttgagaccagtgtggggaacatggcaaaaccttgtctctaggaaaaatagccaggtatggtggcatgtaccttagtcttagtgatgtgggaggattgcttgagcctgggaggcagaagttgcagtgagctaagattgcaacgctgcagtccagcctgggtgatagagtgagaccccatcttaaaaataaaataaagatataaatgacatccaataaagtacacatatttgagctgtaggataagtcttgaattttattataatcccgtgaaaccatcatcagagtcaccataatgaatttatctaatctatcacctttgtatttacttggagcctttataaagtttttctctctgctcttcaaacaaccattgatttactttgctgtatgatggagtactttccattttctggaattttctgactgatgtaataaagtgtttcctcttataatccctgggtgctctcctgcatcatgcttattttgatgtcattgtagatatatgagttgttcattcgttttatgttgctgagaagtatagtctgccgtgaaatgtcattgtatattcattcattcatccatccatttatggatattttagttgctgcatactttttttttttttttttttcaagactctctaccaggttggagtgcagtggtgtgattttggctcattgcaacctccacctcccaggttcaagtgagtctcccacctcagcctcccacgtagctgggattacatgcgtaagccatcatgcccagctgttttttgtatttttagtagagatggggtttcactgtgttaccgggttcatctcaaactctgggcctcaagtgatctgcctgcattggcctacaaaagtgctcagattacaggcctgagccatgagccaccgcacctgtaattgattctgaggccaggcacgatggctcacgcc

SEQ ID NO: 22881 - DNA, 1044 bp, Homo sapiens
gggagacaggagttttattattcaaatcagtctccctgagcattctgggatcagagttttcaaaatttggcgggtaggggcttgggaagtggggagtgctgatcagtctggttggagatggattcatagggggttaaagtgagtttttcatgctgttttctgttctgggtgggatggcagaactgattgacccagattaccggtctgtgtgttgtccgctgatccatccagtgcaggatctgcaaaatgccccaagcactgatcttagatattggggaaaccagccccacaccacccagcagataccccgagtcctgcggagacaaaggagttagaaagagacagaatacgcatttaaaaggcgggtccaggtggccagagcattggaggcttcctggcggcccagagctcttgggctccacccagtttattggtttacaagctctttgttcttatggctgattggagggggaggaagcgatcaggaaaaggattaatcagtaaaggagaactcgtgagtcattccataagatgtaaagcactggccgtttctgtgaatttccttgaacaaaggcgtgtgtctaaactacttaagatctttaacttaactgaaacgggtggctgcgggtttcaggaggagccaagatgtttgattatgctccactgcttcaagggagtgtgatctccctgagcaacccatggaatgctgctgaagagttatgctctcggggcataaagacatgaaggcaataaggagacttttctcctcagaggccgcccatggcttcccatgggtgtctcacacaggggagaccaactcaactagcaccccagaaactcacattaggttttacaatagtaaggttatcttcaggagcaacttggggaggttcagactcttggagccagaagctgcatgacccctaaaccgtaatttctattcttgtagctaatttgttagtcctgcaaagacaggctggtccccaggcaagaaaggggtcttttcaggaaagggctattatcaattttgtttcagagtgaaac

SEQ ID NO: 22882 - DNA, 1053 bp, Homo sapiens
agggaatgtgggaaattatttaacaggaagtatcatcttctggttcatgagagagttcacactggagaaaggccatatgcgtgtgaggtatgtgggaaattatttggcaataagcacagcgtgactatacatcagaggattcacactggagaaaggccgtatgaatgcagtgaatgtgggaaatcatttctttccagctctgcgcttcatgttcataaaagagttcattctggacaaaagccttataagtgcagtgaatgtggaaaatccttttctgaatgttccagtctcattaaacacaggagaattcacactggagaaaggccttatgaatgcaccaaatgtggaaaaacatttcagcgaagctctaccctccttcatcatcagagttcacacaggagaaaggccttatgagtgcagtgaatatgggaaatcgtttgctgaagcatcccgtctcgttaaacacaggagagttcatactggagaaaggccttatgagtgctgtcaatgtggaaaacatcagaatgtctgctgtcctcggtcttaagcgacttcgtgttgagatggagtcttgttctgtcacccaggctggagtgcagtggtgcagtcttggctcgctgcaacttgggcctcctgggttcatgcaatcctcctacctcagcctcctgagtagctgggattatgagtacacaccaccacgcccagctaatttttgtgtttttagtggagatggggttttaccatgttggccaggctggtctcaaactcctgacctcaagtgatccacccaccttgactcccaaagtgctgaaattacaggcatgagcctctgcacctggccttcattcttttcgtattgcttagaatatgacatgctgaaccaggcatggtggctcatgcttgtaaacctgatgctttgggaggacaaggtggttcattggaggccaggagttagagatcagcctgggcaacatagccagacctcctctctacaaaaagaaaaaagaatgacatgcttcttgtttttgtctgttataaatgaaactgctatat

SEQ ID NO: 22883 - DNA, 1928 bp, Homo sapiens
tcagtgtccaagaatttctgttctatcttaccaagagggagtatggttagtatttgaaattgtttattattttaataagtggttataacttttgagtcagtggtttatgttttgcattttttttgttttgagacaaagtctcgctctgtctcccaggctagagtaccgtggcacaatctcagctcattgcaacctctgcttcctgggctcaagcactctgcccacctcagcctccagagtagctggaaatacaggtatgcaccaccacaactggataacttttgtattttctgtagagagggttttacctttttgcccagtctgatcgcgaactcctgggctcaggcgatccacttgcctaggctccaaaagtgcttggtctacaggggtgaggcaccctgcctggcctcacctgtaggcttgttttttaaaatgaattttatctatttcccatttcattaatatatttaaaaataatgaaataacaaagacgtatgttggacttcattcattcttcagtgatgtcactttgctgcaaggaatatttggttttcttttttttttttttttccagatggagtctagctctgtctcctaagctacagtgaagtggcatgatctcggcccactgcaacctccacctcctgtgttcaagcgattctgcctcagcctcctgagtagctgggactacaggcatgtgccattatacctggctaattttatttatttattttagtagagatggggtttcaccatgttacccaggctgctctctaccttctgagctcaagtgatccacctgcctcggcctcccaaagtgctgggattacaggtgtcagccactgtacctggctgaatacttggttttcagtaccacaagaactatgagctggttatccacttcatgtggaatcataagcgtcccaaagtgacaatacatatagattgccaggcagtgaaacagttaagatgccaccatagctttcttttcaacatctttctaagattaccttactatttcttttgttccaagtttgtacttcctcacagttctcacatatggaaaggatacacactttgtagaaacaagaactttatgttatccaagttctaggatagccatgagctccaattatctcagagctctgagtcctctactcaatacccattgagatttatgtgttctgaggcttttgtcttctagctacttacttcattctccatgggtaacgtcattcatccacattaactaatttcctcactccaagctcttttctagagataatctccagtccctgtgcagaaactgtcattgcactttctgctgaaatggcagtttcttctcagcaaggtgagattatggaatccagaatcttttttcaggggtcacatgcccatttccccacttgcatgaatgtcgacactgcagccacagttttggccgtaaatgtgaatttggcaagtaaccactgttcccagggaaatgtcccaatcagaagaagattatctgggacactgatactgacagggagatgggacattctgagggacccggaggcagggtgccacctcctcaacttccctgagggctgcctagaatctgtttcctctcactctgaattattcttcctcttatggctgaccaaaaacatggaacctcacaaagtccactgtaacagctttatatttgtgaagtgaagaacatgaagacagtttcaagcaaagttattgagtggacactttgtgttttttttgagaagtctcactctttcacccaggctggagtgcagtggcacgatctcggctcactgcaactccacctcccgggttcacgccattctcttgcctcagcctcctgagtagctgggaccacaagcgcccaccacgtcagcttaatttttttgttttgtttcttgagacagagtctt

SEQ ID NO: 22884 - DNA, 1050 bp, Homo sapiens
gtttaattgtttttttgtagagacagtgtttcaccatgttgcccaggctggtcttgaactcctgagctcaagtgatccatccacctcagcctcccagagtgctgggattccaggcatgagccaccgtgtctgtctggtctgctttattttatttattttttgagatggaatctcactctgttgctcaggctggagtgcagtggtgtgatctcagctccctgcaacctccgcctcctgggttcaagtgattttccagcctcagcctctgcagtagctgggattacaggtgtgcaccatgactccaggctagtttttgtatttttagtaacggacggtttcaccatgttggccatgctgttcttgaactcctgacttcaagtgattcacccaccttggcctcacaaagtgctgggattacaggcatgagccattgtgcccgacctctgctttattcttaacagcttcagtgtggtccacatttgatttttcttcttttggtggacattaaatttactgcagaaaacttccttgcatactttttttttgcacgaacaagttggtttttctgtaggttggatttctaaatatggaactacaagatcagccaatgttgtaaactaaaaatctggtagtgacaaattgccatctcaaatcctttaaggccaggcacagtggctcacacctgtaatcccagcactttgggaggctgaggtgggaggttgtttgagaccctgtctctataaagaaaataaaataggacaggcacggtggctcatggctgtaatcccagcactttgggaggccaaggcaggcagatcatttgaagtcgggagtttgagaccagcctggccaaaatggtgaaaccccatctctactaaaaatacaaaaattagctgggcatggtgggtgcctgtaatcccagctacttgggaggctgaggcaggagaattgcttaaacccaggagatggaggttgcagtgagcagagatcatgccactgcgtgacagagtgagactccatctcaaaaaaaaaaaaaaaatatatatatat

SEQ ID NO: 22885 - DNA, 1316 bp, Homo sapiens
tttggctggagtgcctctctggtctggggatcacctcaggcgctgtccttcactgggcgatccagcatggaccccgaggacgaaggggtagcgggagtgatgtctgtggggccgccggcggcccggcttcaggtaacaataacaacaataacgacggcggcgggctccgggcaagcgtctcccgcgcagactgaccctttcacctcgcggcgcgatgagagcggcaccgctgttaatgcccttgacacgtggggaaactcagacgcgggtcggggcgtggtgaccgtcctggctggtcagagagggggccgggattccaaccaggcgcctggcccccgaatgcgcatgctccacgcggctctgtcctccccagggctggggtcggtcattcccgagagaatcgagcaggcccatctcctgcgttctgctccgccccgccgacacccttgcccattccaggaaggtctgtcctcgtgttgactgataacagtaattgtagcgttggccgggtgcccagatggcaagaatcatcgaatagagatgctttaacgcgtggagtcagcggacacccaccgggaccccagcaccgcggagcccctgccctggggcttgggcacaacctcttgggggcaatgatgggtcaccacgcactgagtgtgatgagagtgaccaccagggtcgtcccctgcgagactgtgggagaactgcagtgcagggcggtcagtgtttgcagggccatctggccatcagagctccactttctagacaaagtggttgcggcctgtgttctccataaagctgcctcgcgtggcaggaaacaacaataattatccttcctcaagctctgcaactttgaaattatacttttttttattttttgtcgttggtttgttcatggggatttgcattatttcagatttggtacacaaagtgagacttgataatcttaggttgcaggttttcagatgtgtgttgctccaaatttgcatgaaatgctaccacgttttattttgttcttgctgtggatgggggacaaggaatgagtcgtaagaaaggcttgagagaaagtgtattagttacctgttgctgtgtaactcaaaacttcgtgacctggaacaacaataaatatctcacgagttctgacaggagtaatggaatgtcctagctggtggttctggttcaggcccatgaagttacagtgaagatgtcagcatagctgttgtcacctgagacctgagtctggaggatccacctccaggatggctcactcacatgtctgttgataggagacctcagttgttctccatgtaggcctc

SEQ ID NO: 22886 - DNA, 1027 bp, Homo sapiens
caggctggtctcaaactcctgagctcaaacagtcctcctgcctcagccactgaaagtgctgggattacaggtgtgagccactgtacctggtcacatgtctagattctgtaaacttgttccccacacccttctttattctcttatgaggaagaattgtgtttagctataaataccctaaaaccaggttggagcagctcaaaataaagaagcatttttcttgtaaaacaggagccctgagtctgctggtactgtcttggcatctcagaggtgccagggctgattgttctgtgattttcccaggctgtccttgggattacagtgcagctgcagcagctccagccatcacagttgtgctccatgcaggaaggaggggaagaggtaggaagaattctgccagccacatctgtccccttttggcagaactctagatgtcacctgctggggtctctttagccagaactaggtcacctcctcttgcactgaccctagttgctagagaggctggaaagctaggggtgtctagattgtcataattggcttgggcgagtcatggtccccttgctgtggcttgtgtgttggtaccctgaccacattctagagtaaatagcatctggccatgggatgtacaaccagcaatgcctgcagattagcctcccacccaaatacttctgatgccacccagggctttctgattctgcagaaaaacacatatgcccccatgatagcgtatgacctatcaactgggagtcgggtgaatctgctgcagaccctgttttcctgcccctttcatcggttgtcactgctgttacttcagacatgtatgtcggaagcaaattctcatcaccctggacatatgcctgtcactcacaagtcttatgccataaccaaatccaggatctaaaacgtgtgcccataaatactaagcaaaatgttgtgcttgcatggattaggagtatggggtcaaaatcatgatggacagtttcaataacttaatacctagacagttataaatactccagaagcagaa

SEQ ID NO: 22887 - DNA, 1037 bp, Homo sapiens
ccttcagcattcactgagagatatttttgagcttctactacttgtcatttctaggcactggctgtgaacattctagtgcggtgaggtgtacccagaatgaatgaacacatgacctgtattttggtcaggacaagagcagatgagggggcttgaagagggcttggggaaagcgggaagcctggcttataacagagtccctgtcctaatccccagaactggttatcttggatactgggtgagcaagagggtcagaatcagacaaggagatgtgacagcagaagcagaggtgagtgagagagatctgaagatgctgtgctcagctctagaggtgaaggaaagggccaggaatgcaggcagcctctaggaacgggaagatgcaaggattttccccagaacctcccgaagagaaaccagccctgccaacaccttgattttaggacttctgtgttccagaactataagataataagtgtgttttaagttacagcagcaaacagggaactcatataccttgacttcattgccagtgcatggcccacagcaggtgctcaataaatgtttgttgaatgagtggagccgtgtctgagggcacttgatgttaaaataagaggagaatcaggggacttgccagggcagctggttaggaccccatttcaatatcaggcctatggtgttggaggcctgtcccccttccgtttttttctcccaacagctcagagatctttgggttttctttcagcctgggagcctcgatctgaaagccaagcatcacgcaaggaagagggcctgcctgaagaggagccatcccatgtcacgggaagggaaggattcccgacagatgctccttatcccaccacgttagggaaagacagggagtgtcagagccagagtctggcactcaaggagcagaataacttgaagcagttggaatttggcctcaaggaagcaccagttcaagatcaaggctacaaaactctcagactcagggaaaactgcgtcctgagttcaagcccaaatccattcccagagatctctag

SEQ ID NO: 22888 - DNA, 1056 bp, Homo sapiens
gcgcccgtgggaggggagcattctgtgttggaggcagaaggaatgagggtcgtgaccaactcattataccactggaggctctatgagcaaaccgcaaactgttctcatgaaagcaggatgttggtaaactgacaaactgcgtctgccgccagaaggaatgctgggggcagtcatgtcccaggtcccctgctccttgaggttatctacaggaacatctggaacctgctgaacaaagaaagcagtcatgtgggcctgtgttaaatcaaatagctgaccgtcagttaccctttcctccctattcagtctacctaacaaatatgaagggctgtaaaagctcagggccctgttccctagaatctaggagccccctgaccccttctttcaaacagatccttttgtctttgtcttcatttctgccttcgttctccttcgtttggtccagaagcaaccgtgacaagtggtgcccgaccagggacctgaacgaggaaggtctgccagagcagagaaagtgaaactgatcagacgaactacgaacccctggacgggagagtctgccggcggagaatataaggtcagttccctgagaaggtatcgggagcgggaggtttctgaatcagggtaacatggggcagaatctgtctgttgaggagcaacattatgtgcagctgcttaaagttttacttaaacaatctggtgctcgggttagttctcaaacattaagcttctgcaggaggttattacacataacccatggtttctgcagacaggtactcttgctgtggaaaattgagactgagtaggagaaagattgaaacgagctcatcagaaagttcttaaagtggatccttctattttctctgcttggggtttggtctgtactgtcctcctgccattgtcctcttcttattctgccagacagcaggtgctatgttctgaatctcaaaaattgaaagaatcttttgtctcaccagcagcgcccattgaaaatgataaacaggagagggaggatgagaactggcctgtactgtcccctccagtagcagaaatagagacccc

SEQ ID NO: 22889 - DNA, 1043 bp, Homo sapiens
gaagcacagaatcacagggagacggttaggcctccggataactgtgggcgagcctgactaatgtcaggccctccacaagaggtggaggagcagagtcttctctaacctcccccagggaaagggagaccgccccccaccctttcccggtctgctaagtagcgggtgttgttccttgacacttttcgctaccgctagaccacggtcttcccaaacgctggcgtcaccactagaccaaggagccctctggtggccctgtctgggcataacagaaggctcgcactcttgtcttctggtcacacctcactatgtcccctcagctcctatctctgtatggcctggtttttcctaggctatgattatagagcaaggattattgtaatattggaataaaaagtaattgctacaaactaatgattaatgatattcatatataatcatatctaagatctatatctggtataactattcttgttttatattttattatactggaacagcccgtgtcctctgtctcttgcttcggcgcctggatggcttgccgcccacacaagagcaccttaaaaccagaactgcttaacctatttctgagactccaaaaagctgttcgctctcatgctgccccttttcatatttctcatatccgatctcacacacaacttcctggggccactatctctaggtaatgatagagcagataaattcatcagttctatatttcaacaagcccaagcttcccatgctttactgcatcagaacaacttgcccttactcgtatgtttcatctgcctcgcagccaggcttgagttattgtgcaagcctgccccacttgccagcatgtccctggtgttgcacctgtggaaggatgcaacccacgaggcttggctccaaatgaaatctggcagatggatgttacatatatatagcagcctttggctaactccgctatgttcatgtaatatagacacttactcccatatgttacatgccacatgccaaactggggaaacagctggtcatgtctgacgatactgtctgtcgtcatt

SEQ ID NO: 22890 - DNA, 1083 bp, Homo sapiens
ctgggaggtggaggttgggatgagctgaaatcatgccattgcactccagcctggccaacaagagcgaaactccatctcaaaaaaaaaaaaaaaaaaaactgggctgagcatggtgacgcatgtctgtaatcccagcaacttgggaggctgaggcaggagaattgcttcaacccaggaggtggaggttgcagtgagccaagattgcaacgttgcactccagcctgggtgacagagtgagactccatctcaaaaacaaacaaacaaaaaacccaaaaacaaaaaagttctcagccaggtgcagtggcttatgcctgtaatcccatcactttgggaggctgaggcggacggatcacctgaggtcaagagttcaagaccagcctggccaacatgtccaaaccccagctctactaaaaatacaaaaattagcctggcatggtggcatgcacctgtagtcccagctactcaggaagctgaggcaggagaattgcttgaacctgggaggcggaggtttcagtgagccaagattgcaccactgccctccagcctggaaggcagtgagactccatctcaaaaaacaaaaaaccaaaaaactgtggttcctactctggggtggttggtttcctgtcttagagaacacttagcaatgcctggatacatttttagatgtgaaaactgaccggggtggtgccaggcactgtggctcatgcctgtaatttcagcactttgggagcacaaggcaggcagatcacttgaggtcaagagttcgagaccagcctgctcaaaacagtgaaaccccttttctattaaaagtacaaaaaatttagctgggcttggtggcgcgtgcctgtaattccagctactcaggaggctgaggcaggagaatcacttgaacccaggaggcagaagttgcagtgagccgaggttgcgccactgcactccagcctgggtgacagcaagactcagcctcaagggggggaaaaaaaaaactaggccaggcgcagtggctcatgcctgtaatcccaacactttgggaggccaagacaggcggatcacaaggccaggagttcaagaccagcctggcca

SEQ ID NO: 22891 - DNA, 1051 bp, Homo sapiens
gggtccagtccacgggttctgcccgcacggtccaatggccggggaggcggaggtgagcagaggatgcctccgaggaatgagggggcccaccaggtggggggcggcgtgtgccagggcagagttggaggagggcaggagatctgcgtatgattccagggggaggtctttgatgcacggctggggcatgcccttggcagtgggagccattggagatgtgccgcaggactgggacaggatggggtcgtagttgctgtgccaggccctctggagacgcatgtgcagaacggcgtgtggaaggccaggcaattgcctatagggtaaactggggacgttgtgctgggggtgtacagttttaggcattctgttgtccagttttgtgcctgttgagcaggaggcaaactggaccctgggaccaggtacttgagacctaagggagaaggatgagcataggtttggttgcgtctgagaggtatgatctctgggactggaattggcaggcaggagatagagtggagcctgtgcccttggccctgcacatagatggcatcagtctggtcaccaacctgatgtcgctttgggctggacacagtttccagtagtaacaccagaagcatcaataacaccagcagctctgatattcctctgggataggagaaggaaggtataagggtatgtgtagggagtaaggtggggaagagtttagagctcatagggaaagataatgtcagggggagatgtgataggaccctgagatacaggtcaagggcctgaatgtgtccatctgtccatattttggttgtttttttctgcccatcattgaccccaaggctcagttggacccatcattgcagggcttggtgatgtttgaggatgtgacggtatatttctccagggaggagtgggggctccttaatgtgacccagaagggcctataccgggatgtgatgctggagaactttgcactcgttagctcactgggtaagtctcttacactgtcccccagcacactgactaccccctcattttccccatgcgaagttctgtccataac

SEQ ID NO: 22892 - DNA, 1036 bp, Homo sapiens
gtagatgagtttatttttcctctgggtaagctctgggccctacggtaactgaaacaggccactatgttcaatccagagcctttcagtctttcccagtctttcacacagcaatgcaaagtaggctacaacaggacagagcaactacccgctcttctactgtgcccttaggcagattttgtgcccccaaaaggcactccccaatctatccattcattttctcaacctaccccaacagaacccctaagattaaaggtgacctgatcaataaggtctttattatcaccagttagtgcaggcaaggtaggtgattccagtggagggtgatttgtggcctcaatggacacatcttaggggttaaacacagacttgaccacatccacaaggaatgtgcatcttcctgagctcaaattagatttccctcaaggcccctcaaccagcatcggttcagctgagcacagtcctgaatccctagagaacacaggaaggaaggctcagggtactgttttccccatgcatgaggacaggactgctgcaaatttttggatccaggcaagatggaaagtgactatggcttctgccttatgctgcatgggtgagatggccctgcaaaggttcctgggctggtcagaaacagagtagcttctgaaggcttttccacattagcagtacatgtaggtaatttttctggtatggggattctgctgcatgaagtttgacttggctgaagattttctcacaaagaccacttccataaggctccactcaggtatgaatctttttatgctgtgcaaggttacaaagatggctgaagagtttcccacactggctacactcataagtcctttctctggtgtgaactttctggtgccgaacaagtgtagatctttcactaaaggcttttccacactggatgcactcatagggcctttcttgtgtgtgaactctctgatgacgaaccaggtgggagttactgctaaaggctctcccacattcactgcattcgtaaggcctttctccagtgtgaactctccagtga

SEQ ID NO: 22893 - DNA, 1037 bp, Homo sapiens
caccatcagaatagaggtccagctcctcaggctgccattccaggcctaactattggtttcccttccctgtttccaccagactaaatggagaccggcagtccccagaatgcttccatttcatcaccactaaacaaggtacacatgctggtcactgtccctgggacagccttccagatctcattccacaggattccagaaatgggaatccctcgatataaccccttgcctggattcaggatggtaagggtaagtgactcccagggcagggcccaggacccacgtgtgaggacaggacacgatcaagagtcccaggacaccaacatcccctctatctgggcttcaggatcctgagggccggaatcccagcgggtgagggcctggggcacactccacttacctgcgccgggcccatcagcaacgctggcaaccccattagaacctgtgggctgggcagggccataacaggaggcccagggctagccctgccgctgggccgaaccctcacacttccgctgggtgacggtcgcactcaggacctgtcttcccaaatgcaaaatgcgcgcaaggcctctgggcaccgcagggacgaaggctgggtatggagaccctggagacgcgtggcgctggctccactttcgggaacaccttggctcataaaagcagagtaattagccgggcactatggtgcgtgtgaaggcgcggtgacggtccctgcacccactcccgtgccctggtgtggctccagaggcctgctgtagcccaacccaccagcagcaaaatgaggaccgcaatggcggcgccggaagtcccgcctctcaatgacagctcggacttgccactggtccgagctttcattggctcaaggatccccgccgtctatgacgctatttccctatgcccgtcacgctactgctaggtcgttgccaaggtgattgaggaatggcgtttattgcgtcgctgctcaggcaacgcaaactacattatccagaaggaccctcgcggtgcctcagggctggccattggcagccgaggagaca

SEQ ID NO: 22894 - DNA, 1050 bp, Homo sapiens
gttcctgcagggagtggagacacacagaacctagctcccctggagcctgcaagacttgggccaccagaatcccagtaggtccctgaaccattgtcccccagtaagtctgcagagctgtgaaatgcagacaataacccttccctgcctgaaagagcacttttctggggagcccatgggagtcaggagcaaaagcatctgtcaaacaagtagatacccagagagtcacgtgaaatcatttctatgcctctgacagacgcttcttgagcgaagtttctgccctgagcccgcctgaccccttaggctgggctcagtaccctaccttgtcttcccaccagccgcctccctccatcaagttcctttccacgtctgcttgtgcccctgttgtccctcagtttgtccaccctcctccaatcttcccctccccaaacccatgactgatcagtggcccccaacctaggctcccacctccatgcaggtcttggcccctcggctgacctccctccaacctccccctctgctcttaattttgaataggtagtgactgtaaaagtatccctgggcttctatgtcaaaaggtcagactgaacacatgcatctcactgggctcagaaatccactgaaaccacagaggggagtatttaaaacacataacccacaagtatgaggatggtgacagaggagtcaggagcaatggcattcctaagctagaagtgggtgagagctgtcactaagttagggaaggcaaaatactacgtggcgacttggcgaagaggagagagttcccaccaggctgactccagaaccgcagaaggctgagaaccagcagcccagagacgggagacctatatcaaagctgcctggggaacaactactgaagaagcccttaacgccccagtgctctccccacatggtggagggtgaaagtttttgtttttttttccttctgggactctgcatagtcccagagaaaaggcctaagcacctcatccccaaaaacaacctgaggaggccgttggaaagctccgagttgacaagtctcatccacgcaca

SEQ ID NO: 22895 - DNA, 1182 bp, Homo sapiens
ctgggcccttggattgtaagagaccctggtgttctcttgtcagggaagagggaggaagttaaccatgaaaggagaagaaaaggaatccagggtggtgtgtaggcagaattctgagtatgtccacttggagaagtgttcagtaaagggaacagtgtggggaagggtcagcgggggtggggggtggggtggggtggtcctctttttctagacgctgttatccttacccttacattgttgttatctctagaagctagaagaaagggatgtgtttctcagctatgttggggcagaggattctgggagcaaggagttgggcttgcaggcctgtgttcttccctggccacaccctctacatcttcccaataaatggcccagtgtcacagaacaggccggaaatgaggccccaactcattctgcttcctgagttgggggtggtgaagggcaaggtccagccttatgattcccactccccagggccagccaagtctcgggatggtgaacgtactgtctattgcaacgtacacaagcatgaaccccttgtgctgttttgtgagagctgtgatactctcacctgccgagactgccagctcaatgcccacaaggaccaccagtgagtcccaaggcatagtggttgggtgggtgggtgccaccccttccgtagcttagtgctcaggaacacatctgtctgctctcaggtaccagttcttagaggatgcagtgaggaaccagcgcaagctcctggcctcactggtgaagcgccttggggacaaacatgcaacattgcagaagagcaccaaggaggttcgcagctcgtaagtgtgggttctggggctgtgggggtggcccagggcagcaagaccctacctagcctgacctgctgtgtcccctagaatccgccaggtgtctgacgtacagaagcgtgtgcaagtggatgtcaagatggccatcctgcagatcatgaaggagctgaataagcggggccgtgtgctggtcaatgatgcccaggtaagccttgtgccggtgagaagggtccctgagccccctctgctgattgatgatgctgtctggggtgaggagtgatcctagtattcttctgccttctctgcttacctcatacaccttctatctgcagaaggtgactgaggggcagcaggagcgcctggagcggcagcactggaccat

SEQ ID NO: 22896 - DNA, 1022 bp, Homo sapiens
cagagacctccagaccagctgagcagtaccccctcaggcccacagggcttccctgccagctaagagaccccaggactggctcagcagtgccctcttctcaggggcctgagttccagctccatgggaaactcattggagcttctaagttgcaatgcttccctttgttcctctagtcctaagggtctagctgcttcctgcaggaactttcccatttctaagacagattgacttaaccttctcactctcccatcaatcacctaacacctagttagctgtgctctgtctcttgatgggactcaatcagatcaggcatggcaccatgctatgcacatatgtactcttggtggatgctcacagagaacatttcttcctctctgggtttgagaaaccgaggtccattgcccagggagagctgaagctggactgcccagggcagttctgccccacctgctgctggtccattccctctgtaaactagaagctgggtatagcggccatcccacacgcggggtaggtgatgctaggagccacctctctcagggtgaagaggggtgttgtggaggtgaaccctcacaggaaccacgtggttacagagggagcacaccagcccagcactcggggggctggagggtggggagtgaaggacgcacaggtagggaggcactgagtgggtggagacccagtttccatctactgtttattggacacctacagtagccaagccctgggcggacctgcttatacttatgtaatcgccagcctcacaataaccaggggaggtaggtgttctgaccatggcggacacagtgcgtcccggctggagctactcggcgctgtggacgcgctggtgctgaatgagcttggtgctctggtggaagcggcggccacagtcctggcaggcgaagggcttctctcgtcggtgggtgcgcagatgctgcgtgagcgtgggccgctggcggaaggccttgccacactcagggcatgcgtagggccgttcacccgtgtggatgcgccggtgctgg

SEQ ID NO: 22897 - DNA, 1041 bp, Homo sapiens
ccacagtccctccagtcactggtgtcacggccctgggtgtcccacagtctcgccagtcactggtgtcacgaccatgggtgacccacagtccctccagtcactggtgtcacggccatgggtgtcccacagtctctccagtcactggtgtcatggccatgggtgacccacagtctctccagtcactaatgttacaaccctcggtgttgcctcacagctctctcttttatttttctctctctctgtgcttctgtttgaataatttcttttttttttttttttttttgggagacggagtcttgctctgtcacccaggctggagtgcagtggcatgatgtcgatgatgtcggctcactgcaacctccatctcctgggttcaagcgattctcctgcctcagccttcccagtagctgggattataggtgtgcgccaccacacccggctaatttttgttttatttttagtagacacggggtttcaccatattggccaggctggtcttgaattcctgacctcgtgagccacctgcctcggcctcccaaagtactgggattacaggcgtgagccagtgtgcccggcctctgaataatttctatcgacatgtctttgatgctaccaatcctcttttctgatattccagatttctatttagtctgtttcacaaaatttttatttcccatattgtatattttaataggtgctcttatgtgtttttaatttttctgctgaaattctccattttctcaccttgcccctatcttttcttctgtaatctttaaccttttaataatagttactttaaatcattgtcatcctattgctttgcttttttttttttttttttttttttgagacgaggtctcgctctatcgcccaggctggagtgcagcggcgtgaactcggcgcacagcaactgccacttcccaggttcaagtgatattgtcctgcctcagcctcccgagtagctgggactacaggcacccaccaccatgcccggctagtttttgtatttttagtagagacgaggtttcaccatgtttgcca

SEQ ID NO: 22898 - DNA, 1035 bp, Homo sapiens
atggagtcttgctctgttgcccaggctggagtgcagtggcataatctcagctcaccacaacctccgcctcctggattcaagcagttctcccactcagcctcccaagtaactgggagtacaggcacccgccaccacgcctggctcatttttgtatttttagcggagatggggtttcaccatgttggccaagctgatctcgaactcccaacctcaggtgatccgcctgccttggcctcccaaagtgccgggattacaggtgtgagcccctgcgcccggcccataaattgattttcaaacgttaagttaacggtgcacggtggaataaacgtgcttcctggccatgaagtgttctctcttgtgtgtatgtatctcatgcactcagtcctcattatttgtgggttctgtgctggtgaattgcctacttggtaaaatttatttgaaaccgcaaatcaaaactcgcaacacctttacggtcaggcgccagcagatgtgtgtagagtgtcagtgaaggcgagttacctgacgtacagttccagctgaggtgggacaagctgctgctctgtcttggctctcagatcttttactgtgagcacgtgcctttcctgccgtgtactgaatgccgtttttcacatccttgtgccttgtgtcggctacttgacggattaaagtggcccctaaatgtagtgccgacgttctgtctggtgttcttaggtggaagaaggctatgatgtccctttcagagaaaattcgagaagctccactcaggcgcaagctctggggctgctggccgtgagttcagtgttagtgaatccacaaggcagatccagtgagacagtggctcccaaccttttttggcaccagggactggtttcgtggaagacaatttttccacggatgttggagtagggggcgtggtttcaggaggaaaccgttccacctcagatcatcaggcattagattctcataaggagtgtgctgcctgcctccctggtgtgtgcagttcacagtgggatttgcgctcctatgagaatctaa

SEQ ID NO: 22899 - DNA, 1045 bp, Homo sapiens
cttcgagtcatctgcgtggttgtgtgtgtcttgtgtattgcattgtgatgacgtctgtgtcattcgagtcgtctgcgtggttgtgtgtgtctttattgcattgtgatgacgcctgtgtcattcgagtcgtctgtgtggttgtgtgtgtcctgtgtattgcattgtgatgacgtctgtgtcattcgagttgtctgcgtggttgtgtgtgtcttgtgtattgcattgtgatgacacctgtgtcattcgagttgtctgcgtggttgtgtgtgtcttgtgtattgcattgtgatgacgtctgtgtcattcgagtcgtctgcgtggttgtgtgtgtcctgtgtattgcattgtgatgacgcctgtgtcattcgagtcgtctgtgtggttgtgtctttattgcattgtgatgacgcctatgtcctttgagtcgtctgcgtggttgtgtgtgtcttgtgtattgcattgtgatgacgcctgtgtccttcgagtcgtctgcgtggttgtgtgtgtcctgtgtgttgcatggtgatgacgtctgtgtcattcgagtcgtctgtgtggttgtgtgtgtctttattgcattgtgatgacgcctatgtccttcgagtcgtctgtgtggttgtgtgtgtcttgtgtattgcattgtgatgacgcctgtgtcattcgagttgtctgtgtggttttgtgtgtcttgtgtattgcattgtgatgacgtctgtgtcattcgagttgtctgtggttgtgtgtgtcctgtgtattgcattgtgatgacgtctgtgtcgtttgagttgtctgtgtggttgcgtgtgtcttgtgtattgcattgtggtccttggtttggatgctgtggtttttgagtcttgtgtgttccattgtggtccttggtttggatgccatggttgtgtgtgtcttgtgtattgcatggtgatgatgtctgtcatttgagtcatctgcatggttgtgtgtgtattgcattgtgatgacgtctgtgtcatttgagtcgtctgtgtggttgtatcctgtgtattgcattgtgatgatgcctgtg

SEQ ID NO: 22900 - DNA, 1118 bp, Homo sapiens
ccggtggacccaccgcgcctccgccgcccgcgagccccccggcggggctgggtcagaccccgggcgggatttgaactcccgacgcggacccgcctggcgcgaactgggcgcagggtgggtgggtctgccggggcctagagagcgtcggggctgatctcagaagagttggaccagcctctcccgggcacgaagttacttctggagcctcctccctcgtccaggaaacaagcccgggaccctttatctgaaatgtttgggaccagctatattttggaatccagaatttttccaatttgaggatctgtgggattttggactgtgatgtttgatcaaacccacctaggactgtctaggataagacaacagatagcttcgtgtcaggtcaaaccaggaaggaagaaactttcgcttttgaagctttttttgattttggagtggtggatgagcctgtgtggacttgctttcaccttggagggccctggtgaagatggaaagagataatgtaggtgaaggtgcggcggctgcgaggtgctcagtcagtgggactcagtgcatgacttctgtgcgcagaagttacgacaggcgggcagactcaagagctgatcctatctctgggatagagcccaaaggaaaaggtgcccacccagccaggcacagccgcctcgtgggaagccgggattggaactgcggcctggccgtggtgccacgttgcgtgtttatgtcttgggcgttgtgggaggcaggactggccattctctccccctggtgacgacctcaggggcagtaacaggccctgtgtttatgccaaagacggtgtaggtgtctcgatactaggccagaccaccggccagttccttcatcgagaattagttcttcttgagacgcttagggagactgagtccccatgcagatggtggctgtcctccagggtcggaggcagaagccgcgtctcccagtggccctgcagcgacgtggtggtcgaatgagttgtgctcctggaatctgggcaacacacgtggcctgacaggtagctctgtgtctgggatggcacaagtcagactcccaagccagcctcccccagagctgccatgtggctgttctgccctgctctaggctga

SEQ ID NO: 22901 - DNA, 1028 bp, Homo sapiens
aaccctcagtgacaggtggggggctgggattcgaactcagatatttcctgctcccccagaagctcaagccgtaaggctttagcccccttgggccctgcctgtgccatggccgttgttgtctgtcccccaggctggcagggccggaggagtcggcctggggggacgaggaggactctttggagcacaattactacaacagcatcccggggaaggagccgccgctgggcgggctagtggactccaggctggccctgacacagccctgcgccctcacggccctcgaccaggtcagcctctgccctcggggggatggggacagggatgccccagctgctggttccctggacctacctccagctcttctttctgctcctgttctcctcgatcctagaggagggtctctcactcagactcactcactcactcactcatgatttcacttactcacagactcacaatctcactcacaatctcacaggctcacgatctcactcatgatttcactcactcacagactcacgatctcactcacttgctcactatctcacagactcatgatctcactcagtctcactcactatctcactcacagactcacgatctcactcagactcatcatctcactcacgatctcatgatctcactcactcatgatctcactcacagactcatgatctcagtcacgatctcactcactcatgatctcactcactcatgatctcactcatgatctcactcactcatgatctcactcaggatctcactcactcactcaatcacaggctcacaatggggcgccgtgtatctgcccggcctcctctatctctcactcactatctcactcacgatgaagcgccatctgcccggcctcctctaactctcactcacgatctcactcacgatgaagcgccatctatctgcccggcctcctctaactctcactcacgatctcactcacgatgaagcgccatctatctgcccggcctcctctatctctcactcacgatctcactcacgatgaagcgcca

SEQ ID NO: 22902 - DNA, 1031 bp, Homo sapiens
caggacgcagcctcggtgccccccacctccctcccacttcacgccacgtctccgccctgtccccacgccaggtgtcggtcaccgtgccctgcagacctcgatcctctaagatggaaagaacacgccggtcgctcacagggtgctgggcaagtccccgcacggcgtggggtgcagggcctggcgggttccctctgggaccggggcccagtggcgtctccgtgtccctgctctgttttccacacggtgacctcaggatgctatgcggtgtctggaaagcaatcacaggggctgtggatatggccagggcttaagcagggaagagagcgacaccctttttttctgtgaaaactggttgattccattcgtatagacttaaaaaaaccatgtgagacagtttacacgtgcgtatgtgagatataatgtacagtttgagactttaggctcttcacagagtcacacgatcaccactgtctagttccgaacattctcattaccccatcaaaacaccccgtccccatcacagccactccccgtcccctccccagccccggcacccacgcatcccctccctgtctctgtggatcggcctgtcctggacatttcatagcaatgggatcacacgctgcgtggcctcgtgtgtctggcgtctctcactgagcatggcgttcccgaggtgtgtccgcgctgtggcctgggtcagagccttgctccttttttttttttttttttgagatggagtctcactctgttgcccaggctggagtgcagtgacaccgtgtcggctcactgcaacctctgtctcctgggttcaagcatttctcttgcctcagcctccccagtagctgggactacaggcgcccaccaccacacccagctagtttttatgtttttagtagagacggggtttctccatgttggtcagaccggtctcgaacccctgacctcaggtgatccgcccgtctcagcctccccaagtgttgggatgacaggtgggggccgccgcgcctgcatgcatttgtttgtgtcaggcc

SEQ ID NO: 22903 - DNA, 1031 bp, Homo sapiens
gagagacggtggtggtggctgcacagccacgggaatgcgctgagtgccactgaaccgtgcgattaaagacagtcaaaactctaaattttatgttatgtgtgttttaccacaataaaaaagcaagcacacgaaaacgcgccactctcttgcgtcatgggccacgtggagttaggttggaggcgtgtggcagtcatggaaggctttccccacaagatgcctggaggaagctccgaggccctggggacagttcggtgtcattgtgagtcccccccctcctgtagcgccggctgcccagcctcgcgatgatggccaacagggccccacatttccgcggcacccccagggcagcacacacccctcgcccctgtggaaagccatggccaggggcactgacgggggctgtggccagtgggaggggcgtcctcctggccaggggtggagggcggcactggtcagcgtggcgcagggtgtcaaagaaatttgcctttaaatagtttcaaccttagatcaaagaaacaagaacagtagactacgtagagcttttgtaagtttggaattctattgagacgaaaagttccaaagaagactagtacaaagagttcccatgtgtcattcacctagactggccgattattaacatcttgcctcatttattctgtctgtataaattattattattatcattattgagacacggttttgctctcgttgcccaggctggagtgcaatggcgcaatctcggctcattgcaacctccgcctcccgggttcaagcgattctcctaccttaggctcccactgtataaattattattattactgtcgttattattgatgaacaattgagaaagtctgcagccgtgatacccctctaccctcaaacacgctagggtatatagtctaaggacaaggattttctccagcatagctatggtatgattaacaaagtcaggaaatgtaccgttacaatcctgcgatcacattttcagtgcgtattcaaatgtgaccagttttcccaacggtgtcagagca

SEQ ID NO: 22904 - DNA, 1079 bp, Homo sapiens
tggttcatctggagtattttccaatttcccttgccgttttctttttgtttgtttatttatttgttttctgggacatactctccctgttactaggttggagtgcggtggtgcgatctcggctcatggccacctccacctcccaggttcaagtgattatcctgcctcagcctcctaagtagctggagttacaggtgcccgccaccacccccgattaatttttgtattttgagtagagacgggggtttcaccgtgttggccaagctggtctcaaactcctgacctcgtgatctgcccccctgagcctcccgaggagctgagattacaggcgtgagccaccgtatccggccaaagtttctcctcggaactcttggttgttttggagggtgttgtttacacaccctttcaaagcagcaaacgttcccagctttctccccccccatgatccttcagccctaatttgagaaacaacagtaaaagcttctcttaatatttgggtaaacatgggatactattatattaaaatacagatatcgcaatattaagaccaattcgtggtagagaacttgatgtgcttctttattaacgcatcaaacagcgaaattcaggatcaggtggggccagtcttgcggtgaagtccgcagtgctcttaccgcgaggtggaggcggcgtgctgcctggttcctccttgctgcagggggcgccagactccgggaggactgaggatgagggtcgtgtattttcccctccaaggtcacaagccccctggattccctgggcagagagcccacactgtaacagggcgcttttgggatcggcccctacgaaagtgtcccaaacctggcggcttgcacagcagaaacgcactcttagcacgagcccagaagtctggaatcaagatgtctgcagacccgaagtctctccagaggctctagcaggggcccctcctgcctctcccagcgttccggggtggccagcagtcctggatgtcgctggactgcgagctcagcctcccgagcagctgggattacaggcgtgtgccaccacccccggataattgttttaatttttatttttagtag

SEQ ID NO: 22905 - DNA, 1025 bp, Homo sapiens
ggccctcctggtggccgccctctggggtcgcgcgtggcgggccctcctggtggccgccctctggggtcgtgcgtggcgggccctcctcgtggccgccctctggggttgcggagccgagagaagcgttgggacttccatgactgtggccgccagggcagagtgccagccctgagggcgtccacatctcaaccccaggacccgcggactcggctcctcacgaggtaacgtacccggtgccctaagacgaggttgcatggaggacaccgaggtagggaggttacctcggatcgtccttgatctccggactgagagaacaagtgttttaggccccgagtctgcgcgacaggctgggccgcctgctccgggtcacagtcccccggccgagccgttttcctgttggaagatggagttttgagtcaggaggcgttgagggagacaaggctcgggttctgtgtgtccgtggtggttcttgggagttggagttggagctggagaggagggctgggcaggtgaggcttgcagcggcgggacctggagactcggaactggagggcctttgtcagagatgctgccggggtgtgcgcctgcctgtgaggctgggacttccctcgcgtggagtggccagaggagcaggaccgattggttcgccccacccaggcatgagcctcgggggcgctgggcccagaggacaccggcaccctggtgggggctgtgaggccgcattgctcgaggtcagacagcagtaagaagtggccgcccctggtgtcttccctgccccaggagcctgctgcacgacaggacagggccctggtaaggcccgcacccctgcgtccccgggcccctcgcgcctgcagccgccctctccccatccgccctgccgctcaggagtgcttcgtaagcggaagcacagtttgcaacagtttggggttgtcttattttcactgctggcgatttcctggggagccgctggttctgtgcccccaggccgctcctctctgttggggggcccccacctcactgcctga

SEQ ID NO: 22906 - DNA, 1033 bp, Homo sapiens
gctaggattacaggtgtgagccactgtgcccagccctttttttctttgtttctttcttttttttgtttttgtttttgagatgctgcctcactctgttgctgcaatcttggctcactgcagcctccacctcccaggttcaagcgatcctggcacctcagcctccctagcagctgggaccacaggcgcctggcccatttattttaatagctttatctcagtattttcacacaccatataattcacctggtgaaacgtttgtagtatattcataaagttgtgcaaccaccaccacagtctaattccacagcattctcacagctgcaaaaagaacccacctcagccctgccagccgtcactccccgtcccctcccccaggccctggtgctcacacatcccctctctgtctctgtggctcggcctgtcctggacatttcatagacgtgggatcacacgctgcgtggtcttctgtgtctggcatctctcactggacgtgatgtcctcaagatgcaatcccccctcccccccgccgtggcctggtctgggccttgcccctttccatggttgagtcgtgctctgaggtgcgggtggacactggagctgtttgcatctgccgacgacgatgatgaactgtgctgccgtgaactctcacctgccagttctggccatgtgaacatttggtgggcaggtgtcttcgtttctctggggtctgcgcctggagtgaaagttctagctcgtgggtcatggggtagttccatctgggggacttctgggctcccagcaggcctgacggggtcttgcatctcgtcctggctggccctgggaagtggcatctcgctggggctggccggctgcgtttacccagcgtgtttttggaggcatgtcctgtacacgtcctttccccccccacttttctttttttttgagatggagtgtcactctgtcgcccgggctagagtgcagtggcgcgatctcggctcactgcaagctctgcctcccaggttcaagccgttctcctgcctcagcctcccgactt

SEQ ID NO: 22907 - DNA, 1023 bp, Homo sapiens
gcgtcgggagagcgctgcaccgggcagcgggcgggggagagggcgcctggcgagccccaggaacggtggggacagtgggctgaagtaccgtgaggggagacggcgatgaggtagggaagcactgagggacacgaaggcctgggcagcttcgggaggggaggagggcctcggccccgccccgcgcacgccccgcttctcgtctcttccgccgcctgctttggccccgcccccgccggaagccccgcccccgcttggagccccgcccaacggccgggcctagtttgtctctcagcggccaccgtcgcccgggccgctgcccgccgagtacgcagctttcgccgctcccgcgcccccgctccgccccgcgtgccgtgcgtgccgtgcgtgagcgtgcgcgggcgcgtcggccggcgagggagcagcaaacggccggcggcgggtgccgcgcggggggcgggcggcgcggagtaggtggcggcggccatggccgaggcgtcgccgcatcccggacggtacttctgccactgctgctccgtggagatcgtcccgcgcctgccggtgaggcccgggccggggcggcgggcggcagggtctgcgccgcaggcctgaggcaaggccggggccggggtgggggtcgcttgcgcccgcctcttgcgcgagctgaccacgacgggaaaactgaggctcggggcagcgccggcccaggctgaatccgcggggagcccgggcggtgcgcgcgcgaaccccgtcctgtacatgcgggagactgaggcccgggcgggaggcagggcctggccggagcggcgcagcgggatcgcggccgggtgaccccacatccgcggcgttcccgacccgagaggccgcgaggatcccaggtgggatccctaagcccggtgagcctggttttgcaaacggagaaactgaggcccggcgagcagagagagggtattgcccggtggcgcggcgcggggcaggggctgggcctggcggggctcggaccccgagaataacgccaggggaccc

SEQ ID NO: 22908 - DNA, 1065 bp, Homo sapiens
gtggaggtaccaggtaccacagtgtctgtctgtgatggacgcgtggaggggcccactgtgtctgtccatgtgtccgtgatggacctgtggagggccccactgtgtctgtctgtgatggacgcgtggaggacccactgtgtctgtccgtgatggacgcatggagggccccactgtgtctgtccgtgatggaggcgtggaggaccaactgtgtctgtccgtgatggaggcgtggagggccccactgtgtctgtccgtgatggaggcgtggaggaccaactgtgtctgtctgtgatggaggcgtggagggccccactgtgtccgtctgtgatggaggcgtggagggccccactgtgtctgtctgtgatggaggcgtggagggccccactgtgtctgtctgtgtgtccgtgatggacgcttgtgctgcttccacccgtggccgtcgtgagttgtgccgccgtgagcacgggtgcaaacttcccagtggacacgttttcgtttctcttgggctcatacccaggagtaggtatgggttgacagcagctgtgaatcgctgttagcagcgtccatatgcaggtccatgtctgtgtgttccaggcatgactgggtctggctggggggtgttgggttcctgctcgaggataaggggcccttgctgctgcagcccaccctctgtgcccagagcctcccgtgggtcccctgctccaggcccagcccagcctcgcggccccacccccaggctctccggcacctgtttctgtgtggggtgagtgtcccccagggcagcccctggtgcctcttctggtctcctccccaccacaccccagcccgagcctccccccaccgcaccccagcccgagcctccccccagcctgagcctccccccactgcaccccagcccgagcctccccccaccgcaccccagcccgagcctccccccaccgcaccccagcccgagcctccccccaccgcaccccagcccgagcctccccccaccgcaccccagcccgagcctccccccagcctgagcctccccccactgcaccccagcccgagcctccccccact

SEQ ID NO: 22909 - DNA, 1059 bp, Homo sapiens
ctctgcctctttctgtgtgttccttctctctttcctttctttctttctttttttttttttttgagacagagttttgctcttgttgctcaggctggagtgcaatggcacgatcttggctcactgcaacctccgcttcccaggttcaagcgattttcctgcctcagcctcccgagcagctgagaccacaggcatgcaccaccatgcctggctaatttttttttttttttttttggtagagacagggtttctccatgttggtcaggctggtctcaaactcctgacctgtggtgatccgcccgcctcagcctcccaaagtgctgggattacaggcgtgagccaccgtgcccggcctgtctctttcttttctctgtctctctctctccctcttccccctgctcctagtctctctctctgtctccctccctctcaatctctctctgcctatctccctctctgtctctgcctccctctctgcctctgtcttcctctctgcctctgtctctctctctgcctctgtctctgtctccctctatgctccatctctctgtctccctctcagtctctgtctctgtctccctctttgtctctgtctccctctctgtctctgtctctctgtctctgtctccatctccgcctctgtctctctgtctccctctctgtctctgtctgtgtctccctctctgcttgtctctgcccctgtctctctgtctccctctctgtctctgtctctctgtctccctctctgtctctgtctctttgtctctgcctctgtctctctgtctccctctccacctgtctctttgtctccctctctgcctctgtgtctgtttccctctctgtctctgtcgccctctctgtcttcgtctgtttccctctctgcctctgtctctgtcgccctctctgtcttcgtctgtttccctctctgcctctgtctctatgtctctatgtctctgcgtctctgtctccctgtctctgtctctctccatgtctctgtctctgtctccgtctccatctctgtctcatgaattctcctgctcctcccctcctgaacaattgctg

SEQ ID NO: 22910 - DNA, 1013 bp, Homo sapiens
tctcacctcccccccccccatctccctccagcccgttcatgagctccgcctccttcctcggcagccagccctgcccagacaccagctatgcccccgtggccaccgcctccagcttgccaccaaagacctgcgactttgctcaggtaggagccccaggagctcaccgcgccgtggggggcagggtggagtctgggccgcccctccagctgccctgcgacctctctcgctcaggcctgcctgggactcagtgacctcggcttggcccctcggccgcagggtttacggtggggcagtaggagcccagagatgtggcttggttttggggaagagccagtgactggcccttcgtgtcagcagtgagccccgcccagcccttggggtccctgcgagcatctgggcaatgccacagagggagttgcggggagggcggtgctgggagagatgcccttggcagcctttgcccccacggccctccctctaggcgggtccagacaccctgcacattggagtcccaaccccttagcagccacctgaaaacggaactcacataccaaaggaacagaactttccacctccttctccccagggtcgcggggaggctcccagcctcccactgcggcatcaggcggaccccacccccaccctcccagcctcccccttcggcatcaggcggaccccacccccaccctcacagcctcccactgcggcatcaggcggaccccacccccaccctcacagccttccccaaggggttcccagtgccccagcttcctctcggcagctctggagcacccagtgccacagagatcggcttccctgggacggttcggataccacagcctccgtgtgggacccggggccaggggctgctgctgggccggaccacatccagggcctgccggggagcgagggtcacctggtgctcagctcccccaagcctccgcttcccctgtgtaatgggcatgtgagatctgcctgggcctcagagctgttggggggatgggcgcaagccg

SEQ ID NO: 22911 - DNA, 1050 bp, Homo sapiens
acctcatggcctggcgctgtgtactgcaggtctgggtcagccccagagaagccaccgtcccccccaccccctggagccgtgggtgtggtgcctcccggggcacaggggctctgcagaggggtcgtcctggattcctcgggtcccggcatcgtcacaaatgtcctcatgcgtgggacccttctccagctggaggaggggaggtcaggtcagaagcctaagagggaccttgccctgctggcttttaggagggagggatggcgtgatgggggacgtggctccccgaaagcagggaagtggggcctcagcccagtggccacagggagcagaatcccgcccccggccgagctcaggcgcggactctcccggagaacccagaccagggcccaggacagcagtgccttgaccttggccttggagccgtggccgtggagcagccagcccacctggacctctgacctgctgggcccagagagggcgcgtgggtgtcgttgtcagcagctacgtttgagggaaggtggatcaggccgcactggcgaacctggagttcctgcttctgtgatttcgggccctcagttccctcctccaggcgtggagcagcgcctaactgtgcggccattgtcaggacagggtgcgtagctccagcagtcagcgctgaagtctcgctctaagcggtcttggagctgccgtcctcaagcccagcccgaagccagaagggactcttcctcctcctccaggacctgatgccctcagggctcggatgcaggtccttgtgacatttttgtcaccaaggctggacttaagctcaaggacagtggtgaccggtcgagccacttgtctgggatcagcatagcccggctgctggcaacgcttggcactccccaaggagccaggtggggagaccttgtggcctgaggccgctgatgtgaggcagtgacagtagcaggtgtgggatgggccagactaccctccacatggattgaagacacacaagggcacctccatttcaaaggaccggaagtctggagtgagtggggatttagcttaacgtct

SEQ ID NO: 22912 - DNA, 1084 bp, Homo sapiens
aaccccgccccaggccctgaccctacctctgccttctccctgatccagccctgccagctccctaagccccgcctcctaagatatgaccccacccactgtctaaaccccgcctttagtccatcccaggctctgactcctcccacttcccatttgggctccacccagaacctagacctcgtccttctaggccccacccacctgctgatctggccctgcccacaggccatgccaccttccactgtcgcaccccaccgcccttgtgctcaggctctgagcctcctgactccacccaccaacacctccagcttctggccccgcctcctgaaccagaacccgcgccccccaacccaggaggcataagactcctcccattaccccagaccccgcccataatatctgcactctgatttgcccactggcgcagggccccgcctaccgccgcgccaccccgcccaccgccgcacctgtgcccgctgcaccatctcgtccgaggtgccgaagcgctcctccatcagcgagcggatgtgctgggcctcgaactcaagctgctgccggatcaggtccatctgcatcgagaactgctggcaaaggcaggcgggcgggccacggtgaggggcgcccgggccaggccccgttcctcccccacgccgcttcccgcaccctgagtggggcgggcgcgctgccccctggctccccggccggctcaccgtctccacgtgcggcagctcgtccaggcgcttggacaggccctgcagctgagagtagtaccagagcttctccttctcctccttctcaatctcattcagcaggaaacacctggggagcaagtcagcgggggcgggctcagagggcggcgccgtgtgtgtttattttgatatttgtaatcacttgttagcgcttactgtatgccaaggttaacaggcaacatggcaaggtctctcccgtggcactccccgagctagggtaagggggggggggtgggtattgaaattaactgggggatgcaaaaaaattaaaggagagaaaacagtctgggcaacatagcgagaccccctctctaaaaaggaaaaaataaaaataaaaa

SEQ ID NO: 22913 - DNA, 1022 bp, Homo sapiens
cctggtcacgggcgctgcgggccgacaggttccagagcgtgccgcacgcgttgctcacgatggtcaggctgtgcgaagtcagatgctgcagcagcgtctgcagacagttgtgatcccggagcacctgcctgtaggcacagggcgggttagcctgggccaccccccaccctcccctgcccaccgaaggatgggggggccagatgtggcaggtaaaagtaaacgcatctggttaggtttggatcttggaaagactaatttttggtataagtatatcccaaagattgcatgacagagactaaattattttatttttatttttttgagatggagttaaaaaaaaaaaaaaggtaggccgggtgcagtggatcacacctgtaatcccagtactttggtaggccaagtggggtggatcccctgaggtcaggagatcgagaccatcctggccaacatggtgaaaccctctctctcttaaaaatacaaaaattagctgggtgtggtggcgagcacctgtaatcccagccacccgggaggccgaggcacgagcactgcttgaacccgggaggtagaggctgcagtgagccgagatcgcgccactgcactccagcctggcaagagaccaagaatccatctcaaaaaaaaaaaaaaaaaaaggaaaaaacagcatgcacatatcctatgtggtatctggggtatacttagatagattctgtctatatctatcttttctgagagaaagtttcgctctgtcgtacagcctggagtgcagtggtgcaatcatggctcactgcagcctccaactcctgggctcaagcaatctaaccgcctcagcctcccaaagggctgggattacaggcgtgagccacgatgaccaggtaaaaataatattttgtgttttcataaataacatgtaaatatttttattttaatatttcttatttaacaacatttttattttaataatttttttttttctgagatggagtttcactcttgttacccaggctggagtgcagtggcatgat

SEQ ID NO: 22914 - DNA, 1071 bp, Homo sapiens
tgctgctgtgtcctgtctcagaccccccagttcccttcaggatgatggaggatgcggaggccccgggagagcagctctaccagcaaagccgggcctacgtggctgccaaccagcggctgcagcaggcgggcaacgtgctgaggcagaggtgtgagctcctgcagcgagccggcgaggacctggagcgggaggtggcccagatgaagcaggcagcattaccggcagccgaggctgcctcctcaggctgacctctcggggcctgcaggcttgggcagcgcacaaggtggcctgcacccaggctttccctgggggtccgtcggccccagactggcattcacggggtcccagcccacgtgggtgttgacacaggcgcccctcctgatgctggggctgcggttcatccgtcgtctcattcatgccgagttggtgggacccacccagctggctccgtcctgcgtgacctgagggccccactggggttctggaagaggatagggacattattgctgtactgtgattctgtcgtcagctcacagtggccgtgctctgcagtggggcccctgggagcaggtgccacctccttcctctcccggggcaggcactcgcctgtccacttctgagtccaggtgttgggatcgaggtgttaactgtgattccatccagcgagtgcccacccaatgtcagagcagcccgagggccagcctgagcccctgaccccacttccttctgggccccgggctcctcccacaagccacgttgatcttcacaacgaccctgggccgctggggtcacccaagagaagcagccctgagacccagccaggctgggcctagctccacggcacgggtgtctcccagccactgcccttgctggaggaccgctgtgagtcactggccaggagcccagggtgtcctgagtctcatagccaccctgccagctgcagcaggtcctgggcctgcttccctgcgggttctggccctgggggagggggcgttagtgcggcggagggtcttgccaaaggcttttcatcctaaatagcaacttgagtggaaacctgggcaaggcggccca

SEQ ID NO: 22915 - DNA, 1069 bp, Homo sapiens
gcttgagcccaggagttcgagaccagcctggccaacatggtgaaaccccgtctctgctaaaaatgaaaaaacaaaacaaaaacaaaaacaaaaacaaaacagagttagctgggcatagtggcaggcgcctgtaatctcagctactcgggaggctgaggcaggagaatcgcttgaacccgggatgcagagtttgcagtgagccgagatcgcaccactgcactccagcccaggtgacagtgcgagactgtctcaaaaaaaaaaaaaaattactgggtgtggtggtggacacttgtagccccagcttcttggaggctaaagtgggaggatacagcctaggcaacacagccagactgtgtctcaaaaataaataagtggccggtgcggtggctcacgcctataatcccagcactttgggaggccgaggtgggtggatcacttgaggtcagaggttggacaccagcctggccaacatggtggaaccttgtctctactaaaaatacaaaaattagccgggtgtggtggcatgggcctgtaatcccagccactcaggagactgaggcaggagaatcacttgaacctgggagtcggaggttgcagtgagctgagatcacgcaactgcactccagcctggaccacagtgagactctgtttcaataattataataataattaataaatagaaataaataaagtaaaacagaggtggtaagctagggccccccaaaccctgcccctggctgtttttttaaggtctgggagctatgaatggacttcacatttttaaatgggggtgggtgaaaaagaacatttctgacacctgaaagaggtatgaaattcagatttcagtgttggtaagtaaaggtttacggcacacagccaaatgattcacatacggttagtggctgctctcacaccagaagggcagagttgagtagtgggagcagagactccagcctttggcaggaaagcttgtccactcctgatttacgaggtggaagctagtcagagaccaaaggattcagcagtgcagttgggtgaattttgtgttctggatgaggctcattcattc

SEQ ID NO: 22916 - DNA, 2035 bp, Homo sapiens
ctttcgactttccgagcccacctaacggtagtctttgcgtggatgttactggtggtggaaggctttcagagacccccccgtccccaaattggaacaaggcgctgctctgaaaggtcgcagggaaccccctccgtggaacaaagacttagtcgcctgctgcagccaagtcccagacagtcggccacctgctgtttgtcctcttttttttttttttcctggctcgggaaagatgcttttgattctgggccagctttgattgcgccctccccttggttcagtgtcccgtggcgccttcaggtcccccaggaggggaaagcggaggacgcctgccatgtgccgagcacctgggtaaaggggggtgtgcggctggtccccctttttcccacagctcggggtcgtgggcaggagaccgcccaggtgagggcgggtggtttccacgagccaaggaggggcagaacgaccgctccgtccactgtgcacttcggtcctctgtggttcttgactgtcccggtttggggagataaagtgagaaaagtgagcggggaaaggatggctgtgatcagaagcaatgtgtggggcctcgtcctgcaggaggagctcagggactggttcctggaaagttggaggacagcaagagaggggaaacttggtccccaaatgtgtacccttatgagctggaaccctgtacacgtcctgagatctgcagtgacacatgctgaaatctgggagggcagatgacggggcctgaatgagactggggtcagggagggcttctctgaggacgtgacattgagtgacagggagaggcgtccaggcagcaggaaccccctaagaggtggctgcagcttgggagctagaaccaaggccagcttgagcggagtatcctgaggctgtcatcaccccacctctctcattcccactctgggccctggccctgagcatgagggtctagcagtggagaaaagcagggagaagctcctctacaggctagagatttcaggtttctctgcagagggtgaagccaggcagcccagagccgccctctgcaggtctggggcctcaacccagcccttcatctgaggctgcaggctcccagactgcgttttctgttgggggtgcctggggagagttcaggccatgttgcccacttttttctatacgtgtggttttatcaaggctgttcttttttcattgaataaaatctcagggacatcattttgtgtcaatagatgggcataacctttatttaaaattgagatataattcacattccacaaaagctaccttttttgttttttttctttgagacagggtctcacccaggctggagtgcagtggtacaatcacggcttacgcattcttgacctcccaggctcaggcgaccctctcagctcagcctcccaagtagtgggaattacaggcacgtgccaccatacctggcttatttttatagagatggggttttgctgtgttgcctagactagactggtctcgaattcctggactcaagcagttaacccgcctcagcctcccaaagtgctgggattacaggcatgagccactgcctggccaaagccactttttagaaatgtacaattcagtggggtttttttttggagatggagtttcactcttggcccaggccacagtgcagtgacgcaatcccagcccactgcaacctccacctcccgggttcaagcgattcttctgcctcagcctcccgagtagctgggattacaggcgtctgccaccatgcccggctaatttttgtatttttagtagagaaggggtttcgccatgttggccagactggtctcgaactcctgaccccagcacctcagcctcccaaagtgctgggattacaggcctgagccaccacacccggcccccagtggtttttagtacattgacaaagttgtgcaaccatcaccgctatctaattccagaacattctcatcaccctgaaaagcagctctgtcctcattagcagtcactccccacttgttactcccccagcccctggtaaccactaacc

SEQ ID NO: 22917 - DNA, 1043 bp, Homo sapiens
cgtgagccaccatgcccggccctcatttccttcttagctggaggctgccgtcagttctctgccacatgggtcccttcatagggcatctcacagcatggcagctggcttctccagaggcagctagaggttgcacaaaggtgcccaggatggaagccagtctttttcttttttttgagacggagtctcactttgtcacccaggctagagagcaatggtgcaatcttggctcactgcaacctccacctcctgggttcaagccattctcccgcctcagcctcccaagtagctgggattacaggcacccaccaccatgcccggctaatttttgtatttttagtagagatggggtttcaccatgtttcccaggctggtcttgaactcctgacctcaggtgatctgcccgcctcagcctctcaaagtgctgggattacaggcgtgagccaccacgcccagcctctttttcttttttaattttttttgagatatggtctcatatttaccgaggctggaaggcagttggtgtagccacagcctctgcttcctgggctcaagagatcctcctgccccagctttcctagtagctgagactactggcatgtgccaccacacccggctaatttttcttaattttgtgtagagatggggtctcactctgttgtctaggctggtctcaaactcctaggctcaagtgagcctcctgcctcaacctcccaaagtgctgggattccccttgtgagcctccatgtctgaagccagtcttttgtcacttgacctcggcagtgatgccccattgctcatgctgcgttctactcattagaagcctgtgcccggccgggcgcggtggctcacgcctgtaatcccagcactttgggaggccgaggcgggcggatcacgaggtcaggagattgagaccatcctggctaacacggtgaaaccccatctctactaaaaatgcaaaaaattagccaggcgcagtgacgggcgcctgtagtcccagctactcgggaggctgaggcaggagaattgcttgaacccgggaggtg

SEQ ID NO: 22918 - DNA, 1045 bp, Homo sapiens
cactgggtccaggagctccctggggccctggcctaccactcactggcctcgctccccctgtccccgaatctcagccaccgtgtcactctgtgacctgtcccatggatcctgaaactgcatcttggccctgttgcctgggctgacaggagcattttttttttttccagtaaacaaaacctgaaagcaagcaacaaaacatacactttgtcagagaagaaaaaaatgccttaactataaaaagcggagaaatggaaacatatcactcaagggggatgctgtggaaacctggcttattcttctaaagccaccagcaaattgtgcctaagcgaaatattttttttaaggaaaataaaaacattagttacaagattttttttttcttaatgtagatgaaaattagcaaggatgctgcctttggtctctggtttttttaagctttttttgcatatgttttgtaagcaacaaatttttttgtataaaagtcccgtgtctctcgctatttctgctgctgttcctagactgagcattgcatttcttgatcaaccagatgattaaacgttgtattaaaaagaccccgtgtaaacctgagcccccccgtccccccccccccccggaagccactgcacacagacagaacggggacaggcggcgggtcttttgtttttttgatgttgggggttctcttggttttgtcatgtggaaagtgatgcgtgggcgttccctgatgaaggcaccttggggcttccctgccgcatcctctcccctcaggaaggggactgacctgggcttgggggaagggacgtcagcaaggtggctctgaccctcccaggtgactctgccaagcagctgtggcccccagggctaccctacacaacgccctccccaggcccccctaagctgctctcccttggaacctgcacagctctctgaaatggggcattttgttgggaccagtgacccctggcatggggaccacaccctggagcccggtgctggggacctcctggacaccctgtccttcactcctttgccccagggacccagg

SEQ ID NO: 22919 - DNA, 1031 bp, Homo sapiens
caccaggctgtctcggtcatcctgaacttggagcagcaagtgcgaggtcagtgggggcgcgggccaccagcgtccctgcagcgccaccctccctcgtgttcctgccctcgttctccttccccgcccgccttcctggagccagccctccctctgcagcagttgcctccttgcagtgactgtgcccttcacccctctgaccgcattgccatgactgtccactcctgactgccagcccttctccctgcctgcctcagcatcccctccacagtgggaggactggactctttctggacccctagtccttcaggcctgggctctgtggctcagaactgtatctcccagctccacggggctcccactcgccgtggtcctcctttcttgggaagcccagaacccagctcacagaggccagtgtcccccgatcccagagacaggagctggtgtgcaaaccaccctggccccttcccgtcaggcagatgccacgcaaggccacatgagcccatcccctgtctctgactcagtttccctatctgaaggtgatagggaaacttcctatcacccccatttcccagggccagggggaggaaggatacagacagaccctgtccccacccgcagatgtgagctgactccttccccccgctggcgctggcggctgcttccttaactccttcctttcctcgcctgcaccccgttaaccctttctctcctgcagcactgttgctgggaccggagccagagccccggcccggcccacacgctatcccctcagctctaaggtttccgagtctctgcagccgtgtgtggcacgcctcgcgccccccaagcccgcctctctgctgtctgccttccgccctcccctccatcccgcccgtccgtccctctgcttcccgtggcagcccctcctcacctcgcacttgctgcccgagcaccgggagcggctgggctgcaacctcagggcgtttcctcccccaaagccccccgtcagggcttgcgggaagaaaccagacccgggagcacgcagcccctgg

SEQ ID NO: 22920 - DNA, 1027 bp, Homo sapiens
gagggagaagagccaagttttgcttctaaaggctccatccggctgcctgaggatgtcagcagacttggaaggaagctgctgcagggactgggcttaacccgctgctgtagctatggggcaagctgctgttctttgggaggagggaaggtgaggaggactcccaggactttagcctgagcacctgagtgggggcacattgcagagctggggctataggatgaagtccccaggcccatctgaagccagaccacctggtggtgtgcctgagggtttggcaggggcggtacacagggctgtgttcagggcccgtgtccaccaatagttttgcctgcccggcatggtaaccccactcctggtactgaagtctgtcgattgggtttcttgtgcagaggcagctgaaggcacttggacagtctttttctgtatcaaggtcagccagccttctccggaaaggaccaaggagtgaatattgttggctgtgcaggacagatggtctctattggaattgattcaactctactgttgcagcaaaagcagccgttgatagtacatggacaaacgggcatagtgtgtgccaataaaactttatttaaaaagcagcttaggggccagacttggtccttgtgtactgtttgcagatccctgctgcagaccaatctcagtcctacccggtatttactaagcgccttttgaagcctccctctcccatttgccaacgagccaccaggcaaagaccagtccccggtccctctcaggaggggacccaacagggaccgggactgggaaaccaccagcctggagcattccttggctacggatggcctctctgaagcagcatctttcattgttatcctcacggcagcccaggcaggtgggcggcttccacaccccgtgactggaattggaactgaagcccaaggggtgggccgctcctggggccctctccccagcgcccctgcgccgtccactcgcaggcctctcccgaggcagccaggctggcccagggcaggaaggtgcccttcccggg

SEQ ID NO: 22921 - DNA, 1045 bp, Homo sapiens
ttgcggctctgccagtggttcttttctagttttgaataacacgtttaaggccgtgattgaatagcggttagtattctgcgttgtgaagaacacgtttaaacacgccgtttctcgcgctctcaacgtccgaagtgaaatcgcatctgcccccttctgtgagaaggtgaaaattgagcctgtatatttctcttccctgctggtatttgctaccaataaattgctacttttaaaaaacattgtccgaggccagcggatcatgaggtcaggagatcgagaccatcctggttaacacggtgaaatgccgtatctgttaaaaatacaaaaaaattagccgggcgcggtggtgggcgcctgtagtccagcctgggcgacagagccagactcagtctcaaacaaacaaacaaaaaaaacaaaaaaacattgtatctgttcataattgtgtatttgcatcttactaggaaacatttgtatcattaaatagtgactttgctacttactgtgagggcttgagcaaatggcatctatcttttgcgtcagtttccttatctgtagggtaggggtaatgtagccactgcaaggattcagtgaaatgagagagaactcacaaagtgcccccagagggctttccttgtgtgcctgtcttgttacggcttctaggaatctcttgattcgtaattaaatgtgctcactgtctacttcattccatagaacccccaggctctgccatttctttgaggatccatggggcttacaggcttaagacagtcttctcgttttttagggtaaatcattgaacttcttgaacttcatcctttttgttccatgttgggttccctcttgtgtctctttttctttttcttttttttttgaggtggagtctcgctctattgcccaggctggagtgcagtggcacgatctcggctcactgcaagctctgcctcccgggttcgcgccattctcctgcctcagcctcccgagtagctggtactacaggtgcccaccaccacgcccagctaatttttgtatttttagtagagacgggggt

SEQ ID NO: 22922 - DNA, 1051 bp, Homo sapiens
acagccccaggaaccggacatgctaatgcttccctgtgtgaggcagagggtcaggccctgggggcttcctggaggaggaagcgcaactcccaaggccgtccacccccattctcctgggcctctgggtgggcttacagcagggcctggtggggagggtggggtgggaggtgtcttccctcgtcccctgtcgcctctcaccccctcagccctggcacggaccactgtgagattggtccctgggtaaccagagctgtggtgtgtaggccgtgtggacctgagaatgctccctctgggttgcctctccctggacgcccagcccggtcccagcaggaacctgccaatgtttgcagatgtattttctgtggttcccacagagtctcgccctgtgctccggccctgccccaatgctgcaggttgggagggtctcgccttgtcccctcacacgttagggcggaggctttggagggcccagtgaggcccagtatgttgcattttttgcccttgagggacgtgatgtggctgctccagcctgggaccccccagctcctggacacagaggggtgaccccctccccgttcagtccatgcagttaacgcccgcctgagcccgggggtggtggaggatgcagagctccaaggcctgagttggtggcaccctcctcattgcctccactcccccaggcccctgcaggctgtggcgctggccccaggtgtggccctcccgaagctcccgcaagatgggcacctgctctcttccatcgtcaggttcagcgagtcgatgggtgcgaggggcggagggatcccggcagggcccaggagctgcagtagctcatttccccgcttcctgcttctcctctccgaggacccaggaagaggggagtttggggctcatcagcaggatggagccccggagctgtgggatcccttcccaaacctcggcttcttcctggaacagtgggtgcagcttccttccaggcggggcctagttggcttcggggacgccacccttcgccaggagtccccaacgctgatggctgatggggtaccccagc

SEQ ID NO: 22923 - DNA, 1031 bp, Homo sapiens
tgtccgggagccagggcctttccctcagacatcgacgccttgggcttggggtcagaacacgtggcagaggcctggaccaccccaccggtgacgtgtcctcagcggcctccgcagcctgacctgtgtcctctgcctcgatggacttgcctgaaggcagctagagcctgatgccattgcgcagccccagcccctcaccctggcccggccccctgcacgcggagatgcacgtgctgctggcgctgagcggccgcggctgcctggtgctccgccacgtggtgatgggcagccactcgccctgtgcccacaccccctgtgccccgccagcccccacaggtgccaagaggacccttgcggccagcggcagccagtcctccaacggccctgagccaggtggccagcagctgaaaacacgcacattgtcggggatggcgtccaagactaccaccaccatcatccctaagcgaatcgcccacagtccatccttacaggtagcccctcccatctcggccaggaccaccacccccaagaccacgccctgaggcccggccacatgggacctgcggagggccagcctcgcccctgccctgcgggccttcgtgctccacaccgcagtacagccttcaccttccctccccatgccttggtgttttttttttttttttgagatggagtctcgctctgtcgcccaggctggagtgcagtggcacgatcttggctcactgcaagctctgcttcctgggttcacgccattctctggcctcagcctcctgagtagctgggactacaggcgcccgccaccacgcctggctgtttttgtatttttagtagaaacggggtttcaccatgttagccaggatggtctcgatcttctgacctcgtgatccacccgcctcggcctcccaaagtgctgggattacaggcgtgagccaccatgcccgaccgccctggcggtgtttttttgttttgtcttgttttgtttttttggttggttggtgttttttttttttgtttagagacagggtctctgttgc

SEQ ID NO: 22924 - DNA, 1034 bp, Homo sapiens
cttgaaagccatgcaagtttcgtcacaacgcacgttttccatgagctttttgaagacaccttatctttgacgctgcccgagttccagagggagctggccctgccccttcctgttagattgccacggtgctggggcgagggacagagcaggtcagcagccccagggtgacctcccccagagtgcggcagacggcctgctgcgccgtgtgcggcctgggcctgggccggttgtccagctctgagctccagtgtcctctgtagcccggagacagtagcgcttgtcaggcccctgtgcagacgtggcgaggtagtgcaggacaagcagagagcctggctccggggtcagcagccaggagagtcccagttgctccagtcccagagcctccccagaggaggggctttgaggaagattaggcgtagtgggattggattggagtgccagtgtaatcggggtagtcccgcccacccgtgccttatcagggctgaggacatagcctgggcaccgggagacactgggagtgggggagcctggagccacatggcattgaggaccactgccccctgctgcttccccccagtgtgcccagcagctcagaaggcagccagggaggtggtgcctccggcccccgagctccagccaccctctcccaagcctgcccggggtcgcctgctccaggtgcccccgctgtgctgccaggccttagcatttgtggtgacgcaggtggagcccccgaggaggggtcccgcggtgcccccggcccggcccccgacggcgcaggaggtgtgctacctgcgggcccagcaggcgcagagggcatcggcgagcttgctgcaggcccccgccaggctggcagagaagtcgccctccgtccacatttccgcccctggcgagaagaggaggatcgcccacatccccaacccccgcctggctgcaggtgagtcctggcccagggggcctgtgccggggggccgtgggcatgtgggcaggagaggtggcaccctgaggtctctgagctcacctgaaccacatggtgc

SEQ ID NO: 22925 - DNA, 1357 bp, Homo sapiens
ccgggcagaagaggaggatctcccacctttccaagcaaggccaggaggtaaggtccgcagaggccaggccagcaggagccttttttttttttttttttaaagacgaggttggcctggtttggtggctcacgcctgtaatcccagcactttgggaggccaaggcgggtggatcacctgaggccaggagttcgagaccagcctggccagcatggcaaaaccccatctgtactaaaaatacaaaaattagctgggcatggtgatgggtgcctgtaataccagctactagagaggctgaggcaggagaatcgcttgaactcaggaggcagaggttacagtgagccaagattgcaccactgcactccagcctgggtgatagagcaagactctgtctcaaaaaaaaaaaattataaaaaaagggggtcttgctttgtcacccaggctggtcttccaactcctgacctcaagtgatcctcctgcctcggcttcccagcgttgggattacaggcgtgagccactgctcccagcttcatccctctgttttctgtttgtttgttttttggttgtttttttttttttttttttttttgagacggagtctcgctctgttacccaggctggagtgcagtggcacgatctctgctcactgcaacttccgcctcccgggcttaagtgattttcctgcttcagcctcccgagtacctgggattacaggtgcccaccaccacaccaggctaatttttgtatctttagtagagacggggtttcaccatgttggccagactggtctcgtgatctgcctacctcggcctcccaaaatgctgggattacaagcatgaggcactgcgcccagaggtgggcagatcacgaggtcaggagttcgagaccagcctggccaacatggtgaaaccccgtctctactaaagatacaaaatattagctgggcgcggtggcacgcacctgtaatcccagctactcgggaggctgaggcaggagaattgcttgaacccgggaggtggaggattcaatgagccaagatcgtgccattgcgctccagcctgggcgacaaggcaagactctgtctcaaaaagataaatacataaaatgagttatccattcataaacttctgatttctttgggacattgttcctgtaaatctgtgacgctttttgtaaagcatcagtgatttccccattcgttcttccacccaagttttaccataaatttgatgcttaacatttgcttcaattttagcagaactcctgttgctctgactggggctctgttctaactgatgtcttacttttttttagtgcctcaaactccgtctggttcagacatgttatgacaagttagtat

SEQ ID NO: 22926 - DNA, 1031 bp, Homo sapiens
gggcagctgtcacttggagttgcagggagtggaggggtgacgtggggcgggcccgggtgtcactcagagttgcaggggggtggggcgagtgtttccaaacacaggattactgggctgggttttggaggatgaataggagtttgcctgtggctggaagtgggattagggctgtgggctctggggatggagacagctcgaggaaagcctgggatgttctcctgctctgggcttggggctgcttgggagcttgccgccgatggggctcactgttgatatgctgtctcatctgtccccagcctgggagcgctcctgcggttgggcagtctgcgattctcagctttctggagtctcttcctgttcccacagagactcatgtctggagagtcggtgtgctgcaggtgtggaggggcccgtgcctctgggtcagtgtttccttccccttcccactttccttccttcctcagatctctgcagacacctgccctgggccagctccgtcgacgctggggtgctcagaagagcctggcagggggcagggccaggaaggtggcagagagcgtgtgcttgggggtgtgggcctggcgtgcactccaggcgtatccccgccctgtggcttcccagcctgtccatttgtcctggcgacaggtccatccccaccctgttaacggtcacgggtcacagtccatttttctgagacccctccctcctcctctcacagtggctcagaggccctcagagaccaaaagggagccagcactgcctcaggagcaggccctagggagacaggatctggaagccatggaagtgggcctgcgcagtcctgagttggccaccgccccgtgcaccacggccgaggaggtggagtgaggtgagggctccaccatgccttccacctctgtatcccaggcactatgccaggcactgctgcttctgcagggaggacttcggagggctgcctggaggaagtggactttggggaagtggatgagacagagagggagggccctgccctttgtgccctgcaggctgcg

SEQ ID NO: 22927 - DNA, 1049 bp, Homo sapiens
ccaggattgagagtggacagaggttcaggtgaaaagccctcagctagccctggagcacctgtggggccatgctctgtgctggacacgcgctgcatggtgaccctgtgagctatttgctgccggtggggaaacggaggcttatcgaggaacgtgttttgcccatactaccacctggccagggcagggctggagcctccagggcctctgggagaaggagagggcatctgatgagggcaccaaggcaggcagggttgggaggcttggcggagctgcgacgggaacaggaaggtggctggtgctcctgggccctgggtcacaggctcagcgggtcattggcgaccttgagcagcactgctgaaggactcaggtttccttctgggctcttatccctggacctgctcagccattttatttaatgaattaatttttgagacagggtctcactttatcacccaggctggagtgcagtggtgcgatcacagcttactgcagcctcgacctcctggactcaagggatccacctggctcagcctcctgactagctgagaccacaggcatgtgacatcacacctcgctaatgtttaaaatttttgccgagacggggtctcactttgttgcccatgctggtcttgagctcctggactcaagcgatcctctctcctcagcctcctgaagtgctgggatgacaggcgtgaagcaccgcgctgggctgcacagccatttcagagccggctggacctgcccagggtggcttggagggatggtccagcagcccttacggcgggcaccgtgtagccctgggacgcagggatgtgcatccccggcctagaggggcacgttctatcccagccttgtgagttgggaatgagcgttactatccccccagtggccgctctctgctgcctgggccttggctgcagcctggtggtaggtgaggggcctcggttgtctatgtggagtgggcagggctagatcccaccttcctcccatctgacctcagaacccaggcctctgcccactgccccgcactccctgtggtgtctcaggga

SEQ ID NO: 22928 - DNA, 1618 bp, Homo sapiens
cgcccacactgccctcccgcgttgtccccacccaccgcatcctcagggcgctgcgtctcggccaggtagcgcggagcagctgggtggctgtgcacctgggggcccggctggctaggagcagcgcgctctgggcccccacaagttcaccccaccctcctccctgcgagtggattgtgtgcgaggcagggcctggcatttcgcagaggcgcttcgcccagcgcagcgtgggtgggtagcccgtgcaccccctgccccgccacccacgtgcgcatgtgcgcgcctcagtctccaagcgcggggcggggctggcaggcacccaggccggagaggcgaccctggcccgggccccctggccccggcgggagtgggaccacgtgagcggggccggctggggctgcggatgtccccgccgccgccgccgagctacgtgcggcagctgtgttcccagcggctgcgcgcccctgccccggtcgccccccccaccccggcaacctgctcctccttgcaaagtggaactgggggagagggagtggagaccagccccgccgccctgaaaggggaagtgaaccaactgactgtccggcacccagccgtgggatgttcccccttccctcctgccgcctccccgcctgtgccttgcaagatggcgacacggcggcatgttccctggaggggcgcgagccccaatcccgtggtctgctccagccgcgctcccacagccagaccccgtccccagactgaggcccttgggagctgtcagggcccagtggttgagatgggagtggggtcccttccagggctgctctgcgcctcttgcttgggttgtagacggcccccagctggggcggacccgcgaccccagctgcatcctgggttgcttgggggagacttggggtgtggagcaggcagccccagggatttgaggctactgttggtcttggtgacagctggtctctccccctctccagctgcctggattcacaacctcttggggaggggggctgctggtctctgtctgcagtcttgttttgctgagggtgtcggggtgtggcagggaggaaggatgagatgagaagggaaggttttttcttccagctcttcttgggtcacgggtgatcgctggtgcccctcagtgggcagacccctccaccctcccgtgcccctcctcagctgggctccccagggcagcccctgatcttagagcagagatgtcactcggtcaccctgagcatggccgtgcccctcccgccgtctctgtacccctcaccatggtccctgctgtgggtccttctaggcccctggctggctgcagttcttcatggaccggtgggagtgctcccagggccagagcaacctccagtgctgggcgtgggctgcccagtttgtaacccaccgggtgactaccctcctggccctgctgtggcttccttgagaataggctttggggccactcaggggagttggttctgacgtctcttttgctactcagggctccaaccagtgccacgaggggcatgcacatccggtctccatccacacaacccaccctggggtgtcacgggaataacgtcccggaatgccagggtccagggtacctggtgcagggcccgaaagggtg

SEQ ID NO: 22929 - DNA, 1037 bp, Homo sapiens
cctttagtgagtggcaggtcatggtcctgctctcatagagtttctggtttggaggtggggggagatctggccaaacgtgtgaaaaatacaagctgtggaaagagcgtgtaaggggtcctgtcccagctttgaggactctgagagcgttggcagtgaggtgcaaagggtggttgggttgggcaaggctgtctagtgaggttggggaagggagttcctggcagaggagcagaggcaggaaggggcaatttggcttgtcttgagggagccaggagtggcagggtgtgagatgagtgagtctggagaggtcggcctgagccggaatgcggacctggcaggctgtggggagggctttgatctctatccagggaataatgggaggcccccaggacaccccaagagggaagcggctccattgcatttgtgtcgtgaaagattgtttggctgctgggggagaatgtcctggagcaggtgatcagcaaggagggaggctgttgctgtggctctggtgaaaggtgatggaggcagggaccgggcggtggctgatgggagacaggcagagccaccgggctggtgatggaccggctcagatccagtgggtggaaggaggtgtcaaggataacatctttgtttctggcctggatagtggggccctggccacctcggtgtgccccttcgtctccggggtctccaggggcctgctgctgtccactgggctctcaggacccagctgcatgatgccacctaaactgcagggccctccaagtccccagcaccagcggggcagcaccggtagggcctggacctctttgagaatatgttgaaaagctgacatcaacctcgacgctgtggatgttgggcctgatcattctttggggtgggtctgtcctgggcactgcagggtgctaagcagcctccacccagtccccagtggtgacacccaaaactgtgtccagacattgacaggtgtctccaggagggagactcgcctccatctgagaagcagaaccagcctgacagtccacctcccggctgaaaag

SEQ ID NO: 22930 - DNA, 1030 bp, Homo sapiens
atcccacttcgcgagcgtctgtgaacccgccccaccagcgtctgtgcccctgctgagtgtctgtgacccccctatgctgtgtgtgctctcagccccctgggaggccatcgtgtgggcaggccctggggactgtacatggacagcacagagtggcgtcttgagcctgggagccgtggagttctccccaccccatacagacctggccaaacgcgggttcatagccggctcttggggaggcaccagcagcctttctctgctcaccgcaccctcctgcctgtggcgatatcgaagatctgagccactgagtgggccccataggcagcctgagcttcacacggggcagaacccccagcgtcctcacagccaccgctttcccagctggggccacccctgctgcctcctaacgctcctcccacgctcctgctgttcctgggcctccatgcccttccccatggacgtggcggctcagatgaccccacagggcttccctgggccttgcgttcctgatgggaccacgctcctctctcttctctcactcagtgggggctgttcggccatttggtcctcgtctgtctccctcagtgaggccaggccctgtgcctgtagctgactccctgggaaagcttgtgctgatgagggaatgcgtgagcaggagagtgatagagagtagacgagtgtgaatgaatgagtgaataatgagactaagtggatgagtgcatgtgggaatgaacgaatgtgtgtgtgtgtgaatgggtgagtgaatgagtgtgcgatgaatgagaaagtgaatgaatgcatgtgtcataaatgagcaagtgaatgcatgcccacgggaatgaatcagtggatcaatgaatgcatgtgtggatgaatgaatgagtgcatgtgtatgagttgagtgaatgtacatggaaattagttaatgaatgaatatgtgaatgaatgagtgaatgaacgcctgtgtgaatgaatgcatgtgaatgagcgagtgaatgcatgcatgaatgaacgtatgtgtgaatgcatgtgt

SEQ ID NO: 22931 - DNA, 1040 bp, Homo sapiens
tgatcagacggctgcctgcatccctgagagttgctgaatttagggagttgtggggcagaaagagcggtggcttcacccacagagtccagggttcgagacccggccgatccacccacagagtccagggttcgagccccagccgatccacccactagctctgtggcgtgagacactgctgtagaatcagtcataatcatctgagccacgatctcacccagggcgatctaatcttaacccaaagggacactgggtgatgtctgggcacatctgtggttgtcataacttgggggagctcctggcagggaggggcggcggccagggatgccgctcagcaccttgcagtgcccctgacggccccaccccagagaacgatccaaccccgatgtccacagagccaggggttagaggcctggttttctgggccctggttttctcatctgtaaagtggagacagggtttttgtcccaggcagatgaaaagttcaagttcctagttgggtgttaaccctggtggcaggaagtgacgatggtggctaagggccccaggatgggctggggaagttcaggcctttctggtcactgcagcgtgggtgggactcaagtcctcctgccacctgtgcccaggctgccctgagcagtgtcccccagccggtcctcaccaggggctcccttgtgacaaaccattgaccctggaccttcttatggtgcagactctgtcgtcactgcgttcacagtgggcaccgtgttgtgttgtgttgtgtttttgagacagagtcttgctctctcacccaggctggagtacagaggcccgaccttggctcactgcaacctctgcctcccaggttcaagcgattctcctgcctcagcctcccaagtagccggaatttcaggcatgcaccatcacgcctggctaatttttgtatttttagtagagacagggtttcatcatgttggtcaggctggtcttgaactcctgacctcgtgatccgcccgcctcagcctctcaaagtgctgggattacaggcgtgggccaccgcgcca

SEQ ID NO: 22932 - DNA, 1065 bp, Homo sapiens
tagctgggaatacaagcgcccgccaccacatccggctaattttttgtatttttagtagagacagggtttcaccatgttagccaggatggtctcaatcttctgacctcatgatctgtctgcctcggcctcccaaagtgctgggattacaggtgtgagccactgcgtccggcctgtcattgctgttcttttcattcctaatgttcagttttctcctgattcactgcctcccatgaaacactcactccccgttgcctccccagcccctggcaccatgtattctactttgtgtctttgtgaatctgatggctctagggacctcctaggagtggaaccacacggaatgtatccttctgtgtctggctgctgttattacacctcatgtccttaaggtgcatccacatcgcagcctctgtcaggattcccttccttttcacagcagaatcatattttgttgtacagatggaccatgctgtgtgtccactcatccatcgctgctcccaccttctggctgttgtgaattgtgctgctatcaacattgttgttaaacaaataactgttggagtccctgccttcagtacttttgtttttttttatttttttgttttggaaacagagtcttgttctgttacccaggctagagtacagtggagccaagggctcaccacaacctccgcctcccaggttcaagcagttcttctgcctcagcctcctgagtagctgggattacaggcacatgccacctcgccccactaatttttgtatttttagtagagatggggttttgccaggttggccagactgatgtggaactcctgaccccgggtgatctgcctgcctcggcctcccaaagtgctgggattgcaggagtgagcccatttgttctgaatatacacccgggagtgtgattgctgggtcctgtggtaatgccacgtttgaggttttgaggagctgccagactgtcttccccagtgctgcactttgtttcccgcctgctgccgtgcaggaggccctgtttcttcacctgtcgtcatcgtgctgacagcagccattctttttttttgagat

SEQ ID NO: 22933 - DNA, 1033 bp, Homo sapiens
ctgttagatgggagggctcccgctggggaatttgagcagtcgcagggcacagccgtgaggagctgggctgtaggctgtgttcccagcacaccctcgttccctgtgtgactttcctctccagccttcctcccactgtgggacccaggaccctggggcaggaaggccacaagggaagagggctctctctggagggcaggcctgagtcaggggcacagtgaggctggcttccatgccatccaagatgctggtctgtggcccctgggactggtgtgcagccacagcgtcgggctggagggcatctcctctctgtggaggaggcggctgggaggggcgagagcagggatgaggcgcagaaagcccgcgcaggctgaagcccgctgccccgcagatgtcacacaccaagccctacatcaggaagaaggctgtgctgatcatgtacaaggtgttcctgaagtaccccgagtcgctgcgccctgcctttccccggctgaaggagaagctggaggaccccgaccccggtttgtggatttgagttaagcctcagggttgagggtgggggctcagccggtgccctgggaagaggtggtggcgtgttttggggggtgctgcggggagtggtgaagggctcagtccaggaacatgcctgttggaggtggctgggcctccccttgctggggcagccaggagggaggtgctggtggtgggggcagtaagatccaatgtggcagctggcggtgagtctggcgtgtccctgagcagaggtgtacccacccccgccagcccctcttaggaccagtgccaccaggaggcaccttccacagggcaggggatggtctagaccatatgtcccgtgcaggagctgcctccacctagtgtagctgttgtgtatttgtggtgtggtgactgcgggacgcggctgcagattcagtttcactgagtttccctgggctggtgtgtgaagcctctggcgtgtggcaggcgtgggtcggtggaccccaaagccagcccacaggaatcccaaggccctgtgtgc

SEQ ID NO: 22934 - DNA, 1049 bp, Homo sapiens
ggcaacagagcgagactttgtctccaagaaaaaaaaaaaaacacatacatattccaaactgggaatttcctcatggaattttgaagaaatctgcgttggttttcaaatgcgggttggttcccacttgctggtggccccagcgtccaggctgcagggtgttgcttctgggctggcgctgcctggtgtggtcgctgcagagcagagctggagctcctggaggctgcgggtgtcctgcctctgatgtgctcatctgttctctcccagcgaattggctacctcgctgcttcccagagctttcacgaaggcaccgacgtcatcatgctgaccaccaatcagatccgtaaggtgggtgttcccgggccggggccgctctgtgctgagtgcagtctgcccttgccggagcgtctggttcccacacgcgtcttcctgtgggcagcaggtgcctgtggcccccttgagtgcgagcggggcttccggagccacagtcctcccagcagacgcagagaggaggcccggcgggtctgagcctgcgctccctggtgggcttgtgaggtggagggatgctgagtggtgcggtgcccccttccctcgctcaccacctggaggggccggcgaatggggctccagggtccactcgcagctggcctctgcggtcacccactttcttcccttctcccctcatggtagtgcctggtgtagctgtgggcccttccctgcccatgtggggtgcttcctgcccgcggctttttttgagtcccacgaggtgcatttttcagcaccatgtaaatgttgcattttgaaatggtcacggaggccactgggtagtagtaaaggtccttattggccccgagctctgaacacctttggttcccgcctctcaatagaggggttggggtgttggagaatcaggcccacccttttcatgggcagctggcccctttctggccccagaccgcacgtcagaggccacggtcccggctctccaatgtccatgtgcaagggcgggaccctgtggctgtgttgtcgaccccacagtgtgacctgaagtc

SEQ ID NO: 22935 - DNA, 1031 bp, Homo sapiens
tcagggtggccgcggccgctctgctcctgggtgcagagggcgttgagcctgtccacaacaagagaataaagcaggacggtgtcccgggctgttgaaagagcagagcgctccgcaggagaagctcctttcatgctgcttctggggttctggggtttggtggcttttctgtttgaattcgaagtgatggtgattgtggatagtaacttatcctgggcaggatggaccacttcgccggcgcgtcccctttcctgactcagttactgttgggacttggaattctttttttttttttttgagacggagtttcactcttgttgcccaggctgaagtgcaatggcgcgatctcggctcaccgcaacgtctgcctcccgggtgcaagcgattctcttgcctcagcctcccgagtagctgggattacaggtgcgagccaccaccccggctaattttgtatttttagcggagatggggtttctccacgttggtcagactggtctcgaactcccaacctcaggcgatgcacccgcctcggcctcccaaagtgctgggattacaggcgtgagccaccgcacctggccgaggcagcactttcatttatttccttttttattttttttttgaggcagtcttgctctgttgcccaggctggagtgcagtggtgcgatcgcggccccctacagcattgacttcctgggcttaatcaatcctcttacctcaaccttgcaagtagctgtgactacacgatgtgccaccacgcccagctaattttttattttttgatttttttgaaacagggcttcaaaaacctcctctctacacaaaaatacaaaaattaggcaggcttggcctggcacggtggctcacgcctgtaatcccagcactttgagaggccaaggtgggcggatcacaaggtcaggagatcgagaccatcctggctaacacggcgaaatcccgtctctactaaaaatacaaaaaattagccaggcatggtcgcgggcgcctgtagtcccagctacttgggaggctgaggcagg

SEQ ID NO: 22936 - DNA, 2042 bp, Homo sapiens
cagcctgagcggggacggcggccgggagggcgcggcccgggttcccgttccccgcggagccatgcggtacaacgagaaggagctgcaggctctgtcccggcagccggccgagatggcggccgagctgggcatgaggggccccaagaagggcagcggtgagcgggacccgggagaccgagacagtgccaggggcgggaggccggggccggggtctgggcgggggtgccggaggccggagtccgggtcggggcgccggggacgggaggccggggtccgggcgggggctgcctgcgcccctgagtgcgcgctgtgcccgcagtgctgaagcggcggctggtgaagctggtggtgaatttcctcttctactttcggacagacgaggccgaggtaggggcgtcccgggcgcgcgggcgggtcccaggctgggcccctcggaggccgggtgctcactgccccgtcccggcgcccgtgtctcctccagcccgtcggagccctgctgctggagcgctgcagagtcgtccgggaagagcccggcaccttctccatcagtgagtggggctagggaagccagcggcgcttcccgcagcccggggcacccgcagcgccgcactttcccctccccgggcgcccaaggtctcctctgtgtccccagcctggcgccaccctcctcaaacacaagagtgcattgtccacgggcagctcaaggtcaagttctcctggcgggcaccacccttcccacctgccgagtccacttaagcttgggtccctcccagactctgctctttgttccctgtgggcccaggctgtacttacagggcaggtgggccagccccacccaaagcgtttccccagctgccaagagtagcatgggtctagcattgttatatggccccgggctggaaatcccaggtgggggtaggaggagtgagaggggggtgttctcctgggtcttaagagattcccttctgcggggaaagatggagtccctgctagtttgcccagagtggctgtcaaaattccacaggccaggtggcttaaatatcagaaacattctctacagttctggaggccagaaatcctagatgaaggtgtgggtggggccgaatccttctgaggccgaggggaatctcccagttcctagtggtggccagtatcctccaggttccttggcttgtggaagcgtcaccttgtcctccttgcatcacgtctgtgcccacatttccccttctacacagacgccaagcagaatttagggcccaccctgacaacccctttttacttcactttattattttatttgcttattttttgagacagggtcttggtatgtcgcccaggctggagtgcagtggtgcaatctcggctccctgtaacttccccctctcgggttcaagtgattctcctgcctcagcctcccgagtagctggtactacaggcacgcgccaccatgcccagctaatttttgtatttttagtagagacggggtttcgccatattggccaggctgctctcgaactcctgacctcaggtgatcctcccacctcggcctcccaaagtgctgggattacggtcttgagccaccgtacccggccctctttatttttgagacaggatcttttgtttccgaggctggagtgcagtggcgtgatcacagctcactgcagcctcaacccccttggctcaagcagtcctcccacttctgactccggagtggctgggcctacaaggccccaccaccacacctggctaatttttgtttttgtagagatggggattttgccatgtcacccaggctggtctcgaactcctgagctcaagcaatcctcccaccttggcctctcaaagcgctgggattataggcatgagccaccgcacctggcgacaacctcattttgactagtttatatgcaaagaccctgtttatatacagggccatactcatgggttctggggggtcaggacatgaacacatctttgtgggggccagagaagggacagtttatgggcaatggcaagaggaagctgcttgtggctgtgggtag

SEQ ID NO: 22937 - DNA, 1334 bp, Homo sapiens
tccctctcaaaaaaaaaaataaataaataacaacaataacagccatgaatagtcccaccatctagaagtagcccctgaccactagctgccaagcttatttcttttcttgaggcagagtctcgctcttgttgcccaggccagagtgcagtgggatgatctcggctcactgcaacctccacctcctgggttcaagtgattctcctgcctcagcctcccgagtagctggaactacaggcataagccacaacgcccggctaatttttgtatttttagtagagatgggggcttcaccacgtcggccaggctggtctccaactcctgacctcagatgatccacccgccttggcctcctaaagtgctgggattacagatgtgagccacctggcctggcctcaacattcttttcaagataaaaagctaactattgtgaatcgcccatttatatagagaataaatagtataataatagatactataaatacctattattctatttttattgtcagatataaagaacaaatataatgaatatataggaagaaaagactatgcaagacaccgatctcacaacactcctagaagacaggcattgctatgcttcccactttacatatggggatcagagtcccagagaggttaaggcacttgcctggggtcacacagtagttgaagcaggatttgaactcagaagtctgattgaagaacttgggctgggtaggttcccattgcaggttatttaccaccttccttttaactactgtgtgtgaatgggcatttacactgtcattgatattttgtattgattagtaataatggcatctaactttgagagttactattgaaatctgatgccatttttttttttttttttttgaggtggagtctcactctgttgcccgggctggagtgcagtgacatgatctcggctcactgtgacctccgcctcctgggctcaagcaattctcctgcctcagcctccggagtagctagaattaccagcacccgccaccatgcctggctaaattcttgtagttttttagtagagacagggtttcgccatgttggccaggccagtcttgaactgcctacctcaggtgatctgcctgcctcggcctcccaaaatgcatgccactgcacccgcccttcgttttttgagatagggtcttgctgtgtcgcccaggatggagtgcagctgtgtgatcacagtttactgcagcctagacacctggcctcaagagatcctcccagttcagctgcccaaggagctgggaccacaggcacctgccactctgcctgacaaattttttttttaaatttttgtagagacggggtct

SEQ ID NO: 22938 - DNA, 1047 bp, Homo sapiens
gtccccgtccgcgcggactccgtttcccgtggtgccccgggcggcccgcttccggcgcagttagttacgagtcggcgcacgcggcctcggtccggttgactttgcggagccatggagggcggcttcggctccgatttcgggggctccggcagcgggaagctggacccagggctcataatggagcaggtgaaagtgcagatcgccgtggccaacgcgcaggagctgctgcaggtgcggggctggccggggacgggcgctgggggcgacagggccacccctgggggccgacgtcgcggctaaagcctcgcgtgtctccacagaggatgacggacaagtgtttccggaagtgtatagggaaacctgggggctccctggacaactccgagcaggtgagacccgcggaggttcggggcaagggtcgcgagggcctagattcgaggggggaggtgtctgcgcgtgcgcagactaacggggaggtgcgacggagtggtcactgcacgtgcgtagtctgcagcccgggcgtcctggagccggggtcagggcggtccccggggccgcgaagtcccgagctgagccgtgcgcccctccgctcccgcagaagtgcatcgccatgtgcatggaccgctacatggacgcctggaacaccgtgtctcgcgcctacaactcgcggctgcagcgggaacgagccaacatgtgaccggcgagcgcgggccaccccaccctgttcatttccataaacgtgctttgagaggcggggtccgcatgtacgtactgcctgcccggggcttaggagggtggcaccggtgctgggacacacgggactgtgtcctcgccaccccccgccctgccccctgccagccagtgcagcttggatctcgggggtgtggggccctgtgccttcctgaagtgctggcagcccagtggcacctccttcaggcctttggggtattcccctagtgtgcccaagtcagcctcatattctgggcggacagcttgtctggacttcggagttgggggtggtcagacaccacaggagctgtcacctcc

SEQ ID NO: 22939 - DNA, 1051 bp, Homo sapiens
ccaagcgctggtgcctgtcacttgctggactcctgacagtgcagggcagatgatgagggcacgtgtgcctttgcctgggcgcgtggggccgcgtcgtctgcaggacgggaaggtctggggctcggaggcctcggtgaccttgtctttgggcttgcctgacgccccctgaggtgctccctgtggccccatggaccttgcccctccccactcacttgccctcttgactttcagcgccaagaagagggagggcgagcttacggtggcccagggccgtgtgaaggacctggagtccctgttccaccggagcgaggtggagctggcagctgccctcagcgacaagcgcggcctggagagtgacgtggctgagctgcgggcccagctggccaaggtaggtgccaggagccacgggacgccccagcagggtatatgcaacagacagattgtcacaccagctcgctgtcctgtgtctcccaggccgaggacggtcatgcagtggccaaaaagcagctggagaaggagacgctgatgcgtgtggacctggagaaccgctgccagagcctgcaggaggagctggacttccggaagagtgtgttcgaggaggtgagtgagtggcctggcctccagcctggcacagcggaaacgcaaagtccaccctcatggctgtggagggcggaagcctgagggcaccgtgtggccggggtccctcccacggctctagggaggctccttcctgcctcttagggtgcccttggcttcggctgcgtctccccagtgtctgcctctgtcttcccgcggctgcctcccctgtgtccatactctgtgtatcctacaaggacacttgtcattggatttggggcctgcctggatcatccagagtgacctaatggcatctgcagagaccccatttccaaataaggtccattcacagctgctggggatcgggatgtgggcacgtctttttttgagatggagtttcactctgtcacccatgctggagtgcggtggcacgatcttggctcactgcaacctccgcctcccaggttcaagcaat

SEQ ID NO: 22940 - DNA, 1080 bp, Homo sapiens
ttctggttctgaaaccgagagtgtgaaaaatgcatctaatggccaggcatcgtgtcgctatgacagcggccaaggggctgcatgtccaggtgtggctggtcctccggggaaggggacaggctccatccagctgctgtgctggtccaggcccagggcctttggtctccagcactgggcgccgctgttctgggagctggagctcgtggagagacgatcattccagagggggccgcagcagaggaggaggctcctgggatggctgggacccagggtcgcctggcttcctcctggttaccggaccctccccgacagggggctccctttgctgtgtctgtgagatgggcaacacagggtgtcccagtgtccccaggctgccatcctctctctctgcgtgccagtccctgggaatctgagcagggccagtggccgggccccctgactgctgtagtccaaggggaagggtccctctcgcttcaccctgtcctgggtctccccaggtgagtggcatcaaggcgctgtacgagtcggagctggccgatgcccggagagtcctggatgagacggctcgagagcgtgcccggctgcagatagagattgggaagctgagggcagagttggacgaggtcaacaagaggtgagtggtcacggctgggcacgacgtcaccctgatcctggcaccacggggtggacgggggcaggtgggcgctgggctcgtgcggggcatgctctgatacgggcacagcctggagctcacagctcccatcctctctcccccaccagtggctgccacgtcactttttctgttctgaggaaagtgatagatgctcacatcggacagcaggaagcgcagggcagcttaagctcacaagtaaaatctcccgcgagcctccccagagagggcttcctggtcagcctggcctgtctccttagtgtgcacacgcgcttgcacatgcttacctagaccccgggcggcacccagtggacaccgtgagacgcgtttgacctcaggccccatcgtaggcatttccctgtggttggatgttcttggtgccggggttttgtcccagctgttgggacgct

SEQ ID NO: 22941 - DNA, 1042 bp, Homo sapiens
tctacaatgaacaaactattaattcaagtcaggtgtcgtttagtgacagggataccttgtggaaagcgtgtcgttaggagacgtgccccttgtgtgggcatggtagagtgcactcccacactcccggatggtggaagccaccacacacccaggcttgggcgtggcctcctaggccacagacccacaccgcccgctcctctgtggaatgctgtgggcaccggttacacaatggtaagtatgtgagcatttaaacacgagaaagggctgggtgcggtggctcccgcctataatcccagtactttgggaggctggggcaggcagattgcttgagtccaggagtttgagaccagcctgggcaacatagcaagaccccatctcttaaaaaaaaagttagaaactaattaggcaggcatagtagtatgtgtgcctatagtcccagctattggggcagctgagacaggaggattgcttgagcccagagtttgaggctgcagtgagctgtgattgcggcattgctctccaggctgggtgtggctctgtctcaaaataagtaaataaacacaagaaaggtgcagtaagaatatggtattagattctttttctttttattttttgaagtggagtctggctgtcgccaggctggagtgcaatggcccaatcttggctcacagcaacccctgcctcctgggttcaagcaattttcctgcctcagcctcctgagtagctggtattacaggtgcacgccaccatgcccggctaatttttttgtatttttagtagagacagggtttcaccgtgttaacaaggatggtcttgatctcctaacctcgtaatccgcccacctcagcctcccaaagtgctgggatgacaggggtgagcccccatgccaggtttgcattagagtcttacaggaccgccgtgcacatggtctgggggtgctcagcatgcctctgtgcgtgtggctgccattgcagagttgctgttttttctcaccttgaacgggctcctgtgtgtcccggcgctgatcttgtctttgttggaa

SEQ ID NO: 22942 - DNA, 1095 bp, Homo sapiens
gggtgtagacctggcgttgaaggccactcctagctctgagagctgggaccccttgagagaagtagttaccaggctggggcttggcagaatcagggttggaggtgatgatcttggaggcgctgcctgctgcccaggaccctccgagactggacaccttatctgattcttctccctgtgttgtggatggggaaactgaaaccgtatgcatttattaccccatcccaggatttggttcctccacccataataggtgactgagttcaaagagccaagtgtgacctgtgtacagtgggtgtgacccacctgcccactgtgtggcaaccatgtcatccctggaagtttgcattccgtggcttttcctctgttacttttttgactccgtgcccaagcccagcagcttctgaatccaaagccttgctatgccacaatacctactatatttcagaaaattctggaagtttccagaagcttctggaagattccagaacattctacaagtcacctttcacttcttgtatatctcgctccccccaggttttacttcctcaatgtagcatgtgccctgagatggaagtgaccacagtcacacccactctcttgtttcttgctgtgacagtgttggcgtcggccaccgccacctcctcttccactcagggccacagtggaaggtctggatgcctggtgttctgttttcctaaggctgctgaaccctaactaacatccacacagaggccactggtggtcagcacaggtggcagggttagaaaggttgggactggctttgtcctttgagtcagagggacagtcacactcatgtttgtgtgaccatatgcatgtggctatggtcagtcctatagattatggcagcggttatcactctctgtcactgtggaccttggggccagatcgttctctgaggtggggccatcctgggcactgtagggtgctgagcagcgtccctggcctccacccactctatgccagggacaccccgagttgtgacaaccaaagatgtccccagacattgcccagtgccccatggggggcagaatcacccccaggtgagacccccgggggttaggggattccacagat

SEQ ID NO: 22943 - DNA, 1047 bp, Homo sapiens
aacctctgactccctggttcaagcaattctcctgcctcagccttctgagtagctgggactacagaagcctaccaccacgcccggctaatttttgtatttctagtagagacaggtttcactgtgttggccaggatggtcttggtctcctgatcttgcgatccgcctgcgtcggcctcccaaagtgctgggattataagcatgagccaccgcgcccgggcttatatttttaaagcgtaagctttgtggcatgtaaattatatctcaataaaactgtttagggaaacacacgctgatacccatcttccccccacgccctcctgaattgggatctcgggggcgggagtgggtttctgtcttcagggctctcagttctaggatagcagctggggtttttaccgtcctaccagctgggacccatgcctcagatagaagccccattgcctatgaaatgagaaggtatcacatgagtattccaaaatacaggcctccacttgggctctttccaaaagcaatagcgaaagggacagtttccgtccccgggccggtgagctgtattaactgttctgctcccggggtcgccatccaggcagtgacagccaccgtcgccaggcacaggccaggccaggccctgccgcccccacctccatcccccttagtggatgtagatatgattgtttgcgactagcgaaccccctatagatgcagatgcctcctgagccggcatctgtgttgagtcctggctgcccagaagagccaagtgtgacgccccctcgggtctgtgtggacaccaggccggtgttttcctctctccctgacaccccctccggtctgtgtggacaccgggccggtgttttcctctctccctgtaggaaacgagcagatgaaagtggaaaactttgaagctgccgtgcatttctacggaaaagccatcgagctcaacccagccaacgccgtctatttctgcaacaggtaccagctcagggcctgcccagggcaggggcggccgggtgcgggggcgtcctccgggatgcttagcagggacctgag

SEQ ID NO: 22944 - DNA, 1071 bp, Homo sapiens
cgcagggcgccaagcgctgggctgacagcttccgggttattttttccccgacccctgacagcagccacaatggagctccccattttacagacatggaggcggaggctcaggccgaacaacccgtccgagctcacaggctttgcaggccacgatccgggaaccgcctggcctctccctcacaacccggctggcttaaaacaaccaagattgatttccctcgcagttctggaggccagaagtctgagatgaaggtgcaggctgggccacgttccctctgaaggccccaagggaggctccgtcctgcctcttccagctgctgggggccagcgagcctcacctctcttcgtgtggccacatggcctcagcctctgcctccgtcttcacgcggccgtctccgtgcggccatgttcaatccctgcattagggccaccacagcgacctcatctccacttgtttccatctgcaaagacacagacaaggtcccgtgctcaggtcccaggtggacgtgactagcccagaacttggctgctccagcggcgggggcgggggcggctgcttctccacgcagcttgttacatctgaatgtttagagtcaccatcgccagccttcgggggaaatggaggcacagtgaggccaagccttcctgagctggcgcctcaaggcagccggccagcctgccccgggggaagctcacgtcggggcttcctgctcagagccgtgaaggtcactgtggccgaggcccctccaagttggcccaggcacccaggaaacctgtgtgaaaggtcttgtactaaaaaaagacctgtccatagactacagctccagattccagaacagcctctcctgatgtcaccatctggcaccctttagagctttggcaggaaactgcagggaccacagacatgagcagaagcagctgtcaagtcctgggaatgaggaacaagacagggtatccgaggggggaccaggcggatgtccgagggggaaccaggagggtttctgagagggaaccaggagggtgtccgagggggcatccaggagggtatccgggggggaaccaggcgggtgtc

SEQ ID NO: 22945 - DNA, 1058 bp, Homo sapiens
agctcaagcgattgtccctcctcaccctcctaagtagccgggactacaggtgtgtaccaccatggctggttaatttattgtattttattttttttgtagagacgggatctcactatgcagcccaggctggtcgccaactcctggccctaagcaatcctcgcacctgagcctctcaaagtactgggattgcaggcatgagccaccagccttagcttaatgatgttttcagatttttcagtgtttccccaccctcatacctgccgtttctcagtaattctttgtaagtctctggcagaggccgtcattgcgctttgctccctgttgggaaggtactcacggcattgagtgtactgcactttttcatactgttggtcacctctcacaaggacataagctctgtgtggctcagttccccaggctgtcagcctcacccctcttcctgcgcacatgggggaggcggtgcctttgctgaagtgggatgtgtggaatgttttaggactgcgtgatctttgaggaagtggctgtgaacttcaccccagaagagtgggcattgctggatcatgctcagaggagcctctacagagatgtgatgctggagacctgcaggaaccttgcctccttgggtaagggtggtgtcattccctcactgcctccttgggtaagggtggcgtcattccctcactgcctccttgggtaagggtggcgtcattccctcactgcctccttgggtaagggtggcgtcattccctcactgcctccttgggtaagggtggcgtcattccctcactgcctccttgggtaagggtggcgtcattccctcactgcctccttgggtaaggatggcgtcattccctcactgcctccttgggtaagggtggcatcattccctcactgcgtcctggagagcaaagagaccttggttttctttttttttttttttatttttttgagacggagtcttgctctctcgcccaagctggagtgcagtggcacgatctcggctcactgcaagctccgcctcccgggttcatgccattctcctgcctcagcctcctgaa

SEQ ID NO: 22946 - DNA, 1013 bp, Homo sapiens
ggctgaggggggagaatcgcttgagcccacgagtttgaggctgtaccactccactccagcctgggcaacagagctagaccctgtctggaaaaaaaaaaaaaaaaaaaaagagccgggcgcggtggctcacacctgtaatcctagcactttgagtggctgaggtgggcggatcacaaggtcaggaattcaagaccaccctgattgacatggggaaaccccgtctctactaaaaatatcaaaattagccaggtgtgatggcaagtgcctgcaatcccagctacttgggagtctgaggcaggagaatcgcttgaaccggggaggcggaggttgcagcgagctgagattgtttcactgcactccagcctgggagacggagcaagaccctgtctcaaaaaaaaaaaaaagaataaatgctttttgccttttttttcttgtccttagtgagggcagtcattgtcttggatgtgttctttgccttctgccactgcctggtgttataccatggcttagcccgagaaggctgctgtggaaaactctcaaactcggaagacgttgcatcttccattaggatgaggggaaaggcgcacacacagccccatgccatattgtgaggtgggcgaaggtgtggattgaaaacattcatgaaactagcactgacttaggcagggtgcagagtttgtgacagtgggggaccctgctccgtctcctgttagtatctgcgcatcagacagatgcgcattctgtaatatacgacccacagtacagagaagcggcaattccgattaggggactgacgaacaatttatcatgaggataatcattaactgatacctgttttctgcatgagaccctaatcattaactgatacctgttttctgcatgggaccctttgtgggacagaaaaacttctagatcttctagaatccaccactcacccctttgtcctttaacacgggctgaaagtggtgatttggctgtgttcttacttatttttattttttttttgagacagt

SEQ ID NO: 22947 - DNA, 1086 bp, Homo sapiens
gctaatttttgcatttttagtagagatgggttttcgccatgttggccaggctggtcatgaacttctgacctcagatgatccgcccgcctcggcctcccacagtgttgggattacaggcctgagccacagagcccggccaaggcctggtctttcatagtcttgctctgtgaccttgaggggacactgcctcagcttccatcatctgcttaaggggagtgattgtccttgcctggctgttcccttctctgtccctcctccctcctctctccctcctccctgtgctgttgtgcgctcagagcagataatggatgtgcagccctagggttctgtgtaattctgattaatattaatgattcgacatgcagttgtctgctgtgttcccagtcctgggccagctgcctttctctaggggggtgctgaagagggagaatgttggactccacccccgcaacccctgatggtgctgggcaccccccaatatccaaaggggctcgtaggctgacatggtggctcacacctgtagtcccagcactttgggaggccgaggcgggcagatcacttgaggttggcagtttgagaccagcctggccaatacggtgaaacgccgtctttactaaaaatacaaaaattacccgggcgtactagcaggtacctgtaatcccagctactttggaggctgaggcaggagaatcccttgaacctgggaggcagaggctgcagtgagctgagactgcaacattgcactccagcctgggtgacacagtgagactctgtctcaaaaaaaaaaaaagattatccagcgtgatggtgcatgcctgtagtctcagcttctggtgctgaggcaggaggatctcttgagccctggaggtcaaggctgcagtgagccatgattgtgccactgcactccagcctgggtgacggagtgagaccctgtctcaacacaaaacaaagaggggctcgtgaccccatctcttccctctttacccccagattttctccctgggccactgccctaaccaggactggctggcggtcggaatggagagtagcaacgtggagatcctgcacgtccgcaagccggagaaa

SEQ ID NO: 22948 - DNA, 1031 bp, Homo sapiens
ggatcaggaggaatcactgcctctcctctcccccgacccccttccagcaccagcagcaggtcttgggagccattgagagggccaagcaggtcaccgctcccgagctgaactctatcatccgagtatgtatggggacctgggcgggtgggcgggggacaggtgggccccaggcagctaatgttcccctcccccgccctgcagcagcagctccaagcccaccagctgtcccagctgcaggccctggccctgcccttgaccccactacccgtggggctgcagccgccttcgctgccggcggtcagcgcaggcaccggcctcctctcgctgtccgcgctgggttcccaggcccacctctccaaggaagacaagaacgggcacgatggtgacacccaccaggaggatgatggcgagaagtcggattagcagggggccgggacagggaggttgggaggggggacagaggggagacagaggcacggagagaaaggaatgtttagcacaagacacagcggagctcgggattggctaaactcccatagtatttatggtggccgccggcgggggccccagcccagcttgcaggccacctctagctttcttcctaccccattcccggcttccctcctcctcccctgcagcctggttaggtggatacctgccctgacatgtgaggcaagctaaggcctggagggtcagatgggagaccaggtcccaagggagcaagacctcgcgaagcgcagcagccccggcccttcccccgttttgaacatgtgtaaccgacagtctgcctgggccacagccctctcaccctggtactgcatgcacgcaatgctagctgcccctttcccgtcctgggcaccccgagtctcccccgaccccgggtcccaggtatgctcccacctccacctgccccactcaccacctctgctagttccagacacctccacgcccacctggtcctctcccatcgcccacaaaagggggggcacgagggacgagcttagctgagctgggaggagcagggtgagggt

SEQ ID NO: 22949 - DNA, 1055 bp, Homo sapiens
gaagtctgtaaataccttggtgaccaatgcccacttcccctcctgggtcacctctgatggctgctgtccactgagaacgtgggcagtgtccaaattcctgtactgtaaagactaaaaggcgtttgctctgagactgacaaggcggaaacttccatgtgtctcctgccaggctctgtccccctacgccatcccgacacgtccccgttcccccgaaacctggctcagtgcaatactcccattgccatggggtccttcaccatggtactgtctccacagccctcagtccccaccccaggagaggcgcctgccacctcctcctcatctccggtggttcaatcgctccgcctgtccccaacccagtcccatttttatggccaaactgattctgaaacaaaatgaaactgcaaacctcgtgtgtcttaactccccccagggatgccactccattcctccgccccgtggtctggtgcgtgacaatccaaagcgccgagacgagggtgctgtgtccctcaaacccagagtggtgggcgcctctgaaaccatacagccactcctggccccaaacactggtttgcatcccaggttcctcgcccacctacccccgccacaccccgtctttttagagatctctctaataaatcgggtaataagcatccgcctgtttgcctttctgtgggttccggaggtctggttgggagtctgaggagtgactttgttctgtgttttttgttttctgtttttgtttgtttgtttgttttctttttaagagatggagtctcgctctccacccaggctggagtgcagtggcgcaatctcagctcactgcaagctccgtctcctgggttcacaccattctcctgcctcagcctcctgagtagctgggactacaggcgcccgccaccacgcccagctaattttttatttttagtagaggcagggtttcaccatgttagccaggatggtctcgatctcctgacctcgtgatccgcccacctcggcctcccaaagtgctgggattacaggtgtgagccaccgcacccagcctgtgttttgtt

SEQ ID NO: 22950 - DNA, 1062 bp, Homo sapiens
gcgctgaggcctcggctcccctgggagcctgggagaccacacggtttagtcaaaatccagatccccaagctctcaaggaggtccccctgggacgccacatgggccccacgtagctgtgagatcctcagggcctgctgttgtcattatgaccaataagcaaggggcccagagagcctaagagacctgcccagcaccgcacagccagaacggggcgcagacccaaagcaggagtgtcccctcgagacaaagcctccgccgaggccgccgtgactccccgcccatcagcaaacctctccgagcacctctgtgtgccaggcactgtggagtgaccccaagaggtggagaccacttccccggctgctctaggcagctccgtcccacggagccagcgggaagccagccaccgcgaagccgtgccccggagatcgtccaggagctgcccagaggggcctgctgggaggaggagcactggagagacccagcggccctgctggccaccccaccataggcagggagcagttcgcagaggccgcctacggaggggggtgcttggactttgaaaaacacctgacttgaaggggcagacgtggggagggtggtctcggcagcaggcacagcagaagcggaagtgtgggggccagaagggaggcagggcagccattgaaagcaccccaaggcctgagtgctgaagaggctgtgcccttggttctggtcttcctggggtcacccggttctgggtcccagctgctactgccccccacttcccctgtctgcccagctgctggctgagggtgtccctctctgtccccccaactcctgcaggacaaggaagccacctgtcctgccctttcttttttttcattttttgagacggagtcttgctctgtcgcccaggctggagtgcaatggcatgatctcagctcactgcaacctccaccccccaggtacaagcaattatcctgcctcagcctcctgagtagctgagattacaggcgcctgccaccatgcctggctaattttgagttttttgtttgtttgttttttgagacagagtctcgttct

SEQ ID NO: 22951 - DNA, 1024 bp, Homo sapiens
tatctctgcaggcggcgcacacagtcgtctggacaggatggcaggtgagacccaacccccttccttccctgggtctcaccagctcctcctgcacagctcccagctccgtttcccgccccccagcccctctgctctctgcccattctctcctggggacagatttaagattgtagcactcggccctagcaccgcacacaatcttccagccactttgtttttcttacagccagagccagggcagctctggtctgtggatccttccttatttcttcttctattaagttttttttttaacttaaaacaagatacaagagggaatatcgtgaaatgcgccccctcctgcccacggcctgtcccctccccaggagcaaccactgggactgtgggttttgtctcttggaagatactttctgggaacacagcagacgtgcaccaggcttgtggttcccttttattttgacacaaatgggcacacccgtgcacgccgcccacaccttgctgttgtcactcgactgacggggatctcaggggtgggtgcgcgccgttcctgtcacgcctgcgtgccgtccttccatcccatggactgcacctggctttaagtgcccagccctcggggacatttgcgaggtccctggggtctcactcttgtgaacactggggcagtggcgcggtgttgcttttcttaaccgtgttttaatcgctgccgcctggtgaaagaaaccccttggtgccctgggtgggatgtgaccctccctgcagtctagcgtgccatttggagagacatgttacatggccaggcccggcggccgggacactgagtcacttgtgtcagggcctcggctgccaggtgcaggcactgcctggagggtgggcagggtctgtggcacccacaccggtcggggctgccatttgctcatatgcccccagagcccgctacaccccaggccctgctggcaccacagtcaccaagggacccaggtggacagtccccgggctgggagtgacagccagaaagaacagaccc

SEQ ID NO: 22952 - DNA, 1054 bp, Homo sapiens
cctcctgccaccgtggacaggcagcagtgatttgtgtctcggagggacactccggctgcttggggtgtcccctgctccgggtgacctgaggacagcggcccagggcttggcggggtcccctggcctcccagggagggcgccagccccaggagagacccgccttcgctctgcgctgctgcgcctgtgtctgggaggctggagggcgtcctgccgtggcggggaaggcggaggagccgcgtgggctctgtgtttcctgtggatatttgtggctcgtggctgtgggcagaaaaaggcaggcagatggctgggctgggcgacagcagtggcctggacagatctccctccagcctcagagtccaccccacacggctctctcaccctgcaccatcactcccagccaggccatggcagaagcagcgcatgcaggaggaaggaccctcgctgttctgagctgccaaggttggcagggctgttgctgactccgcaaaatccagcctgtgttgaccgacgtgtgataactgatggcgccgttccctggcccgagagcacctcgggcagtgcagggcgggggtggtgacttgagcccaaggagggactggggcattcccaggccctgggcctgatgtgacctcatgtttccggcgtcctctggtccccaaacatattcacagatcagagtgtgtgtggcgctggggacccaactcacgcctcaagcccctggctcttccagcattttccaaaggtggttcccctcacttgttggggtgtttttttaaacactcttgctctgttgcccaggttggagggcagtggcgctgtcacagctcacagcagccttgacctcctgggctcaagtgatcctcccacctcagcctcccaagtagctgggaccacagatgggcatcaccatgcctgtttttgttttctttcttttttttttttagtacagatgaggcctcgctctgttgcccaggctggtcttgaactcctgggctcaaatgatcctcctcagcctcccaaggtgttgggattacagagtgctgggtgagccgcc

SEQ ID NO: 22953 - DNA, 1051 bp, Homo sapiens
ggccccactgtttgctgtccttgccgggcggccgggcagcatgttctgtggctcagcctggctgcaacgcctgcccggctctgagtccctgaaacctcgggcagagcctgggctctcggccctggtgagggagaggggttatggaccccaccaccacctcgggcagtggatgggacactctgaggctggcctggctcacaccgtgttggtaggaagcctgacccccactctgttcccacccccacctagggcctgttttttcaaaagtaaccgttttactgagatgtgattcatatactgtacaattcagcctttaaagtgtgcagtaaatgacttttagtacatatgcagagttgtgcagccgtcacctctaattccagaacattgcatcagctcaaatagcaactctgtccctgttagcagtcacccccatcccgactcccagccctggcacccacatccctttcctgcgtctgtggatcagcctgtcctggacgtgtcatagaagtggaatcacacactgtgtggctttctgtgtctggcgtctctcactgagtgtagcgtcctcagggttcattcgcactggggcccgtgtcagagccttgctcctgttcatggctgagtcgtgttctggtgcgtggggcgcccgtgctgcacttgtcctttgctgcgtcatggacgctcgggtgcttcacactcctggccattgtgaattgtgctgctgaggacacgtgtgtgtgagtctgtgtggatacatgtgttcgtttgtctcgggcagacacccaggagtggaattgccaagtcacgtgtaactcggtgtcatcttttgagaaactcgcaaactgttctccatagcagcggtaccgttttcacacccagcaacagtgaatgaggcccagcgtccccgtgtcctcaccagcactcgtgattgttgtctctgattctggcgtcctcatgggtgtgaggtggtgtctcttcgaggtgtctttttgtttgttttggtagagacaggggtttcaccatgttgcccaggctggtcttgaactcccag

SEQ ID NO: 22954 - DNA, 1035 bp, Homo sapiens
actgtggtataccagcccctgctttagacagtctttgtaggaccttatgagttccatataatcagcgagactcctgtctttttacctgtgccgaagttgtctaggagaaagttctagaattgaagttgctgccaagggcacacacattagaaatgctgccaggctgccccctaggggagaatctattgacacgggcatcacccccagccgtgtgaggaccccctgagtccccaacccattgctggcaggctggtttcatatcatgtcttttatcattagaggggtctgggcgtctttttcagatgttcacactgtttgttttcttttcctctgcctgttttacaagttgagtgagttaatgctttgagaaaagcctcatttctataaataaaaatgacaaaatatgtatttcagacggcaccaaaggatggaagttgcaaattaagagaccctcccccatcccacacccagaaataacttggaaccttctaagattcacgtgtctggccctgactgctgagtgacgtgtctacagtggtggaagccatgtggcactaagagcttgagttctcctggtgggtcacagggaaccagatcctggtgctcagagggagagagccgcccggggctttgctgcctgggccctacgtgccgggtgaccttcagcaggtggtggtcccgctctgggtgcgtctgtggtgggattcgtggattatgcaacaaaccactgccacactgagaggcttcacgctgcagtgcttttgctgtcagtttcccagtattggctgggcttggctgggctcagcaggtcggttctgctgcggcatctggcttgtgccagcacaccctggtggcctcctgtcccaggcctctctccgcattgctgccaccctccagcctggccccagcatcgtactggagggattccaagagagcagaggctgatggaagaattccccccatgtcacttctgcatcatgtgattggccaaagcagggcttgagacccgcccactttcaaggggaaggaattcgg

SEQ ID NO: 22955 - DNA, 1021 bp, Homo sapiens
tttgccctctcgtccaggctggagtgcagtggcgcgatctcagctcaccgaaacctctgtcttccggtttcaagcaattctgctgcctcagcctcccaagtagctgggattacaggcgcccgccaccacacccggctaatttttgtatttttagtagagacagggtttcaccatgttggccaggtgggtctcgaactcctgaccttgtgatccagccacctcagcctcccaaagtgctggggttacaggcatgagccactgcgccaggcctgtttgtggtagttcctttgtgaagctgctgcagacacttcaggcgcacactgagccctggctccaggggaaacccaaggtcgggttcctgtgagcctctgggcatgatgtttccatcagccagtcgatacgtgaccttgttgtatgttcgtttttatttcaaggcgtgttattttagggctgggtgcggtggctcacacctgtaatcccagcactttgggaggctgaggtgggagaataactggattactgagcccaggagtttgaggctgcagtgagccgtgattgcaccactgcactccagcctgggcgacagagtgagatcctaagaaaattttaaagacacccgtgttgttgatttatccacagggagctcacagaccataggccgcgtgcgccaagccccccccaccccccagccccatcccgggcactctcccaggcccccgcccatttgcaggctgtgttggggacaaggctggaagggggaccgggggcatgtattcggctgtgtgggggctcaaaaacggggtggggggccatggcgacgtgggtgtgggtccccctcccccggcccaccagctcggtgtgtctctcgctctcgttctccccccactctcctctctctctctctctttccgctctcagtcctgtttgagcaaagcttctctcactacgggtttctccatggggctcatccgggtctctagccctgagggacacgaaaccacctgaggacaatgcctggggg

SEQ ID NO: 22956 - DNA, 1016 bp, Homo sapiens
ctctatgcttctgtaacccagaaaggtggtacgtgtattcagatgcactctgattggtttaaatcaggcctggtgaggccaagagagcaggaggtgactgctattgaaaagctcttgtgttacagttcccgaggctttggttggaagggacgggccaggcggggtagatgggctgggtgtgcctaggatgggctggtttgactcccgactgtttgcggctcttggctgttggggtggtccctgttctgggagctggccctggggtgattcagggcagggaacctgggcgtggcgcgtgagagtttgatcaggtgcgtgggctcgcggttggttgctctgcacgtcacagtgtgctcgcaggcgggccgtttgcaacgtttaggaatccgcttaccctggaaggggccgtcatccccagattagcgaggcccccaagatgtcgtaaaatccagaaaacaaaacgcagcatcagcactgtaccagaccgggcgctccgtgttccggcagcggaggacgcgtccatctctcccatcctcagcagccatatgggtgcaaggcgacttcttccctcactgcgtcattgcagcgtatattcgtcttcttgtgactcagagaaaaagtccttgtggctcttcgcagcatttcctctttgttttcttggaactgcgtttccacaaggggagcagagaccactagaggcgaagggactcgccacacaggagctccctcccactcctcccgacggtcacctgtgtttctatcaagagctggaaaatggagtgtccccaccagggagacggggtcaccaccgaggctggctctgagctgcctcagctcctgcaagctccgtggccccgacctccaccctccccggcccattttccttgcacagttccttcttgtaagcacacacgtcaggttgaactctgacctcattttctgggacctgtatgattgtgtctttcccagtctacagttatctgtcaccattttgttgattcgtaggagctctttat

SEQ ID NO: 22957 - DNA, 1004 bp, Homo sapiens
gctgcatccctgcccctgccccacttccacggctgatctggcagcaaatgatggcagcttcaccttcagaactggcccagaacccactgactccttccctgtcctctgcctctcccgggtccagcttggtcctcccgggtccagcttggtcctccctggtccagctcggtcctccccggtccagctcggtcctcctcggtccagctcggtcctcctccgtacagctcggtcctcctccgtctggctgagtactccccggtccagctcagtcctcctccgtctggctcagtcctcctctgtctggctcggtcctccccggtccagctcggtcctcctccgtccggcccagtcctcctccatccggctcggtcctctatccggcttggtcctcctccatctggctcggtcctcccgggtccagctcggtcctccccggtccagcttagtcctcctccatccggctcagtcctccccagtccagcttggtcctcctctgtccggctcggttctccttcgtccggctcagtcctccttcgtctggctcggtcctccttggtcctcctcggtccagctcggtcctccttggtccagctcggtcctccccggtccagctcagtcctcctttgtccagctcggtcctcctcggtccagctcgatcctcctccgtccagctcagtcctcctcggtccagctcagtcctcctttgccccctgagccaggcctggcgcccctgctcttcctctgctccctgtcccacattccaggaggaccccattaaaaaccagcggcccgagtcccgaccctcctctgctcgcagccctccatggctcccacctcccttggggtcaaagacatagtcctctttgaagcccatcaggccctgcacagcctgccccgggccctccctgccctccctgccctcccctccgcactctgccctccctgccctcccgtctgcactctgctgtaggcccatgggccccttgctgttcctccagcatgca

SEQ ID NO: 22958 - DNA, 1679 bp, Homo sapiens
ttgtgggttgcagggttccagaaggctgagctgcactggaataaagcttgcgggttttctctgtccctcaggcattaaaagctgtgaccccaaaggccctcttatgatgtatatttccaaaatggtgccaacctccgacaaaggtcggttctacgcctttggacgagtcttctcggggctggtctccactggcctgaaggtcaggatcatggggcccaactatacccctgggaagaaggaggacctctacctgaagccaatccagaggtgagcagctgggtgatgtgcaggccccttggcactgttgcgggccctgccctgctccaagtcttgggctcctcagtcgggagctagaagtaaggagcatagaaggaatatagggtgatacttgtgccagccacaacttttgttcttagcccagtgagggcatttctggagaagctccaagccccagggcacagcacacccctgctcatctgtgtccctgggcacaggtgggtggcggccgtcgacccatacccagggaggagggcagtgattctgaagaggatgtttcctgacagccccgacgcagcagtcagggccttgtggaagccaccagtctgccctgggacctggcaggagggccaccaactccgggagggacctgccctggccctccagggtccagcacaaccatccctgcggcctgctgccgccttctgcttcttccagaacaatcttgatgatgggccgctacgtggagcccatcgaggatgtgccttgtgggaacattgtgggcctcgtgggcgtggaccagttcctggtgaagacgggcaccatcaccaccttcgagcacgcgcacaacatgcgggtgatgaagttcagcgtcagccctgttgtcagagtggccgtggaggccaagaacccggctgacctgcccaagctggtggaggggctgaagcggctggccaagtccgaccccatggtgcaggtgggcacggagtgcacctgctgggagcagacaccctgaggggggacggcttgtgtcctgagttgtggctgtgtgggttgctgtggttggtggattggggtgactggtcatgaaaggaggggttcttggctgtggctgtaaatggagactcctgcccaggcagccaccaccctctcctaggctgctctgcgcgtgttcactgtagcttgtgggacttaacatttcttcaggagtttgtgctggtcccagtttcccagcaccttccctgaaatcttgttctggcggggtccctagctaaagggaagctgggagcctggtcccgcctgttccgagccgcctacccctttggtgctgacccgcatccctttcagtgcatcatcgaggagtcgggagagcatatcatcgcgggcgccggcgagctgcacctggagatctgcctgaaggacctggaggaggaccacgcctgcatccccatcaaggtgaggcgccagtgaccagccttccccacgccccaccccggacacctgccctctgctttaaagctgagctgagctaggctctgcagacgcctagacttgatctcggtcttggtctcagcttcttaagttcctcaagtttcttctttgcagtcttccacaggcatgtggggctgtttttgttgttgttgttgttttttttgagatagtctcgctgtgtcatccaggct

SEQ ID NO: 22959 - DNA, 1070 bp, Homo sapiens
ggcaccccgccgatgcgactattggccctcggccctgtgggctccggccggtagcctgtcggctgactgggcccgtctccttgtggggcagatgcgagatgggaggaggcacagctcctaactgaggtggagtcagggctcctctcttaagatctggactgcatagccagagccttgggacctctcctgcattgagggggttgaataacttgtggctttggcggttcagtgcttgtaagtcagaacttgggtccttgtctgagtcagagtgggctttttcctctgctccaccacgaggtttcctccagctcccgatccgctcagctggctgggcccgtggtaggcaggccaggcctgctcctgctcccgtgctgcgtccccctgcgctgacctgagtcttccaagcaggaagcagtgccaggcttcctcctgctgttcccaaatgggctttcttgtttcttggtggggaatgtaggtgtttgatgcgatcatgaatttcaagaaagaggagacagcaaaactgatagagaaactggacatcaaactggacagcgaggacaaggacaaagaaggcaaacccctgctgaaggtgcggcctgggcccagccctcggggtggagggaacacaggctgctgtttccggatgctctgacagcccaggcctgggggctgaagtcctcagctgggcagggacagctgctgcccctttcgctttagactctgggtgctgctggagacacatcccagcagccagccccatccgggacaggtgtgggtgagggccttggcaggagtgtgcatggcctttgccgccttccagaagggactgtgctttggagaacgttagtcctgactttggcttccttggcttcaagagaggaagcgtgtacggggtggggccatcctgggctccccaggtgtctcatgcaccgctctctgcccccgcaggctgtgatgcgccgctggctgcctgccggagacgccttgttgcagatgatcaccatccacctgccctcccctgtgacggcccagaagtaccgctgcgagctcctgtacgaggggcccccgga

SEQ ID NO: 22960 - DNA, 3168 bp, Homo sapiens
cgccataaccttgcccagacctggttggagctgggttgttagcggggatgggggtggggaatgatgatgtggcaggcgtagtaatggcgggcaccgcggtggaagcggggagacagggaggcgccttatgtaacccgcgggccgcgagtttgagatcgattttctgccgggggactaggggcggcagggaatggcagaacgagcaaagcgacacctgaaaggctccccttttccttccaaataccttctcctgatgctgttaatcgtcgaccttaggcacttgtccttcctatgactcccagatgtacaaagactcttattgagacacgaggtgtaggcttgtggcagttagggccgttccggctccccgttatttcctggggtgggtggccttgtctgatcccgtttgccaaggggtgaccttgcattttatgatgaagcttcttgctcggggaagtttgggtggcccggtgacaacgtggagggggctttaggagaggattcatcccttacgtgtttggccccaaatgagactttagtatttgtacctggtatcaaggaaatctgttgacactcagttttattcctgagcacttttatttctgggttgtcaatcatgaatgacacctattaacggtggttccttggagattgcggggtggctcttaaggggtgttaggctggcaagattcggtgggcttggggcaccccagcaccaaccccctcctggccttgggcatgctggttcgtttggactgaacgctccgtgccatgctgtgttcctggaaatcacgagctggtctgagcctccttgtcttgcccaggtgaacttcacggtagaccagatccgcgccatcatggacaagaaggccaacatccgcaacatgtctgtcatcgcccacgtggaccatggcaagtccacgctgacagactccctggtgtgcaaggcgggcatcatcgcctcggcccgggccggggagacacgcttcactgatacccggaaggacgagcaggagcgttgcatcaccatcaagtcaacgtgagctccctgtgccctctgtacccaggcagggaggtgctggcctggcagctggaggccactgggccagggtgcgcggggagagacttggcaacgtctctttcccctggtttcttaattcatgggagaatgagtgaggttcagtccagcgagacaggatggagaggcacagggattcggggtactgcgagctggaaggttttcttgaggagggggcttaactccgtggttctccctccctgggggacttgcccccactcctacaatatctggagaggtttggctgtcacacctgggaggggagggtgttctagtgcttgggacgctgggaagctcctgtgttgcactggatgatgttcattccatgtcagtttctggccccgatatgagtagggggagcgcagagtacggtgaccccaactgctttttgtcctgggttggtacattggtgagggactctggctaaggctcttcatttcccctggagcaggggcagaagtgaggaggggagggtcggagtctctggaggcttttgccgtcctgctgggtcttttagttgctactttgagtcaggtgtgatgaatcttgggaccaagtcggtggggcaggatgtctggtcaggagggctctgaggatctggctatggggctggtaccaggagttccctgtcatgggggtggcatgtctcggacagaggcaaaggacaagggtgggttggctcttgtgggagcctctccagggatgagtcatggagggaggagcagcctggcttctgacagcatcccagactccctgggccaggtgtgtggctcctgtccccctgacgagtccctccctccatcagtgccatctccctcttctacgagctctcggagaatgacttgaacttcatcaagcagagcaaggacggtgccggcttcctcatcaacctcattgactcccccgggcatgtcgacttctcctcggaggtgactgctgccctccgagtcaccgatggcgcattggtggtggtggactgcgtgtcaggtaagcagtgggtccccctgaggcacggcctggaaccgggggccatccttgcttgaggatgacagcgccgccctgtcccccgtgtccccaggcgtgtgcgtgcagacggagacagtgctgcggcaggccattgccgagcgcatcaagcctgtgctgatgatgaacaagatggaccgcgccctgctggagctgcagctggagcccgaggagctctaccagactttccagcgcatcgtggagaacgtgaacgtcatcatctccacctacggcgagggcgagagcggccccatgggcaacatcatggtacggccctccctagctgggtggtgggcttgccgcagcgggatctgcaggagccggtggggagtggagttgagctgagggggactggaagtgtgtttttgccaggaatgttgggtgacagagaagggggctggaatgttttcatccgacttgacccagcccttgatctttgggcagctggaagagacgagctcagggaacgctgccctgggtggtggaggggctggcccccctattcgtgatgactgatcatttcttcactttgaccagatgtctactgaagaaagcctgcgtctgaggcccatgcccaaggcgcccagcccgtagcttcaggctctgcgcaggggccctcacggctgcttctcgtttctcacacttccagatcgatcctgtcctcggtaccgtgggctttgggtctggcctccacgggtgggccttcaccctgaagcagtttgccgagatgtatgtggccaagttcgccgccaagggggagggccagttggggcctgccgagcgggccaagaaagtagaggacatgatgaagaagctgtggggtgacaggtgagccccgcgggatatggtgggggattcctgacacctgggggtagtggcagcgacgtaggggcgtggtgtgctattcacagcgtggctcaagcccaccaggtcttgcccaagcatgtccccttggcgaccaccctccccaagtcatcccctggagaccctaacttgatttggcttggcctctccttgccaggtactttgacccagccaacggcaagttcagcaagtcagccaccagc

SEQ ID NO: 22961 - DNA, 1109 bp, Homo sapiens
acaccccagtgtcacagggcgagctgttctggagagaaaaccatctgtcgtggctgagcggggagcttgaacacccaggccagggacacccctccccagctcccagagaggccccctgaggggtgagccctctttccaccttcccctatccatgcaccccctcgcaataaaaccaactctaaaatcacagctgtcgtcctagccagtgggggcgaccggacttggggggtggagccctctgggacttccgtaggaacaagggctgcggcccaccgcgacacttacacagacctcggggattgcactaaaccctcgttcctagctccgcactcagcttcgcctgtcctgcccgcccactttgccttaactacccgcccgtcctgggggccacagcctctgcatgggcccagagccgggacccccccagcccagccccgccctccccagactccgcgcaatcacatactgtatatagacgtgaatcgattttatttttattctttaaattaaggtcgtgataaagtgttgccaaagatacctgctgaattctcgcgtttcaggaaacaaacaaacaaaaaaaaatgatatttgaggagggtcgtgttgactccatatgaaaggacacagctcaaagcttttttgtttggttgtttggggttttttgtgttttctttttttggggtgttttttttttaactgcctggtacaaaaaaaaaaagagaaaaaaaaaaaagaaaaacaatgcgaaattgttatttccattctcatggtgaagttgcgtggacgcgtgtgtgcgtgtgtgcaagagagcgggagtgaggtccaggctggggttggggggcttcaggcgggggcgcccgggggccggggaggtggccgggccggagcccccgtctgcagtgccccccagcctgccgggcccaggagagagagagaagcatctttgctactagctgttgctgctacctgcctctgccccccgacgccccccgccttttgagattaaggaaaaaaaaaaaaagtcaaaaaagtttttaaaaatgaaaaaaaaaaattataaaccagtgaatgtaaaatgccggagcaggcccggcctggcatgggtgtgg

SEQ ID NO: 22962 - DNA, 1038 bp, Homo sapiens
atcaggctggtctcgaactcctggcctcaagtgatccgcccgcctcggcctcccaaagtgctgggatttcaggcctgagcctccgcgcctggcctagactttgtctcttaaaaagttaaaaaaggaaaggaaacggggttcagagaggcatagcgttttcccaaggccacacagcactcagggtccgaggccctctttagatgttcagaatgcgaaatcgcccccactcgtctcgtttttcgagggaccgtccccatcggggcaccgaaacctctggtgcacggtccgtgttctgcaagggtgatgatccagggcctgccgtgtccgtgagggtccctgggcggggatcgggggtccccggccccactgaccgtgcccgccccgtgccccgtccacaggcaggacaagctgaaggtgcacatgcggaagcacacgggcgagaagccgtacctgtgccagcagtgcggcgccgcctttgcccacaactacgacctgaagaaccacatgcgcgtgcacacgggcctgcgcccctaccagtgcgacagctgctgcaagaccttcgtccgctccgaccacctgcacagacacctcaagaaagacggctgcaacggcgtcccctcgcgccgcggccgcaagccccgcgtccggggcggggcgcccgaccccagcccgggggccaccgcgacccccggcgcccccgcccagcccagctcccccgacgcccggcgcaacggccaggagaagcactttaaggacgaggacgaggacgaggacgtggccagccccgacggcttgggccggttgaatgtagcgggcgccggtggaggaggtgacagcggaggtggccccggggccgccaccgacggtaacttcacagccggactcgcctaaaaaccaaaaagagaaaacagaaacccgagaaagagagagacagagagagagaaaaaaaatcacccaccacccccccaaaaacacaaaaaaagaaaatctatctatatacagatatctatatctatatatatatatacagatatatat

SEQ ID NO: 22963 - DNA, 1041 bp, Homo sapiens
gaggccatgaaaggcccagctcaggccctctccccaggggccttgcccaggggctctggcccgagagccaccggccggcctggaggaatgtgagctgtgctgggtgactcggggccgccaggggctcccaggagagggcggaggggtggggacaggggccagagggttgcacaagctccgagtgggtggatgagtcacagccgaggggaaggcggaaaaaagggagggggagaaaggggtgggacagacacagtccccccagggcccggcgctgcccgaaacctctgcccatttgacagatagggagactgaggcccagagagggccaaggccttggctggggctgaacagctcagctggggtggctgagagttggggaggggctgccaggcagtcctgtgggcaggcaggaggtggacaggggttcccccggctccctgctcctcctgggctgtagcccggtctctgttactcacagccagggctgagccctatgctgggggctctgaggggcaggaaggggtttagcctgcggagtcactggccctgtccggacggggcacacccacggtggccttgacctcagctgggtttcggcactgggtccccgtgcctgggctgccacaccccttcctgctgactcagagcccccctgaaaagaaccaggcctgaccaggaggcaggagtcagggttggggaggccaaggggtcggctcttaggtccactctgggtttgagtttggacgcaactgtgtcctcatggtggggcctcgggcaagtggcctcagctcacgacggagtgggtgctgccggtggggttcgggtggaactggcgggaagtaggtgttatgtgttgttgttattgtttttttttttttttttggagacgagtctcgctctgtcaccagactggagtgctgtggcgtgatctaggtggctcactgcagcctccacctcctggttcaagtgattctcctgcctcagcctcccgagtagctgggactataggcccgcgccaccaggcccagctaattttttgtt

SEQ ID NO: 22964 - DNA, 1049 bp, Homo sapiens
ccaagctgtcggtttggttggaaaccccagcaggtcccgagacacgccctgcactccccctgcgtccgcagcaggcccagcccagggcgggtggttctgtcacctctcctcgcccaacaaatcagaagtgaccaccagggcatgtgacactttcgggcctttgaactgttccgccgcagtgggctgcagatgaaacggtgagggcttgtcctggggtcttcggggttcccggaggcccatcgcctgcttctccggttgtccgagatccaaagcccagcctttctaccttcgggactgtgtgctcggatagaggaggccacctctgggctaggtgtggtgggcagctgggctgttctagggtccctctgagctctctaaagctcttgaggctgtgagcctcccccttcagtacttcctggagactaccagcaagctgatattatctgcgggcgaattgtaggggaagggtggctggcaactgtgtttctggaggaaacaaagcagaaggtgggggcttgtggttctgtgggaactgctggattgtccttttcttcttagggtgacccttctagtcttgtgtggctttttttttttttttttttctgcagacaccaaagaagagatgagttgacacctcctgcaaacagctccccaggctgctctcctttatgttttgccctaaagtctcacatgacttaaaaaaaaaaaaaaaaaagccaggcttggtggcttacacctgtaatctaaacacttcgggagtccgaggcaagaagatcacttgagcccaggagttcaagaccagcccgagcaacatagtaaaaccctatctctacaaaaaaaaaaaaaaaaaaaaaaaaaaattggccgggcatggtagtgcacaactgtagtcccagctactcaggaggctgaggcaggagaatcacctgagcctggggaggtggaggttgcagtgagccaagatctcaccatcacactccagcctgggcgacggagtgtggccccaaaaaataaaaaataggagaaaaaaaaaagtgttgaaggtgccg

SEQ ID NO: 22965 - DNA, 1028 bp, Homo sapiens
aaggtagattgataaaaactgagaatagaagcagcttccacctggccctggctcactggagctcccgtcctggcacctcctcctgggctgtctgagccctggccatacctgccctctcaccctgtgtgtctgcgtcttcagcctggagctggtggatggagtcacgtgtatgctttagaggtctcaaagcgtgttgggttttctagaactgccttcggcctttctctccaagcctagctgggcagaagtggccagagagcggcaacccgggcacccctgagtcccaggatttctcccccggctcctcccacccatgtgaatgaaagccatcccagggaaggctgggcttttgcaggagtcctggagcagcatggtggggaaatccaggctccccagccagcctctccaggctcctccagcccgccctctctagcctcagttccactttcctctctgctgagcacagaagagacgcacgccagacggtggcagtgggaacttggcctgtcacccctgctgtcctgggggtggcctggcaggtgtgtccggagcctctgcctctgaagaggcaccttgggtggctcccagtgcctggggttttggcatttgggggttttggtccccaggtttgttgccaggcagccttgggcaagacatggaatttctgtttcatcatttatgacatggatgtggggccacacccggggaccagcctacccatgatgactcgtttccaggccctccgcaggatgcccggcacagtggcgaggagaccacaggctgtggggaggggccgaggttaccgtcacctgggctggcgtcactgggatccctcctgcagtccatgcaccccctggcccctggtcctactcggcctggcctttctgccctaggtggcagggacaggcgcagggcagacgcccagcagtggagccgcagggcttggcgagggagccccctgggggtctggacgggcacacagcgacccgccgcctcctcccacgcggggcagcacccgcgtctcctcc

SEQ ID NO: 22966 - DNA, 1081 bp, Homo sapiens
tttccttctttttttgtggggggtagggggtacaaggtctctctctgtcacccaggttggagtgcagtggcatgatcctagctcactgcagcctccacctcttgggctcaaacgatcctcctgcctcaaccttccaggtagccgggactacaggtgcaccagcacgcttgagtagctttttaagtttgtttttttttttttttttttttttgagacggagtctagctctgtcgcccaggctggagtgcagtggcacaatcttggctcactgcaagctccacctcccaggttcacgccattctcccgcctcagcctcccgagtagctgggactacaggcgcccgccaccacagccggctaattttttgtatttttagtagagacggggtttcgctgtgttagccaggatggtctcgatctcctgacctcgtgatccgcctgcctctgcctcccaaaagtgctgggattacaggcgtgagccaccgcgcccggcaagtttttttgtagatatgggatggcactatgtttcccaggctaatcttgaactcctgggctcaaacgattctcccgcctcagcctcccaaagtgctgggattacaggggtgagccaccgtgcccagtgatgtatttatataaaatggcaagcacttgttggtgactggaacttaggaacagtggggctggctgcttccctggggtctgaacctattactggataactcggggcaagaacccagtggacagtggggcctcatgggatggggaaaggagagccagtggcttacggacctcgtagaggtgccccttggcctttctgggggtctcgtcctatctgctgaagaatgcccgtcttgttctactgtaatggaaactggacatgtccatcagtaagggagtgattaaagaatgatatttggctgctttgcagtggcaaagtgaaatccacaatggtgtactgaatgggagtatccccacagtacaacactattcatgtagtggaggggtggttgtagaaaataaacatagcatgggctgggtgcagtggctcacgtttgtaatcctagcactttgggaggccaagg

SEQ ID NO: 22967 - DNA, 1083 bp, Homo sapiens
cagtgagccaagatcacaccactgtactccagcctgggcgacagaatgagactttgtctcagaaaataataataataataaaaattaattaattaaaaagagccagacatgatggctcacacctgtgatcctagctactaggaaggctgaggtgggaggatcacttgaggacaggagttggaggctgcagtgagctgtaatcgtgccgctgcaccccagcttgggaggtagagcaggaccctgtctctaaataaatgaagtgagttcacctgttctttttaaacatgggtactagaagattttaatttgtgcgcatggtttacattccattgcttgtgcacagcaatgggttcctgtgtgcattgcgcttagttgtctgttactccaggatctggttctgagtcaaggcatttgtgaaaatagcttactgtcgaaatttcctctgaagattccttgaatcacccaataaagtgcaatgtacttgcttgtttaaattgttagaaattttttattgtgtagaaacaaggtcttgctctgtcacccaggctggagtacattgtcacgatcatggctcactgcagtctcgacctcctgggctcagcctcctgagtaactagaactacaggcatgagccactgtgctcggctataggtctcactttgttgcccaggctggtcatgcttattttttgttttttttgttttttggtttgttttgttttgagacagagcctccctctgctgcccaggctggagtgcagtggcaagatctcagttcactgcaatctccccctcccgggttcaagcagttctcgtgtctcagcctcccaagtagctgggactgcaaacgtgcaccaccgtgcctacctgatgcagcttttgtgctgagccttctgccctctactcttggttctcattctgtgctctgaggctgctcagaacgcttgttcctctatctcctgcaaagacagacatcttggcccgggctccgttcacccgatcccagcttcctcgtctcctcccgacatggtccggagctcgtgcgttaggaaggaggtctcccggccgcgtgcaatggctcacg

SEQ ID NO: 22968 - DNA, 1053 bp, Homo sapiens
atcggaatgaggggtgtccccaaggagagaacaggatgaggctccccaagcagtgagatcggggtgaggggtatctctaagaggagagaacacagtgtggggtccttgagtagtgaaatgagggtgaagagttcctaagaggaaaggacggagtaaaggttgccgtagtcatgagatgagggtgaggggagaccctgagtagggaaatcggggtgcagggcattcctgagaggagaggatggggtgtggggaggtcaggcagcccctgaggaggaaatctgggcaagggggctccagaggggagaggatggggtgaggggtccctgagtaatgagactgagatggggtagggtccctggtaggaaaagacggggtaagggtccctcaataatgagatagggccaagggaggtccctgtgggaaaagacagggcatggagtcactgagtagcagaatggtggtaggtctctgagtagtgaaatggggtgaacggtccctgaatagtgaaatcggggagatggtggggtccctgagtaatgagattggagtgaggggagatccctttgggaaaagatggggtttggaatccctaagtcgtgagatcaggccaaggagatgtccttgcagagagaagatggggtgcagggcccctgaattgtgagatggggttgagggggtccctgggaggagaggatgtgtcggtgggggcctgtgggggaaggataggcaaggggtgttctgcatattgaaatgatagtgaagcgagtcccttgggggagagatggggtgagggggtccctatgggggaaagatggggtgggagggttcctatgggggagagatggggtgagggggtccctatgggggagagatggggtgggagggtccctatgggggagagatggggtgagggggtccctatgggggagagatggggtgagggggtccctgtgggggagagatggggtgggagggtccctatgggggagagatggggtgggagggtccctatgggggagagatggggtgggagggtccctatgggggagagat

SEQ ID NO: 22969 - DNA, 1035 bp, Homo sapiens
gtcccgctctgtcatccaggctggagtacagtggggcaatctcggctcactgcaacctccgcctcccgggttcaggcaattattctgcctcagccatccaagtagctgcaactgcaggcgcccgccaccacacctggctaatatttgtatttttagtagagacggggtttcaccatattggccaggctggtgtcgaactcctgaccttgtgatctgcccgcctcagcctcccaaagtgctgggatgacaggcgtgagccaccacgcccggcccagtataacgattaaagtcaggaaaagtaaagtggacatcgccttctctaatcccgaatccagactcggcctgtcgcccccatgctccaattgttcctgtttctcctggtccgggatcccatgctgggtcttgtctctcgagccccttcgtctgtctgggacagtttcctgctttgttttctgtgctccgggcaccgagcagcatcccagcccgttattcatggaaggctactcgttccgtgtcgctgggtgctagttctggtcacctgtccaccccccacctccctgggagaacgtcaccctagaaacagtgcgagagtcacccatgggagctcacctggtcccatcctcccccttcctccctgacacaggcagtacgtccgagacacagtcgtgggcaccatgggcctgaaggccacgggccggctctgcaccgtggctaaggcaagggggctgcgagcctgcaggtgagccacccccacccatgccctgggctccaggggaggctgcgaggcccctgaggactctcctcagcttcctcattgcaggggagagctgagggacaccatcctagactgggaggactccctgcccgaccgggacctggcactcgccgatgaggccagcaggtctgaccccccacccccagggagcccatggtggggcggggcgggacgacagcagaaacacagccagctccagcatgggacagtggctgaggctcacaggcagtgaggggaggcttcctggagcaggtgggcca

SEQ ID NO: 22970 - DNA, 1050 bp, Homo sapiens
cattctctcaaagtgctgggattacaggcgtgagcctctgtgcttggccctgacctttttttagtttatttatgatggtgtttttttttgtttgtttgttttgttatttttgttttttttgtttttgagacggagtctcacaccattgcccaggctggaatgcagtggcgcaatctcacctcactgcaacctccgcctcctgggttcaagcaattctcctgcctcagcctcccaagtagctgggattacaggcatgtgccaccacgcccagctgatttttgtatctttagtagagatgaggttttgctgtgttgaccaggctggtctcgaactcctgacctcaggtggtgatcctcctgcctcagcctctcaaagggctgggattgcaggtgtgagctaccacgcccgggttgttatgattttttaaaattttacgtatttgagatgcagtcttgttctgtccccactcccaaggtggtgtgcagtggcacgatcttgtctcactgcaacctctgctgcccagttcaagcgattctcctgccccagcctcctgagtagctgggattacaggtgcctgccaccatgcccagctaatttttgtatttttagtagaaacggggtttcgccttgttggccaggctggttttgaactcctcaggtgatccgcccgccttggcctcccattgtgctgggattacaggcctgagccacgtgcccggccctgacctcttttttaaaacctcactttgtggggccactcttggttttcctaccaaagtgcttgacttgttaagccataaacatggaatgatcttttgtgtgtgtgtgtgtgtgtgtgtgtgtgtgtgtgtgtgtgtgtgtgtgtgtgacggagtcttgctctgtcccaggctggagtgcagcgggccgatctcaggtcactgcaacctccgcttcctgggtccaagtaattctcctgcctcagcctcctgagtagctgggaatacaggcgtgcgccaccacagctggccaatttttgtatttttagtggacacagggtttcatcatgtt

SEQ ID NO: 22971 - DNA, 1044 bp, Homo sapiens
gtgggcaccaacgatgcccgtggagggcggctcgggttggtagggggccctgggccccacccgctctgactcccccactccccaggcactttctacgctcgggagcggctgggggcggtgtacgggttcgtccgggaggccctgcagagcgactggctgccttttgagctgctggcctcgggagggcagaagctgtccgaggacgagaacctggccttgaacgagtgcgggctggtgagtgtcggcccgcaggagcaccgctgacccgatgcctctgcaggttctcctgggaccggcacagacacccccaggagggagcctccttgttctcagagcagggggcctgggcaggtccctgggtttgaatcctgctttcccacttactggcagcagggcctcgagcaagttcataactactccacgcctcagtttccccatcaaatgggagcggtgacgtgcgttagctagtgcagtaggtttaggcttaggtcctggagtcccggagggagagggcaggaggcctgggtgcgagccacagcctccaccagctgagatggcttccaggccggggcatccccgcgcccaggttgcccgctgagttccctgccgcggcaagggccgactctcggtctcagagtgacggcctacccctaccgcaggtgccctctgccctcctgaccttctcgtgggacatggctgtgctggaggacatcaaggccgcgggggccgagccggactccatcctgaaacccgagctcctgtcagccatcgagaagctcttgtgaaataaaagcagggttggcctcagccctgtgggtctgtctcatgctctccctgttcctctccccgccaccccagggcctccaagccacctctggaaatacttggctctgccccatgggcacgggaggggcgccagccgtggagctgtggaattgggccccgtggcagagcccccatcccttgggggctgtggggatgcgcccaagcccccgagggagaggcctggggacaccaacaaatctaagccctccctagctgctt

SEQ ID NO: 22972 - DNA, 1050 bp, Homo sapiens
cagcaggtcgcggcactcgagcagcccggcggccagcacgcgccggtcgaaggtgaagtccacctggtggaagctgacggccgtcatggccaggcagcgcgcccggtggcggaagcgccgcagcagcgccagctcctcaccgcccagctggtccccacgcagcagcagtcccagcttcagggccaccttgaccaggttcttgagcatcttctgggcctccttgcggctgcgcgtgaactccctggtggcgcggtacagctcatccagcacctcactgctggtgtcatccaccagcacggccaccactgccttggacgccatcttactcaggagcttcttctgcgcctgcagagccaggctcttggtgctgaaggtgtccatggcctgcgggggacacagaccagccctcagttttgcacgttggggcactcctcacacagaagaggtgacaacaccacagaccccagagggcctaacggaatttgtttctttaaaaagtgtcatgccggacgcagtggctcacgcctgtaatcccagcaatttgggatgcctaggcaggcggatcgcctgagatcgaggttaggagtgcgagaccagcctggcaaacatggtgaaacccatgtttctctctactaaaaatacaaaaattagccaggcttggtgatgggtgcccgcaatccccgctacttgggaggctgaggcaggagaatcccttgagcccgggaggcggaggttgcagtgagctaagaccatgccaccgcactgcagcctataattcaagcctgtggttcatgcctgtggtcccagtgctctgggaggctgaggcaggagaattgcgaggccaggagtttgagaccagcctgggcaacataacaagaccctatctctaaaaaaaaaaaatcaaaaattttattttgtatttattattatgattattattataaacaaacagagaaggcccttctgaaccccactatctgtagggtctgatgccagccctcaaacccatcatatccttgctatgagctgagaaggggctcaaggtgattg

SEQ ID NO: 22973 - DNA, 1099 bp, Homo sapiens
tgcattcctgtttctagaacagagtaggtgctcaataaatatccgtggaagctgggcgcggtggctcacgtctgtaatcccagcaatttgggaggctgaaatgggcggatcacctgaggtcaggagttcgagaccagcctgaccaacatggagaaacctcgtctctactaaaaatacaaaaattaaccaggcgtgacagcgcatgcctgtaatcccagctactcgggaggctgaggcacaagaatcgcttgaacccgggagggagaggttgtggtgggccgagatcgcgccattgcactccagtctgggcaacaggagcaaaactccatttcaaataataacaataataataataataataataataataataaatatctgtggaatgaataaagtcatcaccccaggaagcacattgtaaccacagcaccactctgactactattctgtggggcgggcaccttctggaggtctccactgctttattttctttcatctgatttttaatttttttcctgcagccccgccggtttccaaggatgcaactatgaagagacacagtgggggctacgattgggtcgtgactgtggcccacgccaggcgagcgtccccgccccagcccctctgccatctgcgtgcctgttctcccgctacctgcccccgcgccaggatccaggcttgcaaacgtccccatgccatgcgcaggcacatctcgggcggccagccaggcacacgctgcggggtgtcattagctgcagtgccgcctaaacgcggcggcccgtgcagaaccacggccaggccacctgcacgggccagggaggtgatggggacagcgagagacatgccaaaccccactggggggttgggaggggaggcgctttcatcctaaggtgacttccgtttttttttctaataaaaaaatattttaaacatggggataaatagagaaaaagacaaaatagaccccatcatagcaatgccaaagatgagacagatttatttattccataaatatctactgagaggatattgcgtgtctgcaccgattccggagctgagctagaccagggagcaaaataaaacaaaacggacccttaaa

SEQ ID NO: 22974 - DNA, 1096 bp, Homo sapiens
cctctgcccacagccctccatggaccccacctcccctggggtcaaagcccaagtcctcgtcacagcccacaaggtcctgcacaacctcccctgtcctctccccgccctcctcctcttcccccttcgccactccgctcctgcataaatacgtgactaaacttgagatctcactgaactgtgacaacaatgctggtgttcccgccaggccagacatcccactccagtcatctcggtcacatattcgcactccctgcactgtttatttgatattcttctttaattaatttatttatttatttagagacagagtctcgccctgtcacctaggctggagtgcaatggcgtgatctcagctcactgcaacctctgcctcctgggttcaagcgagtctcctgcctcatcctcctgagtagctgggattacaggcacctgccaccacacagctaattttttgtatttttagtagaaacggggtttcactatgttggccaggctggtctcgaactcctgaccttgtgatctgcccacctcggcctccccaagtactgggattacaggtgtgagccaccatgcccggcccttttttatttatttgttttagagatagagtctcactctcttgcccaggctgaagtgcagtggtgcgatcatagctcaatgcagcctccaactcctgggttgaggcgagcctcccatctcagcctccgagtagctgggactacaagcacacaccatcacgcccaactaatttttctttatttaatttttggtaaagacggggtctccctctgtcatcccagctgatccagaactccttggctggagtgatcctactgctttagccccccaaagtgcggggattgggatttttgcaaataagtagcttaggatataggcagggcgcggtggctcagcctgtaatcccagcactttggtgggccgaggtgggcagatcacctgaagtcaagagtttgagacaagcctggccaacatggtgaaacccggtctctactaaaaatacaaaaattaggccgggcacggtgggtcacgcctgtaatcccagcactttgggaggccaaggccgggcggatcacag

SEQ ID NO: 22975 - DNA, 1076 bp, Homo sapiens
cggcagcagctgtgtttctgcaccatttccgaggacgacgcagcccctcgagcccccccaccggccccggccgccccagcgacctccctggcaccggccgccgccttcaaatacttggcacattcctcctttccttccaattccaaaaccagattccggggtggggggtggggggatggtgagcaaataggagtgctccccagaaccagaggagggtggggcacagaccatagacggacccctcgtcctcccccagcggtggtagggggacccggggggctcctccccgctctgcagcctggggacactgggctgggaccagaatccagctttcttttaaaactctcagtgtaactgtatcccgtgacatttcattttttttaaatagtgtatttttttttccatttttttttttaagagaaacaaacaaaagactcgccagtcaatgactttcaaagagaactaactttggcttattcatattctgttcaaagacagtctattttttcactgtagaaagcgtccttgtgtgatagttacgttcgcaaacgcgcacgccaggcccatggctgtaccttggcttttttttttttttttttttttttaatttttcctaccatcagaaagtgtgctttgctcacagaagaatgggatgtccttttttctttcttggctttttttttccccctttttgtttcatttttataaattaaattttcagacatatcaaatacagttctgagggtaaggtcatgggggagctcggacccagtggcgttgggtgcggttgagggggacgctgctgtaagaggagagagatgacagtggtcctcctctgagagcctgagctgtctccccgtctcccgcccccaaggagacagagaggatcctacttcttcggggacagtggctgtatggctgtgctgccccacatcagggaccctttccccctgggactgtggggcagtttgggagcaaaaccagaaggacaggcccccctctacccgcctaccctgagcaagcgagttgttcctctttgtacaagggcaggtctgcggttactttcaacactgttt

SEQ ID NO: 22976 - DNA, 1033 bp, Homo sapiens
ccctacatggatctgggcttggaactcataggttggttctgcttacaaccaagtgaggcttttttttttttaaagttaacatttaaccaatggctgctgtcctcttcaggagcctaaagacgatgtttaaaaaatggagaaaacacaaataaacccctcatttctttgggcagaaagagctattcttctgtttatgtctctggttttaatgttcctcggtggtgggagttgaggtttgccctcagccattttccacactcccttgggatatatccctagcaaggtacagaaattatacctgcccaatgccctgtacctcttcccaccatggctgccagggttcatgcctctttatagttccctgtagattaaagtcacctgacagtccaggagaactgaatcaaggccttatccttgatcattttcatgtatgattcacaaactctaccatctcctccctcttcatgggctcatgccagctgcttctaaccaaataaggaatttttcattttactgatggctgctattctccttatgggttcacagccaagttacatctgtccttccaactgtacccggtctccacttcgtatctctgaactggttcatatcaactctattttccaaccaaatgaagattttaaacatttgtatttcactgatgtctttagtcctccttaaagcctcatgcatagcctcacatgccattcctgatgtactttctttttttttgtctctggactggcttgtgtcacttctgttttcatccaaatgaggagtttgaccattagtatttaactgatggctgctgtcctcataaagggatcatgcagggcctcatgtatcacccctcgtgtattctcttccctttctttcctctgtactgattcgtgttgctttggtttttcagccaaatgagaattttaaatgtgcatgtaactgacggctgcagtctcctgaagggatcatgcagagtctcacaattcaccgctaatgtgctcccatctcatttctgtctctggactagctgatg

SEQ ID NO: 22977 - DNA, 1002 bp, Homo sapiens
ttttcatgtatacagcccagctttcccccttctttgcctgatcccagaacctctctcggcacattgattactacccaggctgtgcgaaacaaagagcaggggcggattttggatttctttatgtcccatgggtattggtcaggtgcctgcattgagcaagggccaaatcaacaaggcaggagatggttgccttattaatggaaggaggaggggttctctgagtcctcacttccttgctgtgctttatgcgcccctagcccagtgccggctctacacctttgcatgggccgttccctcttcctggagcacgattcccccagatcttctcgtggttccctctctttcttctttcaagtctttgcttcttaagtgaggctttcttgagacctacttttatttttaagacggagtcttgctctgttgcccgggctggagtgcagtggcacgatcttggctccctgcaacctctgcctcctgggttcaagtgattttcctgccacagcctcctgagtagctgggattacaggcgtgcaccaccacccccggctcatttttgtatttttagtagagacagggtttcaccatgttggccaggctggtctcgaactcctgacctgaaatgatctgcccatctcagcctcccaaagtgctgggattacttacagatgtgagccaccacacccagccttgagatccacttttaaaaatcacaaccccaggctgggcacggtggctcacacctgtaatcccagcactttgggaggctgaggcgggtggatcacctgaggtcaggagttcaagaccagcctggccaatatggcgaaaccccatctctactaaaaatacaaaattacccaggcgtggtggtgtgtacctgtaatcccagctgctcgggaggctgaggcaggagaatcccttgaacccgggaggcagagcttgtagtgagccgagatggggctactgcacttcagcctgggcaacagagcaagattctgtctcaaa

SEQ ID NO: 22978 - DNA, 1069 bp, Homo sapiens
ttcatgtctattatatattgatatatctctctatatattgtttgtgaagtaccttcctttgaagttttggtttctttgtgttggaatttggttttttaatttggttcttttgttttcttttcatttgggggaaaaaaatcaacagagggaaaagaaccagccctgtttatatttaaatggttttcctttttttttctttttttctttctttccttctttctttcttccttcctgcttttctttttctcctccgcatcctgtcttcccctcccaacctcaccccacctcacccctcgcatctccctcccgccgccactgccgccccctccccagtccgccgcgtggccccgcgcttctccatcctgcccatgagccacgagatcatgccagggggcaacgtgaacatcacctgcgtggccgtgggctcgcccatgccatacgtgaagtggatgcagggggccgaggacctgacccccgaggatgacatgcccgtgggtcggaacgtgctggaactcacagatgtcaaggactcggccaactacacctgcgtggccatgtccagcctgggcgtcattgaggcggttgctcagatcacggtgaaatgtgagcagggcccatggggctcgtaggtggaggggcaggctggagtcgatccccgacttcaggcacaggtgggaggcagcgtgggagcacctccgagttaccctcttggcttcagtcattcatggctaggaaggggacggttgttctttgaacaggtattatttattggttataaatgatcctggctgggcgcagtgattcacgcctgtaatcccagcactttgggaggccaaggcaggaggtttgcttgagcccaggactttgagaccagcctgggcaacatagccaggccccttctctaccacaaaaaaatgaaacatttagccaagtgcagtggtgcatgcctttagtcccagctactcaggaggctgaggcaggaggactgcttgagcccaggagttcaaggctgcagtgagctatgatcgcactactgcagtccagcctgggcaacagagccggaccctgt

SEQ ID NO: 22979 - DNA, 1075 bp, Homo sapiens
ctaatttttgtatttttagtagagatgggattttgccatgttggccaggctggtctccaactcttgatctcaggtgatccacctgccacagcctcccaaagtgctgggatcacaggcatgagccactgcgcctgcctccatttcctttttataattcatccctgaactcccttaaggtagagaagctgtttgatcgtcccagcccctgggaggctgaaaggtaacttcaccagctccatgcctgagtttagcacctgctgtgccaggcactgcccgagtcaggttaatgcctttctcggcaggatacccaattccctccattttacagatgaggaaactgaggctccaggaggatgggggaccttcccaaggccactgggctcattcagccacatcagctcctccacgtctgcctggagaggtttactatgggattcagagaccttgaggagttcaccttgctttgtgatttcagctttgggacctccaacttgctcagccctaagagaggcagggtgtcgagaagtggactgagaggggctttagagagagagacttgagtcgggctgggttggtttgttccgaaggatttttgtccacgaggctcccacccctgtggccgccccaaacccgtggccaagactcttgggtgctggatggggaggccggatcctgtgttctgccagggggagggcgtctccctggggaagccacagtcctcctcctttcagaccccgattttcagccccacacccattccatgatttttttttttttcttcttgcttttgggtgttgtgttttgttttggagggagttttttcgtttgtttgttttttagattctctctttctttttttaaattgcttttgctttgttatttcatttgttcttcctggttttgttttggacgtcgataccgtttttctgtccttgaataattagctccccccacgctcatttccccattgtgttctgtttccatgacaactcagccttggcatcttacctgtgcctcgctgtgggtgccggcggctggcctggaccgcgtccgctggctggccggaccccattct

SEQ ID NO: 22980 - DNA, 1035 bp, Homo sapiens
caggggtgatcagagaaagcagtaaaggaacaaaggggactcgggagggaggcatgagggttgtcatttttaatggggctgtagggacggcttcattgaggaggtgatgtttgagcaaagccctgatggaggtgaggaggaaccaagcagataacgtgggggaagagcattccaggcagacggcacagcgtgtgccaaggccccggggcaggaccacgcctggcgtgttggaggaacagcgaggaggcctgtgtggctggagcccagtgagtgatggggaggggagaggaggcaataggtcatgtagggtcttgtgggctgcagggagaaccctgggctttgagccctagagaggtgggagctatggagggctgtgggcagaggagggacaggacctgactcagatactcatggttgatgccagggatggaccaggtgaaggcaaaggtgggtggtggggagaagaagcaagtggatttgggatagctttttaaaaaaaaaaaaaaaaaaaagacaaggtctggctctgtcgtccaggctggactgcagtggtgcagtgcaatcttagctcactgcaacctccacctcctgggctcaagtgatccttctacctcagcctcccaagtagctggaactacaggcgcacaccaccacgcatggctaattttttaatttttagtagtgatgggttttgccatgttggtcaggctggtctcgagctcctgacctcgggtgatctgcccaccttggcttcccaaagtgctgggatcccagatgtgagccactgcgcccggccttgggatggcttttgaaggtagagtatccctcctttttttctttccatgtctggggttagtggccaggctgagctgatgctttctcttcgatccttccattagaagtttccagaactcagaatttcagggacaaatatggaggggagggcaggccaggcccttgccctccagggactcactgtctgttaaatggagaatacaaacagatcaagagattgcagtgtgggcctctcactta

SEQ ID NO: 22981 - DNA, 1059 bp, Homo sapiens
tgagcctattaaaaactatttattttccctgacagttgtttactgaggagaaggagatgaattggccggtgtcctcggcaggcaggaaggaggctgaatgggggtgcttggtggctcagccccagtgcttggggagcacagattgccggtgggggcctgtccttggggacgccttgggcagagcctgtgcttgggtcgtggccactgcttctgaccttggagtcttttgggaggtggatgttggaatgagtgaaaccgtcgtggtgtggaggcagggggccggccccgatgacgtctctcttctctttccaggttaaaatgtctcagatgcgctggtttgagacccaagacctggccccatggcccacatgagatattgtggcgggatctcccaatatcccatcatatcccccgactccgtagcagttgaactttacaatttttatctgggcacatggccacctgggggaaagaaaacatttctcagtgcaccttgcagctgtctgtgccatatgattcaatgctgacccatggcgtaaataagcaggattttctggaaatgcctttcaagagaagtggcacatgctcctctctacctgtcagctggaatatggagatgatggcaggtgctcaggcagccattttggaccatgaggcaggtgtcatagataagaatgggggatcaaagaggtggaaggggcctgggccccagtgattgtcggggaggggaaaataaccctgaatggccaacctggcagcttcccttaggtgaaaagagaaatcattccttatttgtgctttttctggcatttgcaattcaactggatccaaacggtggcagaacatgaaccttgggacaccttctggggatgtggctctcctggggatgtggctcttcttgcccctgtgctccagagaccccagactcgaagttttgcaaacagtgtgaggatggggatgatggtgaacgaccaagcatgatgggtgctgacacggatcccacctctagctgagtgcctcgtggtcctgttgaatctgcacagccctgtgagaagcctg

SEQ ID NO: 22982 - DNA, 1029 bp, Homo sapiens
tctctgtctctctccatttctgtctctgctctttttctctctgtgtgtctcttttgtctctctgtttctctgcgtgtctctgtccatttctgtctcttcccgctgtgtatttctctctctgtgtctctgtctctgttattttggtctctgctctttttctcgctgtgtctcaacatgtgtgtctgtgtctctttatctctctggtgtctctgcatttttctctgctgtttttctctgtctctgaagctctgtctctctcttccttctctggtctctccctaccgccttatctttcccacagccccactccagtgtccgttacccacactcacacttggatatctgggtccccaaagaggtcccctggccaagacgaccctcaagtggggcgtcttctggcccaaggaggggtctgcagagaagggcgctggggccacgggaacagctcactgccggcctggggcagctctgggaaatgggtcgaggatggccgagaggtggtgaagatggtggggcctcgtctcagagcctgggaccacctccttggaagcattgaacaggagagggacgggggccatgtgaattaccctggattttatgggggtcacattcaccagccctctagaggcttgagtcaccgagcctgggttgatgttttgagggcaggagcctcagatgccaccccgttgcaggagtctggggctgcaatgggggcaggagaggccccctccccaggccctcttgagggaagatcttagcggggacggggaggctgagaggatgatgagggatggaggttcagagcttggggctaggagagggtgttctcggcagcgtaccttctatgaggtctgggggctggacgaccctcagacgtccagactgtaattatgcagtacagagtcagcatttattgtgtgcctactgtgtgccagactccatgctggacactgaaattcagcagtgacccagagagaccagatttcgccttcacagagcctagagccaaataatagcacaggagaatgt

SEQ ID NO: 22983 - DNA, 1031 bp, Homo sapiens
cccttggtagccacaggtccctttctggctctggatttgccgtcttgagtcatttcttggcctgcgcggtgtgcctgctgggcctggcttctccctaagccttgggtattcagggctcatctccacatgctgcctgggccagcgcttccttcctagttagggctgaacattccatggtccagacacactacatagtgttatctgctcatcagttcatgggtgttggggtccttctccctttggctgttaggaatcctgccgctaggaacattcatgcacagatgtctttggccatgttttcatttctggcaggtaggaatgggtttgctgggtcatggtaattctgcgcttaactttttgaagaaccaccaaacttttccacagtggccacaccattttacatttccaccagcagtggacaagggttcttccctttcctcgcaccctccacggtgtgtgttattgtgtgattctagcatcccagccagggggaggtagcatctcggtgtggctcggattggcatttctgggtggcgttgagcaccttctcacgtgcttactagcacatctgtctttggggaaatgtcccttcccttgatttgcccacttgacatgcagcccttgttgtgtggcatgacccaccatgcagctgaggtcagggtgggtgcgcctgctgccgacacaaccctggaggctcattagatggctgcatgtctttttcttttggcaaaggggtggccgtgactggggagagcacaaccagcggctagaggagcaccaggcacgcgcctggcagggtgccatggacgcaggcgcggctagccgggagcacgccaggtggcaaggtacggggctggctccagggacgagggtggctgtggcccccacatgtgtccaggggcttccccaggaacggagtgtttgcagacccttcttctcttctaggtggcgagaggggcctgtctgggccctcggggccggggcacatggcaagccgcggtggagtggcggggtaaggtgtgtcgtccgtg

SEQ ID NO: 22984 - DNA, 1023 bp, Homo sapiens
gacatggtcagtgtcaccctgttcctctcctgccttccagcactatggagatgaccgccatggccacggaggacccccagagcgccacggccgggactcccgtgatggctgggggggctacggctccgacaagaggctgagtgaaggccgggggctgccccctccccccaggttagtgggtgagccccagccgggtggggagcatctgtcctaacctgggaaaaggttggtgcctggccaggcacgtccccaaggtttgattcagctaggggagctttaggatgggctaccaggggtcctgccatttgaaacccctgactcagaaagtccaggttctcaagaagaaagcatagaacaggctttcagggatggagctgtccaggtcgcccagaatggcccatccccattcttgagctgggggtcgcctgcagttgtgaatgtctcgatcatgggctgcgtacacactgggagagacagcgctgaagctcttagtcctgccccgtccgtggtagagcagcctcgcccctgcctccacgttgcctcttgacacgtgtcttcctcgggttttttctctgacccccagttggtctggggtggatcttctcaaccctatcctgcctattagaatcacttaggaggaccctccacccaggactcagggctgaggacactgggccaggtcctccacaggtgtccaaagccaccttcaccagcactgcagtgggggtgctgttctgagccttgtcagcattggtggggggcagggcttgtctgggaggactctgggtgcctctctagtttctttggccagctgcagtcacccctgcctgtttgtcctgttgccgtctgggctggccgtgaggaggctggtggcaggactgctttgcggctgctgccctgctttcctctgtgagccgagtgtcctgtcttgtctccagccctggcccagggctgcctcggaccctgcccagcgccacagggtgggttttggccccctgtgctcccccgttccatccctccctc

SEQ ID NO: 22985 - DNA, 1055 bp, Homo sapiens
cgtgcaaaatttctcatgaggcctgttttgtatttcgagggtctgggtgggttttttagccttttaaaatgaggaatacatctagtttattaaaaaggcagcccttggttttccagtgtaagaatcctgtctttgggctcccctcggctgcacatctctgacccatttccccattcattggctccttcagtcggaatgtcagagcggggagaacaggaaagggaggctgagaggccacactcttaattctgctggagtttggggtggagttggtgtgaattttgatgagtcccacgcattgggtcagaccaaagatgagggatcattggaggcctctgtttgtccctgttcccctaactgagagctccccgaggaattttagttcagtgagatctttattcctacctctttaggatccaacttcgtttctgcccccggggaaaagcctttcgatttgagctagctttttccttttttcccaggccagttatagtttttatgtgatgggatggaaaaagtatcccagtcgcgaaacttgcctgacctgcagaaatgtgtagtcgtgcctggtgctgtttgaacgggatcttttccttttgcaggcgggagggttcgaggccaatgatgggagaccaccgggatgggcaggtgagtagagccccgatgccaagccctggggccactgtactgctgtgcaggcatagcggaccatttctagccaggcggccgcttgatcccagagaggtggcaaccaagtcagcacgtgtggcgggtatgcaagtgtgggttctggccagcgactagaagtacaaatatttagtcggacgtggtggctcatgcctgtaatcccagcactttgggaagctgaggtgggtggatcacaaggtcaggagttcaagaccagcctggccgacatggtgaaaccctgtctctactaaaaatacaaaaaattagccaggcatggtggcgagtgcctgtagtcccagctactcgggaggctgaggcaggagaatcgcttgaacccgggaggcggaggttgcagtgagtcgaggtcg

SEQ ID NO: 22986 - DNA, 1065 bp, Homo sapiens
aacttgatggctgccacttgctgaagggtttgtgatgcttttcctctccacttacccgtggagcatagctgttctctgtcttgcgagacaaccgaacgcccgttaggcccaagttggccaccgctgactctgccggtctcatgtgtccttgtagacagagaggcagagcaggcgctgtggaaaaggaaattgcctctgatttagaaagtaggtttattggtctctagctaccccaggcggcttaattgacagtcacccttcaccccgctctccgtgagcctagttttctggtaaaaatcaggaagaagataattggatgccgtccagagctgtgtgtagttcactatcaccccatctaattctctttgcttttgcaagaaactcagagggagattcaggctcccgtggaaggcagggaaagtaaaagtgtggcaactcgaatgctattccagaagaatcaaatatttcttttcagttgctcatgaggggggatcaaggtaataacagcctcacgagacaatgagctcacagcagtgctccttttgggactgttggatgagaacacaagtgtgcctctcggctgttaatggcggttttaatttatcagatcaaagcaatgatgatcgaatgtttagagattagccctgcaggacattttaaacgatactgggtctggggagagagctcccctccccacctccacctcctccttttttcctcctcctctctcattaatggaatttgtattcttttaaaataaaaaccaacagacgagatgatgcctattggccagaaggaaagcgtgtggcaatggaggaccgatatcgtgcagactttccccggccagaccaccgctttcacgacttcgatcatcgagaccggggccagtaccaggaccacgccatcgacaggtcagtggtcttgtcccctcctttagctacagtcattgtgggcaccggggcatccagctgacctcgttctcagcccagtgcaggggttcctgtgtgctctgaagcctcgtttacttctgagatccacagtggatgactctggccttgcacagaa

SEQ ID NO: 22987 - DNA, 1163 bp, Homo sapiens
cactgcaagctctgcctcctgggttcatgccattctcctgcctcagcctcccaagtagctggaactacaggtgcccgccaccaggcctggctaattttttgtattttaagtagagatggggtttcactgtgttagtcaggatggtcttgatctcctgacctcgtgatcctcccacctcggcctcccaaagtgctgagattacaggcgtgagccaccacgcccagccaaacagttatattttaaagagacccagaaatgacaggaaaaaatcatgttcacctcaccaggtgctcttcgttgctttttgttgtatatccaagttcccatcggagatcatcttcctccctcctgaaggaattgaatgtttcctgtagtgcaggtttgctggtgatacgttcttgtttcttttgcatgtcagaaaaagtctttactttgtcttcattttgaaataaattttcactgggtatagaattctaggttaatttaatctttgttccttcagttaccaatttgtgtcttttctctctctttttctgtggctgcttttaagtttcttctggtttttttgttttgttttgttttcccttagagacaggatctcactgtgtcacccaggctggagtacagtggtgctcactgcagcctcgagctcccgggctcaagcgatcctctcacctcagcctcctgagtagctgagaccacaggcatgtaccactacacccagctaatttttaaaatttttggtacagatgtggtttctctgtgttgcccaggctggttttgaacacctggcctcaagtgatctacctgccttggcctcacaaagtgctgggattacaggcatgagccactgtgcccagcctgtgcctggtaattttttactggatgttgtgaattgtattttttgggtgctagttatacttgtatctctacaaatacccttgagcttttttctgggacacagctgaggtactggacacacactaaggcagggccaaagtagccttcagtttgggctgattttgtctcaccactgggcagtgccctctgagtagtgggtctgatggcccgtgaattaccagcctttccaccctggctattgggaagagcaaaccatttgtggccctgagtgcccctccagtggttgttccctctgctcctga

SEQ ID NO: 22988 - DNA, 1071 bp, Homo sapiens
gtactgataagagaaacacgacagttatggtttgaaagttttcacactattattttaaagctgtctatattttaagctgtgttatgatcttgtaaattgctctaatggtggacaatccagatcatacaaggatcagagattggaaacccattcgtatcaccagatctgtggaagagccattctggcttcttgaggtcaaatacatttggtgcaatgtagtagtgattcttttcatgtctaaccacgtagagtggcatttaattcccccgtccccgtgattcctccatgtgtttctacacatgaaacagatcttgtgatattttgctgcagtcattttgattaacgcagttaaggcaggataaagctgttgtcagggcacttaccacctgagaagtgactggattccagaagaggaaacagagtttctccgtgaaaattttcaacatattattccccttccggactgcgtttatctcccaccgtcagaagagattctgattttcatattggattgttctgttaaaagaaattcaaagaaatttggaagttgagctgtcattgaatggtgattgcattcggttcagcaccttggacattggaaaatcagtcagaagacccagacttgaacaaaaactcgaagaagactattgagaaccagccgcgtggttgtaggtgtttaaatctgtgggggccttttctcttccgtgtagcgtagaggcttacctagaggcggtcgcggcgcaggtagtgtaaccagtataactttgtgtacccgcgggttttccaatctctgtgtagctagcagttctcttcgtgttagtgtggcagccgtgccagttccacatttgtgattgctttatttccctggtaattaaaccttgtgccattctattcctgttaaatccgtagaaaatgagaaaatactcgacattttgggggaaacttgtaaatctgagccagtaaaagaagaaagttccgagctggagcagccatttgcacaggacacaagtagcgtggggccagacagaaagcttgcggaggaagaggacctatttgacagcgcccatccgg

SEQ ID NO: 22989 - DNA, 1059 bp, Homo sapiens
ccctcctcgccagcctctgtagacagcggttctttggaaaccgtagcctcagtgagagccgagtgtgaggcatctgctgagtccaccacgtgtttccatcctgcaaggcattcacttgagtccaggtttaaagtgaacatttctgccttctctaaaaacatccccagctcccgacctcccggctcaggccttcctagcatctgcccgcccgctgcaagggtgacagcatgctggcccgcgcagtgtccagtccccagggggcggccactctgaccagccgggagttgggaggagctggaggaggtggggccagtgcagctttggggagtcccagattgactagggggtggggggtgtgagggggaggacaggggacctgttctgcaggcccttggttgggctggggtctgagcaggaaggagcagctgggtgaaggtggaggggtgggggtggggggcacccagtccttcctgggcaagcggtttgaagtggtcgcgaagcctcttggagcctggttcagggatggctggaggtgcgggccggaggagagaccctggcggggttctgaacaagcctgggtcacctctggccttgggagggagtcaccaggtagcggggctgcggggagggcaggcgtctgctgacgtctctgggttcctgagacaaggacaaggacaggagactggctgcggggcgatggatcgttgttattaacagcagcaaaaccctcctttgcccccagctctccagggctcccacgttcctcggtcaaagcccaagttctcactgcagcccacaggaccccgcatgacctgccccaccccctcctctctctccctctcttcttcctccccctccctctacccccttccctctccatctcctccctcttccccctctcctccctcttctctccccccctcctccctctgcctcagcctcatggcctcctcactgttcttctaacacaccaggcgtggtcctgtttcagggcctttgcacgggctgtgtcctgggcctggaacacatctctcagaccctcacgtggctctctcctca

SEQ ID NO: 22990 - DNA, 1028 bp, Homo sapiens
gagggagaccatggaaagagggaaaggggagaccgtggaaaggggagaggcagagggcagaggcagaggcagaagcattttttgtatttttagtagagacagggtttcaccgtgctagccaggatggtctcgatctcctgaccttgtgatccgcctgcctcggcctcccaaaattctgggattacaggcgtgagccactgtgcctggcctgtaaattgttttatagagatggggtcttgctgagttgctcaggctggtcttgaactcctgggctcaagtgatcctcccacctgggcctcccaaagagctgggattacaggcgtgagccaccgcgctcagccccacacatgggtttcaagccccttgcaaccacccagccaagtccagcagagagacaggcagctcgtgagctccactcagcatctctccatctgtcccctggcagtgtcacccgcaactacctagactggctcacgtccatcccttggggcaagtacagcaacgagaacctggacctggcgcgggcacaggcagtgctggaggaagaccactacggcatggaggacgtcaagaaacgcatcctggtgagcccagtgtctggcctgttgtggatttgcatgtgggtgcccgggcccaggactcttgtgtgctgtgggttgagatttcaaaggagccccctggtgaattcgtaggcctgggggtgctggtcggggggatcccggcggaggtagcatcctgccctgcccccgagggctcgaggatttcccaggtggactgaagtcatgcctgacgggccgggcatggtggggctgcttgtagtcccagttactcaggaggctgaggcgggaggatcacttgagcccaggaagttgaggctgtggtgagctgtgatcatgccactgcacatcaggttgggtgacagagtgagacccccatctctacaaaaaattttaaaattgcggctgggcgctgtggctcatgcctgtaatcccagcactttgggaggctgaggcatgcagatcacctga

SEQ ID NO: 22991 - DNA, 1033 bp, Homo sapiens
actacaggcgcccgccatcacgcccgcctaatttttgtattttttggtagagacggggtttcactgtgttagccaggagggtctcgatctcctgacctcatgatccacccgcctcggcctcccaaagtgcttggattacaggcgtgagccaccacgcccggccaagacttggtctcttaaaaaatggaggaaagaaaacacagtctctttttttcccctgagatagcttatcctaaggacaaggctctgaggggtaaggagacagggtttggttttagttttgactctcttggtcctgtgtccctgggactggtgagtccaccagggactgcactcctccatctcccaggccgtccgtggccagggccagttggcggaggggagggagttgatggagctggtgggtggggctcccagggccatgctcccacccagcccaccccctgctggagcactgctgggccccagcgaccctgccccatacttggcaggccctgactgcagagatcgtgaagaccatccgggacatcattgccttgaaccctctctacaggtgggcctctgtgcgggcagctggccaggcgggggcatctctgcagctctttctgcagctgggtgggtagggggcttcctcagcgtcctcctgggaggaaaccttgcctgccccaaggagtggcctgtgtggaggagcccgttgcccactggggcatggggcaggtgggaggcccggggccgactcagcaggcccagtttctttgtccccttctgctgaggccggaagctgttggtggcattggctgggggagtggggagcagactgctgaggtgaggtcactgcacggctcccgtggtggctgcacgtgaggatgctgcatgcctttccagcccaggacgggtgggccctgaactctggagaacaagcagcagagctggctcccagcgagcacccctagaccgtgcccatagctacaggggacagggaccctgaggaccgggtccccgtttgggggctgcactgcagcagagcgtgagg

SEQ ID NO: 22992 - DNA, 1020 bp, Homo sapiens
agattgaggctgcagtgagctgtgatcgcatcactgcactccagcctgggcaacagagtgagaccctgtatctaaaaattaaaataaaaaaattcaggccgggcacggtgggctcacgcctgtaatcccagcactttgggaggccgaggtgggcggatcacctgaggtcaggagtttgagaccagcctgaccaacatggagaaaccccgtgtctactaaaaatacaaaaaaaaattagccaggtgtggtggcttatgcctgtaatcccagctactcgggattactgaggcgggagaattgcttgaacctgggaggcagaggttgcggtgagccgagattgcactattgcattccagcctgggcaacaagagcaaaactctgtctcaaaaaaaaaaaaaaaaaattcagacagccaccagcggctacactgtcctgggcagctcagcattggggcattccctgtgagaatcttgcaacagggggaagacagcgaccaaacttacaaatgtgattagaactggcaagaccccttaggggcagcgaacttgttctttttttttttttttttttttttttttgagatggagcctctgtcgcccaggctggagtgcagtggcgtgatctcggctcaccgcaagctccacctcccgggttcacaccattctcctgcctcagcctccccagtagctgggactacaggtgcccgccaccacacccggctaattttttgtgtattttttagtagagacggggtttcaccgtgttagccaggatggtctggatctcctgacctcgtgatccgcccgccttagcatcccaaagtgctggggttacaggcgtgagccactgtgcccagctgaacttattcttaaagcaagtgccccggacctccagtgggcctgttctggtgccttctaccagggtcagctcagacagttcagcgtcaaagccaaagactagagaccaggtgattacggtttctttggagacagagtctcaccctgtcactcagactggagt

SEQ ID NO: 22993 - DNA, 1085 bp, Homo sapiens
agagccttgggggtggggagggagcaggatgatgtaatagagagaaagcagtgagtgtaaggaacttgagcttttacagtaggaaggccccaaaagccttctcccccagctccccttcccttaaaaaaaaaaactactgatgtggaaagtggcatctatgggaaggttatctcctaactggcagagcaaggtcacgcagtgagtcagcctctgcgctcactctccagactcttctaaacaaatctcaaggatctgttgggaagggaaaggccatttcagaggggcagcagccagtagagaggggacagagggagcttctccaacgctgctccaagatttttttttttttttttttgagaccaagttgcactctgtcatctaggctaaagtgcagtggcgcgatttcagctcactgcaacctctgcctcccgggttcaagtgattctcctgcctcagccccctgagtagctgggattacaggcgcccgccaccgtggctggctaatttttctatttttagaagagacagggtttcaccatgttgcccacgctcgtctcgaactcctgacctcaagtgattcacccgcctcagcctcccaaagtgctgggattgcaggtgcgagtcactgcgcccggccccaaggcctttccttgatgttgagtactggttactgatgcaggcccccagagcaagaccttgtggggtcctatcctagctccataaccttcagcaagttattcctttggcttccctcttctcatctgtgacctggacatattagtgtcttattagagttgttgtgggatttaaatgaggccatgtgggctgggcacggtgtctcacatgtttaatcccagcactttgggaggctgaggcaggagcataatttgaaaccagtatggtcaacatagaccctgtctctacaaaaaaaaaaaaaaaaagaaagaaagaaaagccgggcacagtggcatgcacctgtcttcccagctacttggaaggctgaggcaggaggatcacttgaaactgggagatcaaggctgcagtgagccatggtgtcaccactgcactgcagcctgggcaacaga

SEQ ID NO: 22994 - DNA, 1026 bp, Homo sapiens
tagcggccctggacgtgtgcctcggtttccccatctgggcagggaggcactgacccagccggcgatgtctcggtggagggtcaggggtttgggctcaagtgtggccctggagtccctgcctttcctgcaggtcggcgtctcctggtgggggcctccgggcagcaggggtgaggggtcttgggtcagcccacgtcctgccctccctccacccgcctgtctcttccagggtgggggctgtgccctcatgaatcgctccaccaagttccagcagatcgtccgtggcatgaaccaggtacggccagccacatcctcgcactggctcccaaacaactcccccgggccctgtctcccaccacctcccaccgtctcccaccacctcccaccatctcccaccacctcccaccaccgtcctgtaggtgctggatgtgccgctgactgtgaagatccgcacaggcgtccaggagcgtgtgaacctggcgcaccgcctgctgcccgagctgcgggactggggcgtggcactcgtcacggtgggtcttgggacgcctcgggcattggggcctcgcggtcgaccccgcgtcccttcctaatggctcctctcctcccatccctccctcttcacctccacacctccctctgtctccgcctgtgtctctctctgtctctctcagcctggctctcttggtctcttcctctctgcgtctcactctctgcctcctaccctgcgtggcggcttctcccccagctccacggccgctctcgggagcagcgctacaccaagctagccgactggcagtacatcgaggagtgcgtgcaggccgccagccccatgcccctgttcggtgggtgttccgggaagccacctccctctcccctaccacccttggtcactcacacctctgggctgttcgccttcccacttgggaccccctcgtaccaccctgatgggagccactgggtcagccaaaactcctgaagggctggtgagcagaactccagggtcccacctgcccatgtctccctgagacc

SEQ ID NO: 22995 - DNA, 1051 bp, Homo sapiens
gcagctgctgtcggggccgtgtttggcctcaccacctgcatcagcgcccatgtccgcgagaagcccgacgaccccctgaactacttcctcggtggctgcgccggaggcctgactctgggagcacgcagtgagtggccccctccccacccccaccctcctcccagcctggcagaatgacccctgacctctgctcatcctccaccctctctgttccatcccggacaagaagtaaagcagccttcttgaacaccagccatttcagtcatagcgacagctgctgctgctgcttaagcacctactgtggccctccctgacctgccctgtcccctccccaccctcccctcctcactctgctccagccacacgggcctcctcactgctcctcccacatgccaggtacagtcctgccccagggcctttgcatgggcagtgcactgcgtggaatgctgttcccctcactgtcctgaccaccctgtgtacaagccagcatccccgccgccctcgctctgtgccgccttccttctgtgtgccttgtcagaggacacaggtcaccaaggtcaccccctgtctctgccactggcctgtgagtcagagaggaggatggatggagtctcgccctgccatctctctccctgcacctggagccctgcaggggagctgcccccgcaaccttcactttacagaaaagggtattagggctcagggagggaattaagtggcccgaggtcacctggaggagcaagtggccttctttgcagccatcagagggtgcagccctggtggagaaggccacgcttggcacaggggagcccgtctggagcatgagccagacatcactcctgccctcccatgggcccgggctcagcgtcagtgcccgcctgtgcccctggcctacccccagcccgccaaggctcgggccctcagggccagcgggaggagtgaacgagccctcttgcagctcagccgctctggcctggcatgttgggagtgatgaatggcaggttccaggcaggcagagagggagggtgcgagggcagggcgtacgccgtca

SEQ ID NO: 22996 - DNA, 1029 bp, Homo sapiens
gactgaccacagggcatgaccactcgctatgcagattctgacactgggtgtggccacatccccgccatgccccgccccccagtcattgtttcgtcatgtcttgctcctatcaactggagtcccgcccgtcccagtctgagcccggcccctcccctagtagatagtccccgcctctagtagtccctaacctaggactccctgagctgggactagcgaaatctgtctgcactgatcgcagtcgtcctcagtttcaccctctaggaatcggcctggggatgcacgtgctactctcttcctccaggccggtccccggcgcgtgcgcgcgatccatgtccatgtccgcgcctatcaataaagttgctcacttgttgccggcccgctagcccgaaaggttgcgcgcgcagcccgagaagtctcgcgatagccagccgcggctgcccttgcgcttcccgagctggcggggtccgtggtgcgggatcgagattgcgggctatggcgccgaaggtttttcgtcagtactgggatatccccgatggcaccgattgccaccgcaaagcctacagcaccaccagtattgccagcgtcgctggtgagcgccggccgggccccgagggtggagggccgaggccgcagggaggtcgtggggttactgggggctgtttggatcgaacgggtctgggagtctcgcgggtacgcacgtggttgtcatcggggtgtcttgggcggtcgtagggggggatcttgtgtgaaatggatgttggtagggggtccagcagggttggggagcactgggaggtcgtgacatgcgacaagctagtccctggggtcatctgaggcggtcccaagctatcgccaggctcggggaaattgtggagtgagacagggctattatcaggtccaaggagctaagggaccacgagactttccaacggggtagagattgttagaggggatcatgagtcatgattggggcatctgagggcggtacagatgtttgagaaagttttggggtgggatgaggtctttctg

SEQ ID NO: 22997 - DNA, 1051 bp, Homo sapiens
ggaatgagggagctccacttcctgctcgttgattttattccttccccctcactgcccactgctgaaccatgcttgctgtatcgaaaaccagcatagagaagaggaggtgtttgggctgtgaatgtaggctaaagaggcgagggaccaccattcttctccccggccctcttcaaatcacctcccgtccagcgcagcagcccccaagagacactcagctctccagggtaactggaggcgtgaggggcaccaataatttgaacagtgttgtctttggttccattctgcgtagagtgagttcttcccctacgaattccacttcatttgtggaaacctgttggctggcccacaccctgggaagcagttgccctggtgaaggaagatcttaggtgggggagggggaaccccatggacaagccttgacaggtgaggaggagtcagggcctccaatgtggcctggagcatctgatatctcccctgccggctgcccctgcagaggtgcagggacaagggggtgcccccagttgaccagagttgactgtagtcatcagacagatcaaggccgtcgggctggagaccctcgtagtgctgtaaagagtcttggggtttgctgttctcgggaaagactgaatgccctgtttgcgtgctgttccgtctcctcccgtgggacgtgagaatccacccctcaggtgggagaggtgatctctgagcgtccaccccacccattcatgctgtttttcctcttgttccctcccccgcctgcacctccttgtcaacagtttcaaaaaacaatgtttttatgccatcaagcttctgcgagccatctgcaggcaattccgactcagagccaagtgagccccggcccctctgccttcccgcccggcctgggggttctcctgggaggaaaagcaattggtgtgggaaaatcagatcttcagcgggcatttaaagtcagttcttcttcagctgttaaaatttttcccccaactcttcagctcatagtctggggatctggcgtgagatgaggcttcataagccctcatgtttgtttctg

SEQ ID NO: 22998 - DNA, 1031 bp, Homo sapiens
tgttacggccccgagagttgctcggctgccgtgagcctgatgccctctgaccccggctgtgtgctccttgtttcagaggtcagctggcggctccagtcctgaaggcggagaaggtaaggagctctctaacacctttgaccatcttcagttttaaagacagaagcaacctgatttttctcctcctcttctcatcattttctgtagattctgacagagaagatggaaattactgccctcctgtcaagcgagaaagaacatcctctttaacccagttcccaccctcacagtcaggtaaaatatgcaaacttacggaatggtgaaagcgtttatgcttacaaacccgccattcccctcagtgccgcgcatccgtctgctgtgtccttcctgcccagctccggttagagtcgatctgaggctcgggctctgtcaggagtgaggtgagagcttgtccagagtgcagcatcaggggtcctcgtctcgaatcagtgacactgacggcatggtgagacttggtggcctgaggaagactgtgaagagatcgtccctctgaaatggaggaaaggggttgactactgagagccctgttggggcctctgcctgttaattacatctcctctttccaaggctggacacagactgggggtttaggggtggggtgttctcccaacccctcagctgcatgcccagcacgggcagtccagtgcagtagcccagacacacacacgcatgtacacacaagcatgcacacacacacggtaaccagcaagccaggaggccccagcagaggcccgtgtgtgatgctgtgaactcccagaggagaggagcttgcgggggcctggaagggtgggccaggctcggactgtggagcagggcaggctaaagggcttgaaggccctggacgtgaggcctggtctgagcacaggcctggaggtcggcctggggactcatgcaggctggtacaggagagaggttcctgaggcagataatgccgtcagcactacttaatataacactcagaaagcccggcctcc

SEQ ID NO: 22999 - DNA, 1024 bp, Homo sapiens
aggcactctccaacacagattgctttgcaagactgattgtgtttggactgtggttaaggcagtgaactgattgtcttcaatcaaagcaggaagaagaaaagactcttcctttgaacccagaaggaatcccctgagccctttatctttgtattaagaagccttttgaagattataggtggagaagattgtgaactctcaagaacaagaaatgtcttgggtttttgaagtttgataaattgggaaaggtaaacattatcctacattcaggattgaaaactccatcctgtaggtaactcatgacagaagacccctattctcaggacagggaaaaaggactcttaacaagaaaagaagggacccagctctaccgcctgagcaccaggcagccttccaggctggtacggtcccaaaccttatcccggacctcagcgttctttctagcacacaacagtccccggtttttaaggaaactgttaacattcagctacagccaccaaacctcaggacacttaggaagcactgttcagccaggggtgggttggagtcctgtgttaacattttggaggagtcagtgtgtgatggaaaaagaagcaacagtctttacttgtgccataggctatgggtgtgggggaggtaacggcagtagtggccttcgtggcacaaaagtgggtttggggtagtgagacacgggagccgcgggaaggagtccagccaggaggcacttgacccacagtgcactgggagtacagccctcccatgagcgcacgtgactgccgccagagcaagaattaggaggtggctgcgtccttcttttgttggcagagtggctgccggaaacttctcctgagtcaggtatggtgagttactgcacctctggtctttgagagcacaggaaatggtgttctcaggtttccgtcttcagctgtctgggaacagatggtctttagggtcccccccagaggccttctgcaggtgcctgggtttgaaaaatgcagcccacataggactctccagctgcagaggt

SEQ ID NO: 23000 - DNA, 1029 bp, Homo sapiens
tgaagtggggaggctttgaggttgtactagcagaataatggccatttggtaaaaagaaggcagttacagaaatgctatttagcagaaagtacagtatcactgaaaatgtggtcgtagggtgtttagacctgcttttgaggcttaccgttggtgtgatgagcttagccctggtgcacgtggtttttgccagccatgtgtattttaggatgaggtcaaaggctggcaaactcttgatgtctgattttaccagacatgttgaaaaactccaggcttcaccttagttctttagagcttacgattcctgcccaggagaaatgctaggacctgagtagaaaatgctggaatgacattgttaattctcccatctgagagaggaagtgatgtaatacttctcaacacttatacaaatcattcatcttaaccaaagatgacgaatttgatcctgttttgatgtcttggtttccatgtttatgacttacttcttggtcctcctgtttagcattttgaattaccatgaggatgtttgaatatttacatttcaaaagcagggattacaaaaaattcaagtggttctaattagagataggcagtcccccacagagctctgggtttaatttttctcttgtgaggtgttaagtctctcaccatcaagtagcaacagacatgggtggctggacgaaccacggtgccctgtgcaggtttagagagccaggtttagagagcggctggtccgtggctctgccctggatacgaagaggcgacagtgtccccttgattacttttgagtgaagattgcttttgctttcctaggaatttgtgtacattctcttacatcctctttctgtagctcctttcctcctcccggatcactgctttttaagtagtgcccaaaccccgtctaaagaggtcagccacttcacacccaagaagaagcacagccacgtccacggggagacggggcagccctgtagtcatgtaggtcaccgagtgcgagaaatggctccatgtcgttggacgatgccaagaggg

SEQ ID NO: 23001 - DNA, 1050 bp, Homo sapiens
gttactctaatttgttctctctttactgagagtctcttttccaggtcgcattgccaaggccacttctgcccacagacggggagacctaagcagaggcctttacactttcacgttgagcttggagggaaaaggcttggtggctttaggttaccgtggagagaggttaggatgggtctgttgtggaaagggctcagagagtacagtttgttgaaacggtattagaaagcttcttcctaattcctgatgatttgtttgagaaatgccactgtaccttaggaaaaccaacagcagagggacagtagggggcaaagggaggagggaaggtggggagggagtcagggagggagggagggaggggaaggaggagagcaatggtggttacaggggaaacaagacctttaagcctggatttattggccctaacgagctgggcgtacgtgcatttagagtaattgttcatttgtttgcattatatatttatcccgtgtccatgaggctgcttctcccttggattcagggtgtctgggtcgcagtgtggttggaagtacctcgcctgattcatggcgatgagctggcagcctgtggaaggtctgattggtgtggcaacagggttctgtgataagacaacgatgggtgctatttaccttgaagccatcggcttctctccctgacagatcggtgtggatggtcagagttttgtcagaagttagttggtgctgtgtggcagtgactcctcagcttgcatggggaccctcactgtttatccagaaataatgtgtggtccctccccactgatgcccagcgacggcactccccacctcatacccgctgcaacagtcccactgatgcccagcggcggcactccccacctcatacccgctgcagcagtcccactgatgcccagcggcggcactccccacctcatacccgctgcaacattttagagtgaccaagtgttgtgctgaattcggtgcattttgaggatgtctgcatcttgttggtaataacaggatttgagaatctcatcaactccattctcctgtggcttct

SEQ ID NO: 23002 - DNA, 1093 bp, Homo sapiens
ccggcagctcctcagaaggggcctctgtccagaagtgccgctgttttcccttggaattcctgcctgcctcggattagtgtcttagctcagtgcgtggcctccaccctcaacaacccctgcgcctcccacaacccctgcgcctcccgcccacggtcccatctgaggcaggggcagccaatcttccaggcgctcggcccccaaccccactgcgtcctcgcctccttgctcctctcatgcccacccccagatgctcttcaacctcaccttcaagaaagatccagaaccaggtggcaccccccacctcctccacttcgactacttcccgagccgccactgtccctgtggattctttcggccacctcctagccagccgtcagcacccacccctacccagcctccagccccttctcacagcagccaccagagtgatcctgctaaaacccaggtcagatcgccacactgctctgcttggaagcctccagggctccccttggccctccaagtagaaccgagtgttgtcaaaatggcccacaaggccctgcaggacccgctctctcccactcctcactgtgctccagccacacgggcctcctcgctattcctccaatgcaccaggctcggacctgccccagggcctttgcactgtggggccctctgcctgaagctctcttccccaggctccccctcacctcctctgagtcttcactcagtgggcactttctcagtgagccctgcctgacacccccaccccacctcaacttactataccgttgcagtcctccctccagtccctccgtggcggcgaccccatcccctttcccaggtgaatttctctgacggcactcggcatcagccctcattcggttcattttacttatttattgtgggtctctgccagacaagaacggacgcttccagggggcaggggtttttgtcttttattcgccgttgcatccccagcacctaaacaaggcctggcatagagccagctctcgtaaatatttgtggaatgggtgaaaaggtggatgttccaagtcggattatgtcaacacagggcacacctggacggttggaatagctgcccgagctgcta

SEQ ID NO: 23003 - DNA, 1035 bp, Homo sapiens
ggtccactcctccaccctctggcagcatgagtcgctctgaaagattttgaagctgggacaggagagggtgagtgaggtgaggcctccgcatgccaggttttcactggcacattccccatcttcatcttgaccatcagcagctgcactgcagccctgctcatggtcagaaagggagagaaacgtgagagggaaagaaaggctggtaagagaaggagaacacaaaagcatgatgccttaggaagccgcttccaagaatcctgggacaggcccctgtgctcagctgaagacgggagctggaggccaacatggtgaaggtggctagaacaggtgagcagcccggagcaggcgggctgctcattctcttgttcattgcaaaacacgtcttgagcatctttgcaggcaatgtgctacgtagggtctggggttggggtgagggatctgtgagggggctgctgagatgacatagatccagactttgttttctcaagaagggctggctggccaagaagccagatgtgaacagctgcatgacatgaagtaatctgaggggacaagcacggagagtggtttggtgaatctggaaatgctgtgtggagtaaaggtgtggccttagacgtgtggttctccatgggggtggtcctgcccccaggggacactgggcgatgtctggagacatttgtggctgtcagacaggggtcggggggtttcctggcatggagtgggtggaggccagggatgctgcccagcaccctgcggtgcccaggacggccccaccccagagtgtattcctgcccctcatatccgcattgctgaggtcaggaaagcctgtatgacatgacaagctgactggagagagggtttccccactgctcatcacttgcctgggatcccctttggagctgctggctgctgtctctctgcctccctccttcttcaacgcagcagtcactttaatcttagctgtcatgggcgggtggactttgagggacagagggctgcccagcctgcctggccctgctggaggggtcttgtcca

SEQ ID NO: 23004 - DNA, 1080 bp, Homo sapiens
tgtaagtatcactctgtgatattcgcacaatgatgaaattgcctgaggttgcattgctgagaacgtatccctgtcaggaagcgactcatggccgtattttactcctgcaagggtgccaagatcattcgatggggtaaatacagtctttccaataaatgatgctgggaaaactgggtttccacattcaaaagaatgaaattggatctcccctgcctttttttttttttttttttttttgagacaggatcttgttctatcacccaggctggagtgcagtggtacaatcatggctcactgcagcctcggcctcctgggctcaagagatcctcctgcttctgcctcccaactagctgggaccacaggcatatgccaccatgccaggctaatttttaaattttttatagagacgaggtctcactatgttgcccaggctggtcttgaactcctggcctcaggcaatcctcccacctcaccctcccaaagtgctgggattacaggcgtgagccactgtgcccagccaggacttttattttataacatacacaaaaattaactcaaaatggatcaaagacctaaacataagagctaaaactgtaaaattcttagcagaaaacatagggagacatctttatgacactggatctggcaatgatttcttggataggacatcaaaagcactcacgacaaaaggaaaaacagaaggattaggccatcagcgttcaaaacttttgtgcatcaaagaacagtagcaacagagtaaaaagacaacccaaggaatggaagaaaatgtttccaaatcatttctaataagaggttaatattcaaaatagataaagaatttctgtaactcagcaaaaaaattttttaatgggcagaggacttgagtagatatttctctttcttcaaagaagatattcagatggccaataagcagttggaaaggtgcttcataccagttatcattgcagaaatgcaaatcaaaaccctaataagataccacttcacacccattacgatgactgttacccaaaagaagaaagacagaaaaatgttgataagaatatggaaaaattggaactg

SEQ ID NO: 23005 - DNA, 1025 bp, Homo sapiens
ctgcattttaaaaagtaaaaagagacaagtgaaagtaatttaataatacatttcatccaatgaactgtattgaaaatattcatttcaatatataacctatatgaaaaattattgtcgagatatttcacattcttttttgtgtgctaagtcttagaaatgttagttcggaccagccccatttcaggtgctcagcagccacgtgtggccctggcttctataccgactgcacaggtaaaggtgttaaagtcaaagcaggcacaagttttaagtcaactcttccttttaaaaggtgaccactatattggctacttactggcgtgcagatacttcatagccgtgaaaacataaggtcactgacaaagtctgagtagcgtgggtccacctgacctcagcgttgtccattttctaaagtgatcatcactggactttgaaacacaggtggtgccctccaagccacctgagtgatctgtccccagaattccctagtgaccatttcaggactttgggatcctgtgtgtagtccccataattctgactgcttctcttttacattataaaagtcttacgttttcatcattaaaaaaaaatccaaattgtaaaaaagaaaaaaagagcctctggctgcttcttcctctctcctctgcccctcccaccactaagaaaagtttggtgtggatggtttcagatatttcacaggcctgtaaaacatacatacgaattctttagtgttttttgcattgggatgtaattcacatgccgcagaattcaggctcttaatgtgtacaatttagtggctttcagtatattcacaaggttatgcaaccatcaccaccatctaattccagagtcatcaccccaaaaagacaccctgtccccattaagcagtcactccccacctcccttccccagcccctggcagccactaagccactttctgtctttgtggatttgcctgttctggaaacttcatgaaaatggaatcatatagtaagtagccttttgtgactggctgtttttagcatgat

SEQ ID NO: 23006 - DNA, 1032 bp, Homo sapiens
agctgggggtccgtgaaaaacaggcggcgagcgagagtttgctgacccctgatcagactgttcccacatgtcccacactcctcctgtggggtaaacggagtcccttgggtcccctaaaactggactttcccaaaacgcgccaccaacccacggcgccgcgcgcgcgaccggttcgccaaccctctgagccgcgcgcgcctcccgccaagacccgcccctcttcgcggccattggccgagtctcgcactctttttcaagggggaacgcctcctccttccgacagactctgcagacagccaatggaacgccgtagggtctcgcgccccgccctcttgggggcccgttggaggcgagcgtgggcgggccgttaggaaggtggggcgcggagcctggtaaccgttgccggtaacaacgccccgccccgtcgggcgggcgggctgcgcgaggctggctggcggcgggagccggaggaggagcggccgccgccgccaccgccgccgccatagagactgtagccgtggagactgttacttaccaacggggaccaacacgcagcagccgctgccgccgccgcgggagccgctgcccgaactcccggcccgaactccaggtgaccgatgcgaccgccccgggcccagcccggccggggagtgtggggggcggcggggaccccgttcgggggccggggggcgggcagcacgtccccgccgctcaccccaaacgtccgggtggtgcgcccgcgggacccgcctccgccaccccgtccgcgcgcgcggcggagtttggggggaccctggcgacgtccccactttccttattgactgaacgcgggggaggtgcggtgccgtcgcctcactttttacaaaacttcctgaggttggggcgtccggggacccctttctcacgcttaccttcaaactcgctgagttgggggcgccccgggaacgtctctcaaactcctcaaactccctgaattgggggcgcttggggaccctcttctcaccttaaccccctagatctctgagttggggg

SEQ ID NO: 23007 - DNA, 1075 bp, Homo sapiens
gccagctgaaggagtttacacaccctaccatgaccctggtagagtagagacagcatgagttgaagcctgctactcagaatccactgcaactaagagtgtgtgtgtgtgtgtgtgtgtgtgtgtgtgtgtgtgtgtatgtatgtgtgtatgtgtgtgttttctgcagttccagtcacagatctgcctgccacacagtggagccctctcttggactctgaatgcatagcccagcaaagccaagcaactgaatctcaccatcagaacagctgagagcagctccatcaaagcagtcagtggtacatgtgatcaatttgttttttgtatttctgggctacaaaatgtctcttaagtttcatcattggacctatcgagaaaggagaaatcaattgagttgtggagataaaagaaaattacacacacccatgcatgaccaggcaacagagtcccatgcctggggctaggctgggtggctggctgtgccattgactttcagggtgtgtaacttttgccatctgtatggggatgataaaacttccatgtgatccttcagctgtggtgaggattctgtgagctggaaggtgaagagcatggtgcattctgtgcctgatgtggactgtgcacccaatggaggagggatatcatcatctcaaaccatacccctatccccattttacaggtgaggaaactggggcatagagaggaccagttcctctgaggtcagccagcaagtgcacggcagaatcaagtctcaaactgggagttgtctgctccctgagcccaggactttcattgaaagcctctgagtcaccaggggcattgaagcccctctgggtgtctcaagcaaccccacaaggactgtgttttcaacttatagatgagaagaccaccagcctggacaacatggcaaaacaccatctctacaaaacaaaaagaggatagcggccaggcacggtggctcacgcctgtaatcccagcactttgggaggccaaggcgggttgatcacgaggtcaagagatcaagaccatcctggccaaaatggtgaaaccctgtctctactaaaaatacaaaaaatta

SEQ ID NO: 23008 - DNA, 1029 bp, Homo sapiens
gcctccggaagcaccaacccagttctcagttacctcctctggccggaaggcctcacgttgtcctccagagctgctctgggcccagggctggctccgtgaccacctgatggacgtgctgggcagcatgggctcccaaggcagcatccccagctgctctcccaccccaccccagctgcccggcggctgggcccacgagggctctggggacacttccataggaaaggggcctggcactttgtgattgccacgtgtttcctgttaagccgcctgcccccagtgcaaatctctgtgttttgctctctcctgaacaaaaatgtaaaccgacgccggaaagcaaatggtatcgaatacctttcttgcccataagggtttttacaaagaacgtgtctcactaggaactaggacactcatcggcccgagaccaactcctggataaaaggaataaggagaatcgtgtttgtaacgagttacaggattgtttctttcctggattttaaacttttgttaaattgtgaaattatggaggagttttatagaaaaaaaaagtgaaataaagtcagatgggaaagcagacgcatgcatctgcctggttcctcctgtccagtcagtgggcaggcttgcgaggtagcctggggccccctgccccgactacgtgtcccagtgcccccagatcagtgaccaaaacagagaaggagggttgggaccaagcctggtgggggtggggagtgtgagcaaggctggagacgatgctaccagcaattcaagagggcagagaattcggctcacatcctgcttctgatgctgtgctctctacttggaagcagacagcaaggtttgggttgagaagaaaacttggtttcataaggtggatgcatggatgatggatgaacagatgggtgggtgagtggatgggtggtttgatggatgagtggatgattggttgggtggaccatggatgaatagatgggtgggtgggtggaagaaaggatggaaggatggatggatcgatgggtggatggaaggaaggaa

SEQ ID NO: 23009 - DNA, 1049 bp, Homo sapiens
gccggagtgtttggagtgccctctccctctccaggcaggccaccctgagtaggggcggctttttggggaaaggacataggcccattggctgcaccagcctgccccagagtggggagggccctggggaccaggcagcctgcaggacacagtgggagagctgccctgagcccccggccccagtccagaccccagcacccactcccaggcaaaaagcgtttccactcctggattggaacaagagcctccttcccccttggcctggaatcctttgcaggggggctgggggagaggagtgtgcggggttgtggagggagtctggcctggaattcagccgtgcagttgccgagggggctgggggatggggcccttgaagcctacactcgctccaagtgttcttatctgccgggaagggagggggacctactgaagcgggatcatgtgactaaggtaattgagggctttgtgtccctctgttgccttggtaacaggaatataaaccaagatgccgtctgtaggggactggaaccgtgtgcctctggagaaaggggaggacggtggactgggagcagcagaggggattaccgagggggtgggcaggccggcgtagggtgcaggaagagagatctgtgaccccaggcccagcttcccagccaggctgtggctccctcgccctccctgggctctcggcagagcttctgatctctgtgccccgagcagaggaggggttctcctccggctgcagcaatggaggggccctgcgcgcccactgccggccagtcccctgaggcctgcgagcagggccaggaaggtagggaggggtgggggagccagggcgttctaggggaagcgggtggctgccggtgtgggggcagttcttagagatgggcacagggacccccaggtggacgggcgtgtgcatttgggggtcaccagtgtcaagaagctctgcgtggcctcatgggcgaggggccctggaggctcagtggagccctgcccttgtctcccctccctccctgccccgcctccccaggacccctgcgctccatggt

SEQ ID NO: 23010 - DNA, 1050 bp, Homo sapiens
ataattcttttaatttctataagattggtagttcccacttttatttctgatgtgggttatttatgttcttttttttaaatactagccaaaggtttgtcaatttagttgatctcttcaaagaaaaaacttgattttattgattcactctatgccttttattgcgtattttatttctgttcttttccttctgttagctttgagtttagttctttttctaattccttagggtgtagaaggagtcattgatttgatgtcactcttatttttgaatgtaggtgtttacagctgtacatttcgctctgagcactgtgtacactgtattccatatgtttcgatatattgtgttttgttttcattatctcaaaagtatcttctaattctcccagtgatttcttctttgacccattggttgttgtatttgttggggttttttctccagacaaaatcaataggagagacagatagatagatacccagatacgagagggaacttattgggggaataggctcacgtgattgtggaggccgagaagtcccgtgacaggccacctgcaagctggagatctgggttgccggcagcacagctcccctcaagctcagacgcctccgcagcagagaaaccctgctgtaattgtcagtctgaggtcgaaagcctggtactgagggtgtgaggccagagtcctaaggccacagagggagagaggcagatggagagattgccctccctgactttttgtccctttagagacagatggccatttctctgttttttgtcccatctgcaacccaaccagttggatggtgctggtccacactgagggcgagtcttccctcctcggcccgacttacatgccagtgtcctctggaaacaccctcatagacacacccagaaataatgccttaccgggtctctaggttctttttttcttttttctttgtggtggagtctcgctctgtcacctagactggagtgcagtggtacaatctcagctcactgcagccttgacctccttgggctcaggtgatcctcccacttcagctttccgagtg

SEQ ID NO: 23011 - DNA, 1035 bp, Homo sapiens
taagaccggagcagaaaaggtgctttctccgacagctctattcttgtataagcatgagggtttttcagcgagtgcacttgaccttgaatatggcatcgcctgtataatgaaggaattgtgctttatgcagtgttaggcattagaacgtaactgaggccgcattttgtttgacctgttggtaggatgtccttttacagaaaaatcactcctttctctcaaggaaaaagaatttggaaggcctcatctgattgcaaagtaatacatgtgtgttgtgaagaagtttttccgaagcaagacgacagcgttgccttgcttgacatctgctgggaacatgcgtgttgggcagctcaacctttctgctgttctgggcatgtctgcaaatgactgtgaaagctgacagtatcagtttggggttgcaaatgaacttcagtgaggaggtaaattcaaaagtatggaatctacacagaatgacggacagctataccattttctgtttatccattcatctgtggatagacgtttgggctgtttctacccatttgctatggggaatagtgctgctgtgaacgtgtgtgagtgtgtgtttgtacttgtttgagtgcccgttttcagttcctctgggtgtatacacctaggaatggaattgcaggctcatacaataattttctgtttagctttctgaggaactgctaagccgttttccagtggctgtatcctgtcataggtccaccagcaatgtgtgagggttcctgtttctccagatcctcagcaatgcttgttttctgtttcttaaaaattatagccatcctctagggtatagagcggtaactgttgaggtttttatttgcatttccttgatgacccgtgatgtttcacgtcttttcacatgcttgctggctgcacgtatctctttctcgagaaatgtctagatatatccattgcccatttttgtttgtttttttccgagatggagtctcactcttttggccaggctggagtgcagtggcgccatctcggctcactacaacctctgcc

SEQ ID NO: 23012 - DNA, 1006 bp, Homo sapiens
tagagtgactgtcagcttgctactcagtgctccctctcgccctgaatcaatgggacggcaccaggccaaggcccacaatgcccagagcaagcctctcggggcacagatggggaaactgaggccttggcagttttgtggcctgtgtggtcagactctgcttagacctatggtggccttggcttcaagtagaccttccagagctgctgtcctcctcccttcccacttgaggactgacctttggcgtgtctctttacaggacttcaatgacagaagagtacagggtcccagacggcatggtgggcctgagtgagtgtgggtcaccttgggtggggaggcccactcttccccaggaggaagtgtcctgtgagctcctgccagcccagaagccctggtctgagagggctcctatgtgctgttctcatttgtccctccttcgtcccctctgggcagaggacaggagctctctagaggactgctgccctcctgaacgtcagaggggctggggccccggccacacagtctcctgaggcctgggctcccttccctcatcacgctttgcttttctccttctttctccatccagtcattggcagaggaggtgaacaaattaacaaaatccaacaggattcaggctgcaaagtacagatttctccaggtataagagcgtcaggttcctgccagagtgggggccagggttgggccctttgcactttcctttaattacttaatttccacggggactgtggacaggaagcgagctggcgcttgttggtgcttactacggaccaggctcagtgcagtatctcactccactagtactgcccacggggcacagctgtgactttttttattttcagtgggtgggtatggactgaggtggcagggctagcatttcgcacaggggcctggttccagacaccgagcttcgacgcactgcactgacctgccgcgtgggtgaaagcaccccggcaagactgcgtgagacagggtggtgccttggacagag

SEQ ID NO: 23013 - DNA, 1050 bp, Homo sapiens
attggcggggtctggcctccctcaggggccagtctctcctgggctcctgtctcagctcctgttaagggtgggggccgaggggcactgtttaccttggacatgtggcaccagcatcaggttcgaggcggccgtgggtgggtgggtgctgcatctgccatcctctctctttcccagatcaaccggagagcaagaagctggcttcccagggagactgtaagtccagggggtctggtggcagatatgtggcttcagagggttgaggttttcaggagtcaggagctggaagcactgaggaggtggcagctctttacagaggcccctggtgcttcattctggggcccatacgtttgagggatcccaggaaccctgaaattgagggagatgagctctgtgcttttatggggaggaatccacagcatccatgaggcactggagcaggctggggaccgtggtgccgggctcagctcccactgacccggggcaggcagtgccaagtgcccgaggaggagctaagccagtctttgctttgggttttctctctacagcaatcagttctcaacttggacccatccatcctcccccaaggtaagccatggtggggcccacactgctttcttgtctgttggccagcagactggcctttctgctgacttgggagggctctgactgggggcacatctctcaggttttatcccccagtgccagttgaccagagtgctcagacgggaatgaggcagaggagctgtgtccgttcctcgtaccccttgtctgaagggctgtgggaggggagcgtcgtggcagtcactgtagtgatagggtggtctccgcaccctatggcttcctccgctggggtggggactctgagcagcacaaatgtcgtcttcctggaagaggctaggagggccttgcttccctccctcacacatctgcaagtgcccatcccactcagtgctgtggagctcagggctctttgccacctctttgccccaccagatggactgaggtgaacctgacacagggcagttgtcaggggtcattttttgtttgttt

SEQ ID NO: 23014 - DNA, 1015 bp, Homo sapiens
acgtataaaagtgttaaaactatacaggcttgatttatacagtcaatatttatttgtatttgctcacattttatctttcctgattatccttatatatttctggaattgcttccacatggaataattttcctccagccccaaaactttccttctttctttccttctccttccttccttccttccttccctccctccctccttccttcttttttttttttgagacagagtctcgctccatcgcccaggctggaaagcaacggtgcgatctcagctcactgcaacctccacctcctgggttcaagcaattctcctgcctcagcctcccaagtagctgggattataggcgaccgccactacgcccagctaatttttttttttttttgtagttttagcagagatggggttttgccatgttggccagccttgtctcgaactcctgacctcaggtgatccacctgcctcagcctcccaaaatgctgggattacaggtgtgagccaccgtgtctggcccaaaactttctttagtgtttcttgaagtgcagttctgctggtgatgaactatgttgttgctgaaacaccaggggttcaatctaggtcctgctgctcaccactgcacagaaagcctatcgctgagacaatgagtattgccaaggaagaaggctttaatcagctgctgcagctgaggaggtgggagaacaatctcaaatccatctccctgaccaactaaaatttgaggtttatatagcagggaagaaatgttaccatgtgtgggaatacaggaattagggaagggtaaggaagaggagttggtcaacaggaagcaggtggtcagttaggcaatcatgatgggtgatgggtctgatgtctcactgtacaaatgcagtattctggtgcgtttcagctcctagatactatctgggaggcctgatggttggtttcctgagaaaggaactcagataagataaatgtaactttcttaagttttaagattgggaagatcaatttgtttgtttat

SEQ ID NO: 23015 - DNA, 1041 bp, Homo sapiens
tatgtattaatcctgtaggtcctaaggaaataattcaaatttggggcagggaacaaagctctatgcataagattttcatcagtagcaaaatatgcaaaccactaagatgtccatccattggagaatggacacatggaagacggtgcatccatagaattggtggatgaagagccattgaaaatgatgtttgggggccaagcatggtggctcatgcctgtaattccagtgactcaggaagctgaggtgggaggattgcttgaggccaggagtttgagcctgggcaacacagccagaccccatctctgcaaaaaaaaaatttcaaaattagctaggtgtggtggtctatgcctgtagtcccatctacttgggaggctgaggagagaattgcttgagctcaggagctccaggttatagtgggctgtgactcactcactacactgcagactgggtgacagagcaagaagactctgtctccaaaaaaataagataaaatgtttgggatgacctttgttcagtgtaatgtagaagttaaaattacatgctctggagtttagttcgtttgtgttgttatcccccagcagttaagaatccccctgtatctgctgggtgcagtggctcacgcctgtaatcccagcactttgggaggctgaggcgggtggatcatgaggtcaggagatcgagaccatcctggctaacacggtgaaaccccgtctctactaaaaatacaaaaaaattagccgggcatggtggcgggcgcctgtagtcccaactacttgggaggctgaggcaggagaatggcgtgaacccaggaggtggagcttgcagtgagccgagatcacgccactgcactccagcctgggcgacagagtgagactccatctcaaaaaaaaaaaaaaagaaaaagaaaaaagaagaaaaaggaatccccctgtatccagactagcttatgatagaggaaaagcttcttagctcccagagttgaacaactgaagagcttctcacatggctggatccaggattcctttgggtcggttgcatctt

SEQ ID NO: 23016 - DNA, 1033 bp, Homo sapiens
tagtgcatgcctgtaatcccagctacttgggaggctgaggcaggagaatagcttgaacctgggaggcagaggttgcagtgagccaagatcacactactgcactccagcctgggtgacagagtgagactctgtccaaaaaaaaaaaaagaaaagaaaaggaaaaacttaaggattttttaaaaatcaaataaaaacaaataaaaaacaaataaaagtatatctggcaaaacctcgggaaaaaagaacttggaatgtgcctaaaggtccatccagccaaaaattgtaaaagcttttttatagtcattcttgagaaacaaaagtgggagcagcccaaccttggtgcccatcctccaagggtacaggctggaatttttgctaaatttgctgtttgggctgcattgtgagtagagtttggcatgcataaaatgaacattccctcttagtcccggttgtccatcctaatttctgggatggactccatctcagtatattccagtatattccaaccttctccttgaggtcctagaaactctattagcaaaacagcagaaactcaaactagctagatcaagattgactcataggcaggaggtctgtggaagacccagattctttccatctttgtgctcctcatggtcacaagatggctgcctcagccccagcctcacatctgtagaacagacagcaaatggggaaagggacaaaaggacatgttaatcaacatgagctggtaagtgacttgagaaggtggtctaaacaatatagtttagactatattatctgtactccagcctaggcaccagagtgagaatccatctcaataaaacaaacaaacaaacaaacaaaaaccttcaatggctcctttctccttattaaggatggccacatgttcttggtcttggtctggcatgcaatatactagagggtctggtccattgcaactacagctatttcctgtcacctattggccaaaacaggctactttgctcttccctgaactcagcttaggtgcctctgtgttatcagtatttcc

SEQ ID NO: 23017 - DNA, 1035 bp, Homo sapiens
catggtcatttataatttcccactgggaaagcatattatctgctttgttcactcatgtataccggcagctgagaacgggggttggccaagggccagatagtaaatattttcagctctcagggccatatggtctctgttggagctacttaactctgcctttgcagcgtgaaagcagggttagacgatgtactaaccaataaatgtggccatattccaataggatattatttgcaaaaacaggtggcctactggatttggctcccagcccactgtttgccaactccaggcttagagcattgcctgccacataataagaatagaggcaataaaagaagtcaaacatttggtcagtattttgtttctgcctcagctgttctgccactacctgggtgtacttgcaacaccgttctgacaccatcctcctccaaagttagcatcagacgccacaagtttaaggctcagccctccatgagatttcccttgcttcagacactggcagcatcttggggatcccccagccacccacacttctgactaactggctctaaattgggggattcccacaaactgtttgggtttcataatttactagaaggaactcacagaatgaaaataaacctggccaggtgtggtggctcatgcctgtaatcccagcactttgggaggccatggtgggaggctcacttgagcccagaggttcgagaccagcctggacaacatagtgagatcccatctctacaaaaatttaaaaacattagccaggtgagggggtgcatgcctgtagtcccaggtacttgaggggcttaagcaggaggatcgcttgagcccaggagttcgaggctgcagtgagctaagattgtgccagtgcaccccagcccgggtggcagagcaagatcttgtctcaaatttaaaaaccctgctatacaattacagttttattataaaggatacacatacggcaagatctgggagagttctagatgcagaatttccatattgcctcctcgtggcaacagcatgtatcaccctcttgac

SEQ ID NO: 23018 - DNA, 1019 bp, Homo sapiens
acgcagacacgggcacacacgcagacacacacacacgcccatcatggacacacacacacgctcgcccaccatggacacacacacactcccaccatggggacacacacacactcccaccatggggacacacacacacacacacacacacacacactctcactctggaaccgaccaatcctggggctgcacagacacacacgcgcacacactctctctcgttctctctctctctctctcgttctctctctctctcgctctctctcccactctggaaccgaccaatcctggggacacacacacacacacacacacactcccactctggaacctgccaatcacacacacacacacactcccactctggaacctgccaaacacacacacacactcccactctggaacctgccaaacacacacacacactcccactctggaacctgccaaacacacacacactcccactctggaatctgacacacacacacacacacacacccaaacacacacactcccactctggaacctgacacacacacacacacacacacacacacacccccactcccactctggaacctgccaatcctggggctgctctagcgaggagacccctgggaccccgcctccttccgggcctctgcgtgcgcagtatatctcctaagagatccgcagcatggagagggcccgcccccgtggacggactcactccctccccactcactcactcactcgcttactcactcactcactctctctccgaagagaagaagcctgcggctcccgaagcgggaaggccctctggtactctgttccctttctagcctctatatgcgccgtatgtctccaaagagctgcgcagttctattccaaaggcgtcatcgcgtgtggggcggtattgtcaggcaaggaaaaggggcgcttccccgcttcaaggacacgcgctcctgcggtcgtcgctgctgaccacgaagctgtcaaaagttcacctccttggctgcccccaacccctgcccctttgc

SEQ ID NO: 23019 - DNA, 1050 bp, Homo sapiens
atcatcatgcccagctaatttttaattttttatttattatttttttaaagagataaggtcttgctctgttgcccaggctggtcttgaactcctaggctccagcaatcctcccacctcagcctccaaagtgcagcctctatatcttgaactccacacctcaaacccagattgtccacatgtgagcacctgtctttttggtttgctgtttctctcgtgagttgtatccagttgcccaaggtggaaagttgggcgtcatccagcaggtaagtcctgacacctccacctccccgatggcttcagaagccagcctcttcttttctgtttcctctgcctctcaacttcctcatccatctaccataagccagaaaaatgacccccaaatgtgaatccgatggtgttctttctgcctgacatctttctttggcttctgctgtggggtaaagtccaagccccttggttccctgtctttcctctctggtctaatcttctattcctctcatcctgtactttgcccttcatcaactctgaactgtttatagttctctgaacatagcccgagtgattcacacatttgcatgtactgttcctctcctgctgtgataaagggacagtcacctaatccccgcccctccgttgcattttttttttcctacaagatttattatgcacctactgtgtgtatggctctgggatgctgtaataagcaagacagacacatctttcccttcacggggcgtatgtgtctcgtgcatactgggagggcagggacagggtctccattcatttctgcattccaatgccaagagggtgtcagatctgggtgggtcgaggtagggaacaggtaaacataactcacagtgtgatgccgtgttacagccaggctgggttcctcacgcctgtgatggcagcgctttggggagccaaagtgggaggattgcttgaagccaggagtttgagaccagcctaggcaacatagagagacccgctctcaaaaaaaaaaaaaaaaaaaaaagctgtcgcagtggcactctcctgtagtcctagctcctt

SEQ ID NO: 23020 - DNA, 1044 bp, Homo sapiens
aaccccaactctactaaaaataaaaaattaaaaaaaaaaattagttgggcatggtgctgggcacctgtaatcccagctactcaggaggctgaggcaggagaattgcttgaacccgggaggcagagattgcagtgagccgggagcctgtaatcccagctactcaggaggctgaggcaggagaattgcttgaacccgggaggcagagattgcagtgagccgggagcctgtaatcccagctactcaggaggctgaggcaggagaattccttgaacctgggaggcagagattgcagtgagccaagatcacaccactgcactccagcctgggtgacaagagtgaaactccatctgaaataaaataaaatataaaagttaaagcagtcatcctggcttttaggaacccgcagaatcaggaggtaagctaaaagtcgtctcccttttgtcacgatggaatgtgaaataggtgcattttccttctgacttatgattctgtttcacggtgcctctgcagaaattcagtacgtccccatgggcacctgtgtccttcaggagttgaggaaattttctccattccttgtccctgtccctagactctgccagctcgtgcatgtagaagctcccgggaaaactgtcaacctgtgcacattcaagaccgccatatacttgttattgaaaagccatcagtcatgtgagcagaacttttttatggttgagattgtccccagggaaacccgccttgcaattcagaccttccacggagatcgattccaaactctcatcccgttcccacttcctcgttcccatggaggctgcggttctctctctctgtgccgcttacagattgtcatacctatttccaaaaatgacacagaaaacttcaacgtgtggctaaatttgaacagagaaaaataagcaaagaattcaaggcgcgaggcgttttcagggagagagggagagcttttgcatggtttgaagggatgatctttaatgagttgagggtcacctagaatagaattaaactgtagagagcaaattgttggaaatg

SEQ ID NO: 23021 - DNA, 1068 bp, Homo sapiens
ccgggacggggtttctccacctggggcctgcggatactggggctggattgttctctggggtggggccgtcctgggcactgagggtgctagcagcatccctggcttccacccattccatgcctggagcgccgcccccgaggcatggcaaacacaaatgtctccagacactgccaggtgtctcctggtgggcagaatcgcctccatttgaggacccctggaccagggtgctggaatgggggtgaggggcactctgcaattattctctgctctttttttgaggggggggaaatggaaaccaagagcccatcatcagcctcgtggctctgtggtttgacactgccatgctaccgacaaaaaccacgtccctagacttgggggaccaaggaatctggaggaatatgatgatagtcatttaatgaaggtgggtttatgtattactcaagtgctgggctggggagtcaggacatagccacagggaagaaaacagaaaggtccttccctcttggaagcccctcttgaaacacctaattggtgacatggtacactggagaatcagagagtgtcactcaagcattttggcttggtggtggggcgggggtggcgggtcaggcactcaagcacccctaagctgatctggagaaagtgtcggggaaggggaacattagcgtttctccctgaggaatcatcttacacctataacggcaactggcccacagtaacattgatggagcaagtgtcttcttgtggctcggccgctcaatagctgtgtgaccatgggcaggttactgaacctctctgtgcctcagtcttctcctctgtaaaatgggaacatctaggattgttgggggaaataaatggttaataattggaatagtgctgggtgcataggaaactctaagtgttacacagcatgtggccacaacctcccctctcccctcctctctcctctttgctgctgccctgctgccttaatgggatactcccctctctgtctctgtctgtctgtctgtctgtctgtctctctctcatccccttttctttcctctgttcccccacccccacctctga

SEQ ID NO: 23022 - DNA, 1977 bp, Homo sapiens
aagaaaaagggaagcaaaggaaaaggaaaacacagacccagaggccctttatggggttgattgtatgtgaagtccataaattgatggagagaaggagcaccttggcagtatttacttgtactctcctatgtcatggatttcctctccattttcccaagggttctttcctgttcttagaaatgttttgtgattttgcttcagacacagtttgtctacttcttgtaagcattgttcttagattgctggctttatatctatcactcccttgctcatctgcccatccatctatccatccatccatccatccatccatccatccatctatccatccatccatccatccatccatccatcatccctccatccacttgctcatctgcccatccatccatccatctatccattcatccagtccattcaccacccaccatctattatccatccatccatccatccattcatccactcacccattcatccatcatccatccactcacccatccattcattcagtcacccttcatccattcactcacccatccatccatccactcatccaatcacccatccatccatacatccactcatccattcatccatccatacatccactcatccattcatccatccatccacccacccagacgtccatccatccatccatccatccatccttctgtctactctgccaacaatccacacacctgtccctccatcccttccaaccactcacccagcaatcttctcatccatctatccacccatgcatacatccacttattcattcatccatccctccacccacccattcatccacccatccatgtgtccattcatctctccatctatccgtgtgtctatcatctaatataagggagatgttttgaagtattaaaagtgattattttgtagcataggggacagggattgtgttttctttacttactgctaccttattaaatgcttactagttctaaaagccctgcaattgattcccttcaattttccaactctataattgcagcatctgcagataatgatgacttcttgccttttgccaataattagaccagttattgctgttaaccttgttatggcaggaacttccagaacagtgttcagtgacgcagctgaatatggtcagcccagtctcatttctgatttgagtggaatgcctcaattgttttactgcagaggataattatataattgttaatactcttgaccttcctgtctttagcctcactgagtaaatggggtgtgatcatgaaatcttgattgtctcatagatgcaagagacataaacgacatttgtctgtgtataatgacagcagatttattttgctaagctgttaagctgttaaaataagcctttaagcccccgcctcaattttccagcagagtggaatgttattttgttgcttctggccaagtgtcgatattcattttagggcaggtcttcatggaaagtctgctggactataggtctggatacttgccggaccctgtgtcatcactaaagttagggtgcgtttcagaaccaccctgtaccacagtgaagagggacaaatggccttagggagcaggacccatgggggccctctggggctgtttcttgtgccctgagagaggccctagatttgggacagtctgatttacctcccctcccttttttttttctgggtgatgctaccctggtttctgtgttgaaatatgaccctagtgtgaaggtcgcggtctcagaccatcttgtttctggtatgttaagaaacagaaaaacaccttttaggacacaatgttaaccattgaggatacatatcagtgttctggaaaaacaaaaacaaaaacaaaacaatctgtaccgcgactgtggttttcatcagggtgggctgcctttccgatccataaccctgtgtggcttgatggagaacatgttttgtaacttgcaagggcatctgcaatagccgggtcctcttg

SEQ ID NO: 23023 - DNA, 1052 bp, Homo sapiens
taaaaaaaaaaaaaaaaacaaaataaaataaaaagtgaataagtgaaagtaataaaatgtaagatacagttggagttctctttgtcatcttcccttgctatattctcctcccttcttcccagaggtaacaactctcttaggtttggtacataaacttccagccctgcatgtattttgacacataaccttgtacacacgtcaatgccagatacaggttcagtatcccttattcaaaatgcttgggaccagaagtgtttcccacttgggattttagaatatgtgcgtatatgtaatgagatactgtggggctgagaacgaggtctaaacgttaaattcatttatgtttcatgtacatcttatacacatagcctggaggtaattgtatacaatattttcagtaatattgtgcgggaaacaaggttttcaccgccctgactgtgacctgtcacaagaggtcaggaatggaattttcttccactgctatcatgtcggcgctcaaaaagttgaattttggagcatttaggattttggattttcgggccaggaaattttggagcatttaagattttggattttgggttatcttcagttgttctttaaatctatttatttatttatttgtatttgacaacgagtttcactcttgtcaccctggctggagtgcaatggcgcaatcttggcttactgcaacctccgccttgcctcaagcaattctgctctctagtggctcagattacaggtgtgcaccaccacgcctggctaatttatgtatttttgtagagatggggtttcaccatgttggcctggctggtctcaaactcccgacttcaggtaatccacctgcctcagcctcccaaagtgctgggattacaggcatgagccaccacgcctggcataaatctttctttaaatctttcgctgctgtaataaaatatacatcataaaatttgccatcttatttatttttcagtatacagttcactggtgttaaacactgccatttatattgtaatacacttttgagtattctaaatatctgcatatattgggaa

SEQ ID NO: 23024 - DNA, 1079 bp, Homo sapiens
gctggcagcccaggtccttcagtgatctgtttctctcaatgcgcctgtgtcagatagaaccgtgcatttcccagtaaaaggaggtgatgtgtgtgctggagtttcaagattgtaccccttatcctatctcccctttcctctgtcttccctctctacttttttattttgttgtttgtttgtttgtttttgagatggggtcttgctctgtcacccaggctgcagtgcagtggtgcgatcatagctcactgcagcctcagccttttgggctcaagcaatcctccagcctcagcctggccagtagctggaactatgggtgcatgccaccacgcccagctaattttatttacttatttacttatttattaaagagatggagtcttgctatgtttcccaggcagctcacaaattcctgtcctcaagtgaccctctcgcttcagcctcccccattagctaagactacaggtgcgcaccaccatccctggctaatttattttttaaatttttctttttgtagagatggggattttgctatgttgcccaggctggtcttgaactcttagactcaagcaatcctcccactttgggaagcccaaagtgttaggattacaggtgtcagccaccaggccgacctgtttgctcatttttccttttccttttttcttttcttttcttttttctttttttttttgagatggagtttcgctctgtcacccaggctggagcacagtgacacaatctcggctcactgcaacctctgcctcccaggttcaagcgattctcctacctcagcctcctgagtgctgggattacaggggcatgccaccacgcccggctgatttttgtattttttagtgaagacggggtttcaccaggttggccaggctagtctcaaactcctggcctcaaatgatccaccagcctcagcctcccaaagtgttgggatgacaggcgtgagccaccacactcggcccgtttgctcatttttaaacataaatgatgtcaagagtgggaagcaaacaagaaagtgttgaaagcattgctctcctctgctccctggttacctatcatcctggggcccg

SEQ ID NO: 23025 - DNA, 1050 bp, Homo sapiens
gggccaaaaaatgattgttttttgaactgttgcccctgtctttgagagcaactcagcttcagctttctttcccctcttcaatttcttgtattgtgataaaatacacatagaataaatttttcatcttaactttttttttttttgagatggagtcttgctctgccacctaggctggggggcagtggtgtgatctcagctcactgcaacctccgcctcctggattcaaatgattctcctgcctcagccttccgagtgactgggacttataggcaccagccaccatgcccggctaagttttgtattttcaggacagagggggctttgccatgttggccaggatggtctcaaacccctggcctcgagcaatacacccacctcagcctcgcaaagtgctgggattacaggtgagtgccaccgcgcctggccccatcttaaccattttaagtccacagttttcagtggcattaagcacgttcacgtggttttgcaaccatcaccaccaccatctcccaaactttctcatcctcccaaactgaaactctgtccccatgaaacactcactccaccatctccctctcccagccccctggcacctaccatcctattttctgtctctatgaatgtgatgactgtagggacctcctgtgagtggaatcagacgggatttatccttttgtgcctggcttatttcactgagcatgttgtcctcaaggttcatccacgtggtagcctgtgtcggaaattctttcctttttaaggctgaatcatgttccattgtatggagggagcacattttgcctgtgtattcatccatctacgggcacttggtcgctttcacatttctgccattgtgaatcagggccactgctgttgacgcatctagcttttcaatgcctgcattaaccttgttgctgaggctttaggaaacttatttatttatttattttttgagacggagttttgctctcgtcgcccaggctggattgcaatggtgcgatctcagctcactgcaacctctgcctcccgggttcaagcgattctcctgcctca

SEQ ID NO: 23026 - DNA, 1029 bp, Homo sapiens
cttggcttcccaaagaactgggattacaagtgtgagccacggtgcccggcccatttctttacattctttgcacttgtaattgtcactctttttggttttagctatcctagtggggataaagtggtatctcactgtggtttgaatttgtatttctctaatgtccaacagccagttaatctttcctttttttctgttttttttttgagacagagtcttgctccatcgcccaggctggagtgcagtggtgtgatctcggctcactgcaagctccgcctcccgggttcatgccattctcctgcctcggcctcccaaatagttgccactacgggtgcccgccaccacgcctggctaatttttttgtattttttagtagagacggagtttcaccgtgttaaccaggatggttttgatctcctgacctcgtgatcagcccatcttggcctcccaaagtgctgggattacagccatgagctggccaccacgcccagccgttgtgtttttttaatcgagacgaggtctcactctgttgcccaagctggagtgcagtggtgtgatcacagctcactgtaacctcctattcctggacccaagtgatcctcctgtctcagcctcccaagtagctggaattacaaccacatgccaccatgcctggatatttaattattattattattttttagagttggggtcttgctatgttgcccaggctgactttaaactcctggcttcaatcgatcctctcactgtggcctcccaaactgctgggattacaggcatgagccactgtgcccagccctagttaacctttgaatgcatattcatgtctgattttggttctgccatagcctggggaggatggcggccaagtgttctttctacctgcagtgtgtgtgtgtgtgtgtgtgtgtgtgtgtgtgtgtgtgtgagagagagagagagagagagagaaatgaaatatagtgtgggactcagggttgagaagcccagggctatggccaaatctaagattaggatgccagccaggcatgg

SEQ ID NO: 23027 - DNA, 1051 bp, Homo sapiens
gtacctgggcatccagaaaaatggtggtgatggcgcgactctcgcggcccgagcggccggaccttgtcttcgtgagtccacagaggagccgggggtggcctgcgttggggcattgggacctggacgccgcaggggatcgaggctgggtcggcaaggagatttaggccgaaactgccaggccaaggtctgggaaccctaatgggccagagaccggatcgtcatgtccgcaccgaactgtccaggagtaaaaatatggtgttgtatcttcgggtctgagtagaaaaccactgtcgaagggaagcgtctagcctcccgaaccaggggcggaaatgggggcgtgcagggaatgggagaggaggaagatcgcataactgaaccttgagaggtgaagatcggtgtctgaagtaaaggcttgcttacgaggccagggttctggtttctgggatgaaggcttggttttctggatagcggtctctaggcctggactgcagcatgacagtttctggggtggtggccaggctagaagaaccctggtgatgtggagcttgtcaggcgatggccagtgaaatacttactctctggagtagaggcgtgacatcttcaccagattcttggtgtgcagagttaaaggcttggcttctggtgtataactcctcctgtgagataaaggcctagcttttaatttctggggcagagttgagctagacgctggctagtgggatcctgggggcggggctagtggcttggaatctggacctgagagccctggtggctggggtaaagatctggtcatctgggcctggggtggagatgggtcagatggtgacagtgggagtctgaggggccaaaggcctggtgtctgggaagaggcacgttttgaagaagtggggtctggtgtccaggactggcatctgggccagggccttggtatctaaggagtctgaccatctggggcagaaagcgagtggtgatgcggactcattcctggcccagagccctaatgactgagaagtctgatgatttgggttcgattttgggtagttgaattctg

SEQ ID NO: 23028 - DNA, 1049 bp, Homo sapiens
tgttcgccttcgtgctctgcctgctcgtggtgctggtgctgttgatggtgcgctgcgtgcgcatcctgctcgacccctacagccgcatgcccgcctcgtcctggaccgaccacaaggaggcgctcgagcgcgggcagttcgactacgcgttggtgtgaggggcgcggcgccccctagccggccctgcgccggggtctcagagggccggcccggcggggggcgccgcggggccaggactgcgctcaggatcccgccccggagcccccagcccgggggagagggggagggagttgggagaagcccagcccctccccctcgagacccctcccatgtcccttcctggcctggccggagccccacctcgtgcctttatccgccctgtcccttcctctctgcgcatctcacccgcccggctggcccccacccccgactctgaatcccgggcgggaggaggacccccgcaccgccccctccccagcgtgtaagtggctctgctattgtgcgtccctggaagtggggacccccttgtccctcctccctcccctgttgtctggccgtcgtcaaccccaccttgactgagtgttgagcccgtccttgggctctggtccctgcggggcaggctctcccgggcccacggggcggacgctgcataccaatttgccctgcaccgcctgtcccggagacggagcccgaaggcctgccatggcggctgtgtcgaggatgcgtggcgcctgccgtggcgggacagcgtgggcaggctcatttctgcccccaacccgggccccaggacaggtcagcgcgccctgccccggtgcccaccgctgccccccatccgccctcctgccacttgcccctgacccccctgccgtgcctcccgcagccctcccatgccgttccactcctccctgcctctgagccgaacatgataataaaagctattattgagcgcttactgcatgccaagtagcgtgctgagttggcacctcctgtttatagcctgtctcctcttcgggatcgtgagaatgagccaggccctgttagcatcccta

SEQ ID NO: 23029 - DNA, 1026 bp, Homo sapiens
ggggttgagggtgacactgggggctggtcagtgacagaggcagcctcaggctgaggacagatcctagaagaggcgtttgatctcaggccaagattcagagtgcggcgaatatggaagtattaaagatcagccaaggggccgccagcttagccctgggagtagatttgggattttgttccaagagaatcacccactttgctgattaatcctgttttcattgggtcatctggatagagtgttgttcccaggagtgggaagcgtgtgatctgggccagtaagtgggtggcacctgcctccccacttggacctgggttcttggcctctgccattgctggctggcggcagggcacctgggcgccagggtgtgtgggcagcagctctgtgtggcgtggtgcccaccctgggtggcatcacgcaggcgtgtcggcctctcattgcagacttacagccagctggcccaccccatccagcaggccaaggcactgggtctccagttccattctcgcatcctagacattgacaacgtcgacgtaagcacctcgcagtgggggcccgggccaccatcgggggtgggaactatggcccagacaaggcccaggaggtggccttgccaggggctgggggccatgggctgatccaagaggtcttgggcttgtccaaggggagggtctcgagggaggcctggtcctggcctgagaggcaaggcccacggggagggaccggtgctgggcctggtgctggagccttctcctagcagggcctaggcgcaggggtttcacctccaggggagcagccgggctgtcctctgaggcacatcccccctctcggcccctctgcagctggccatgggcaagatgatggagcaggggccggtgctgatcatcaccttccaggcacagctggtgatggtggtcaggaaccccaaaggcgaggtggtggagggtgacccggtgagtgagggagtgggatggggcaggcacatgacaccgcctgtccccaagatctgtgtgtggccacctggcagag

SEQ ID NO: 23030 - DNA, 1061 bp, Homo sapiens
ctgggcctcctgttctcaggaggtagctgccaagcggggacccgagtctgccggccttctgagcaaggagctcaccgctgctgagaccctcaatccaagccatgtgggcagccgggggccctggaggcagcacatgctggcaggtgcggggagggaggggctgcggagaagatgcttcttggacctttggctgtaagagaaatgtcactgccgtgtcagaacatacagacttaaagacacaacggttggccaggcacagtggctcacacctataatcccagcactttgggaggccgaggcgggtggatcacttgaggtcagaagtttgagaccagcctggccaacgtggtaaaaccctgtctctactgaaaatacaaaaattagccaggcatggtggtgggccctgtagtcccagctactcgggaggctggggcaggaaaatcgcttgaatctggcaggaggaagttgcagtgagccgagagcgtgccactgtactccagcctcggcaacggagacattgtctcaaaaaaaaaaaaaaaaaaaaggacacagcgctctttacctagaaaaccatcgagtcagaaaccgtgcggacgagcgaggtgctacggaagaagcttggggagctgacgggcaccgtgaaggaggtaacagttccacgcccgcctggagccgctggggccatcaaagtcccctggccgctggaggctggaggaagagtcggctcctgggtgggggtggcttggcagcagtgggtggcatggggcgtgctgccaccctcgggaaggtttcaggagttcccggcacatgcagggtgaggtcagactggcaaccttgcatgaccgttgacccagggagtcggcagcagtaagtgctgctagccaggactcgaggagaacatgaaaatgtttttcctgcctaaaaataggaggagaggggccgcttccaccccctcccgagggtagaggcgggaggcaggattcctggggtgctgcggctctcctcggttgtctgttctgtccagctttgcgcagcatggggcgccctcaccgccgttcttt

SEQ ID NO: 23031 - DNA, 1021 bp, Homo sapiens
tatttttagtagagatgggggttcaccatgttagccaggatggtcttgatcccctgacctcatgatttgcccatctcggcctcccacagtgctgagcgcagtggcacacgcctgtaatcccagcaatttgggaggccaaggcaggtggatcacgaggtcaggactcgagactagcacggccaagatggtgaaaccccgtctctactaaaaatacaaaaattatccgggtatggtggcgggcgcctgtagtcccagctactcgggaggctgaggcaggagaatgccatgaacctgggaggtggagcttgcagtgagccgagatcacgccactgcactccagcctgggtgacagactgagactcagtctcaaaacaacgacaacaacaaaaaattgttttttagagatggaggtctcgagggggcatggtggctcatgcctgtaatcccagcattttgggaggctgaggtgggaggatcacctgaggttcaggagttcgagaccagcctgaccaatatggagaaaccccgtctctactaagaacacaaaattagctgggtgtggtggcacatgcctgtaatcccagctacttgggaggctgaggcaggagaatcacttgaacctgggaagcagaggctgcggtgagccaagatcgcgccattgcactccagcctgcgcaacaagagtaaaactccatctcaaaaaaaaaaaggccgggtgtggtggctcacgcctgtaatcccagcactttgggaggccgaggcaagcggatcacgaggtcaggaaatcgagtccatcctggctaacatggtgaaaccctgtctctactaaaaatacaaaaaattagctgggtgtggtggcaggcacatgtagtcccagctactcgggaggctaaggcaggagaatggtgtgaacctgggaggcggagcttgcagtgagccaagatcgtgccactgcactccagcctgggcgacagagtgagactctgtctcaaaacaacaaaaaaagagatggaggtctcat

SEQ ID NO: 23032 - DNA, 1029 bp, Homo sapiens
agacctacctcacctactaggacctgaggcagctccttagcagagacccctggggtttagctgactctgggggtcaggggttcctgtccccaaacttcgcaagacagccctgaagtcacaagtgctttcttttaagtggcattggcaattggcgtgtaatgatggcagtagaatctgaatctcggatcccaggcagggttcacatttccaaacctttttgatttcccctgacctctaatggctggatcctatttttctacaacctttcagtgacatcgttcaggtttctttcttggccatttaaaaaaacaaattttttttttctcacttgtaagtcaccgccagtacctaagttaggctaacggagactttgacaggactggatttttcttccaccagaagagaagccttttccgttggtttggggccacctctttgaccatgaccatgtgatgttccgtttacagtgacttgctttgggggaggggaggctctcttaaccgattcccatgttgtacagtagatggttagaccttttgtatattagtgtgttttaagttattgatttgttttatataaaataatttatttttcaggtgccatttttcattttaactttgtttttacatgggtttgttttcaataaagtctgacactggtgtccaaaagtcaacaataaaatgaatcccattgtgttcttttgaagatgcctatgtaacttttaagctttttaaattattttcagaaaaaaaaaaagaaaagcccttatcagttttccatcagcccattgcctttttattttttttttttaatccttgtgaataaatgttctttagtgttttaggaggaaaaagcaaacctagattttgataacccagaagacttcagattaataaagaagctttgaaagaagaccatttttcaaaattttagtgaagtgtgaatattttttgtcaatggctttctcaaagagaatgaaacttttgcaccattttcagagtttttatagagatgccaaattgatatatt

SEQ ID NO: 23033 - DNA, 1052 bp, Homo sapiens
gctgggacaggtgagaagaaactgtgaagtatatgagcctttgaaagttccctgaagtttctcagttcaggaacattctcattgtatgtggtctccgctgtttgaacagccttctagctaaaaaattccaaagcctttatttgggagtcttagcttgcaagcttgtggaaggatttagcttaacaactgtcactcctgaaaagcaatctctgttccatcaaggttctagttgctggccctgtgtcctcaaagttcattacatcttatcaaggcctgtttgcaaaggggagatcccttttcttaaaaaaggctcaacccaaaagaaaccatttcttaaaaaattttacatagatcagttgtatttctatttagcaaaaatgagtgctctgcttttatttgggaatttcgatgaaaaagcgttcagagtagataatgttcatttatcaaaaatctggtttgggaaataccaaagaggctttgattgaattcccttttgacccgtgtgtaacttcctctggtagttagaccccaggcagctccgaatttgtgaacctgcttcctgatgaattctcccttgttcccccttggctctgccattatttcgttttcagtgtaatttgccaagccgcagttttctgtgctggctgtgcctctagtcgcagctctgtgactgattccctcccgggtgctgagtcccctccccggccaccatcctgcgtgaatatcctgaaattcatgggcttcctcgggggcccgcccgcaggtggtgctgggtgggttccgccaccttctcctggaaggtgagccttttcctggccaagggcagctgccttaacctctgagagtctgcgcttggccttagtcctggagacccagcctccagggactgaaccgtgctgctgttgggagccaagaccggccctttggagccggcagcccaggggtccctgctggatcagagaaatagaagcacccgaagacggttagtggcaattccttgacccggtttgcttccaaatgaaggccatttgtccaccaggcattgaaaagac

SEQ ID NO: 23034 - DNA, 1432 bp, Homo sapiens
catgataaggggaaggtgcaaaatttggaaaaaggagttcagcccctgcacgtaccccacagtacgaggagagtttcctccagggagaactgaggctgtcagaggcctgcagagcatttctaccttcaacggaggaccaggagaagcgcccatcatctaaaatgtggggaaccgcaggaacccctaaacagaaaccccgacatacacagtgggaggagtggagggcaccaaccagcccctcagagtcagctccctacagaacagggtcccgcccctccactactgtatttaattcctcccagggttttgacccatgcaggtgtctcaaccgtgagcacctcgtggctgcgcagagcgggatggggcccagcggccatggtcagcatgcgtccaggccttgccccatccccaggccgcctgcgctgaccgtggcctgacgcttgctctctgtctgccaggttctcccccatgggcgtcgatcacatgagcgggctctctggcgtcaacgtgccaggaaacgcctcctccggctggtgcattttcatctacaacctggggcaggatgccgacgaggggatcctctggcagatgtttgggccgtttggtgccgtcaccaatgtgaaagtgatccgcgacttcaacaccaacaagtgcaaagggtttggctttgtgaccatgacaaactatgaagaagccgcgatggccatagccagcctgaacggctaccgcctgggggacaaaatcttacaggtttccttcaaaaccaacaagtcccacaaataactcgctcatgcttttttttgtacggaatagataattaagagtgaaggagttgaaacttttcttgttagtgtacaactcattttgcgccaattttcacaagtgtttgtctttgtctgaatgagaagtgagaaggtttttatactctgggatgcaaccgacatgttcaaatgtttgaaatcccacaatgttagaccaatcttaagtttcgtaagttatttcctttaagatatatattaaacagaaatctaagtagaactgcattgactaaccagtccctctggatggtggtgaacctgaagcatgctttaacctctaagactgtctaacacgcgtttcattcaatgtctccacagactgggtagcaaaaaaatcaccttttagttttagtttttaatctaaagatgttagacagatgctgagtgtgcgttttctcaaccgcttcaacattgtaagcgatgtatgctttggttgacaggaagttccttttccaggcaggtcccgttgccacctcctgctcactcagtcccgggctctgccgagtggtcctgggaatggcggcgggcccgtccagcgtgggccaccactggggccgggggccacgggctgcatgctgggcgggccctccagagaaggacacaaacgtgtttcg

SEQ ID NO: 23035 - DNA, 1050 bp, Homo sapiens
cagctaaatagtgacggtggatgtgctgtttcctaatgttgctttcttccaaataagaggcctgggtgtctattggggatgtctgtcaccaaaatatctttgggcgccaacactgtggagtcatggcttcagccgggaagaaagtctgaagctttaatcttctgttagtcattggttttctttactccatccatttgttttcacttttaggtttaatttttgtttatttccttaaccagacttctagcctggcccacagtagactgacctgacttttgcttttcagttttgaaagtcctagcgtttttccccctaactccgtttttgttgatttgttgaaaaggtttgtccagaggggttgcgtttatccggtttgacaaacggtcggaggcagaagaggcaattaccagtttcaatggtcataaacccccaggttcctctgagcccatcacagtgaagtttgcagccaaccccaaccagaacaaaaacgtggcactcctctcgcagctgtaccactcgccagcgcgacggttcggaggccccgttcaccaccaggcgcagagattcaggtgggtcgggagggtgcgcgctcctgaaagccatacttagccccgctggcaggcgacggcacagccacagaatagaaaccacggggatgatagactgatcccgtcagagagcgcgtttcagaatcattctgcagctccacaccacaacctccatcagaaaggtgtctgtaggaaagccgtttacttccgattgggcgttgtctttcatgggaatcaaaacagtgactccaggctggacacagtgacttatccctgtaatcctagcaccttgggtggctgagagaggaagatcgattgagcccaggagttcaagaccaacctgggcaatattgcgagaccccatctctacaaaaaatacaaagctggccaggcatggcggtgcgctcctgtagttgcagcaactcaggaagctgaggtgggaggattgcttgagcccaggaggttgaggctgcagtgagttgtgatcataccactgcactcc

SEQ ID NO: 23036 - DNA, 1045 bp, Homo sapiens
agcctcatggggacgtgacagccctaagtaatttctccccaggtctccccgaggctccctgggcctggctcctctagcagttcccccggcgcagccctggggtcctctgtgctccaagtgtgttcattccgcaaacctttactgagcccctggccagtgtggtgctgggccagatacgttgatactgagggacttcggatcccctgccatccccagtttaaaggtgactgatctgtgcagtgtgataagggcctggatggagttgtgcgttcaactgatcctggattttattgcatcttggtctgatgccacctggtgtcctgcagttctattctgacaccagtcacccagagttagcacagccccagcacatttaaggccacggtccccaacaagaccgccctcacctcagatgccagtcaccctttgggggaccccaggcccctgcacttttgaccagctggctacaaattcagggttcccgccaccccttcagggtgcatgactcactagaatgactcctggaactcacacttctgatgacagtttgtttataaaggttgcaactcagggcctgccaaatgaagagccacacagggagggtcccaagcacagagctcacatgtctgcacctggtgggatcaggtgcctagtcctccctgcatgtgacctgtgcacctgccaggaggctccgtggagctttggtgtctgccgtgtttactgggctcattacgaatgcatgaccgattgactctttggccatgtgatcgaactccatccccagcacccctttcccctcccccaccctggaggtcaggccggtatcgcccagctcacagccccagccgtctagtcacatgcttggtctttctggtgtcggagcccatcctgagccatcacttagcacaaactcaagtgggatccaaggccttatggtaacaaagacagaaattccaggagttttacaagcttcctcctaggaatctgggacagagaccagacaaatcctttatgacaatacgggctagggccaagccctctgcca

SEQ ID NO: 23037 - DNA, 1052 bp, Homo sapiens
tcacatctgtaatcccaacactttgggaggtcgaggtggggccgaggtgggaggattgcttgagcccagaagttttagaccagcctgggtgacatagtgagaccccatctctaaaaataattttaacaattagcttgggcctgctggagcgggcctgtagtcccagatactctggaggctgaggtgggaggctgtcttgagcccaagaatttgaggtggcggtgagctgtgatcacagcgctggactccaccctgggtgacagagcaagatcctatctctttaaaaaaaaaaaaaaaaaggaacctgtgttcattgcagaaaatgtacgtgtttgccaaagaaaataaagtttgctagcacctgtaatcccatttcccaaaggccaggcagatatagtgcttcccgacctccctgtccctcactcgcagacggttggcttaccaatgtcttcatgttctcttgcacaggacacagcttgggctatggctttgtgaactacgtgaccgcgaaggatgcagagagagcgatcaacacgctgaacggcttgaggctccagtcaaaaaccattaaggtaaagggatctgatcaccaccgcatccattcctgccctgggcacaggtctgtgctgagccccgcccagcctcacagtcactctccaagggactatgagcacagccgctcctcgggggctcccatcagataccctggtcaggtgtatctgacccaggccttacatgagtgtctcaggacccactccccgcccagggtgcccccaggttgcgtcagctcccaggcctcccctgtcgtctctcctgcctggctctctgtgttcccatccctggacagctccatccacccccagcctgcccagtgctccctctgcgctccttggggccagttgtaacccttccctcacccagcacctcactcagcacctactgtgtgccccacagtgaccaaaacagacaaattcagtgcccccgtgggtcgggggtgcagacagtaaacaagacagaggatagccatgtgtgaccggcagttgccgtgtgtg

SEQ ID NO: 23038 - DNA, 1047 bp, Homo sapiens
ctgagtctcttagccctgaggagttttattagaaatacgagtctagaggatctgattttggttttgttctttaggaaagagagcgccccatgcagaactaactgcacgtcatttctatagctgctacgtcagggccatgccttaagtgtgggctgggcgtcctgacttccttccgcggagggcagtgtggaaaggggtgggagtcactttacagccaagaaacctggcaaactgactgcctcggcccagtgatcacggtcagcaccagcagccataagtcacgttgacggcctgtgcccttgacatcgtgtgacgagaagggcgctccagctgtgacagactccagcaaacccaatcgagagtctacgggatgtccgaccagtcctcaaaaccgtcacagtcacgagaaacaagaaactgtcatagtcgagaggagcctgaggggatgtgactgctaaatgtcacgtgggatcctggatgaggtcctggggcaggaaagaacatgagggaaagactaaggaagcggctggggcgtggactagaggtaatgggaacattcatcgtcaccagcatttcatactcacttgcggtggtacccataggggaaactgggagggggccatatgggaacttggtattatccttgtaatttttctgtaaacctaaaactgttctgaaaaataaaattcattttaaaaagaaagtggcaaacctgggttaggctctctgctggatttgtaatcttgctgtcggtgagatggatctggatgtccctggcccagctgccaggaggatctctgcctcagtggggctccaggccacctcctgttcggtgacctgctcgttgtcgcgctctgccggctgggggaatggagcagtgctgggtgaggctcaggcccacagcagatgttcagcagccttgcaagtgcatggataagctgcgggagacggggattgcgctcttccctgtgcctcctcacttcccctttagtgagagcatttggccaaatgtcctgtgaagctccttctgaaccctgaccccagagg

SEQ ID NO: 23039 - DNA, 1082 bp, Homo sapiens
ctggttgagtgccagccatgggctgggcactggtggcgggaggaaggaggggcgtgatgatggctgggaggaagggactgccccatgtgctgctctcaagactcggaatgtttctggctggcctggccctggtccctatgttggggatatggcgttggttggttgttggctgttccacccacaaacaccagctaaggaggccactgcagcgcccggtggtcctgcccgctgccttcctgggcagccctgccccagtgtctggtctctccacagtggccccatatgtccctcgggggatcagaaggagtcagccctctaccctcatggatgacctgtcatgccggagccaccaggctgcagccccattcacggcttctgtcttgctgtatatctctggtcgggttaaagcccacaccgctgcccaaggctttaaccacatcccggaggagggggtgtcccaagagggtagggacacccctgggcgcctgccccctctccccacttgctgcaccctcccccccccccggcaccccccggtcaggctctactcttgggcgcttgtgattctctgaacactgttccctctgcaggaatgtccttccggactttcccagcctgatggcttttttcttaatatgagtcatgtttgctcctcacagaaaaaaaaacttaagcatgagccaagcagaaacaaacaaacaaaaaatcacccacaatcataccgctgttagcttttgggcacatgtccctccaaatgattttctttacgtattcatggccataagcagccacgtacttctacagaatgggctcttctctcaggctgtggataaacttcccttcctgtatctggacatttttccacttcgctgaacatctcgcgatcccatcatcatcggtcgcatagtattctgcttcccatttgttgatatttgaaagccctgctgacataaatgtcctggcacaaatctttgctcactggttatttccatagaaagtcttcctgccggtgaagcggcagatgggagagcgcaccttttaaaggctcttggtccctgtcgctaactcgctctctaggggac

SEQ ID NO: 23040 - DNA, 1049 bp, Homo sapiens
gctgtaaacatccatgtgcagatttttgtgtggctgtaagttaacatgcagcatagaaaagaatctctaagtgcagggccaggtgctgtggctcatgcctctaatcccagcactttgggaggccgaggcaggtggatcacctgagttcaggagtttgagaccagcctggccaacacgacgaaaccccgtctctactaaaaatacaaaaattagctgggcatggtggcagacgcctgtaatcccagctactcaggaggctgaggtaggagaatcacttgaacctgggacgcagaggttgcagtaagccgagattgtgccactgcactccagcctgggtgacagagtgagactctgtctcaaaaacaaaacaaaaaaaaaaaaaaagaaagaaagaaaatctctaagtgcaaatgcagttactagttttgccttcatatactgcaatatgaacattttgaatttacttgctctttttctcttggcagatttttgaaaaatacaatgtctaatggttatgaagaccacatggccgaagactgcaggggtgacatcgggagaacgaatttgatcgtcaactacctccctcagaacatgacccaggatgagttacgaagcctgttcagcagcattggtgaagttgaatctgcaaaacttattcgggataaagtagcaggtaaagaaatggaggcgttttagtaaaccgggtattggtggccatcctttgggcactgtctcctttgcctgtgactctgtggcattcctcagtgcaggataactacagccttgaaacgatggctgtgaagtttcatttttatttcaaactctgtccattgctcttgtataagatcggacataagttcccaaaagaggaaaaattcattgtaagacagagagcatgtacaaaataagacagtgggaggagaggaaggaaccagagacagggcattctgagagctggaaggggctggagaaccacagcctgacctggcttggcctgggcagattgattgggtcccacgtgtggaagggaccctggcgagtgtactgtc

SEQ ID NO: 23041 - DNA, 1033 bp, Homo sapiens
gcggggcgcccgcgggcctgcaccggccgaggcccaggccgcgccggaccgggggaggggacgcgcgctggggccgcggcgggcgggtcggggcgggccggtgtgggcgccggctacaggccccggggccggattcctctggcgcctcgagggacgggcgagggggatacggcgtgggcatgcgccggggggccgggctgcacggccgggggccccggtcgccttggaagcccgggctccgggggcgggagagtggggccagctacgggggagcgccgggaacgctttgagcgcgcagaggtcacggcccacgggcttgctcccccgggaaatcccacagattcttttgtggtcgttgtcagagcaccgcggccggtgcgaggtcctttgagaagtgtgcaaacccttcagtagatacacgggagtcctgggggaaaaaaaaaatctaaactgcatctttttttgagcgccatctctaacaaagctgtttgtggggcgtgggacgttaggatttgtaaaatatgtgtgtgtgcctgttggaaacacaagctgcacacagttgaacaatgggggatggatgcccttccttccttttccggtgctctgggctgcggggcttgttaaaatgggttttggtccctactgtgtgcagggcaggtggagaagaacttctgcacaacttctgcatgggcttcccgtggtgggactgagcccccttgctagaaagtgttcatctaagatccggatggccagaaatgggaagatgaggagaatgatctgtctagagcagggtttctcgacgttggccctactgatgtttggggtcagatagtttttggttgtggtggtagtgggggcttccctgtgcaatgtaggaagttgagccgtattcctggcctctacccactagatgccagcagtatccccatgctccaagtcgtgaggatcaaaagtatctccaaacattgccagatggctcgggttgcgggggaggggtctcttccactctcacacgcacaggtgagaaccatta

SEQ ID NO: 23042 - DNA, 1024 bp, Homo sapiens
ccctgcccccaaattcgggcccccacctcaccctggccagcttgataggctgcacacggctggtgtccatgatggcggcgcggcggcggtctggcggagaggagtcacgtgcttcggggagagcctttataggacgttctagcaccgcccactcccgtctcgcgataccacgccgcgtctttcccagcagccccagcggtggagacgtcaccggctgcgcccttcagtatcgcggacggaagatggcgtccgccacccgtctcatccagcggctgcggaactgggcgtccggggtgcgcggggcggacagggctgcaccatggggggcttcgggctccgtgtgtccgggacccgctcctgctcctcacctccctcctaagccgggacccttcgctctccccgaatctccctgggaacccccagctagtcaccccttcagcccgggaccctctcctggcctgggaaccactcaggcctgggatttccccagtccccgaccttcttagccttggatctgtgggcccggactctggctttgctcttcacctgcaggacccacatccgtttccccgagtgttcatcccctgccttcccttaaaatgcgcatccccggaccatccctggtcccttgccctctcctttcctctctcctggggtgccttgcaggccgacctctcctctcctcttcccacagcatgacctgcaggggaagctgcagctacgctaccaggagatctccaagcggtgagcaggccccgctcgctgcccagcctctggctctgtcctttctccaccaaaaacgaaatctgtgttcctttagacccctgaaacggagggctgacatcctgccaccagtcccctgccaggctgtggaggcagaggtttgcctttaaccttgctgaactccggaggacagccctcctgaaacagcgaggccgggcgtgcattctgactggcaatcaggctagatttgcagtgctcagcgtggccatgttagtcagtgttatccccaagctacagatga

SEQ ID NO: 23043 - DNA, 1062 bp, Homo sapiens
actgtttagtgtaaaaacaacactcttcccctaagaaggtgcagagtcctcctttctcagcagtgaggaggtctaggcctcagtggttttggagagttgctgctgccaaagagtatatttgggattgtagagtaaggatagattttgttatttcttacaaactgtctgagaaatcctttgaaggtgtatggtagtagaataatgaagtggataaactggctattccggttcctgtagcagtagccattcctaaccctataagtagggatattagttgtatggccctgcgctgatagacttgagctttgaggggcacagatacggtctgatttccataagattagaagttaggataatacatgttacactgttaacttttttagcaaactttacttttgttgaaaaccttgtaagtttgggatttcaattattctttgctattagtaagaccttgttcagtccatattaacttagaattggtatagatggctgcttcctgattctgtaagtactttaagatttggctgagtggaaacaactggcatgtttgagcagaccaattattaggcaattttcctaactctgcatctacaagagtttccttatcacttactgaatacccattgtgtctttttcccttaatcgcctgggaggaaccatctatcatcctgtcctgaagggagttcctcctagatctggtcagacctttgtatggtaattaattaagatttagatctcctgttaggaaacctgctgggttaaggatttttgataggaaggctacaggttgtcagtggcctcagtgctttccggctatgcccttgtttacactgacaacaaggtggtattggagtgttataaggttacagagaagaccttcaattatcaattataggttttaaatttacgctagggtacacttttttttttttactacttctatctccttttctctttgacttcttctttgtctctgtctcttcctctctgtctccttctctttgtctctctgtttcttcctctcttctctctttctctgacttcctgtctctttctctcttt

SEQ ID NO: 23044 - DNA, 1048 bp, Homo sapiens
accactgtgcccggctacaaaattcttttaattaggcgggtgtggtggtgtacacctgtagttccagctgctcgagaggctgagaggcaggaggatcccttgagcccaggaggtcaaggctgcagtaacctatgatcgcaccactgcactccaacctgggtgacagagtgagatcctgtctgaaaaaaaaaaaaagctggccaggctcataccggtgctcccagcactttgggaggctgaggcaagaggatcacttgagcccaggagtttgagaccagcctgagcaacttaaggagacccccaactctacaaaaaaaaaaaaaaaaaaaaaaaggttttttagttagccaggtgtggtggctcacgcctgtagtcccagctactccagaggctgaggtgggaggatcacctaagcctaggagtctgaggctgtagcaagccaagatcacttcactgcactccagcctgggcaacagagacatcctgtctccaaaaaaaaaaaagaaagaaagaaagaaagaaaaatcctaacccagtcatttcctagctgtaaaacctggtcaagttccttagcttctctgagcctcagttttgtcagccctaaaatggggataatgaaacacctggttcacaagggtggggcaggggtgcagttagatgtgtgtttagcgcagtaatagttagctgttatcctcatgggccggggacaggggaggcaggcaggtgttggggacatgccaagtgggtgacatctgagctctgctgttcagggtacgaggatgtcgtctggattcccaaaggctccgtccacatcttcatccaggatctgaacctctctctcagtcacttgggtgagcagatggtggggaggggatgaggattaggggtcagtggggagggcggtttcagcatgactagaattctgaaccctgcatcgtcccccagccctgaagggagaccaggagtccctgctgctggaggggctgcctgggaccccccagccccaccgtctgcctctagctgggaccacctttcaactgcgacaggg

SEQ ID NO: 23045 - DNA, 1040 bp, Homo sapiens
gaatgtaaggaatgtggaaaggcctttgccagatcctctcgccttagtgaacatacaagaactcacactggagagaagccttttgaatgtgtcaaatgtgggaaagcctttgctatttcttcaaatcttagtggacatttgagaattcacactggagagaagccctttgagtgcctggaatgtggtaaagcatttacgcattcctccagtcttaataatcacatgcggacccacagcgccaaaaaaccattcacgtgtatggaatgtggcaaagcttttaagtttcccacgtgtgttaaccttcacatgcggatccacactggagaaaaaccctacaaatgtaaacagtgtgggaaatccttcagttactccaattcgtttcagttacatgaacgaactcacactggagagaaaccctatgaatgtaaggagtgcgggaaagccttcagttcttccagttcctttcgaaatcatgaaagaaggcatgcggatgagagactgtcagcataaggaatgtgggaaaacctaaaggtgtccctgttctctctgaagacatgaaaactcactggggagaaaccctatgaatgtaaaaatgtggaagcaactttgtatctcaggtcttaatgaacacatatgaattcacagtggagaagaccctgcatcagggaatgtggaaatgactttgctgaattctcaagccttaccaaacacatcagaaatctcactggagagaaactgtatgaatgtagagaatctgggaatacctttctgaatcccacaaaccttaatgtgtgtatgtgaactcacattggagagaaaccctgcaatttaaatggtatggtctggatgatgccccactccatatttgtaagccctaagtcctagttccttacactataactgtatttggacatagggttttcaaacaggtgagtaacttcaaatgaggttgttgggttcgatccctaatctgacatcactggtgtccctataagggaaactgaaggaaggatacacatggagaagactgtgtggatcca

SEQ ID NO: 23046 - DNA, 1064 bp, Homo sapiens
tctttttttttttttccttttgagagagagtttcactctgttgccaggctggagtgccgtggtgtgatctcggctcactgcaacctctgtctctcaggttcaagcgattctcctgcctcagcctcctcagtagctgggatttataggcatgcactaccatgcccagctaatttttgtgttttcagtagagatggggtttcaccacattgcccaggctggtcttgaactcctgacctcaactgacacacctgccttggtttcccaaagtgctgggattacaggcgtgagccaccgcccccggcctgattttttctttatcaaataggggtcattggtatctactgtaaagggtggttatgataattaagcgagtatataaagctgctagtgtgacttctgacacacactgttcctcagtagtggaagttggtcttcctactatttgtagtgtacaccgttttcagtgtcttttcctctatatgctctgcagagagagtgctaatgatgtctgatgactgataagtaatgcttgttgattaatgatttatacaaacaggataccgttaaccctggataaagagaatggaggttacctctgtccgtgtagattcctaagctgtcctggagtgatccttggagtaaaggaaaggtgctttgaagcacattcagccatcagccctgtgggatggcagccactgatttgtcctatggtaagtcctgtttctgttcattttcagataccctgctttaggtgtccccccccacacagtatggagtccagtggcctgtgcctgatcattcacgctgcagcttcatttctgaggtgctgatgtgggctagggaatgctttgttcctttttttttttttttttttgagacagagtcttgctctgttgctcaggctggagtgcagtggcatgatctcagctcattgccacctctgccccccaggttcaagcgattttcctgcctcagcctcccgagtagctgggattacaggcgtgtgccaccacacctggctaattttttgtaattttagtagagatggagtttcaccatgttgg

SEQ ID NO: 23047 - DNA, 1035 bp, Homo sapiens
gagaaaacctctactggtgagaaactttctgagtttaatcagagtgaaaaaatcttcagcctgacaccaaatattgtataccagagaactagcacacaagaaaagtcatttgaatgtagtcactgtggaaaatccttcattaatgagtcataccttcaggcacatatgagaactcacaatggagaaaaactctacgaatggaggaattatgggccaggttttattgactctacaagcctttctgtgcttatagaaaccctcaatgcaaaaaagccctacaaatgtaaggaatgtggaaaaggctatagatacccagcctacctcagtattcacatgcgaacccacactggggagaaaccatatgaatgtaaggaatgtgggaaagccttcaattattccaactcatttcagatacatggaagaactcacactggagagaaaccctatgtatgtaaggaatgtgggaaagccttcactcagtactcgggccttagtatgcatgtacgatctcacagtggagacaagccctatgaatgtaaggaatgtgggaaatccttccttacatcctcacgccttattcaacatataagaactcacactggagagaagccttttgtatgtgttgaatgtgggaaagcctttgcagtttcctcaaatcttagtggacatttgagaactcacactgaagagaaggcctgtgagtgtaagatatgtgggaaagtatttgggtatccctcatgtcttaataatcacatgcgaacgcacagtgcccagaaaccatacacctgtaaggaatgtgggaaggcttttaactattccacccaccttaaaattcacatgcgaatccacactggagaaaaaccctatgagtgtaaacaatgtggaaaggccttcagtcattccagttcatttcaaatacatgaaaggactcacactggagagaaaccctatgaatgcaaggagtgtgggaaagccttcacgtgttccagttcctttagaattcatgaaaaaactcacacagaagagaaaccctat

SEQ ID NO: 23048 - DNA, 1050 bp, Homo sapiens
caagtgatccacccgcctcggcttcccaagtgctgggattacaggtgtgagccaccatgcctggccaacttccaggttatctaaatgcactttgcataaggagaaataatcacactgtagaaggtttttctttacctttttggtagctggtctaagaaaggttttacaagaaattatcgagataatttcctgtattgcctttattaagttttttatcacttaaaaaaaaaaacctggttggttgggcatggtgtttcatgcctgaatcccagcactttgagaggctgaggtgggaggatcacttgagttcaggagttcgataccagcctgggcaacatgatgaaagcccatctcttaaaaaaaaaaaaaaaaaaaaagacacacatacaaaaattagctgggtgtggtaacgtgtgcctgtagtctcaactactggggaggctgaggtgggaagatcacttaggcctgggagatcaatgctgcagtgaacttttgtgctgctgcactccagcctgggccactgagtgagacgctgtcccccatctacccctgaaataaataaaaagaatcaacaaaaaactctgggctttaaaaggattcattttttcctagtaactctatttactcctactaatgacttttgattatcactgtatttacatggattactaacaagtgagctgttatcctgtttcaatcaaatgttttgagccttctaacatctttgacaaacttccccaaatgcaaattctttttattttattttatttattttttttgagacagagactcgctctgtctcccaggctggagtgcaatggcataatcttggctcattgcaacttctacttcctgagttcaagtgattctcctgcctcagcctcccgagtagctgggattacaggtgtgcgctaagatgcctggctaatttttgtattattagtagaggtggggtttcaccatgttggccagtttggtctcgaactcccgacctcagttgatcctcctgcctcagcctcccaaagtgctgagattacaggtatgagccac

SEQ ID NO: 23049 - DNA, 1080 bp, Homo sapiens
taaaatattcagtaaaccatgctgtaaatagatgtaaatagataccacaggaagagtagatgtagcataattcttaactggctcttggatttttggaatggtaattgaatattagcattcatttaaagtcaccaactgcattgacctctaacaagaaagccagcccaggctgggaaaagtggcttacacctgtaattccagtgctttgggaggctgaggttggaggatcacttgaggtcaagagttcaagaccagccagcacaacagagcgtgacgctgtctctacaaagtaaagagtcagcccgtcctttgaatctttgaagtcagatattagcttacctagagctgtgaaagtcctaaatggcatctcctgaagtaaggctgttttgtctctgttaaaactctagtagagctacctctgccatttatctagatattctggaaatgcttgctgcagattccacatcagcaattgctacttcactttgtacttttatgttatggaaatgacttgttaaacctcacgaactgatctttgccagcttccagcatttcttctgcagctaactcacctctcagccttcatagaattagagttagggccttgctctggattaggttttggcttaagggaatgttgtggctggtctgatcttctatccagaccactaaaacttattccgtgttagtggtgaggctgttttcctttcttattatgtgtgtgttcactggagtagcacttttagtttccttcaagaactttacattcacaacttggctaactggcacaagaggcctagattttggcctatcccagttttttttttttttttttttttgagacatggtctcccttttgcccaggctggagtgtagtacagttatagcccattgcagcctcaaacttacgggttccagtgatcttcctgtctcctgagtagctaaagactgcaggtgtgcaccaccatggccagctaatttttttttttttttttttttttttttaaagaggcaggactttactgtttacccggctgatcttgaacttaaaacctcaagtgatgctcccctatctgcctc

SEQ ID NO: 23050 - DNA, 2075 bp, Homo sapiens
gtggaaaatccttcagaagctcttcatgccttaagaatcactttagaattcacactggaataaaaccctataaatgtaaggagtgtgggaaagcattcactgtttcctcaagcttacataatcatgtaaaaatccatactggagagaagccctatgaatgtaaggactgtgggaaagcctttgctacatcttcacaactcattgaacatataagaactcacactggagagaaaccgtatatatgtaaggaatgtgggaaaaccttccgtgcttcttcacatctacagaaacatgttagaattcacactggagagaaaccctatatatgtaacgaatgtgggaaagcctacaatagattttatttacttactaaacatttaaaaacacactgaagaaaaactctgaatgtaaggaatgtggaaatcttttaggaatttctcataccataattaccacatttgaattcacactgaagagaaattttattggtacaaagaatgtgaggaggccttcagttatccccattcacttcgaagacatgaaagaactcatactctatgtgtcccctataaattttaggaatgttagggagccaatggaatctttttttattattttattttattttattttattttattttattttattttattttatttgagacagagttttgctgttgtcatcacacaggctggagtgcaatggcatgatcccagctcactgcaacctttgtctcctgggttcaggcgattctgcctcagccttcaagtagcttggattacaggtgccgtcaaccacacccagctaatttttgtatttttagtagagatggggtttcaccatgttggccaggctggtctcgagctcctgacctcaggtgatccacccgccttggcctcccaaagtgctgggattataggagtgagccactgctcctggccttttttttttttttttttttttttttttttttttgtaagtcgttgttaatacacattcttttctcaagggattggattgtggtcacaatccaacatttgagaactcaccatggggccatacaatgtagaaaacacagaaagccctcattatttccttaggcctttctaagtatataagatgttgcaatggagaagagaaaccctattgatacaagatacaggcatgccctgtagatattgtgagttttgttccagactaccactataaagtgaatatcacaataacatgaatcatacaaatgttttggtttcccagtgcatataagttaggtttacatcatatggtagtctcttgtgtgcagttgtgttatgtctaagtaaagtaccttagtttaaaatactttattgccaaaaagtgctaatgatcatgtgagactttggtgagttgtaatctttttgcttgtggtaggtcttgcctcagtgttgatggctgttgatcagggtggctgtggcagtttcttaaaataagacagcagtgaagattgctgcattgattgactcttcattacatgaaaaacttctctttagcattcgacgctgtttgataacattttacgcatagtggaacttcttttagaattggacttaatcctctcaaacttcgccactgcttgatcaactaagttgatgtaatattctaagtctgttgtcttttcaacaatgttcacagcatcttcaggagtagatttcatttcaggaaaccactttctttgcttatctatacaaagcagcctctcatctgttcaagttttttcacgagattgaaacaattctgtcacatcttcaggctccacttctaattctagttctcttttttccatcacatccacagttactttttccactgaagacttgaacccctcagagtcacctatgaaggttggaatcaacttcttccaaactctggttaatgttggtttttatttttttaattaaaaaaattttttttagagacaaggtctcgctgtgttgttcatgctggagtacaagtgggtattcaccagcacgatgagagcacactgtagccttgaactcctggcctcaagtgatcctccttcctatgcctcctga

SEQ ID NO: 23051 - DNA, 1032 bp, Homo sapiens
cttgtaatccgcctgacggcctcccaaagagctgggattacaggcgtgagcctccgctcctggccaggatggaggctttataatcagaatattattctagtattagtgtaataaagtagtatctattgaatttattaacagcatgtttagactaagtgtagttttgacatttttttctgaaaaatttgatcctagggaaaacttgaacatctaacacacccagtctagtagtttttttttttttttttttgagacagagtctcgctctgctacccgggtcggggtgcagaggtgcgatctcggctcactgcaacctctgcctcccaggttcaagtaattctcctgcctccctagcattaggtgcgtccatgtgaagagaccaccaaacaggctttgtatgagcaataaagcttttaatcacctgggtgcaggcagactgagttcagaaaaggagtcagcaaagggagataggggtcgggcagttttataggatttgggtagatagtggaaaattacagttaaaggaggttgttctcttgcgggcaggggcggggatcacaaggtgctcagtggggagctcctgagattcattgtccaggagaaggaatgtcacaaggtcaattgatcagttaggttggggcaggaacaaatcacaatggtggaatgtcatcagttaaggcaggaactagctattttcgcttcttcttgttgttcttcagttgcttcaggccatctggatgtatacgtgcaggtcacagggagtctgatggcttggcttcggctcagaggcctgacacctagtagctgggacacaggcacatgccgccatgcccagctaatttttttttgtattttagtagagacaaggtttcaccatgttggccaggctggtctcgaaatcctgagctcaggcagttcacctgcttcggcctcccaaaatgctgggattacaggtgtgagccactgtgcctgaacacttactttttgagcattgtgcttgttttctttcacctcaggtaaatacattttatg

SEQ ID NO: 23052 - DNA, 1028 bp, Homo sapiens
aggaatgaaaccatccataactgccagtgccctttcacagctgattatttctgtgtccccttgtaaaatctaagaagtgtgacagccttgcctgttctgccttgtatgtctattttagatggcacaatgtaagtggcaatgtctcttctagtataatccagtctctcttctcacttctgtcaaggtggctgatatagtccatgaatcccactcatgatctctttatcagatgatcgttcagccacactttgaggattctcttcagtacaagttttctaatttttgcattatggataggctgagaattttccaaatctccaagttctggttcctttttccttaacaattttttctgcaattcaggtctccttttgcatttttgctgagaccagctgggtcatggagaccctgacccagcagctctagaggaattaagacaaagacacagaaatagagtgcagagtgggaatcggggctcacagccttcagagctgagagccttgaacagagtttgacccacatatttattgacagtaagcctgtgataaacattatttctatagattatagattagctaaaagtattccttacaagaaagaaagggacaggctctggcttgttatctgcaacaggaacatgtccttaaggcacaaatcactcatggtattgtttgtggtttaggaatgcctgagcagttttccagttttccaccgtgggtgggccaggtgttccttgccctcattcgggtaaaccagcaacctccagcatgggtgtcatagccatcacgagcatgtcacagtgccgcagagattttgtttatgggcagtttctcatggcctgtttatgtccaaatttggggggcctgttctgagcacattttcctgtaagcactcaggaagaatgaagcttcctgtgtcctttaacactttaagtacagatcttagtgatacataaccagttttatctctctcaagctctaccttccgcaaagtgctagaatacagttctgccaagttcttcactactt

SEQ ID NO: 23053 - DNA, 1350 bp, Homo sapiens
caggagtttgaggttacagagagccatgatcacaccagtgcactatagtccaggcaatggagcaaaaccccaactctgaaaaaagtgaaacatactgggtgtggtgggtcatgcctgtaatatcaccactttgggaggccgaggcaggcagatcacctgagcttaggagtttgagaccagcctgggtaacttggcaaaaccttgtttctacaaaacagaaaaattagccaggtgcagtggtgcacacctgtattcctagctactcgggaggctgaggcaggagaatcagttgagcctgggaggtggaggttgccgttagctgagagtgtgccatgcactccagacagggagatagaacaagactttctctcaaaaagaaaaaaaaattaaatattaaaaagtaaaatcataattgtcatcaaaatgcttctgtgttcagatgggtgaaatctcttaatatgtctgaaaatgttttaaaacctttatctcgtcatcaacagacaagaggctacagtggatggaaactctgtgactgtaagaattgtggagaggtcttcagggaacagttttgccttaagacacacatgagagttcagaatggagggaatacttctgagggtaattgttatggaaaagacaccctcagtgtgcacaaggaagcctctactggacaggaactttccaaatttaatccatgtggaaaagtctttactctaactccaggtcttgctgtacatcttgaagttctcaatgcaagacaaccctacaaatgtaaggaatgtggaaaaggctttaagtattttgcaagccttgataatcatatgggaatccacactgatgagaaactctgtgaatttcaggaatatgggagagctgtcacagcttcttcacacctaaagcagtgtgtagcagttcatacaggaaagaaatccaaaaagactaagaaatgtgggaaatccttcactaatttttctcaactttatgcacctgtgaaaactcataaaggagagaagtcctttgaatgtaaagaatgtggaagatcctttagaaattcctcatgccttaatgatcacattcaaattcacactggaataaaaccacacaagtgtacttactgtgggaaagccttcactagatcaactcaacttactgaacatgtaagaactcacactggaataaaaccctatgaatgtaaggaatgtggccaagcctttgctcagtactcgggcctttctatacacatacgaagtcacagtggaaagaaaccctatcagtgtaaggaatgtgggaaagccttcactacatccacaagtcttattcagcatacaagaattcacacaggagagaagc

SEQ ID NO: 23054 - DNA, 1014 bp, Homo sapiens
ctcccaggttcaagcaatactgcctcagcctcacaagtagctgggattataggcatgcgccaccatgcctggctaattttgtatttttagtagagatggggtttctccatgttggtcaggctggtctcgaactcctgacctcaagtgatccacccgcctcagcctcccaaagtgctgggattacaggtgtgagccaccactcccggcatttttaatttttacagaagtagtttgtaataaactatctaaacacatcagttatgtaataaaccccacatcattatagccaaatttttgatgtaccaaaatcctcaaggttctctggcttttattttattgctgtgtttaatttgaaaacaagtaaaaatgactcattttaaatgaatatttcttctctaaatccttacgtttctttttctgcttaactttagaatgggaaatacaacctagaaccaaacggtcatcacttcagcagggttttttgaagaatcaaatattcagtgggatacaaatggtaagattcatgagggatatttcttaatttcctctcttagaaaagatagagaattccattctagaaaatcagctcagtcagaggtgtggcttacatctgtaatcccagctatttgggaggctgaagtgggggtctcatttgagcccaagagttcaagaccagcctaggcagtatagtaagatcccatctctgattttaaaaagaaggtgaatgtggtgactcacacctgtaatcccaacattttgggaggccgagatgggtggatcacttgaggtcaggagtttgagaccaggctggccgacatggtgaaactccatctctactaagaatacaaaattagccgagtgtggtggtgggcacctgtcataccagttacttgggaggctgagacaggagaatggcatgaacacagaggcagaggttgcaatgagctgagattgcaccactgcattccagcctggttgaccgagtgagactctgtctcagaaataaagaaaaga

SEQ ID NO: 23055 - DNA, 1037 bp, Homo sapiens
gggttgagccactgtgcctggcctctatttctaatgtctaggcagcaactgttgttgtgttgttcctgttacatagtcttattacccatttgatacaaagttcagattgattgttcctgttcgtattccattttgggttttccctctatctttgttgattttttaaaaaattaaatatgtaaaagaataaagggccaagcagagtggctcacagttgtaatgccaacaatgtgggaggccaaggaaggatgatcgcttgagctcaggagtttgagggcagcctaggcaacatagagagatctcttctctacaaaatatatttttaaaaattagctggatgtggtggtgcacgtatgtagtccctggtactcaggcaaaggactgcttgagcccaggaagtaaaggctgcagtgagccatgataatgccactatacttcagcctgtgtgacagagtgaaaccctgtttttttttttttttttaaagaaaaaaaagaatgtaattttaaacatcagaactgtaaggtactctgagctggccataccatggtcaagccattgtgacatccccccgcccttgtgataatgtactttgtgatattcccctgcccttgtgaatgtactttataagatacatcctcccccacctagtgaatgtaccctgccattggcccttgtgacagtacacctttcctctccttgtaaatgtactttgtaaccttcctccccacccttgtgatgatacaccctccccgcccttgtgaatgtactttgtaacatcctccccgcccttgagaatgtactttgtaacgtccaccccactgcctacaaaaaaaattgctcctaactccaccgcttatcccaaacctatgagaactaatgataatcccaccaccctttgctgactgttttgttggacagcccatccacatccggatgtaatacacagccattgttgctcgcacaaagcctgctaggtgctctctttactcagacgcatgtaacattttgtgctgaaacctgggacattagaactcct

SEQ ID NO: 23056 - DNA, 1030 bp, Homo sapiens
aaaaataaaaataaataaataaaacagttatcaggctgggagtggtggctcatgcctgtaatcccaccactttgggaggctgaggcaggcagatcatgaggtcaagagatcaagaccatcctggccaacatgttgaaaccccgtctttactaaaaatacaaaaattagctgggcacggtattgtgcccctgtaatcccagctactcaggaggctgaggcaggagaatctcttgaacccctgaagtggaggtttcaatgagcctagatcacaccactgcactccagcctgacgacagagcgagaatccgtctcaaaaaaaaaaaaaaagacaactaggttgggcacggtgcttcacggctttaatcacagcactttgggaggtcaaggcagggggtcacctgaggtcaggagttcgagaccagcctggccaatgcggtgaaacttttgtctctactaaaaattcaaaaaataaaattagccaggtgagttggcgggcgcctgtaatcccagccgcttgggaggctgaggcaggagaattgcttgaatctgggaggcgaaggttgcagtgagttgagttcttgccactgcactccagcctgggtgacaagagcaaaactccatctcataaaaaaaaaaaaaaaaagacaactaaggcttgcataagtattttgagaatattcttctaggcatgtttttatttccaaatgtgtagcaaaaatttatactttttatatttttcatttttgctggttgtataacttcagtctccttttgcattctggaataacttattaattgtgcattctttccctttgcttgtgttaatcttggtagagagtacccaggtttatgaattctttcagatatttcgcttgaaaaatctacactatttcttgcatgttttctgttccactaattctgttagatatttatatagttacatcagcttgattttcctctacttcttagtctttctgtatgctttttaaaaaaatgtgtctttttatacatactttagctggagttttaa

SEQ ID NO: 23057 - DNA, 1021 bp, Homo sapiens
acaggaccaaggtgaaattaaaattgctaatgaagttttgggcaccattgtcattgataacatcttatcaggagacggttttgagatcaactggtctgactaaaatttattaggtgggaatttcctcttcctaataagcctgggagtgctatgggagactggggtctatttcacccctgcagtctcgaccataagagatggctacacccaggggggccagttcagagacccactcccaggtgtgcattctctttctcaaggatgttccttgctgagaaaaagaattcagtgatatttctcccatttgcttgtgaaagaagagaaatgtggctttgttccacctggctcaccggcggtcagaatttaaggttatctctcttgtttcctaaacattgctgttatcctgttcttttttcaaggtgcccagatttcatattgctcaaacacacatgctgtataatttgtgcagttaatgcaattattacagggtcctgaggtaatatacatcctcctcagctgacaggattgagagattaaagtaaagacaggcataggaaatcacaagggtattgactggggaagtgataagtgtccatgaaatctttacaatttatgtttagagattgcagtaaagacaggcataagaaattataaaagtattaatttggggaactaataaatgtccatgaaaccttcacaatccatgtttttctgccatggcttcagccagtccccccgtttggggtccctgacttcctgcaacaatgtcctgcaggaaaagttttttctttatatccagtttttacatgatgaattatttcccaatatttcatagtttatgaggctgaattcctcttgaatttattaaatgcttccttcacatcctctgtgatgatcatgtttatttactgataaaactcaatacctagaactgcacctagctcatgatggtacctaataaatacttcaatgaaatgatgtggtgatgcatgcctatagttttagctacttgggagggtgg

SEQ ID NO: 23058 - DNA, 1699 bp, Homo sapiens
gggaggctgaggcaggagtatcacttgagcccaggagaccaaggctgcagtgagctatgatcaccactgcattctagcctgagcaacagagggagaccctgtttctaaggagaaaaaggtcatgtcattggcaaacatggctaatttgacttcttttttagttgagatgccctttatttgtttctcttgcctaattgctctggccagaacttatagtattatgttgaatagaagtggtaaaagtggacatccttgttctgttcaagatctcagaggaaagactttcaatttttccctgttcagtatgatgttggacgtgggtgtgtcatatatggcctttattattttgaggtatattcgttctatacacagtttgttggggacttttgtcaaaaagggatattgaattttatcaaatggtgtttcagcatctgtggaaatctcatacggtttttattcttggttctgttaatttggtacgtcacatttattgatttgcatatgttgaaccatccttgtatttctacgatgaatttcacttgattgtgatgaatgattttcttaatgtgttgaatttggtttgctaatattttggtgagaatttttgcaggtatgttcatcagtgatattggcgtgtagttttgttgttgttgttgtgctcttgtctggtttttgatatgagaataatgctcaccttgtagactaagtttggaaatattctctcctcttcaattttgtttgaggagttcaagtagtattggtattagttctttaagtttttggtaggattcagcagtgaagttatcaggtcctgggcttttctttgatgggattcattttgttatcactttgatcttgttattgttgtgttgaggttttctatttcttcatggttcagtcttggtaggttgtatgcacccaagaatttgtctatttcttccaggcttttcagtttgttgggatatagtttttcataatagtttctaatgattggttgtatttctgtggtttctgttctgttttctttttcattttttattttatttgggtcatttttttcccttagtctagccgaaggttaattttgtttatcttttcaagtaatcaactttatgttttattgatcttctgtattgttttttattttcaattttattttggctctggtctttattcttttgttctactaattttgaatctggtttgtttttgcttttctagtattttaaggggtatcattaggtttattttaaatttttctacttttttgatgtatgtgtttactgctgtaaaattctcccttagtactgcttttatcccatagattttggtttgtcaacataccaaaaccaaaacaaagttccattgtgtaatttttttttttttttttttgagacggaggtttgttcttgttgcccaggctggagtgcaatagtgcgatctcggctcaccacaacctctgcttcccggattcaagcgattctcctgcttcagcctcccgagtagtgggattacaggcatgcaccaccatgtctagctaattttgtatttttagtagagacagtgtttctctatgttggtcaggctggtcttgaactcctgacctcagaagatccacccacctcggcctcccaaagtgttgggattacaggcatgagccatagcaaccagcctcttaaattcttttgatttttttttt

SEQ ID NO: 23059 - DNA, 1034 bp, Homo sapiens
acagaattccattctctttatggctgaataataatctgctgtctatatataccatattttctttattcattctttcattgttagacacttaggttgattccatattttggctattatgagtagtgctgcggtaaacaagggaatgtatatatatcttttcaaatatattgatttcctttcttttggatatatacccaatgggattccagatcatatggtagttctatttttaattttttgagaaacccccatactgttttttttgttttgttttgttttttttgagatagtcttgctgtgtcacccaggctagagtgccatggcataatcatggctcactgcagccttgacttcctgggctcaggtgatcctcccacctcagcttcctgagtagccaggactacaggcctccactaatacacctggctaagtttttttgtttgtttctttgattttttgagacagagtctcactctgtcactcaggctggggtgcagtggcacgatcttggttcactgcaacgtccgcctcctgggttcaagcaattctcttacctcagcctctggagtagctgggactacaggtgcacgccaccatgcccagctaatttttgtattttcagtagagacagagtttcaccatgttgaccaggctggtctcaaactcctgacctcaaatgatctgcctgccttggcctcctaaagagctgggattacaggcatgagctactgtccctgactggttgtgtgtgtgtgtgtgtgtgtgtgtgtgtgtgtgtgtgtgtgcgcgcgcgcgcgcgcgctcgcgcgcgtgcatgcagacaggtcttgccagtttcagacaggttttgtgcgtgcatgtgtgtacagacaggtgttgctgtgttgcctagcctggtctggaactcctgggctcaagtgatctcccaccgcagcctcaagttttgggattaaaggcctgagccaccacacctgaatattgttctctacagtggctgtactaatttatattcccaccaactgcatacaaggatt

SEQ ID NO: 23060 - DNA, 1040 bp, Homo sapiens
ggaggggccggggtggaatgatatagtttggctgtgtccccacccaaatctcaacttgaattgtatttcccagaattcccatgtgttgtgagagggacccaggggaaataattgaatcttgggggctggtctttcccatgctattctcgtgatagtgaataaatctcaagagatctgatgggtttatcaggggtttccatttttgctttgttctcgttttcttaattttttttttttttttttttttgagatggagtcttgctctgttgccaggctggagtgcagtggtatgatctcagctcactgcaacctctgcctcctgggttcaagtgattcccctgcctcagcctcctgagaagctgggactacaggcacgtgccaccacactgagctaattttttgtattttttaaattaatttatttatttttctttgagtcggagtcttgttctgccaccaggctggagtgcagtggtgcgatctcagttcactggaacctctgcctcccgtgttcaagcgattctcctacctcagcctccttagtagctgggactacaggcatgcaccaccacactcggctaatttttttttgtattttagtagaaacggggttttgtcatgttggccaggatggtctcaatctcctgacctcgtgatccgcccgcatcggccttccaaagtgctgggattatgggcatgagccactgcgcccgggcttctttctcattttctcttgctgccgccatgtaagaagtgcctttcacctcctgccatgattttgaggcctccccagccatgtggaactgtaagtccaattaaacctctttttcttcccagtctcaggtatgtttttatcagcagcatgaaaatagactaatacagtttgtattacatgggtatatatatgcatgtataaaaggcaaatgtaagcatgctttctgaaggattgatgataagctattttcttcagtgaatggaagagtttgatgtagaaacacctttttggccgggtgcagtggctcatgcctgtaatcccagca

SEQ ID NO: 23061 - DNA, 1050 bp, Homo sapiens
tacctcccggtacgggaccggatccgcatctccaggtgcggccccgcctccggggggaagggcagggcggagggcgcagctggcacctggagatgcgatgtggcccggggctggggtcgttctaaccgcgcgtcccctcccccagggtctgtcaccgctggaagaggctggtggacgaccggtggctgtggcgacatgtcgacctgacgctctacacggtacgcgcagctggccgggcgggcctgggccgcggtcgcggtgcccggaccccgaagaccacctctcccaccctgggactgtgtgtcggggcccgggctggggatttagagccaggcgatccggggcctatctcggcatcatcgcttaccagctcctcttcgacctcagggcctcaatttcctcatccctgcaatggggataaaggacagtacctgcctcacggggctattatgggacttcactgagatcacgcagggaaagggcttagaacagtctggcacatatttatcattcgataaatgctaatttatgactatgttatcaagtttttgttttgtttttgagacagagtctcgctctgctgctcaggctggagtgcagtggtgcgattgcagcctcgacctcccaagctcaagcgatcctctcgcatcagcctcctgagtagctggaaccacgggcgctcgccactacacctgctaattttttattttttgtagagacggagtctcactatgctgcccaggctggtctcgaactcctgggctcaagtgattctcccgacttagcctcccaaagtgttcagattacaggcatgagccacagcaactggctcaaaacatttatagatatatttgttgccctttttgaaactgtcttcatagataattgctattataaagtgaatttgcacccttccttttacgttacttcatatgtgtgtgtccaaaaacaattatagtgttagtaatgtatttctgaacttcgggtaatgctgttctactatttagatagtgttctacttttaaacaattttactgtatatatccatct

SEQ ID NO: 23062 - DNA, 1032 bp, Homo sapiens
gagaagacaggtgtcattgcacaagaagaaagaaacaaaaaggcaaagccagttcagccatcaaatgaaatggcaaatagcttctcactttttaggctctaagagagtcctggtgaatcccaggaagaatacatgatgagcacatggtgagccgggttctttttaaattttattttgtttttttttttttaagacgcagggtcttgctctgttgaccaggctagagtggagtggtgtgaccacagcccactgtagcctcaacctccttggcccaagtgatcctcctaccttagcctctcaaatagttaggactacaggtgtgtaccactacatccagctaatttttctctttctttttcttttttttggtagagatgggggtctcactatgttgcccaggctggtcttgaactcttggccttaagtgatcctcttgcctcagcctcccaaggtgctgggattacaggcatgagccacagggcccagctaatttttgtatttttagtagagacagggtttcacaatattgttcaggctggtctcgaactcctgacctcaagtgatccgcctcagcctcccaaggtgctgggattacaggcatgagtcactgcacccggcccacattgtttctgttcctaatttctctagtaatttctatgagaaagacactgatagaggcactcactcactcaggagggacgtgacacagtccgctctgaatggctgtcagttgccaaatttgggagacagatgcagccgacacatggtacaaagtgccagatgtcaagagtcaagtgggcttcctgggggaggtggcatttgagatgggccttgaaggatgagcgagtgaagactggagggtggacacagaagaaagtcattggtcatgctgacaagacctggtgggtttacccttattttacatgattctaaccatgtttaaaagaggggaagtttctggaaatgggaactagggtaagtgtgtggttgatgcctatggtgggtgcagataggagaagggaagtgagcttg

SEQ ID NO: 23063 - DNA, 1050 bp, Homo sapiens
ggcatgggccatcacacccagctaatgtttgtatttttagtagagatggggtttcaccatgttggccaggctggtcttgaactcctgacctcgggtgatccgcttgcctcagcctcccaaagtgctaggattacaggtgtgaaccaccgcgcctggcctgaatttccttgtttttaatcccactttttcagtggtcacattttcaggtatacgatccttcaccaagaacaacttgaggatgtattttggtgtaagaattagaaaccttgtcttttctttttagagacagggtcttgttctttcacccagactggactgcagtgatgcgatcatagctcactgcagcctcgaactccttcgctccagagatcccccaacctcagtctctggagtagctgggactacaagtatgtaccatcacgcctaactaatttttatttttatttttagtaaagatgagttcttgctatgttgcccaggctggtctcaaactcctgggctccaatgatcgtccctcctcatccttccaaagtgctgggattacaggtgtaagccaccgtgcctggcttctttttttttccttttaatatatgattattttttgtaaagatggcgtctcactctgttgcccaggctggtctccagtgatttcaattcttgtaagtataaagcagatgtggaagtgctgggtcatttggtggttctatttttaatgttttgaggaaccaccataccatagttcatagtggaaggctgttttttaaatgaaataaacatgtaaggctgaggtgcccatctacttccctagaaaaaccacagtaaggacattgccacgtctcctttctgcccctgttttttggctgttaccacatctgcatgtccatcaatttagtatttctttctttttatctctatttactttttttttttttttgagatggagtctctgttgcctaggctggagtgcaatggcgcaatcttggttcgctgcaacctccgcctcctgggttcaagtgattctcctgcctcagcctccttagtagctgggat

SEQ ID NO: 23064 - DNA, 1075 bp, Homo sapiens
ttactagtctgcgttagagaggggacagtgcgtttctctcccaaacgattgcagttctctccttttcaggcctataatgcaaagagcaaaagctttgaagatcctcccaaccatgcccgtagccctggaaacaaagggaagggcaagggaaaaggtacgtcattgtatgagtttcttttcaagttattcttctgtaacttggaggctgcctgtgaatccctcagtgtaaaaccacctctggtgttactgactctgggacagcgaggccgcctgagttaacaaggcgcttgagagcaaggtggacttggactctgaggatcgggtttagcctctggcctctctcccccagggaagggcaagcccaagtcccaagcctgtgagccgagcgagccagagatagagatcaagctgcccaagctgcggaccctggatgtgttttctggctgcggggggttgtcggagggattccaccaagcaggtgagcgcccgtaggctccatctctgaatacctggtgagcccagaccgggcaggtgctacctgaaacgacttccaaccccggtcaccttcctgactcaagaatctccttccgaggccaggcacggtggcgcacgcctgtaatcccagcactttgggaggccgaggtgggtggatcatgaggtcaggagtttgagaccatcctggccaacatggtgaaaccccgtctctaataagaatacaaaaattagctgggcgtggtggtgtgtgcctgtagtcccagctactcaggaggctgaggtgggagaatcgcttgaacctgggaggcagagcttgcagtgagccaagatcacaccactgcactccagcctgggtgacagagcgagactccatctcaaaaaaaaaaaaaaatcttctggagagttgaaagcatggcttcgtgcttgatctgccaggcatctctgacacgctgtgggccatcgagatgtgggaccctgcggcccaggcgttccggctgaacaaccccggctccacagtgttcacagaggactgcaacatcctgctgaagctggtcatggctggggagaccaccaactcccg

SEQ ID NO: 23065 - DNA, 1082 bp, Homo sapiens
ggtcaacaagttctacaggtcagcagaggcctctgttcttccacgaggccacagactcttctagaaggctctgcctgaaacaaggttgtggcatagcacccacagttgttctaagagttaggttgaagtagctgtttttccaagtgtttctgattatcggtgggcactgataatgactagaattctagttcccagccctcacttttaggtccttattttaatgttgcagagccctttttccaaaagaaatccttaagctggctgggcactgtagctcacgcctctaatcctagcactttgggaggctgaggcaggaagatcacttgagtctaggagttcaagaccagcttgaggaaacgtagtgagaccccggccctaccaaaaaaaaaaaaaaaaaaagactagctgggcgtggtggcacacgcctgtaatcccagctacttgggaggctgaggctgaagggatcactgaaacccaggaatttgaggctgtagtgagccatgatcccaccactgcactccggcctgggtgacagccagaccccgtctcaaaagaaaaaacgggtagagtgcctgggcacccccagagaacctcccaagctccatctatgactgtccaggttctgtcccgctgtccccacctcttcccaggtcctcctttctgtctctgggattttttctctttcctaagcttttggcctattacgttttctttttctaagacccgagtaacttgcggtgattaggcattaacctgaaactagcctgtacaggaagctatacacttgcctcacctcttagctaacatagatcaaagatttcctgaagcctttgtaataacaggaaataaaacaagggctgtgagtggtacaggtgagagaaacacactcgagaggctgctaccggcaggcggacacagcagggcagggccaggcgtgcagagcaagcagccaagctgacctaatggttggggggtctctaccctgtggttccctaattgggggcgaatctaccttgcagttccctcatttggggaggggttatctttacctgcggttccctaagtaggggggtctttaccct

SEQ ID NO: 23066 - DNA, 1044 bp, Homo sapiens
gatgacttctctgtgtcagaggatcgaggctcttccaggaaaaacctaaagccacagatcgtttccacactgatccattctgtgttttttctaagaatcagcgtgtggttggaattacagccaacgttttccagatgccttcccggctcacaattccatttccttagagccccagctcccttgccttagttcagttactgtgaattatgagaactggagaagcaggttccctccagccttggcacagttggggcgcgttaccccctctggttgtccttggtgggaaggggacacctccccgtagtgttttctgccagttgctcctggcaaagtgggagagtcagcacagagacgcctttggggcccgtcagactcctggggggcctagtggggagaacgtgacagctgacttccctaacggcaggccttcttcaaagaacagcttttccacactagtcagaccacactcccattgtcccaggccctgtggcgccttacattggcctccagtgtcgcttctagatcagagccttagtcagggtagcgtaggttgtatcatagcaacaaccccaaatcacagtgacttaaaaccacagaagctggactgggtgcggtggctcatgcctgtcaggagttcaagaccaagaccagcctggccgacatacctgtctctactaaaaataaattagccagggttagctgggtgtggtggtgggcacctgtaatcccagctacttgggaggccgaggcacgagaatcgcttgaacctgggaggaggagttgcagtgagccgagattgtgccactgcactctaacctgggtgacagagtgaaactctctcaacaaaaaccacggtagccgctgtctcgctcatacgaggtgcccatcacaggtcagcagaggactccacctgttgtgtcccttggatatctgggccgctggagtcagaagttgccagtgtttgagcccaagggaaagcacacaggacattccccaggcagtgacatcctctttggtcacttctgcccacgtcacatgccagga

SEQ ID NO: 23067 - DNA, 1055 bp, Homo sapiens
tgcaggaatttgtcacacgcctggctaattttaattttttgtagagttgggggtcttaatatgttgcccaggctggtcttgaactcttggactcaagtgatccatctacctctgcttcagcctcccaatgtactggttcaggtatgagccaccatgcccagcctaaaagtcttaattcaccgtttgtttcattgttgctaagggctgtgtgactcactttttttttttttttttaattttttgagacctaaaagtcttaatgcatcatttgtctcattgttagtaagggctgtgtgatttgccctttttttttcctttttttttttttttttttttttttttttgagatggagttttactcttgtcgtccaggctggaatatggtggtgtgatcttggctaactgtaatctccacctcccaggttcaggcaattctcctgcctcagcctcccaagtagctgggattacaggcacaccctaccatgcctggctaatctttgtatttttagtagagatggggtttcaccacgttggccaggctggtctgcaattcctgaccttaagtgatctgcctgcctcggccttctgaaatactgggattacaggcatgaaccactgtgcccagccctgatttgcctttttaatgccattttttaggtgtgtcagcagcctgagtgtgggaaatgtaaagcctgcaaggacatggttaaatttggtggcagtggacggagcaagcaggcttgccaagagcggaggtaggtcaggccgagtcttcctcctgtggcagaggacttgccagctggtggcagatgcactgtggagaagggcctgcatgtgtgggacagcaccaggattccttcgttaggcattgtctcaggacctgtccctgttatgaagaaaacagccccggttggtcttacttagaaaaggggccttaggtataaccagtgacattgcaggtgtcccaatatggccatgaaggaggcagatgacgatgaggaagtcgatgataacatcccagagatgccgtcacccaaaaaaatgcaccaggggaa

SEQ ID NO: 23068 - DNA, 1035 bp, Homo sapiens
taatttttgtatttttagtagagacagggtttcaccatcttggcgaggatggtctcaatctcttgatctcgtgatccatccgcctcggtctcccaaagtgctgggattacaggcgtgagccatcgcgcccggccctgtgcctggccaattatttgtttaccttgaggtgtccacttacacaggaaagctaaggttttaaaaaattggcttttcctctaaatcttttcaggaagtctttggttatgagatttatttattcatttattttgagatggagtctcactcactctgtcgcccaggctggaatgcagtggcatgatctctgcttactgcaacctctacgtctcgggttcaagcaattcttctgcctcagccttctgagtatctgagattacaagtgcccgcctggctaatctttgtatttttggtagagacgtgatttcgccatgttggccaggctggtctggaactcctgacctccagtcatctgtgtgccttggcctcccaaagtgctgggattacaggcatgagccactgtgctgggcctgactataagattttgtattctatgactttagatggtagagtgagtcagagctcacctgctggccctctcactgcctccctccccttctctctgttttatgataatcacttatacaaagttcttaacaccgaagcactatctgggtgtaaaacactctcttagcctttaatcctcttttgttttccctgtgtaggaggagaagagacgcaaaacgacccccaaagaaccgtaagaatttattcttgacattatcgaaagcagatggtaatgttaaaatgatggttctagaacaaaagggaaggggtttcagtaattgccagagcaaccttaggctcattttggatcgggttggtgaacataggaccaaggtgcgtcaggcaggatgcccctgcggtgaagagccactgtgaccacgcgcctgggcctcactgccacagccggtgcctccctgtgccacaggcacctcaggcagaaacctcacaggggcg

SEQ ID NO: 23069 - DNA, 1921 bp, Homo sapiens
tagctgggagtatgggcctgtaccaccatgcccaactaattttcgtatttttagtagagacagggtttcaccatattggtcaggctggtcttgaactcctgacctccgtgacccacctgcctcgcctcccaaagtgctgggattacggggtgaagttagcttcgatttctcctcccaaccccagggcccttctcagggttggtcacacagctgtgtgtcatgtggtagtgaaaggccatcaggtgagcagctgtgtcacttacctttcactgtgaaaatgctgtgtgacaaatggctccaaggccagaggcctagaacagtgagcatttttcaagctcacttgtctacagcttggtggctgtcggctgatcttgaggtggcttagtggggatggctgggctgacccagctctgcctccgcaatttggccaggctgggtacacgcttgtggctgtgccagaccacaagggcagaaatgaaaagtagcactttttcaaacctctgttgaaaaaagttgggccaggtgcagtagctcgcgcctataatctcagcactttgagaggctgaggcgggtggatcacttgaggtcaggagttcaagatcagcctggccaacatggtgaaaccccgtctctaataaaaatacaaaaaattagctgggtgtggtggtgcatgcctgtggtcccagctacttgggagactgaggcaggagaatcacttgaacccgggaggcggtggttgcagtgagctgagatcacatcactgcactccagggtaggtgatagagcgagactctgcctcaagaaaaaaaaaaaggaaaaaagaaaaagaaaacaattagctgaagcaaattttgagactgagcctgaatccagaggtgggcagaataccccacctgagcggcagggccctggcagagtgggaggtgaagactcggacccctgtgtgcagtcagctgtccacggtcactgactgacgctgatcgcacatcagcccagctctcaacctaggcaggccagacatgggtcttcctccaccgcaggctggattcccatcaggccacggaaatcatgacatccctttgtctgctttttgtattaaaccactggcatctctgaccaacattcagatggggtattgatggtgttcctgaagaccttgagtcctggagtagtaaatgccctctgggcttcctgcagtgaagacaggagaggcagcctgtcctctgaacctggggaggagcttgtgtcagcccttaggagctgttggccccggtgcagggccccccccgagctgaccagcctgtgtgtgtgttgtcttctgtgacagaacacccaaacagaaactgaaggaggagccggacagagaagccagggcaggcgtgcaggctgacgaggacgaagatggagacgagaaagtaaaggcgggttatttgtttctgaactccccctcattcttctgctcctgtttgcttgggcgggagtgcgcagggtggggctctgggttcaagtccagccccatccacccaggctccatggggccatccagactctgggaaggtcaccttttcctccttttgggggccgggatttgtggctggatgcctgtgctggatgcctagtgaacactcagttgtcctctgtctttcacactagagagggtctgtgtgagcctgggctgagatgtgcatgaagcatcctctcctgaggcctcactgctgagaagccttgacacacagtcagctctgacgcacatgtcagccacacctttgattctttcccagcctcctacgttctgagtctagctctccccctgccagcctccccagtctagtttagccaagtgcatgcgtttaaaccctaaagcatcatgtggaacactgctgggcctctgtcaaagtacaggatggccaggttgcctgca

SEQ ID NO: 23070 - DNA, 1005 bp, Homo sapiens
gacagcgtttggttgacttgttccttaaagttatagattccttccctcctattttacttaaaattcctcacagattttaaattccttcatctcttatcttcttgccatttacttgaagaaattcatttgtccaatagttcctagattgggccgattgcatccttgtggtgttccacaggtccccttgccttctgttccctataaactgataggattacaggactgatcagattccagctttttattttttgagactgacttttttttttttttgatacggagtcttgctctgtagcccaggctggagtgcagtggcatgatttcggctcactgcaacctccacctcccaggttcaagcgattctcctgcctcagcctcctgagtagctgggattacaagtgcccgccacaacccctggctaatgtttgtatttttggtagagacagggttttaccacgttggccaggctggtctgaaactcctgaactcaggtgatcctcatgccttggactcccaaagtgctgggattataggcgtgagccactgcacctggtctgaggctgactttatggatggtgctgtgtccctccatcagaaaggtgtgtgaggtctcttctctgacactagcagctgttgatcggtgtttagacccgtgatttcttaggacttacaagatggcaagacaacattctaaacccgtcattcagagaaacattaaacttgaagcctctttcaacatcctggtgaatgagggtccacttcaggccagctggaggcctagggtcttgttccactaatggttggcctcactgtgtgtgacagccctgccaaacggaaacctcaggaagagtctgaaagagccaaatcggatgagtccatcaaggaagaagacaaagaccaggtagggccagtgctttcatttcctgactctaccttaacttggtgtatttgatgattgtgacttcatatgtgttctgtccaagtaaataaaaaccctgtctaggg

SEQ ID NO: 23071 - DNA, 2041 bp, Homo sapiens
tatacacacatatatatacacatatatatgtatatatatacacacatatatatacacatatatatgtatatatatacacacatatatatacacatatatatgtatatatatacacatatatatgtatatatatacacacacacacacatacacataattgtgttacagagctgctatgtaatctcacaatcatcagaaaaatgacccccaaaaggggaaccttgttcagatcagatgacttcttagcattaggcattccagtaggacactctagactcttgcggggagacaaaagccagcttagttttttctaacactcatatgttaaacttgtttgtgtccaaaacttctttagaactgtgatattcttacaggcaaatgaagttgcttaacaagtgtttgtattttctcccctatttcttcctcccaggctcaaagatttggaaagagacagcttaacagaaaaggtaatctccaccttaaaatttttcttattaccaaatctgactgacacactttgtggctcataaaaagaaatttgttttctttaaatggattttgcattttttcccatggagtttcaaagataatttggatattcttgttaaatgtcagcactaatttgctgctaatagttgggtggtggtggtgtttttttttgttgttgtttttgttttttgagacagagtctcactctgtcacccaggctagagtgcaatggcatgatctcggctcactgtgacctctgcctcccggattcaagctgttctcctgcctcagcctcccaagtagctgggactacaggcacgcaccaccatgcccagctaatttttatattattagtagagatggggtttcaccatgttggccagactggtcttgaacgcctgctcgtgatctgcccaccttggcctcccaaagtgctggaattacaggcgtgagccaccatgcctggcccaggttttttttttttttaaccaatctcagttcctaaacaatctactctggattgtaacttgtcctggtaacactgttttattgtgtttttgttattgttttgagatagggtctcattctgtagcccaggctggagtgcagtggcacaattttggctcactgcaaccttcgcctcccaggctcaagtgattttcccactcagcctcctgagtagctctaactacaggctcaagccaccatgcccagctaatttttaaatattttttgtaaagatgggattttgtcatgttgccccaggctggtcttgaactctggggctcaaagcaatccacttgcctcggcctcccaaagtgctgggattataggtgtgagccactgtgcctggccgacactttacagaagcacagtattattcttataaaccatgatatgtctccatctcacctccagctttcccatttttcaccactttggagacaggagtgaagtgatcctaatggaaattccctgaacacatttcatgactgtttagtgttttgactgagacagcattgcctgccattcactcattgtgatgtgatcaggcagctcaataatttgtgtattagtccactagtgaatagcttgggaatgtgggtactgctaaacctatatccttcccttaggaatgtgtgaaggagaaattgaatctcttgcacgaatttctgcaaacagaaataaagaatcagttatgtgacttggaaaccaaattacgtaaagaagaattatccgaggtaagtcagttctcagcatcctagcctctagaaaaatgtctcctcctagtaacttgtctgtgaccagggaggcagcaagatccccagctgtcctcattgcctgatgatgatgatgatgatgatgatgatgaaggaaacacatgtgtttccttgttctctgacacttgtttacattcactgctacttaaattatcctttcctgctgtaggagggctacctggctaaagtcaaatcccttttaaataaagatttgtccttggagaacggtgctcatgcttacaaccgggaagtgaatggacgtctagaaaacg

SEQ ID NO: 23072 - DNA, 1026 bp, Homo sapiens
aggtgcatgccaccacacccagctaattactattttttgtagagacaggttctcgctgtgttgcccaggctggtctcaaattcctgggctctagtgatccttccgcctcggcctcctgagcagctaggagtacaggtgcgtgctgtcatacccagctaattactgttttctcgtagagacagggtctcactgtattgcccaggctggtcacaaattcctgagctctagtgatcctcccgcctctgcctcccgagtagctaagactataggtgcatgctaccacagccagctaattattctttcttgtagagacagggtctcgctctgttgcccaggctagtctcgaattcctgggctcaagtgatcttcctgtcctggcttcccgagtgtagagattacaggcatgagccactgcgcccagccatggtctgctgtatttcagacgagcatttctggcgtagaggtgttagagtaatctaacattttataatttcttcctatccaatctatactagatacctctgctgggttagttttcttaacacggctctgatgtcattggttctacttccccttgactgctttggtgtttgttaactatggaacaagatggataagtgtgatgcttttgccctccctccgactgtccccagccacctctctggaggtgcctttccctccctgtatgtggccagtctcacgtttgtttcttgtgtgtttccagaaccagccacttctcaatggtgcccctgtttgagcagcttcctgtgcccggttcacacagagctgtcaacttcttcctgaggctgttataccctttctcttgggaatcccgcaggcgtgagctgtatttgccttattcctctgtggttgtttatatatatctttttttttttttttttttttgagacggagtttcactcttgttgtccaggctggagtgcaatgacgtgaccttggctcaccgcagcctccacctcccgggttcaagcgattctcctgcctcagcctcctgagtagctggga

SEQ ID NO: 23073 - DNA, 1025 bp, Homo sapiens
ggctaactttttcttatttttagtagaaaccggggtttaccgtgttggccaggctggtgttgaactcctggactcaagtgattcgcctgcctcagccccgcaaagtgttgggattacaggcatgagccaccgtgcctggccttttaattcattcttaagcctgctctcagacagctaggcttgcttctccacaataaagagtgttgaattttgtcggtgtatcccgcatggtgccattataacactgaaattagtgattatttcagggtctgttaccagagcgtgtctgccgtattcactgtatctgcagcttggagcacagtagactcaaatgcttgcatgccagctcttcccctgtacagcctggattaacactgatgctagcagactcctttgcacaactgattagctttcgtaactaccacagctttcttactgctagtcattctgtgatgggattaagctaggtcttgaactccttaactccagttccttggctactactgagtacatactgaataaggcaaaattgacttacctcttttgttttgctcccctgtggtagaattctaggggtacagactgctgggtttcaaatgccgccctacttgccagccgtatggctaagttattgaacttcttggtgccttggtgtttcatctataaaaagggggtggggctgcctgctcgacaggggtgttaggaagactgagcttatcagtacagatatgttgagagcagcacctgtccaaagcccttcatcactggttattacgtggtactgtgtgtacagtggggatgctgtgggtttggttccagaccactgcagtaaagtgaatctagcaagaaagtgagtcacacacacattttggtttcctagtatgtgtaaaagttattagactaggccgtgtgcagtggctcatgcctgtaatcccagcagtttgggaggccaaggcaggaggatcgcttgagccaaggagttcaagactagtctgggcaacataggaagaccccccccatctcaa

SEQ ID NO: 23074 - DNA, 1056 bp, Homo sapiens
gtgcctgtaatcgcagctactcgggaggctgaggcaggataatcgcttgaacccaggagccgagattgcaccgttgcactccagcctgggcaacaggagcgaaactctgtctcagaaaaaaaaaaaatttttttttttagagatgagggtcttgctttgttgcccaggctggtcttgaactcctggactgaagcaatcctctgcgttggcctcccaaagggctgagattacaggcgtgagccacagggcccggccattattcctcaagagttcttaaaagtggatgctgcaggagttaactgccaggaagcaggaattcctgctaaggtctgctgcttgccaaagcctttcccttcaacaggggttgccagtaggccactggctcaggggctctgttggccctgtgcaaatattttgtttggctgaattggaataccattaggtgagccttacaatccaccactgaccctgggttccacatttctttacactcagattgcttcactgtaggcattggagttttggaggactgcttttgaccatgtggtagacattgaaattgtagtttatatgactcactccacagacttttttttttttttttacattttgaaaatatttcattaaatgaaaaataaacatggtatccaacagtacttgaaacttagatttttttttttttttaattgaggcagggtcttgctctgtggcccaggctagagtgcaatggtgtgatctcagctcactgcagcctccgcttcccgggtttaagcaattctcctgtctcagcttcccaagtagctgggattacaggtgtgcaccaccacgcccagctaatttttctttttccccctcgaggctgagccttgctctgtcgcccaggctggagtgcagtggccgtgatctcggctcactgcaacctccacctcccgagttcaagcaattctcctacttcagtgtcccaagtagctgggattacaggcgcccgccaccaagcccaggtaatttttgtatttttattagagactgggttttgccatgttgaccaggctggtt

SEQ ID NO: 23075 - DNA, 1055 bp, Homo sapiens
ccactgctccgcgtggggggggtgtgtgcccgccttgcgcatgcgtgttccctgggcatggccggctccgttccatccttctgcacagggtatcgcctctctccgtttggtacatcccctcctcccccacgcccggactggggtggtagacgccgcctccgctcatcgcccctccccatcggtttccgcgcgaaaagccggggcgcctgcgctgccgccgccgcgtctgctgaagcctccgagatgccggcgcgtaccgccccagcccgggtgcccacactggccgtcccggccatctcgctgcccgacgatgtccgcaggcggtaggtaccatgggggggaacacggactcagggggacaggcagggcgctgggtggggggtcgcttcccctcggggtggccggtggccgctgctgacagacgggcgcgcatgcgtggggtggtgcggcgcgcagcggcagttggcgcgggcagggtggcacttccggtcgcgcgtgcccgggctgtttggcgccaaaatggaccgtggattcccccgtagctccctggtggctagaaactaggcggggtgggggttctcttttgatccccaaatacagcaagctttgggttcgtttccggggtccccttcttcaagcagcggtgggccgggctcttgactccagcttggtcgcacaggaagtgggcagcccgcggccaacggacacccctcgggcaccggcacttcggcctccacttccggtgtccggcccggtccccgggggcgcttctgtggtggggggtccctcagtgcctttcccccaaagctgtgcatctcgatggcggcctccagagacggatgtcacccgtcggggcctgggctgggctggctcatgttcgagagcccagccttccgtggggtactcattctgtcagttgggactgtgtggttcttgctccttgggaaagtccatgttttggcaggaactttaaccgtgcattgcagcgcagggcccgggaagcgtgaaggctgcatggttggtcttttcctgtaaatctgtgcctgtgagccgtg

SEQ ID NO: 23076 - DNA, 1049 bp, Homo sapiens
aacaaaaaggctgcgtgtggtggctcacgcctgtaatcccaacactttggggggccgaggcaggcggatcacctgaggtcaggagttcaagaccagcctggccaatatagtgaaaccccgtctctacctaaaaatacaaaaattagccaggcgtggtgttgtgtgcctgtagtcccagctacttgagaggctgaggtttacttgtgaggaaaggattacttcagcccaggaggcagagattgcagtgaactgagatcgcgccactgtactctagactgagtgacagagtgagagtctctctcagaggaaaaaaaaaaaaaaaaaaaaagcatcaggaccgggggggtcctgcatttgatacccagccttgcttctttgctgtgggtaagtgactttgtctctctgaacctcagtttcctgaactgtaaaatagggctattaaaggtaggagaattcacttaagaggtagacagagtcgctgtacataagcaggaggtttcttttttagagtgattgaaatattttaaaattagattgtagtcatggttgtttgtacagaagtcattgaattatgtgcttaaaagggatgaatcttatggtattctaaatcgtatctcaagaaagcaaggctggggcatggtggctcacatctgtaatcccagtactttgggatgccaaggcggggtcatttgaggccaggagttcaaggctagcttgggcaacattgcaagacctcatttctccaaaaaaaaaaaaaaaaattaaaaacaagctgggcttcggcatggcgtggtggcttatgcctgtaatcccagcactttgggaggccagaacagatggatcaccggaagtcaggagttcaagaccagcctggccaggccagacatggtggctcacgcctgtaatcccagcactttgggaggccaaggcgggcggatcacgaggtcaggagatcaagaccatcctggctaacacggtgaaaccccgtctctactaaaaatacaaaaaattagccaggcgtggtggtgggcgcctgtagtcccagctac

SEQ ID NO: 23077 - DNA, 1095 bp, Homo sapiens
gtctggcctagccaattagagactctcaaccccaggctgcagtacgcggttcttggcatctgggtgagcgtggctgggctgcctccttcccatctggggggtgctacctgctggggccaggatggacgggagccaccagcagctccctcaagtgagaatggggttctggatgggtccatcccacctgagaactgggtctagtgtgcgcgggtcttggccttccctcccgaccttggaggggctctgctgggctcaaggtaggcggtccccggcccgccctctatcgtcccccaccggggccgcccctctccgcggcaggcgagaagtcgctgcagctggtcatggagtacgtgcccctgggcagcctccgagactacctgccccggcacagcatcgggctggcccagctgctgctcttcgcccagcagatctgcgaggttggtcggccccgcccctgcttctggagcttgccccttcctcttcagcttgggctggcctgagcgatccggtgcagtctgctctcacgctccgcccctgctcgtttgcccaggctgtcttgtccttgcactgacctccgaactgtttggcttgcttggccacaccccctcctcccaagggaccacgcacagccggctcggcccctcccaactcgccctcctgcccagctttgctcgtctagccccgtccctgctttctggctcagcctccttttgcttggtgccacgtgccatccggccctctccagcggccgggtagccaccggcctgacctgactgtcccccagccctcctggctgctcaggtcctgccgccgcccccggccgaaccccgccccactgaaactcacgagccctgccccgtccccagggcatggcctatctgcacgcgcagcactacatccaccgagacctagccgcgcgcaacgtgctgctggacaacgacaggctggtcaagatcggggactttggcctagccaaggccgtgcccgaaggccacgagtactaccgcgtgcgcgaggatggggacagccccgtgttctggtgaccaggcggggtgcagtctgagggggtgctggggtcacttggaacaggcaggg

SEQ ID NO: 23078 - DNA, 1030 bp, Homo sapiens
aatcctggctcctcaggaggctgaggtgggagaatctcttgagcctgggaggtccaggctgaagtgagccaagattgcaccgctgcactccagcctgggcaacagagcaagaccctgtctcaaaaaaaaaaaaaaaaaaaagagagatcaggtagccgggcacagtggctcatgcctgtaatcccagcactttgggaggctgaggctggcagatcagctgaggtcaggaatttgagaccaggctggctaacatggtgaaaccccctctgtactaaaaatataaaaattagctgggcatggtggcagggacctgtaatcccagctactcgggaggttgaggtgttgaggcaagagaattgcttgaacccaggtgggcagaggttgcaataagctgagatcacgccattgcattccagcctgggtgacgagggaaaatccgtctaaaaaatacaaacaaataaacaaaaaagcaggtgtgtgcctgctgctgcattgtgtctccatgtaagtggctgtgtgtccagagttagtgtccccacaagagtggctgtgtctgacacttgtcctagctgtgtgtgtgccctctaagtaggtaatgagtgtcattgttcccgggtatgggtccagagtggccccaggtggcctgatagtccccctggaccaccttccagggagccatttgtgcaggccaagctgcggcccgaggacggcctgtacctcattcactggagcaccagccacccctaccgcctgatcctcacagtggcccagcgtagccaggtgagcccagggctgggggctggggctggggctggacacgttccctgcctggtcccctgcttactgctcccacctctgccacctcctgccaggcaccagacggcatgcagagcttgcggctccgaaagttccccattgagcagcaggacggggccttcgtgctggagggctggggccggtccttccccagcgttcgggaacttggggctgccttgcagggctgcttgctgagggccggggatgactgctt

SEQ ID NO: 23079 - DNA, 1033 bp, Homo sapiens
ctgtaatcccagcactttgggaggctgaggtgggcagatcacctgaggttggaagtttgagaccagcctaacatggagaaacctcatctctactgaaaatacaaaattagccgggcatggtggtgtgtgcctgtaatcccagctactcggggggctgaggcaggagaatcgcttgaacctgggaggcagaggttgctgtgagccgagatcgtgccattgcacttcagcctaggcaacaagagcgaaattccatctcaaaaataaataaataaataaattaattaattaaataaaagtggaggtcaggccaggcttggtgactgagtactatagtcccaactatttgggaggctgaggcaggaggatcacttgagctcaggagtttgagctgtggtttgccactgcactgcagcctgggtgacagagcaaaactgcattacaaaaaaatgtgggagcagtaggatgtgctgaaggtacccaggtgaatatgtgggtaaaggacaaaggtgagggtgcctctagggttttgggttttagttcatttttgagacagagtcttgctctgtcaccaaggctggaatgcagtggcgtgatctcagctcactgcaacccctgcctcccgggttcaagcaattctagtgcttcagcctcccaagtagctgggattacaggtgcctgccagcctcagggtttttttgttgttgttgttttgttttttttgagatggagtctcactctgttgcccaggctggagtgcagtagcacgatctcggctcactgcaacctccgcctcctgggttcaagcgatcctccagcctcaacctcctgagtagctgggactacaggcatgtgccaccatgcccggttaattttttgtattttagtagagacggggtttcaccgtgttagccaggatgttttcgaactcctgacctcgtgatccgcccgcctcggcctcccaaagtgctgggattacaggcgtgagccaccgcgcccggcctagcctctaggatttttaacctgcgtacctgga

SEQ ID NO: 23080 - DNA, 1071 bp, Homo sapiens
aacctccgcctcccaggtcaagcgattctcatgcctcagcctccggagtagctgggattacaggtgcgtgccaccacgcctacctaattttttgtatttttatagagacggggtttcaccatgttgccccgtctggtttctaattcctaggattataggcgtgaaccacggcgcctgcccaacaaaatagtcttctattggaagtagatgccaactaggactttcaccctagagagaagtgaagtcaatgactggcttcaaaggacagcctgactcttgttaagggctaatgcagctggtggctttcggttgaaaccaattctcatttactattctgaaaatcctggggacctttagaatgatgttaagtgtacttggcctctgagctataaatagaacaacaaagcctgggtgacagcacatctgtttactgaatattttaagccaacagttgagacttcctgtgcagaaaaaagtttcatttcaaaatatgactgctcattgtcaatgcaactggtcacccaagagctctgatggagatgtacaaggagatgttttcatgcctgctaacacagcgtccattctgcagcccactgatcaaggagtacatttgactttcaagtattattattattatcttatttatttatttattttgagactgagtcttgctctgtcactcaggctagagtgcaatggtgccatctcagctcactgcaacctctgcctcctgggttcaagagattctcctgcttcagcctctcaagtagctgggattacaggtgcccaccaccacgctaggctaatttttgtatatttagtagagacggggttgtaccatgttggccaggctggtcttgaactcctgacctcaagtgatccacctgcctcggcctcccaaagtgttgggattacaggcatgagccaccaccgcccgacctgttctcctatttttaaaaattgccacaaccaccccaaccttcagcaaccaccaccctcatcagtcagaagccatcaacattgaggcaggaccctccaccaggaaaaagattatgacttgccgaaggctca

SEQ ID NO: 23081 - DNA, 1096 bp, Homo sapiens
gccggtgcacagccgcctgatcaacctgccccagctctgtgaatatgggagcatcttgggggctggagacatgacacccctttcctcagtcctgccccttgctgactcaggcagctggaaaatgaaataaggggttcctagagcctgcgaagggtgccttggggtaggggtgtcacagcccgccacaggacaagttgcagctagttttgcaaacggcagggagcatggagatcgggaagggctggtggctggacctagcccagttggcactgtgcctccccaacccacctcccactctgctccctctcctacctacctgtcgttctcggccctggtgatggaaatccgcggtgggatcagcagcggcagggtggtgggccgtggcggcagagggaccccagggtccgagggctcaggctgggcccagcccaggccaggaccggacgagaggcggcggcgagggcgacgcaggtcggcccccagcatgttggcacggtcggattcgggggtctccctcgacctctggggagggacaaagtggaataggggcgtggcctggctgggaagctctgagcccctctccccaagaacacccctacctagctgtctaagggagtagttaatggcggtataggctccccttcacgtgtgagccactcgctgacccctcacacagagggtgccctgccatcccttaggtctgagagtgccccttctcagccataatttttgtggggtcccctctcgatgccccagccttggggtctgtcacatctagacattctgtctcaagtgtgagacctctctaacacatcacctttttagggtctcttcccaacctccacgtctaagagggcccctcttggtcttaatgtcaatgcccccctcccatccctcacatctgagactctcaagacctcaccacccctagcgccccctcccacctcctcgccaaaatcctctcctcatttgagaagcctttgcctgctgtccctgggccggctgagagcctcttagggcagcaggagaaaaaatggaatcaagggggtaaactgaggcacgaggggaccaaactcctcacagcttggaggtagtg

SEQ ID NO: 23082 - DNA, 1041 bp, Homo sapiens
agctactcaggaggcagaggcacaagaatggcttgaatcacttgaacctgggaggcagaggttacaatgagccgagatggcaccactgcactccagcctgggcgacagagcgagactccgacttcccatcttaaaaaaaaaaaaaaaaaaaaaaaagaagtgtaaagatgtgattatgtggcagggggtaagggttaaaaagaaaacaagaacaagttttcctctgcttagccagcttacttcaaggacagttataacactgaaaagtcgaggccaaaggaatgggctccagacagcctcctccggagcaaagttgaaaagaaaaattcctttactgtctctccttttctgaaccattaaatatgactgtttgccaatggttgtatttagtaagatttgtagactctgtttttcttttgacacagctgcaaggccaacagctgtgcaaagccacaagttatgctaagtcagcagttatgctatagattacatgacctgtgactgtatcattaactgcttttgttttgcttctgtaagtttgcctataaaaaccacactcagtctttgttcaatggtcagcttttcagatacaaatccactgagccggtgtacatctaaataaatcctcctgtttcccgtgtcagtctctctggtcctttgtttcctgcaacaattacagaaatgagtgcctagccgggcatggtggctcacgcctgtaatccccacactttgggaggccgaggctggaggatcccttaagcccaggagtttgaggccagcttgagcaacatggcaaaacccagtctctacaaaaattagctgagcgtgatggcctgtgtccatagttccatctacttgggaggagtaggtgggaggatcacttgagctgtggaggtccaggctgcagtgagccgtgatggagtcactgcacttttcagcctggatggcacagctagaccgtctcaaaaaagaaatgagtgcatgctgtaccctctgcttttctattttatttacattttactgtggatttttaataggtag

SEQ ID NO: 23083 - DNA, 1027 bp, Homo sapiens
cagggcaggcctccctgaggagggtgagggaatgagccttgttggcaacaggaggggtgggggagacctaggaaaagaggcttccagaaacgacgtaagcttcatggcaggaacttgcatgaactgcagggcggcattaccactggagcgagtgagctgcagggaggtcacaggcgaggggacagatcacacaagcctcccatgctgtggcaagaagagatcttttttttttttttttgagacagagtctcactctgtcacccaggctggagtgcagtgatgtgatctcagctcactgcaatcttcccctcccgcattcaagcgattctcctgcttcagcctcctgagtggctgggattacaggcacgtgccaccatgcccggctgatttttatatttttattagggacggagtttcaccgtgttagccaggctggtctcaaactcctgacctcaggtgatccacccgcctcggcctcctaagtgctggaattacaggtgtgagtcactgttatctggccgagaatggatctttaagtgttttcggggtccctctcgccatcatgagtggcgagggcggaagccaggaggctggggtggaggcggccacatggtggggactgtggatgtggagagtggcactggattctggaacgtgctggggaagtagaagagactggctttgtggctagataggtgggggtggggggagtgggaggttaggagcggaggcaggctctagggatttctgcctggactaacgggatggatagagttgccacgtatccacgggaccagcttggcagtgagggcagagggcaagggtgtggatgaagccggagatgcccacccgggagcttgaactggagcctgcagtgctcagggcagagccctgggctctagaggaggcataaggccctgggcttgaaggaggtcatactatgggtgaacgcagacatggaaggggccaagaactgggcctggctgctccccatggctgaaggggtcagagagtcaaagaggaggtg

SEQ ID NO: 23084 - DNA, 1031 bp, Homo sapiens
gggccagaacctccccccgatacggcttccaatttctctaccccgaagcctaggcggctgtgaaccctgacccaggagtgagacccatctctgactcgaaccccgcccccgccctgaactcagacctcaaacccgagcctctcgtccccagaccctgaccccatcccagcgtcaaccctaagttgcagttccactttaggaggaagggaacagatgtcctccggatgcctccaaactgaggaagttgggccccaccttgggggagatcaatggctcagcagagcctccgcccccagatgagcatcggtttagcttgggcccagtcgagttctttccacccctcaaacgtgcgtgtgtcccatatacctcctccacagaattcgaggaggccactaatcttctggctgacaccccagatgcagccaccaccagcagaagcgatcagctgaccccacaagggcacgtggctgtggccgtgggctcaggtggcagctatggagccgaggatgaggtggaggaggagagtgacaaggccgcggtgagtccctgtgtcctgcctccttgcagcccccagctgacccaggctctccgggcaggcactgaatgcccgcaatgtgcagctcctgcaggagcagcagcagcagcagcagccgggattctggaccttcagctactatcagagcttctttgacgtggacacctcacaggtcaggctggggaggcaggtgggatggggctcagagttatgctcagggttcagccactcttcccctgggcagggtgctggtgatggtgggtgctggtgaacgaactgtggtgctctcaaagggttatggtgggactggttatggatcgggactatgggaacacaggggacacacacaatctggtgggttagagaaaggcctcctgggggaggtgaggaattggctgagacctaaaggagacagaaggcttccctggggaatagggtagggaagcaggagtatatgttccaggcacagggaacagcatatgcagaagaccaaaga

SEQ ID NO: 23085 - DNA, 1045 bp, Homo sapiens
gagaatggcgtgagcccaggaggcggagcttgcagtgagctgagatcatgccactgcactccagcctgggcaacagaacaagactctgtctcaatcaatcaatcaatcaataagctgggcatggtggtacacacctgtagtctcagctacttgggaggccgaggtgggaggattacttggtcctgggagattgaggctacactccagaataggtgaaagagcaagaccctgtctcaaaaaaaaaagaaaagaccaggcgcggtggctcacacctgtaatcccagcactttgggaggccgaagcagacagatcagttgaggtcaggagtttgagaccagcctggccaatatggtgaaaccctgtctctactaaaaatacaaaaattagcagggcatggtggtgtgtgcttgtaatcccagctactcggtaggcaggggctccagaatcacttcagcctgggaggcagaggttgcagtgagctgaggtcgtgccactgcactccagcctgggtgacaaagcaaaactctgactcaaagaagagagtgtgcgtaaatagagccaagaccctgggcctcccagctgcagttagcgcaggggcagccctctctcgaaagccggggtccttaacgacctgccctactcagctcaccagagagctggaagagctcaaggagattgaggcggatctggagcgacaggagaaggaggtcgacgaggacacgacagtcacaatcccctcggccgtgtaggttctgccaaaacgtgtgcctgcctgtgcctccttgtgcagtccggctcttggttgaagttggtgctgggtaactttcttttttttttttttttttttttgtcttcctgtacaggtacgtggctcaactttaccaccaagttagtaaaattgagtgggattatgagtgtgagccagggatggtcaaaggcagtatcctttttggggagccattttaacccttgtgcactgtaggtagggacataaaatggtgcatagcaggaccctgtaaaaattagccgggtgtggtggcgtgca

SEQ ID NO: 23086 - DNA, 1023 bp, Homo sapiens
gaaacaccgtctccggtaaaaatataaaaattagccaggcgtggtggtgggtgcctgtaatcccagctactcaggaggctgaggcaggagaatcacttgaacctgggaggcggaggttgcagtgagctgagaccgtgccattgcactccagcctggatgacagggcaagactccatcccccccccccaaaaaaaaagtatcccctcagctgtgtgagaatatgtcaggtaggagcaccttataatgaacagccatggggtagagattactactcagggaagaattcaagaagacttggttgtccttcgggagggcggacagacagcgggtgggaaggctgtgtgagccagccagagcctcagctgtcctaacaggaaatcagcaggccccatccgaaccagaccgatcaagaaatagcagcataagcaagttaacttagaaatgtggaggccagtgccagagaaaacagctaaaacttgaaagtggctgcttcagagggacggagaggcttggagaagggtgtgtgcgtgtgtgttcatgtttgcagaaccatatacatgtcatactctgattaaaaataatgtaagtttctaaaacttaaacatgggccctttgggaagcattttttttttttttttttttttgagacggagtctggctctgtcgcccaggctggagtgcagtggcgtgatcttggctcactgcaagctccgcctcccaggttcacaccattctcctgcttcagcctcccaagtagctgggactacaggcgccctccgccacgcccagctaattttttgtatctttagtagagacggggtttcaccatgttagccaggatggtctcgatctactgacctcgtgatccacctgcctcggcctcccaaagtgctgggattacaggcatgagccaccgcgcctggcctgggcatttaatctgcattctctgagttggcaggtttctaggaaggaacagtagccatctttgttttattttggtttgctttgggtttttgagaaagg

SEQ ID NO: 23087 - DNA, 1116 bp, Homo sapiens
aggtgagccaggggctgctcagcctgctgggcgccaaccgcgcggaggcgcagcagcgacggctgctggggcgccacgagcaggtggtggagcggctgctggaaacgcaagacggtgccgagaagcagctgcgaggtgagggtcggagcgtggtcgcgggcccacgggggaaggggcccgggtgctgggagggggcgaccaggcccacctcaaaaccccttctctcctggactctcccatctcctgccctatgccccctgggacggccccctctgagccttagtttcaccatctgagaaatcggctttatgacagcaaccatcccccaccccccaggggtttagtggtaaatataggagtctggaggggttggccccttctgagctctccgtgagcaggagctgggggtctcagggtttgaactggggctcaggagtcaaagctccgggtttgaatcctagcacccatccccatgtccgctgtgagacttgaggtgagtttcttaaattctctgtgcctcagcttccttccttgtcaaatggttgtgacaatagcccatcccttcttcctgaaggcattcagatgttttatggagcatctgctgctgccaggccctgggctcaccgcaacctccacctcccgggttcaagctattctcctgcctcagcctcctgagtagctgggattacaggcgcttgccaccgcactcggctaatttttgtatttttggtagagacggggggtcaccacgttggccaggctggtctcaaactcctgacctcaggtaatctgcctgcctcagcctcccaaagtactgggactgcagacgtgagccactgtgtccggcccatcttcactatctgtaactgcacagttcagtggccttaagcacattcacactgctgtgcaaccatcagcaccatcatccatctccagaactttctcatctttccaaactgaagctctgtccccatgaaacactcactccccatccccttctcagaccctggcacccaccagggttctactttctgtctcaaatttgactcctctaggaaccttacgaggaattgtacaatatctacccttcctagtggaatcatacaatatctaccc

SEQ ID NO: 23088 - DNA, 1063 bp, Homo sapiens
caaaggcaagcgagctctccctctgcttccctgggggagccccgacggccacaggactccagctccaagtgggttttcttggctcccctgttcaaagtggccacagcgcagaccgaagcaaaattcttgtatacattggcgccagggctgatgctggggtgtgggttttatgaagaacattgagaacaatcagctggtaattatggatggaggaagagggagaggaaaaaaatattgtatttttgaatcattgttgcaggagggggtgggaatcttaggatttgttgccagatttgaaagtcactggaacttgcatattttcattttaatcctaagtgttattacgcaccagttggggttcacccttcatcccccacatttaattgtctgatatagaatagtgttgtgtccactgccccgctagacggctttcttaggggaattttcttctggttgtttcacaagacagattctgtccttgtcacccgggacagaaaactcagtcttttcaccctcattcagatgaagggactcaggacaggctctgtgacttacagggacccaatcaattcacaatgagaaattaccggccaggcgtggtgactcacgtctgtaatcccagcactttgggagggcaaggcaagagcttgagcttgagcctagacgttaaagaccagcctgggcaacacagcaagacccatctctacaagaaatttaaaaactagccaggcgtggtggtgcgcgcctgtagtcccagctacttgggaggctgagccctggaggtcgaggctacagtgagctatgatcacaccattgcacttcagcctgggcgacacagcgagaccctgtctcaagaaagaaaagaaaaagagacaaattacccagaaacccctcccttccccacatggaggccttggcaaatgttaattttcctagaaaatccttcagacctgaagacgcaggaaaagaatctggctctcagggtggcttctgcgtccccgccgccaggccccagactatggtcacagggccgtcctgttcctccccgggactccagaatttc

SEQ ID NO: 23089 - DNA, 1064 bp, Homo sapiens
aagatcatgcaccaggtgggcccaggaccccctccccagaccccaccctcagccccactcctcatccccactcctcatccccagggatctgctgaccttgacccttctcttccccacagagttccggctgggaggtgagtcagccttggtggacagccacctgcctctgggacccccgtgatgactggccagcagccatcagtgaacaccagggggcaccagaggagcatggccgctggcccttggggctggggctgtggccacaagggacccaccccattatttccctcccttccccaaaaatgcccccaccccccgccccagatctcgagggcagcttgtgactcacccagctgggagctctccagagacacccctccctctgccagggccagcttggtcactgcaggggggtggcggggtgactcttgactccctcatggtctcttggtctctttctcatctctccccagtctatcacgtggctctccctatcttggtatctcactgtctcttagtctctgtctctccctgcgtacccagcttccagcctcccccaggctctctgctcctcatttctggttaatgtgtcctcccgctccagcccccccgaatcccgcttcttccctgcttaggtctatttttaggcatctcctagtttggggagaatgttctggccaaagatggcagaaacccagagcccaggcaggcaggctgggtgggagctgggtggggagggcaggtcctcttcgcccccgcccccctcccgtctctgatctctccccccacggaatgattctcacggggcagtgttaaccaggaccctgggggttgagggaactctgacctctgacctctcccatgacattgtctctctgtcccccacacctctggccccaccatgtctgccccatcctccccggatcggccttggtaagtgaacatccagccattctacttcctttccagtcatggggtggtgtttttagggtggtagggagggggttccttcttccaaacttagggctggggacaggagcaggggaatgccatggaacaaggga

SEQ ID NO: 23090 - DNA, 1048 bp, Homo sapiens
ctcagagccaggagcctggggctggggcctccctcccaggccctgtttagctgtttagctggttgtgttttaagcaagttcttgcccaatcatgcatcctgctagaaaaggaaatgaagcaacgttcccagccaccgcaggcagttgtcggcgactttctgatgtaagcacctgggctccgacttgaggggggcccttcaagacccaatgtccatttcccaatccttgtcatcggcagggcccagggatgtgacaatttttgctaatggaggagtcacttctttttttttttttttctttttgagatggtctggctctgtcacccaggctggagtgcagtggtgcaatcatagctcaccacagcctcaaactaggggtcacttctaagggatgctgggggttgggcggaaggggtgaggaggtaggattgagtaacttgctgtcactgcttgtactttgtagacagcctgagagtggcaggaccttatgtgaatgggggggatggactgtgatcagtgccggggagtctctgaagctggggtccccacctccaggggcttctgctcagaggttacgtgtgcagtttgaagatgtacatcttgacctccggtttagaggcactttctgcccatcagattccaaactctaggggcgcagcaccttttctttgctcccaaacaccaaccaacaccccttcacaggaccagcactgttaggatggctaagtggatgttttatgttcccacgtccctgactctgtttcagaggttgtgtctgctctcccagcccctgaagccaaaatgacttcctgcagctttcatgagctcagcctcttccctggggtatgtgtgagggggaaagcctggttcaagtttagatttatttctagggagccctggtttcttcataccagaggctacccttagaactttggagtggggtatctttttttcatttgtttttttgatacagagtctcgctctattgcccaggctggagtgcggtggcacaatctcagcttactgcaacctccacctccagggttcaa

SEQ ID NO: 23091 - DNA, 1029 bp, Homo sapiens
gcccacctccgtctcccaaagtgctggaattacaggcgtgagccaccacgcctggcaccccccaaccttcttcttttttttttttttttttttgagataatatcttgttctgtcacccagcctggagtacaatggcacaatctcggctcactgcaacctccgcctcccaggttcaagtgatcctcctgcttcagcctcctaagtagctgggatcacaggtgtgcaccaccatggccagctaatttttgcatttttagtagagacggggtttcatcatgttggccaggctggtctcaaactccagacctcaagtgatccgctcaccttggcctcccaaaatgctggtattacaggcgtgaaccaccatgcctggccttaatttttatattttctttagagactgggtcttgctatgttgcccaggctggtctcaaacttgtgagctcaggtacccacctgcctcagtctcccaaagtactgggattataggctgtcttaatacttttctgtagtttctagtttctccagtaaatttctctattgaatgacatccaaaaaatgtattttttttcctttttaaaatttttatttgttttagagacagggtctccctatgttacccaggctggtcttgaactcttgggttcaagtgattctcctgccttggcctcctgagtagttgggattacaggcgcataccaccacgcctgattaatatcagaaaaataagctgggcacggtggttcatgcctgtaatcccagcactttgggaagctgaggcaggtggatcatctgaggtcaagagttcgataccagcctggccaaaatagcgaaaccctgtctctactgaaaatacaaaaattagcctggcatggtggttcacacctgcagtcccagctccttgggaggctgaagcaggagaatcgcttgaactcgggagacggaggttgcagtgggctgagatcgtgccgttacactccagcctgggcgacaagagcaaaactctgtctcaacaaaaagaaaaataaa

SEQ ID NO: 23092 - DNA, 1025 bp, Homo sapiens
ggcctctgaagtggcatggagattgaggtccagagagcctgagatcttgagggctgacatttggagagatggggtcgagggttgtctttgggccttgactgctttgggcctttctcactctcattcccgggatgctttgccagaatctctgctggattggccgtaaccctgtccccgagcgggctcacagggtctgaaggccacgcatgaggcaaaggtaaagttctgagccacccggtgcctccttcccaggactgcaagatggaggaaggcgggaacctaggaggcctgattaagatggtccatctactggtcttgtcaggtgcctggggcatgcaaatgtgggtgaccttcgtctcaggtagggaccctcagcttggatgtcatgggtacctggggtggggatggaaataagaggggaaccgggaagtgccctaacacccctgtggtccccataccctgcaggcttcctgcttttccgaagccttccccgacataccttcggactagtgcagagcaaactcttccccttctacttccacatctccatgggctgtgccttcatcaacctctgcatcttggcttcacagcatgcttgggctcagctcacattctgggaggccagccaggtacgtgggtttgagtgccactgccctctggagacttgttcccaggacctcagtcagcgcctatggctacaccttttccagggggggaaaaaaaaaggctaggcatggtggctcacgcctgtaatcccaacactttgggaggccgaggtgggcggatcacgaggtcaggagttcaagaccagcctgaccaacatggtgaaaccccgtctctactaaaaatacaaaaaaattagccaggcgtggtggtgtgcacctgtaattccagctactcaggaggctgaggcaggagaattgcttgaaccgaggaggcagaggttgcagtgagccgagatcatgccattgcactccagccagggcgacaaagcaagactccatctcaaaaaaaaaaaaaaaaag

SEQ ID NO: 23093 - DNA, 1039 bp, Homo sapiens
ctcctctacccactgcctttgcctgcccggggtgagggagcccctctgctccacccatgccccccatgatggcacatctgtatgaggctgaggcatggggggcagtgtgaagaacaggggcaggttccaagaaaaagaagaaaaacccttcccacagccctaataaataacagaagggtttgggatgacctgggcacaggcaaggggagacacagcaccctgaaccccaaaacctctgaagtggggcaagccctacttaagtaggggattaggagagagtgggtgagaggtggagaggccgcacacagggaggggctgagaggaaaaggggtaccccaaggaccctgccatgggggagcctgccccccaccctacagctgggctcgctgattctgagagaagactcaatgacaaacaatgacctcatctccctcctctcctttgcacatgcttagacacgggcggtcccccattgactggaatcatgcccacccactctagaaattctggaaaccaagggctcctattggctgttcagtcgctgaacactggctggagttgccctcttgcaggaggattctaagaagtgaggggaaggctcccattggttggagccaactccttttggttaaaattctgagaaccaggggttctcattagccaggcaatggccaatggggtcaagctttggcccttaaaagggcaatagtaggggcaagtgcgcaccttccatttgtgcccatcgggatatctcagagggccagagaggcagatgtctcctaaatgtccttctagccatcttctaatgtctgggtctggctggcttggggggcaggggactttggcactcacgtggcacacgcacacacacgcgtggcagggaagaagtggggactgggcagattctgggtgggtggtcgggcctcacagcaggtggtcacggctggcaaacaggtaagggctgaagttgtcccggtggaagggggagggatagagtccactcagggtgtacaggtcccgcagcaggggcgtgggcagc

SEQ ID NO: 23094 - DNA, 1018 bp, Homo sapiens
gctggagtacattggcgcagcctcagctcactgcaacctctgcctcccgcgttcaagcgattctcctgcctcagcctcccgagtagctgggattacaggcgtgcacccccatgcccggctaatttttgtatttttagtagagacggggtttcgccatgttggctaggctggtctcgaactcctgacctcaagaggtctgcctgcctcggcctcccaaagtgctgggattacaggtgtgagccactgcgcccggcggggttgcagatttaaatgtaaagatgaaaccatacccgggcctgggcctggccttttatttccttatttatttgtttatttatttttgagatgcagtcttgctatattgcccaggctggtcttgaactcctggactcaagagatcctcccacctcagcctccagagtagctgggactacaagtcacacacagcctggtttgtattttagaagaaactgtctctaggatgtgtgtggcttgaagaatggatggggtacacattgtgatacaaggttggccaagagttaacaattgttaaagctgatgatgagtccaaggaggttcatgactcttgtcaacaattaaaataaaaaaaaggaagaccaggcatggtagctcacgcctgtaatcccagcactttgggaggccaaggcaggtggatctcttgaggtcaggaatttgagaccagcctgaccaataggccaaaaccctgtctctactaaaaatgcaaaaattagccgggcatggtggcgcacgcctgtagtcgcagctgcttgggaggctgaggcaggagaatcactggaacccgggaggtggaggttgcagtgagccgagatcgcgccactgtactccagcctgggcaatagagcaagactgtctcaaaaagtaaaataaaaataggccaggcgcgatggctcacgcctataatcccagcactttgggaggccaaggtgagcaaatcacgaagtaaggagttcgagaccagcctggccagcatattgaa

SEQ ID NO: 23095 - DNA, 1053 bp, Homo sapiens
atctcttgtaccgtgtgcctagaggaattccagacgcccataacgtgtatccttggaaacctgggctttttccagagggtggggagggggctggagtccggaccctgctcatctggcccactgtgtgccctggtgcagggccaaagccgtccagaggaacaggtgccacctagtgatttctgtggggtgagaagatgcagggcagggttccaatgccaatgatcgcccttgacctaagtggcccagatctgtcagaacccgtggatgtgtacagtgattggatagacgcctgcgaggcggccaatcagtagcgacacagaggacccgccccctgagcagccccgcgtactgtggatccagctgttcggttctggtccagagacattccaggggtccagggtgtgggtcctgggctgtcacagccgtgtgtgtgtgtgtgtgtgtgtgtgtgtgtgtgtgtgtgtgtgtgtgtgtagtgggtgtgcgtgtgggtgtgggtgtgagtgagtgtgggtgtgtgtggctgcacgtgtcactggggtggccgtgagtgtgtgctcacaggtacgcggtggtgtcgggttcctgggcctgaggggcctgaactgatctcacttggctccgaaagcctttgctgtgttccctgcagcccctggccccccagccttggggctctggctccccccggcggaattgggggactgtttcctgacatcctggacaagggaagcccactagaggctggaacaggacctctccagcctcctcaccagcaccgtgcccatctcaactggacttcccgctctccttctccaccttctagtgcccgtggccggggattcaaagccgccgttccccaggtccctgggctgggccctgacagggagccgcccccctccccatggtaaccaggaagcccgtttcatgttcagttgcttttgtagaggaagcaagggctgggatggggacagctgtcaatcacaagcccttaaataaagcagccagcgcacatcccttgctgtccgtgatgtcttgggttctgcgtctgcctgg

SEQ ID NO: 23096 - DNA, 1059 bp, Homo sapiens
gtcctaattaggggagaaaaaaatcaggctggcgagagccgcagaaagcaaagagataaagtaaataagctacaaatctgcctttcttcatggtccaggacatataaacaaaaagaggcagataagttataggtctgctttatggcccaggacatatggccctcctgctcagataacatacataactcaaacttcctgcttatcaacaaacgcttcaatttatcaaacaccacagcggccagaaaaatgcaaattagccccctgctgccttggcgttatcaatcagccaaagttccagtccataaaatcctcagcaagcctgtttccctgcattcagcttctcttctgctgacctgcctgttgctgcctcgcaacgaattttcatactttctccgataaacctgccttcctttacctacaattgtcttggtaaatacttttacccccggcgcaccactgccccagatagtcatagctcacccgcgacgaggcaagaggcgaggaggcaaaagaggagtgggtaacctgtctttgcttccactttggcagaacttgttctgtagcttcttaaaacacaacccaaacgtcgcttctctgctcgaaatccaataaaagtccttaatacggcccaccaggctccatgggatcagtcccttgcctgcctgcctgcctaaccaggtctattactacctcagcactctaactgcggtccgcggaccagcagcatggacgacactggggaccgagtcagaaatgcagaggatcaggccttccccaatgacctgctgaatcagaatcttttaaaaagatctgtagtttcttgtgaaagtttgaaaagaacgacttactagcttccactttataaagagtattttatattcctcacctgtgggatattgatcagagtgtgctgtggagacccggtgagttcgaggggctggggctggaactgggagaagagacaagtgaaacatccccgagatgatgcagccgaaggcgaggccgctttcgcagcacttgtatggcctgatggcccggcccacggctcctggcgtgcag

SEQ ID NO: 23097 - DNA, 1050 bp, Homo sapiens
agagtctcactctgtcatccaggctggagtgcagtggtgtgatcttggctcactgcaatctctgcctcccaggttcaagcgattctcctgcctcagcctcctgagtagctgggattacaggtgcacaccaccatacctggctaatttttgtatttttagtagagacggggtttcaccatgttggtcaggctggtctcgaactcctgacctcgtgatctgcctgcctcagcctcccaaagtgctgggattacaggcataaaccaccatgcccagcacaaggacaaatattgtatccttcccgttatatgaggtgcctagaatagccaaattcatagagaaagtaggatagacattatcaggagctggggggaagggagactggggacgtgtttaatgagtacccaatttctgtttagagtgatgagagaatgctagagatcaatagctgcgttggttacaccacatcgtaaatttatttactacaactaaatggcacattttaaaaatgatcgaaatggcaaattctctgttagtatattttacctccaaacaatctaaaaactaaagaaaaaaacatgattcaagctactaggcatgaaaacaacatctgggataacaaattacactgagtggaataaacagcaaatcagatactgcagagaagaagacgagtgaaccttgtgacctagcagtagaaactatcccaaatgaagcacccagcaaaaaaaacaacaacaacaaaaaacagaaaatcagtgagctgtgtagtgggaaaattacaagtgacataatatgcaaataacaagactctttggcagaggaaagagcatgacaaaaaatatttcaacaaatactggtttcacatttgccaaactggatgaaaattataaacccagaaatcaaaaaagttcaacaaaccatgagcatatatgtatataaatctacaccaagcacatcatcagtaaactacttcacagcaagaacaattaaaatagctttaaggcaacaggaaaaagacacattaactacactgaaccaaagataggattc

SEQ ID NO: 23098 - DNA, 1025 bp, Homo sapiens
tgacctcaggtgatccacccaccttggcctcccaaagtgctaggattacaggacagaaataatttggtttcctccataccagaatttgattggctgactagccatgtgtccccaaggaatggaaacgggttggagaagaaaaggcgtgtcccaagggattagttttttacaataatgatataggagactggtcccaccccatagcatccagctgctccctggggaggcctcaccgccacacctcaggctctttgggaggaacgacctaggggctgatattcactagactttcccaagagacttggcagctgtaggcatcttgggccagccccaggtagtcctgaaacccaggatcaggaaaaggcagagggtgggctgaggtcgcatcactgtaaagtttccaaaggggaatctcaacccaagacattctcagaaggtgtctgtgcctagggcagataaaaagagacacaaagattgtttacagcggagtgtcaggtggtttttctctgaaacgttcacaaacacaaaacaaatatttttaaaacggccatatactgccctctaaaaaaatgacgattaaaatactgcctgtgtttgaaacatagcctggaggacgaagaagtgatactgttgtgaactaaaggaaatccgtgttataaaatgcggaaagggatcaggaaatcccaaatttgctgccagccttaggagaaggtagcctagggaccacagtcgcggatttgagaccctgcttcgcgtatatttgggaaactcagataaaatacaaaagcccctggtgagaaagagggaactggggaccccacagcctacagctcctctcacacgaaccccatactcgaggcaggatttcccccatgaccctctagtggcccccgtacaatctggggagacacggaggcagcgggcgtgactggggcagcgggcgcggagctgaccagagagggcgctgggcctggggccacagtcagttgcacagggactggaccggacggctaggggtctcggct

SEQ ID NO: 23099 - DNA, 1032 bp, Homo sapiens
ttaaatacatagaccagtgacactataaaacaaccacacaaacaagtctgcataataaccagctaacaacatgataggatcaaatctacacatataaatactaaccttgaatgtaagcaggctaaatgccccaattaaaaggcacagtggtgacttggataaaaaagcaagatccaatggtatgctgtcttcaagagacccatctcacatgcaatggcacccttaggctcaaagtaaagggatggagaaaaatctactccacaaacaaaacagaaaaaagcaaaaggacatggtttggatttgaatctccacccaaatctcatgtcgaattgtaattcccaatattgaaggtggggccttgtgggaggtgactggatggtggtccttcatgaatggtttagcactatccctgtggtgctgttcttgagatggtaagttcttgtgagaaccggtcatttaaaagtctgtggcaccttgccctgctctctcttgctccttctctggccgtgtgaactgctgctccccctttgccttccaccatgattgtcagtttcctgaggcctccctagaagctgagcagatgccatccttccagtaccatgcttcctgtgcagtctgcagaatcatgggccaattcaacctcttttctttataaattacccagtctcaggtatttctttatcatgctgcaagaatggaataatacaagaaaattggtactgagaagtggcgcattgctatcaagatatctgaaaatgtggaattggttttggaacttcttaacaggcagaggtttggaagagtgtggagggctcagaagacaacaggaagatgagggagtttgagactttgtagaggcttgctgaatggttgtgaccaaaatgctgatagtgatataaagttcaggctgaggaggtctcagatggaaaggacaatacttataagtatttattgggaactgaagcacaggtcacttttgtttttccttagcaaagagcttggctgcagtgtgcctctgccctagggatatgt

SEQ ID NO: 23100 - DNA, 1024 bp, Homo sapiens
attacaggtgtgagccaccatgcccagcctggaaaattttttctaaaaatgaatgaatttgaagctgggctgcttcattttctttgcttgcttttaacatttgttgtcattctaacaatatcttaagggacatagctctaggttgtaagtgcaaatgaccttagatttcttttggaattattgtactgatcttcaatgatctggtcttcacattttattcctaaaatgcagacccataaaagtcatcataagttattacaaaattatagaaaaattattagattctatgttcatgggacactgtggccatggctgatttattcaccaaagttcagttgaaccttgaccaacatggttttgaactgcacagttcactcatgcacattttcatcagctcttgccatctctaagagagcaagaccaaaccctccttttttgctcaggttactcaatatgaagacaaccaaggaagaacaccttgataatctacttgcacttactaaagtcaacatatcttctcttctaatttttttgataaccttttcaaaagaaaagcttactgtattataagaatacagtacataacataccaaacaggcttggcatggtggctcatgcctgtaatccctgcactttgggatgctagggaggaggaatgcttgaggccaggagttcacgaccctccaccttacaaaaaaattatacaaaaattagctggggatggtggcactcgcctctagacctagcaagggaccctgtcttaaacatatatacacatacgcactttttttttttttgagacggagtctctctctcttgcccaggctagagtgcagtggcgtggtcttggctcactgcaacctctgcctcccaggttcaagtgattctcctcccttaccctcccaggtagctgggattacaggtgcatgccaccacaccaagctaatttttgtatttttagtagagatggggtttcaccacgttggccaggctggtctcaaactcctgacatcaagtgatgcac

SEQ ID NO: 23101 - DNA, 1033 bp, Homo sapiens
caatggcgtaatctcggttcactgctacctccacctccttggttcaagctattcttctacctcagcctcccaagtaactgggattacaggcatgcaccaccacacccagctaattctgtatttttagtagagacagggtttctccatgttggtcaggctggtctcgaactcccgacctcaggtgatccacccacctggacctcccaaagtgctgggattacaggtgtgagccaccgcgcctggcccagactggataattttaattgtttcatcttcacagttgctgattctttgttatgttagcaagtagtgaattggctcacttccagatgtacacacaagccaatagcatggcaccagcttttgaagaaagaaaagctttactacaagtttgactggcaaggagaaaggaagaaatgctcaaatatgtctccctgagctgggggctttggcaagttttataagcgtggggtaataagacatgaactcactgcatcttgcaatgatctcatgccaggttaatgtgactcgattggatcctgccatgggatgataccggggcccaacctgattagatcctagattccaccatgtggtatcttttttttttttttttttttgagacagagcctcactctgtagcccaagctggaatgcagtggcatgatctcgctcactgcaaccttcacctctggagctcaagcaattctgcctcagcctcccaagtagctgggactacaggtgtgcgccaccacacctggttaatattttgtatctttcacagagacagggttttaccatgttgctctgggtggtcttgaactcttgagctcaggcaatccacccacctcagcctcccaaagtgctgggattacaggcatgagtcaccgtgcccagcatctactttttactttaatctccacacctcagtccaagcatataggttccacccatggttacacatttggttcatctgggcatgctcagattatgtgaccttgagtgttgggtccatggcaactgaaaactcagc

SEQ ID NO: 23102 - DNA, 1051 bp, Homo sapiens
cacccaccaccacgctaggctaattttttatatttttagtagagacaggatttcaccatgttggtcagactggtcttaaactcctgacctcaagtgacccacaccagtgtctcccaaagtgctgggattacaggtgtgagccactgcacccggccttctaatctttttccagccttcaaattttttttttttttttttttgatacagagtcttgctccaggttggagtgcagtggtgtgctgtcggctcactgcagcctccaactcccaggttcaagcgattctcctttctcagcctcctgagtagctgggactataggcgtgtgcccccacacccagctaatttttgtatttttagtagagacagggtttcaccatgttgaccaggctggtctcgaacttctgacctcaggtgatccacctgccttggcctcccaaagtgctgggattacaggcgttagccactgcgcccggccatttttgtatttttagtagagacgggtttctccatgttggccaagctggtcttgaactcctgacctcaagtgacccacctgcctcagcctcccaaaatgctgggcttacaggtgtgagctactgcgccaggcctaatatctttttttttttttgagacagagtcttgttctgtggccaggctggagtgcagtggtgcaatcttggctcactgcaacctccgcctcccaggttcaagagattctcctgcctcagcctcctgagtagctgggactacaggcatgcgccaccacgcccagctaatttttgtatttttagtagagatggggtttcaccatgttggccaggatggtctcaatctcttgacctcatgatctgccaccttgggctcccaaagtgctgggattataggcaccacgcctggccctaatctcttctcaaagtacttttttctttaatgaatgtcttaaataaaaacttttttctaaccacaaacttttttttaaattattttattatgtaatttttttttagagagttggtcttgctgtttggacccggctggagtgcagtgatat

SEQ ID NO: 23103 - DNA, 1051 bp, Homo sapiens
tgggattacagatgtgagccactgcaaccagccccaatgatctgttttctttctttcttttttttgagaccaagtctcgctctttcacccaggctggagtgcagtagcacaatctcagctcactgcaacctacctctgcctcccaggttcaagcaattttctgcctcagcctcccgagcagctaggactacaggcacccgccaccacgcccggctaatttttgtatttttagtagagacggggtttcatcatcttggccatgctggtctcgaactcctgactttgtgatccacccacctcggtctcccaaagtgctgggattacaggcatgagccaccgcgcccggcctccaatggcctgttttttaacaagcccttcagatgattctcatgcatgagaactagttcatcagagcaacctgttaaaatataatgcaaaaagatatcactaaaatgtaaatataattagtaactaaattggaacactagagaatattgatttgattcagagacatcaagaaaggatgaacgggggaaaaacacaaaaattgtgctgaaaagatttttgttttctttatttgcctcaatctgtttgacacatgctaaaatctgaggctatgggtcatgcagtttactcacacattgcagtgctcataggacttgacttttttttgagttttttttgagatggagtctcgctctgtcacccaggctagagtgcagtggcgtgatctcggctcactgcaagctctgacccccgggttcacgccattctcctgcctcagcctcctgagtagctgggactacaggcgcccgccaccacgcctggctaatttttttgtatttttagtagagatggggtttcattgtgttctccaggatggtctcgatctcctgacctcgtgatccgccagcctcggcctcccaaagtgttaggattacaggcgtgagccaccgcgcctggccaggacttgacttttaagttaattttttgatgttgttgacaatgttatttttggttttgtctctacatgctaacagttcatgaattt

SEQ ID NO: 23104 - DNA, 1056 bp, Homo sapiens
caagcaattctccttcctcagcctcccgaatagctgggattacaggaacatgccaccatgcctggctaattttgtatttttaagtagagacagggtttcaccttgctggccaggctggtcttgaactcctgacctcaggtgatcctcccgcctcggccaatgaaagttctgggattacaggtgtgagccactgcacgcagcctttttcttttttttttgagacatggtctccctctatcacccaggagtgctgtggtacgatctcagcttactgcaacctctgcctccagggctcaagagatccttccacctcagcatcccaagtagctgcgactacaggcgtgcgccaccacacctggctaatttttgtatttttggtagagatggggtttcaccgtgtcgcccaggctggagcatttttaaaaaacttttatttacttttattaccccagagaccatgtaataggtttctcaggtcttttattggatgatttcaaatggaatttcagggcttagcagtgtaaatactaccaagggaaaaatttgggaaaactcttccattttggctgcagaaaaatgaatatattttcacaagaatgtgtggtaggtatttggttgaattataaagctttatcaaaactttagtttctcttctttttaggctggagaacttgggacagtggataagtctggtctgttcctgttatctggacttggcagattaatgcaacattctgtgggactttgcaatagctaaagaacttaaatatcctttgtttactaaaggcttcattattatggaagtagtaactgatgtttattatctgagatggatagatacttgtgcttttcttgttgagctataaaatagaagtgacttacaatttccttccctcctgtaaacactgaatttgagtgattttgatagattcatcacacatggagttttgtttgtttgttttatgttttaaatccacgtaaggcatgaaagggtaagcaaatggccttgactggggtggagaggcttgaggccagtgactccaagtggaggccaat

SEQ ID NO: 23105 - DNA, 1034 bp, Homo sapiens
atgaagtgagtatagattctcagtactgtgattttcacccttcctcctctgtacatgtgggatggatcaggcctcagtggctttagaggatgtggctgtgaacttcacccgagaagagtgggctttgctgggtccttgtcagaagaatctctacaaagatgtgatgcaggaaaccatcaggaacctggattgtgtaggtaaggatgacatcgcatttccacttatttaattggagacatttgtttcttggtcattcgtgctgttcaaagatttggaatatggaaaggggatatggttggccctggaaaaaaaaaaacagggtttaggggtgccagctcctgtagcagttgtacatcctcatataactttttgtccacatcttagcctactattgatgggcagcattatcagtcacataagcagtgattaatacatatattttatgtcgtattattacatcgtatattctcacagtaaagtaagctagaaacagaaagtgttaaaaagataatcataaggaagagaaactgtatttactgttcattaagtggaagtgcatcatcagaaaggttttcattctcattgtcttcacattgagtaggctgagtaagaggaggggctggtcttagtgtcttgggtagcagagactgaagaacattcatatatatatgtatatacaaatggacttgtgcagttcaaacctctgtttttcaagagtcaggtgtacttcagtgaatgcattttgaacgattgcagtgtacatcaaaatgttactgtttgtctataattttgtaaaaatttgtaatgatttttctgtgtataccttttaggaatgaaatggaaagaccagaacattgaagatcaatatagatatcccaggaaaaatctaaggtaatttatactcacaagagaaagatatgtccctggagccgttctgagaatgatatgaaaatttaaaaacaagcaaagaaaatgaacaagcctagcttaaatttatttattcttagaaaattttctccaaaatatatacttaa

SEQ ID NO: 23106 - DNA, 1029 bp, Homo sapiens
tcttaagttgccttggatatttgacatgatcattttgctgttgtgcagactgaatgacccaatatgtaccacccaaaaaatctatggatgtttagagggtaattttcaaggaataatggaggtgagctgcagacagggaatcattttgcataatagcctaatttaatggaaaggaagaatatttggtgtcatcatataaggaaaaatttaatgccttcttacaagagtagtagtttgaatctttttgtttcaatgcttccagaaagtccccagatcccaatttggtattcacatgtttgggaagagtggggggaaagtaaaatatttgtgtcttactaaatttgagcaaaggaaataaaatctttgtccattttttttcagtggtaacttatgttagtacttagcactgtgatttcataattataagtatctcatttgattgctcaaccaatcagttctcccatcttacagatgaagaaagttaagtacagggcacaggatcctacccaaactcacgtaactcagaatcatggaatctctggattttgaagtcctaatgtgtgccaccacctgtactgggcactgccaaaaaaaaaaatttttttttttttgagactgtcttgctctgtcacccaggctggagtgcagtagtgcaatcttggctcaactgcaacctccacctcctgggctcaagtgatcctcccacctcagcctcccaagtaactgggaccacaggtgcacaccaccacagctgacttttttcttttttcgtagagatggggttttgccatgttgcccagactggtctcaaactcctgagctcaagtgatccacctgcttcagcctcccaaaatactgggattataggcgtgagccaccatgcccagccaaaaactttaaacttagaagaacattgcaaggtttgtataattatatccttttaaaatattcatattttaaaacttattttaaaatttgttttgcaatacttacacactttttctgccacatgggatggaagtgagaaca

SEQ ID NO: 23107 - DNA, 1034 bp, Homo sapiens
ttgagcactgagtgaacgagactccgtctgcaatcacggcacctcgggaggccgaggctggcagatcactcatggttaggagctggagaccagcctggccaacacagcgaaaccccgtctccaccaaaaaaaatacgaaaaccagtcaggcgtggcggcgcgcgcgcctgcaatcgcaggcactcggcaggctgaggcaggagaatcaggcagggaggttgcagtgtgccgagatggcagcagtacagtccagcttcggctctgcatcagagggagaccgtggaaagagagggagagggagaccgtggggagagggagagggagagtatcgtatagcatttctctaagatgctgtgtatcctgtcattggagagcataagacttgaagtgatcatactaaaaatgtagaaataatttccaagtattcatggtggtgttaaatttatgaagaagtaagtgtggacgaagatttgagttctgatgacaaagttacaggataaatggagaaaattatatatgaacttttaatgaactgagtttatatccccagtgctgtcagtctcacccatcctcccctatacatgtgggatgtttcaggactcagtggtctttgaggatgtggctgtgaacttcacccaggaggagtgggctttgctgggtccctctcagaagaaactctacagagatgtgatgcaagaaacctttgttaacttggcctctataggtaagaatgaaattattccctcacttagtcaattagagaacaagtgtttcttgctcatcagcaaggttccaaggtttagaatgttgaaagggaatactttggtaaataaatcagacaggataacagctcatcctagatttagaatctaataatttttctgtaatttcgaataggtttaatgatttttctgggcctgcattttaggggaaaactgggaggagaagaacattgaagatcacaaaaatcaggggagaaagctaaggtgagttgtacttacaaaagaaaatactgtcttatgagagaatcttag

SEQ ID NO: 23108 - DNA, 1043 bp, Homo sapiens
cctgggtagtgtttcttggcctggacttatctgtgtgttttagagtgaagctgtgactgctgctgacctggcatacaaggtgctcatgggaaagactacctgccagagcagtcatttttgaaaaagagacaaaagagagggggaaaggcagctgttagatggtgggccgagtccacactcctaatagcacagggctcccaaggacccttaagtgttgctgctgttgctctattgcagcaaggatgctgaccctcaggattatagggcacactcatgtttcctctgcagcattgcaaagggttcattcaaagccagcttaaggcccaggtgcttaaactttataaagcaaccatgagggacaggcccctaagcctgataatagtgatttgtggctctctggagggaaaagaacacccctcccctgtagagaggattttgctgtcaaaatatatccagggacaaaaacaaaaacaaaacaaacatgttaggaaggaaaggaacaaaagaaaaaaatgctgaaaaagaggtccacaatttgacccaattggaaattccaaatagactaaaggaatttagacggcaaaaaagataaaagagcctctatatcataggttctgtattaattttaacatcttatgtaatgtattaattaacacactataggattagccaatacaagggctcaaattatggttatacctgggagacccactaaaatttaagcaaggtatcccctgataatcttaagggagttactgaatataaaatagaagacaaataagtatgtctcatcttagccatcataactgtgcctaaattccccatgttcatggcacccagtgtcctaaaatacgccagaatgaacaggtaaactctaaaccagtgagtcataagtgaaatttaaattaaatctttggcacttacaaactggcttgacagaatgagaccctgtggaacttactccccagttaaattagttatgatggctcaatataaattgaacagggccttgaagggttgaaaagtattatgtaaaacttgtt

SEQ ID NO: 23109 - DNA, 1041 bp, Homo sapiens
gtggtgtgatcatagctaactgtaacctcgaacacctttcttggctcaaatgatcctcccacctcagcttcccaagtacctaggactacaggtgtgcactgtcacacctgaatttgtaaattttttgtagatcctcactgtgtccaggctggtgtttttttttccctttggattcctttatttgctgactattacagcagctgaattctagtttctgttaacactttttaatgttattccatatgtgagtgtgttaaattttgtttcttgggtttgaaaatgtaagtcgattgaaaggtatgatgcaactaaggcaagaaaattctgaaaccaggccgggtgtggtggctcacgcctgtaatttcagcgctttgggaggctgaggcagaaggatcacttgaggtcagaagttcgagaccagcctggccaacttggtgaaaccctgtcgctactaaaaatataaaaattaaccagacatgtaatttttggtgggtggctgtaatcccagctactcgggaggctgaggcaggagaattgcttgaaccccgggttgcaggggaggttgcagtgaaccgagattgtgcactgcaatccagcctgggcaacagagcaggactccatctcaaaacaaaaaaaaagaaaactctggaaccaaacagaatatttgtttcttttaggcaagagaacctcaagataagagatgaatgtatttacattctcaggtacatttttcatttttagatcggtttttgtatgtgcatgtcatagagtacttggaaatttaaaagaggccaggcatcgtggctcatgcctgtaatcccagcactttgggaggctgaggcaggtggattgcttgagcccaggagtttgagactagcgtgggcaacatggcgaaaccctgtctctacaaaaaaaaaaaaaaattagccaagtgtggtaattttagctgggtgtagtcccagctactcaggaggctgagatgggaggatcccttgagcctgggaggcagaggtggcagtgagccaaaattgagtcagtgtg

SEQ ID NO: 23110 - DNA, 1075 bp, Homo sapiens
atggcttgagagagtaaggaaaggagcctggactgggtgtttactgtgattgggggtggggcagtaggagagttcatttcccctcgaggggaaaagcttcttaggtgggactctccagcaaggcccaaggagggaacgcctcagctttctcagcttgtccaggtattgtaaacaaaaaataaaatccaaagcaccctcctgactgaacagaccccttcttggccaagggaaccccataacaaccctaaacactgaattcccaggccaggcgcagtggctcacacctgtaatcccagcattttgggactgaggatggcttgaggccaggagtttgagaacagcctgggcaacacagtgagaccccatctccacaaagaaagtaaaaattaactgggcatggtggcatgcacctgtagtcccagctactcaggaggctgaggtaggaggatagcttgagcccaggagttcaaggctgcaataagctataatatgactgtgccactgcactccagcctggttaacagagtgagaccctgtcttgaaagaacaaaaacaataaaaactgaattcccagccatgggaagggaggtcggacacaccctgttataacccctcccttttggagtttaggcacaactgaccagcattaatgttaaaatagagaccataaaactaacaaaactctttatgacaataagataccaaattataaataagacctaaggccatgctctccaagggttaagtcacaaactctaggtcattccgacccagtgtattggttaacagattttcttatctttttttttttttttttgagacagggtctcttgctttgtcacccaggctggagtacagtgacataatcactgctcaccacagcttggacctcccaggctcaagtgatccatgtagtggggaatataggcatatgctgccacacccagctaatcgtttttactttttttttttttttttttttttgagatggagtctcactctgtcgcccaggctagagtgcagtggtgcagtcttggctcactgcaagctccacctcccaggtttacgccattct

SEQ ID NO: 23111 - DNA, 1052 bp, Homo sapiens
catgaaattttaaaaataagtaaacaaaccagtaagcccagcttcagatttatttattcctacaactttttcaccagaaaaagaaaaagtggcatagatgttcagtgttgcaaaatcattcacttggaaatagtattaagaaactgtatatatggatatcacttttttggtgatagctactgtcaagctctcttgcagagcattccatccattcactttcaaacaattcatacaggcctgaaaacttaccctttccgcgattatggtaaaaatgtaagtcgaatacctattaataaatataaagtcacaaaccactaaatcttgctttctattttttccagaaatcatatggaagagggactcagtgaaagtaaagaatatgatcaatgtggagaagccttcagtcagattctcaatcttaatctgaacaagaaaattcctactatagtaagaccatgtgaatgtagtttgtgtgggaaagtcttcatgcatcattcatcccttagtaggcacatcagatctcaccttggacacaaaccatatgactatcaggaatatggagagaaaccatataaatgtaagcagtgtgggaaagccttcagttcttgtcaatcctttcgaagacatgaaagaactcacactggtgagaaaccctatgcatgtccggaatgtgggaaagccttcatttctctcccaagtgttcgaagacacatgattaagcacactggagatggaccatataaatgtcaggaatgtgggaaagcctttgatcgcccaagtttatttcagatacatgaaagaactcacactggagagaaaccctatgaatgtcaggaatgtgcaaaagctttcatttctcttccaagttttcaaagacacatgattaggcacactggagatggaccttataaatgtcaggaatgtggaaaagcctttgaccgccccagtttatttcgaatacatgaaagaactcatactggagagaaaccccatgaatgtaaacagtgtgggaaggccttcatttctttcacaaattttcaaagtcatatgat

SEQ ID NO: 23112 - DNA, 1056 bp, Homo sapiens
tccacccaccttggcctcccaaagtgctgggattacaggcatgagccactgcacccggctatttcagtttttagaagtggtcccttccctttccccttccccttccccttccccttcccctcccctccccttctctcttttttttttttttctgagacgaagtttcactcagtcacctaggctggagtgcagtggtgtgatatcagctcactgcaacctccacctcctgggttcaagccattctcctgcctcagcctcctgagtagctgggattacaggtgcaccccaccacgcctgactaatttttttgtatttttacaaagacaaggtttcactgttttggccaggctggtcttgaactcctgaccttgggtgatctgcccgccttggcctcccaaaatgctgggattacaggcgtgagccaccgcgcccggccccttcttttcttttttgtggtggagtttctctcttattgcccaggccagagtgcaacggcatgatcttggctcactgcaaactctgcctccgggattcaattgattctcctgcctcagcctcccaagtagctgggactacaggatgtgccaccatgccctgctaattttgtatttttagtagtgacagagtttcactatgttggtcaggctggtgtagaactcctgacctcaggtgatccacccacctcggcctcccaaagtgctgggattacaggcatgagctatggtgcccggcccttttttcttttccttcctttctttcctttttttcctttccttccttcctttccttttttcttttctttcttcctttccctttctttccttcctttcttccttgagatggtccccctatgtcaccaggcatgatctgcactggcgtgatcatagctcactgcagcctacaactcttgggttcaagcgatcctcctgcctcaacctcctgagtagctgggactacagacacgtgctatcatgcccagctaatttttaattttggttgaggtttcattatgttgcctaggctgatcttgaactcctggcttcaagtgatcctcct

SEQ ID NO: 23113 - DNA, 1031 bp, Homo sapiens
gaggtgattctgtggaacccctggatactttcagagtggagactggtgaccagaaagaccaaacccatgactagagggttgttgctttaagctccattccctaccccaggaaagagtggaggctggagattgagttgtgtaaaaatttttgagcaaagacattcagagagtacttccaggttgatgaggacattgatgtgctgggagggtggtgcaccccaagatgaggagcgttgcctatatccacccccctttccctgccatttttcagctcttatttgcctgttcctgagttatacttaagtaacatgttttgctaagttctttgaatagttttagcaaattattgaacccgaggaggagattatgggagctcacgatttgtacacagttgttcagaagtgtgggtggccctgcggcttgtgactggcatgtgaactggcatgttgtgagactgagccctgaacttgtaggtctgtcctaattctgagtggtgtcagaactgaactgttagacacctgctgttagaactggtcggtgtttacacttcgggtgtcacagaaaggacaccagaggtcagaaccttaaactgactccaggtaaacatctggtcactggtgagaatcgagaccgtgaatcacatcatgaggagaggagagtagggtgcgtggagctcccaggatgtttccctcactcatttcttttttttttttttttttttgagacggaattttgctcttgttgcccaggctggagtgcaatggtgcgatcttggctcaccacaacctccgcctcctgggttcaagtgattctcctacctcagcctcctgagtagctgggattataggcatgcgccaccacgcccagctaattttttgtatttttagtagagacggggggtttctccgtgttggccaggctggtctcaaactcctgacctcaggtgatccacccgccttggcctcccaaagtgctgggattacaagcatgagccaccacacccggctccctcactcatctcttaggagtgg

SEQ ID NO: 23114 - DNA, 1027 bp, Homo sapiens
cgaactcctgacctcatgatccgcctgcctcagcctcccaaagtgctgggattacaggcatgagccaccgcgcccggcagaatcctgggttttaaaaagggagaattattgacgggcatggtggttcaggcctgtaatcccagcactttgggaggccgaggcgggcagatcccaacctaaggttgggagttcgagaccagcctgaccaacatggagaaaccccgtgtctactaaaaatacaaaattagccgggcgtggtggctcatgcctgtaattccagctactcgggaggctgaggcgggagaatcgcttgaacccgggaggcggaggttgcggtgagcggagatcacgccactgcactccagcctgggcaacaagagagaaactctgcctccaaaaaaaaaggggagaattattatgaggctagatcatgtgatgcttttacagtgcacttaacaattttttttcccaaagacatttctaagtgtctaaaccacactttttcttaaaatcctgagtagcttctgttgcaatagctattttttttaattgttgttttttttgagacagagtctcgctctgccaccaggctggagtgcagtggcgcgatcttggctcactgcaacctccgcctcccaggttcaagtgattctcctgcctcagcctcctgagtagctgggattacaggcgcgtgccaccacgcccagctaatttttgtatttttagtagagacagggtttgaccatgttggccaggatggtctcgatcacttgacctcgtgatccgcccgcctcggcctcccaaagtgctgggattacaagcgagagcctccgcacccggccggaatctatatttcttaatttttaatttttaattttgtagaggcgggttcttacagtgttacccaggctggtgtgaaaatcctggcctcaagggatcctcccgaagtgctgagattacaggcttgagccaacgtgcctggcctttaaatgtcttaaaaggaagtaaattctgacacatgctacaa

SEQ ID NO: 23115 - DNA, 1022 bp, Homo sapiens
atggggtctcagttctttttttttttccttttttctccttcccttccttccttccttctctcatatctctgcttttctttcttttgctttctttctctttcctttctttttctttctttctctctttttcttttctttctctctctgtcttttcttttttcaacacgactgagcctcactgtcgcccaggttgctgtgcagtggtgtaatcacagctcactgccacgtggaactcctgggcacaaaccatcctcccacctcagcctcctaaagtgttgagatgacaggcatgaggcacccagtacggcctcattcaaattttctaagtccgcttatggaagcatgcacctgcagtcccaactacttgggaggctgaggcaggaggatcactccccagaagtcaaggtgacagtgaactatgatcgcaccgctgcaatctagcctgggtgatagagcaagacctcatctcaaaaaaaaaaaaaaagtttgacaggtggtggaacacactagaacttcaaaactttgagactctataattctgatttacatgagtttgggaaagaccctgtgctctctctgcctctgttttttcatgtgtaagatgggaggaatcccagcactttgggaggctgaggtgggtggatcacctgaggctaggagttccagaccagcctgaccaacatggtgaaaccctatctctaccaaaaatacaaaaattagctgggcatgttggcacatgcctgtaatcccagctactcgggaggctgaggcaggagaattgcttgagcctcggaggcagaggtttcagtgagctgagatcgcgccattgcactccagcctaggcgacagagtgagactctgtctcaaataaataaataaataaataagtctatgaaacatttatttctggaattttccactaagtatttttggactgtgtttgaccatgagtgactaaaaccacagaaagcaaaactttggatcagaattgactactgtattaccataattaattctgaata

SEQ ID NO: 23116 - DNA, 1032 bp, Homo sapiens
ggaggctgaggcaggagaattgcttgaacccaggaggcggaggttgcagtgaggcaagattgtgccactgcactccatcctgggcaacaagagcaaaactctgtctcaaaaaaaaaaaaagaaaaaagaattatgtgggccaggcgcggtggctcacgcctgtaatcccagcactttgggaggccgaggcgggctgatcacgaggtcaggagatcgagaccatccttgctaacacggtgaaaccccatctctactaaaaatacaaaaaattagccgggtgtggtggcgggtgcctgtagtcccagctactcgggaggctgaggcaggagaatggtgtgaacccgggaggcggagcttgcagtgagccgagatcgcgccactgcactcccgcctgggcaaaagagcgagactccgtctcaaaaaaaaaaaaaaaaaaagaattatgtggcggtgactgaaggttgaccttgatgtaggccttaatggggtttatggccagggttgggggacatttgtaggactcacctctgctcaggtacagactgacatccacctcacccgtgtgcccgcagacacccttggtgcaggaggtgcaccagaacttctcagcttggtgttcccaggtggttcgcctgtacccaggacagcggcacctggagctagagtggtcggtggggccgatacctgtggggtgagtggcacaggctgggagaggggtgtggaagcaagggcagaggggtttatccaaggctcacaaccttgccatcccattgggtacagcgacacctgggggaaggaggtcatcagccgttttgacacaccgctggagacaaagggacgcttctacacagacagcaatggccgggagatcctggagaggaggtggggggtgactgagagcactgagggggtggtctgtggtgtgttggggcccaggggtggtgagggaaatttgctgattacatgagtgtgggagacagaggacgaagggagagtgaagggcgggggagccaggcagggtgcagtggctca

SEQ ID NO: 23117 - DNA, 1033 bp, Homo sapiens
ccatcacaatgtccccctcctggatttatgtgcattcctcattagaagagatagcataggctgggcaagagatagcatggcatggtgactggatgccctcttctaggtagtgggtccaagagaactgctcaacaactggtggctacttttatctgtgtccccacgctcccaagtgccatacccccacccatgcctgtgcacccaacatccttgaccccatatacatcaaaacacagctatacacagggatggcccaggatcctctggcttcaggactcccctcttgcctgcagggccggtattaccgcaccaaccacactgtgatgaccatgggctcggacttccaatatgagaatgccaacatgtggttcaagaaccttgacaagctcatccggctggtaaatgcgcaggtcagtgcgcctaccctgtggtacccttgtgcacatgtgcgcttgcatccgggggccttgggttatgtgcatagctctcagtgctgtctttgttttctattgttctattgtggtcattctataacaaatgaccacacacttagcagctcaaaacaacagaaatacattgtcttacagttctgtaggtaagaagtccagcatgaggccgggcgcaatggctcatgcctgtaatcccagcatgttgggaggctgagccgggcagatcacgaggtcaggaattcgagaccagcctgaccaacatggtgaaacgctgtctctactaaaaatacagaaattagctgggtgtgatggtgcgtgcctgtaatcccagctactcgggagcctgaggcaggggaatctcttgaatccgggaggcggaggttgcagtgagcggagattgtaccactgcactccagcctgggccacagagaaagactctgtctcaaaaaaaaaaaaaaaaaaaaaaaatccagcctgagtctcaccaggctataatcaaggtgttggcaaggctgtgttccttctgcagtctctaggagagaatataatttccttgctttttccaacatctagaagttacccac

SEQ ID NO: 23118 - DNA, 1033 bp, Homo sapiens
atggtctgtttctggcctgactccccaccaggctgggacatgtcaaggacagggctcagggcttgaaaccatgcacagggatgctaagatgtagctccagtttcttgaatgactgcagccctatctcacccaaggttagacatggccgtcggctcccccttgcccaggggtcagtgccagttgctcggcctggcatctgcagcccagcctgaccccggatcttgccgcacctgccgccaccctgaagcctttgtttcctgactgatgcatgcgcaggctacacctcttaacatatgctgttccctttgcctggaatgcccttcctgcctcatcttctctctagcccaagctgggcacggtgtctcaggcctgtaatcccagcactttgggaggccgaggcgggtgaatcacttgaggtcaggagtttgagaccagcctggccaacatggtgaaaccctgtctctactaaaaatacaaaaattagccaggtatggtggtaggggcctgtaatcccagctactcaggaggctgagacatgagaatcacctgaaccctggggggaagaggttgcagtgagctgagatggcgccactgcatttgcctgggcaatagtctcaaaaaaagaaaaaagggccgggtgtggtggcttacgcctgtaatcctagcacttgggaaggctgaggtgggtggatcatgaggtcaggagtttaagaccagcctgaccaacatagtgaaaccctgtctctactaaaaatacaaaaattagctgggtgtggtggcacgcacctataatcccaactactcaggagactgaggcaggagaatcgcttgaacttgggaggcggagtttacagtgagccaagattgcgccactgcactctagcctgggcgacagagcaagacttgtctcaaaaaaaaaaaaaaaaaaaaaaaaaagatcctagccttcaggccctggagtgactgaggtaaggacagggctgagatggggcaggcatctaggtatgaagtagggctgggggcacctcacctc

SEQ ID NO: 23119 - DNA, 1050 bp, Homo sapiens
gcaaaactccatctcaaaaaaaaaaaaaaaaaattagcagagtgtagtggcatgcacctgtagtcccagctctttgggaagctgtggtacaaggattgcttgagcctgggatgtggaggctgcaataagccatgatcgcaccactgcattcatgcctggatgacacagcaagaccttgtctcaaaaaaaaaaaaagagttcctgggccaggcacagtggcacatgcctgtaatcccagcactttgggaggctgaagcgggcggatcacctaaggtcaggagtttgagaccagcgtggccaacatggtgaaaccccgtctctactaataatacaaaaattagccgggcgtggtggcacaagcgtgtaatcccagctactagagaggctgaggcaggagaatcacttgaacacgggaggcagaggttgcagtgagccaagatcaagccactgcactccagcctggatgacaaaagtgaaactccgtctccaaaaaaaaaaagtttctgggtggggtgtgcctttcctggactctgaagtcaggctgacccatggacacaaactttaatctgtactcaacttgaacttgctctggtttcatctatgcaatgggggtgatcacctggagccagagttgggtgttgtacttgctgcagcatctatcaccatgggcactggggaggaagagctatgtggctttgggtgagtctcttgacctctctgagccttacctgcaaaaacagaacgatcccagtctgggacccccatgggctgtggcaggtgtgtgactgctgctcctgtcctgcagggctgggtgtggtcactggcagcgcaggaccaccgcgtgtgctccggctcctgggacagcacagtgaagctctgggacatggcagcggatgggcagcagttcggcgagataaagtgtgtgggggcctgggcagggggcctgcggggataggaccctgtctggccacagccaaagccctgtggtctgtgtgtccctagggccagctcagccgtgctgtgcctctcctacctgcctgacatcctggt

SEQ ID NO: 23120 - DNA, 2063 bp, Homo sapiens
caggccctgcatctattccaaggggcactcagtacacattccataaattagctgggtgtccctgcacgcccaccccatgaaactcgagcaggtctctggaagccatttgttaaaaaaaaaaaaaaaagttttaaaaataccttttaattttctggtaattccagttctttgaagcatcctctgctgggtcttggggtgtgtggatggattggctgtctgatgggattggtaacccctcgctactcaagatggggggatacaaacaccttcagggaaggggagcctggttcttctcgttttcctttttttttttttttttaaaaaaaaactatttaattttttaatttatttttggttgttttttgcacaatgaagtttcagcttctcaaccttctcccctacccagggctgtggacccagactggccttgagccacagtccctctttccctcctcaccctcttccccctgcgggctcccgggtctgtccatttgttactgtgctgtgctggggattggcgccgaggtggcgtgagattccacttgtgtagaactttgttgagtaaagatcagtttcttgtgaactccttagtctgtggcttcctgtgtccttggctttggtagtgaagaaatgtcgggggcaccggggatacttgagagtgggaagatagacgaatgtgaaagatggaagattaaatttgtaacatatatgaaatgtgcagctcattctctgggacttcagctcactaagggtgagccattagtgtcacagcccaggttcaagatgcccctctgccgtactctaaactgagtggtaaggggtgaggccttgccgcactcttatcatcagctgaccctgggtcaaggttttcatagaaggttcagcccagccccaggccgagggtaatttaattaatattagttacaattactcaggcaaatgagaagtagtttcagctgtggggggaaaccacaatcttcagaataaaatctttcttttttttgagaccgggtcttgctccgtcacccaggctggagtgcagtggcgcaatcatggctcagtgcaacctcaacctccctggctcaaccagtcctcccacctcagccacccaagtagctgggactacaggtgcatgccaccatgctggctaatttttgtattttttgtagagggggttttcgctatgttgctgaggctggtcttgaactcctgggctcaagcaatccacctactttagcctcccaaagtgctgggattacaggtgtgggccaccgcccccagccaaaataaaatcttactgcaaccttggtgtggcccaaagaccaacgtgggaaaatttaaaaatactgacacacatccaatattcaacaaataagtcctgcattctagtgagaggatagagtataaaaagtggaactgtgctaagtcctatagagaaaaacaggaaggcagagagaatggtgggggaaacggttgaaatcttatgtagggtgacctgcaaaggccacactgagaagacgatgtttgaacagagccatggagagaagagtgtcaagtagagcaaacagcaaggactgcgcagatgacctacgtggattggttagctgcctggctcaaaagaggcttgcagtaaatacctgcagtttttttgtttgagacggagttttgctcttgttgcccaagctggagtgcaatgatgccatctcggctcactgcaacctccgcctcccaggctcaagtgattctcctgcctcagcctctgagcagctgagattacaggtgcctgccaccacacccggccaattctttgtatttttagtaggaaggggtttcaccttgttggccaggctggtcttgaactcctgacctcaagtgattaacccaccttgcctctcgaagtggtgggattacaggcctgagccaccgcacccggccaacatgctgttttagtaagtgtgatgttaggccgggcgcagtggctcacgcctgtcatcccatcacttcgggaggctgaggcgggcggatcacgaggtcaggagtttgagaccagcctggccaacata

SEQ ID NO: 23121 - DNA, 1014 bp, Homo sapiens
ttgttctgcccctgcctacccctcaccaccaccctccccacagattctccacggcttcaaagaccaagttggggaagataactggcagcagttctctgagcaattcccgccgctgctcaaggagaggctggcggctttctatggggtctaggtgatcatggagactgccaggtaaggagactgcagctggcaagtcagcactgtcttgggggccgaaaggtcccaggccatgaccttcctcctccccctgcaggtttctgtctgcgtcgtcgtcggagggattactggggagtgcgctgcatccggaagtcgctgtgccctggttgaggggggttagggaggagtgagtgggactcaaatccagatgccttccccgtccgtccgtccgtccgtccatccgtccacttgccctcctggcaggtgggtggggccaccatgctcatcctacaaacggggaggtgggggggacttctggtgggcaagggcccctgggctctaatagggtcatctctggcagcccacttgggccagctacgtgggagggaggaattacacagctgaccgaatccggcttcggatgaggtgagggaggagcaggtcaggaggggggccctcgtagggacgcgtacactcacacggacacacatggccacacgcatgtgcgggtgccataaccggcgaggctgggccagccgctccaccatttccccgactgcatggagacagtagaattagtgaacccctgagttaacccgtaaggccttccgtgtaacctgcatctagagtttaagaagcttctgctgttttgccggaattggcggtgactggggagggctgggtgggtggggggcctcaggcgggatctcggggcggggggaggaggatggtgaccttgggagtcgccctgtcagcacgcacatgcttgggacccactccacacactccctgccagctttgttgcagcctcagctggtggtgtctccgtccttatcctagcctagctcgcagggtgag

SEQ ID NO: 23122 - DNA, 1327 bp, Homo sapiens
gtgcataggtgcatatgcaaacactatgccccccccaccgccccccacctgttttttgagacagagtctcactctgtcacccaggctggagtgcaatggtgtgatctcggctcactgcaaccttcacctccagggttcaagcagttctcctgccttagcctctcaagaagctgggactacaggcgtgtcccactatgcctggctaattttattgtatttttagtaaagacagggttttgccatgttggccaggctggtctcaaactcctgacctcaagtgatctgcctgcctcggcctgccaaagtgctggagattacaggcatgaaccactgcgcctggccctaacactgtgccactttatatcaaggacttgcacatccgtggatttttatatctgcagggacctggaaagaatcccccacggacactgagggatgaccgttggggcactgccatctcccatttgcagatgtgggctggaggctagggaggttaaggaacagctaggagctctagaactggaaagtggcagaggctggacatgcaccagggactgtgccccctgagctgtcctggttagaaggaggggagcctagccacactgatcttacttgaatccccaggactcgatgcctgaggtccggcagagctcctttgccctcctgggagacctcaccaaagcctgcttcatccatgtcaagccctgtatcggtacgacactcgccttgtccctaacccatgaccccagccccggcctcaagtgatggagagcaatacccggggatgactgtgaccacattgggatgtattcgtactgtctgatggggcctgctggactaggtcctgcagcttaccctggctggccctccttctcagcacccctgtttctccccaccagccgagttcatgcccattctgggcaccaacctgaacccagagttcatctccgtctgcaacaacgccacctgggccattggtgaaatctgcatgcagatgggtgagtgccctgcaagtggcaacacgcgccccccattagcctgttctcaacctgggggcgggagcctagctctgactgacagcttccttcaaggcaagtctcttgggggtcgtcaggggtggagccaagcagaaaggtcatttgtgattggcttctctaaagaggagggataggagggctgttctgattggaccgttttgtgtagttggctaaaagactcattcggattggttgggtgactttggctttttttttcctttgacttgggcagcgtgttgtcaccttagcgactccagagaagcctctgttgtttggagggtgtgggtctg

SEQ ID NO: 23123 - DNA, 1001 bp, Homo sapiens
ctttacctggctctgtgaaatgagtctgggccagtgatttaaactctaagcctcagtttccctatatgttgtgtgcggctgactcttctctccatacggtgggtgtggctgggcccaatcaaactgccccctcttggttccctttccttgtaggctgcatgcagggcatggtgccctacctgcctgagctgatcccgcacctgatccagtgcctgtcggataagaaggccttggtccgctccatcgcctgctggacgctgagccgctatgcccactgggtggtcagccagccacccgacatgcacctcaagcccctgatgacagagctgctcaaacgcatcctggatggcaacaagagggtacaggaggcggcctgcaggtgaccctggacccctgatcccacagcccccactctcccccggccaccctctgggaagtgatgacacctgtgactgttgatgtggaactgatttatcgcgtattcgtactggctgatcctgagttgccctccccaactgcccatggcccagtgtcacctgccatggtccactgagcccccgcttcatcctccctcccaccagtgcttttgccaccctggaggaagaggcctgcacggagctggtgccctacctcagctacatcctggacacccttgtctttgcctttgggaaataccagcacaagaacctgctcatcctctatgacgccattggcaccctggccgactctgtaggccaccacctcaaccagccggtgagaccccagagcggctcccgcctcccgatccccgtgcccctgggcatccagtgacctggtggcaaccccgtgttgcacgccagggacgtggccgtgacctcgacaggcagacagacagacccggccccgccctcgccctgctcccagtctagtgggggagaaagacagttatgagacagcgtggtaagtgctgtgcttcgggaaccaggaggtggtaacccaggctcccggggggtggggtgggg

SEQ ID NO: 23124 - DNA, 1589 bp, Homo sapiens
gcagagactagattccgataattccccagagggaaatggatcaatttgcacctagcagtaccatcatgctctgcagggtctgctctgtggctgattggggggctggtcactctgttggcacctgtttgcctcctccccaagctgtgcctccccccaacttttgccacggcccctgcatccccataaacagtccctctctgtgcaggttgatccccatcttggtgaatgggatgaagtactcggaaattgacatcatcctgctcaaggtcaggcagggcccacccagcatgggtgggcatgggcgtgggtgtcgcggctgtggtccccaaagtacttaacagtctgcctgtcccccagggggatgtggaggaggatgaggctgtccccgacagtgagcaggacatcaagccacgcttccacaagtcacgcacggtcacactgccccacgaggctgagcggcctgatggctccgaggacgcggaggatgacgatgatgatgatgctctgtccgactggaatttgagtgtgtgcccctgcctgggggtggtggtggggtggcaagccctggactccctcttgggaggtgactagaagctgaggcagaagctgattagaagctgatcgtggccgggcgcagtggcttacgcctgtaatcccagcactttggaaggctgaggcgggcggatcacgaggtcaggagatcaacaccatcctggctaacacagtgaaaccccgtctctactaaaaatacaaaaaattagtcgggcgtggtgtcgggcgcctgtagtcccagctactcgggaggctgaggcaggaaaacggcatgaacccaggaggcggagcttgcagtgagccgagatagcgccactgcactccggcctgggcggaaaaagtgagactccgtctcaaaaaaacaaaacaaaaaaaaagaagctgatcgtgaagattctgagcatgatctctgatcctgggagtgcagtcaaggagggtcggccacctgcctgaggggccgccctgagcctccccattgttcccccttccccagggaagtgctcagcggctgcactggacgtcctcgccaatgtcttccgggaggaactgctgccccacctactcccactactcaaaggcctcctcttccaccccgagtgggtggtcaaggagtcgggcatcctggtgctgggcgccattgctgagggtgagtgcgcctgatctctgagccctgtgctggcatgagactgtagggctggcccacattactagccacaccaatgcctcagttctccctggaggcctactcaccccactccaaacagctctgagatctcaattctccccttggttcctgggcctgaaaggaacccctggagccccacagtgcaaggcctcttgttcattcttgcaggcaggtagttctttcatgttgtaagcataattacagcaacaatgataataacagcaggcacagctgcatgcttgcctcgtgcacttatgtagacaaacatccttggccctcaccaccacctgatgagctgggtgccggatcccagtttcgaagatggggaaactgaggtacagaaagattgatg

SEQ ID NO: 23125 - DNA, 1022 bp, Homo sapiens
ccatctcaaaaataaaaagtaacttttagtcctgcaaaaaccccctcccaggccagtagtaggatgtggacttcctgagctcattctatgtgccaggctctttgctaagtcattgaaacttactgatccaggctgagcacagtggctcacgcctctaatcccagcaccttgggaggctgaggcaggtggatcacctgaggtcaggagttcgagaccagcctggccaacatggtgaaactctatctctactaaaaatacaaaaatttgctgagtgtggcagcgggcacctgtaatcccagctgcttcagaggctgaggcaggggaattacctgaactcgggaggtggaggttgcagtgagccaagattgtgccactgcactccagcctggactacagagtgagactccatctcaaaaaaaaaaaaaaaaaaaaagagagaaaaagaaacctactgataaccttagttaggaggctggttttctttatctcttctgagggctggaagcactgaggcacacagaatgagggggtgtggctaaagttccacaatcctcactgtgtacctacccattgcagggagcacctttctctcgttgagtttccacccttgggaaacactgccatctcatggcagcaaataccatctctgcacttaacagaacccatatccagctctgtcaccagatatgtgcactgtcctggcacctcagatgcctgctgtatgtaactcctggatatctaataggcagtacaagcatccctgccaccttcctgcccttacctcctttccctctctcatcatgcctgtccttacgccaggcctttgcaccatagagtcccctgcctcagatgccctttccccagaaacctggatgattcctccctcgcctccttcacctccttcaggccttggctcagatatcaagatgtcacctcaacgaggcctgctctggccacccaatttaaagttgctaccttcacctacagccctttctcaccatcttttctgctgtatttccccc

SEQ ID NO: 23126 - DNA, 1173 bp, Homo sapiens
ttttttcaagatggagtcttgctctgtcgcccagactggaatgcagaggcgcaatctcggctcactgcaaccttcacctgctgggttcaagcgattcccctgcgtcagcctcccaagtagttgggaatagaggcacgcacacatcatgcccggataatttttttgtatgtttagtagagatggggtttcaccacgctggccaggctagtctcgaactcctgaccttgtgatccacccgccttgacctcccaaaaagtgctgggattacaggcgtgagccaccgcgcccggccccttatatgaatttgacgtgtctgaggtgctctgtgtcattgtgggcttattagggagcgggatcccccaggagctggcagcctggtcccagtggtcagagatagtgtcaggtacataatgaggggacctggctgggggaaggcctctgtcttccaagtcccttaacagcctggcagaaactcaaacaactcaatcagtttcctgacttcaacaactacctgattttcgtcctgaccagactcaagtcagaaggtacgccctctgctcccttccatgcgatcgggaccctgctttctccccctgggcccctgaacctcagccttcctcctcccagatgagccaacgcgctctctcagtggcctcatcctcaagaacaacgtgaaggcacactatcagagcttcccaccccctgtggcagacttcatcaaacaggagtgtctcaacaacattggcgatgcctcctcgctcatccgagccaccattggtgagaggggcagcgggggttggcctctgaggacacactgaactctcacttctcagcatgttaagtgtagtgcttcatggaatgctctggcaccctctatggtagtactattactattgccatttgatagatgaggaagctgaggcgctgagctattaagggacctgtctgggtaagcagcagaagtcagaaacagctgaggcagtgcagggccacgctctggaaccactccctcctgaaacagtccttcttggctctgagacagtcatgcaacatctagaattttgtgttcggccttgggctgagtgctaagggtatagcagttaaaataatgcaggtattcatgtttcaggtgcaacggaattaggttttcagcagagccttttctgactcttg

SEQ ID NO: 23127 - DNA, 1050 bp, Homo sapiens
gagggagacgggcggagcctcagggccgggaggctccgggccccgcgggcggtggcggtggcgggagccgttgggctgagtcgggatcggggacgtcgcccgagagcggggacgaggaggtgtcgggcgcgggttcgagcccggtgtcgggcggcgtgaacttgttcgccaacgacggcagcttcctggagctgttcaagcggaagatggaggaggagcagcggcagcggcaggaggagccgcccccgggtccgcagcgacccgaccagtcggccgccgccgctggccccggggatccgaagaggaagggcggtccgggctccacacttagcttcgtaaggagccgtgggggtgggggcgggcgccacggcctgtcttggcagcgggagtcggggcccgtgaagggggatcgggaccgaagtccactttccgttctgaatgaggggcccgtccgggtcacccgctgagggtgtggaacttggattcccgacaactggggtctaggggcgggagtggggactccaggagcttgcccgtgggaactgggagctgaggaattgcctaggaatcagcactgtggagaatgaggaaacgtggatatcaggattcctgtttgagtggtacccggaccttgggtcatgggaccaccactaattgtgaggaaagggagtaaatttaagtctggactctgagctatatgtgttagactcagaccacgtactatgtaaggacaattacttatctaggacaattgcttgacttccttgtatcttattcgaccaacctccatttattgagcaatttacctcgtgctaggcattgtgctaggtgctggtatgcagtggtgagcttacagacaagatcgctgctttcctggagcctctgggtttgcctaccctcattttccctagttgcaaaaatagacatcatagcatctcttgatgtggtgagggttttatgaggtgatcctggaaaagtggttagcacagagcctgtcttccaggaagggctaaactggtggttctcaattggggcagttccctccacccc

SEQ ID NO: 23128 - DNA, 1865 bp, Homo sapiens
gaggcatggctccagggcatctcggaagatccaggtcccaactggaagctgaaggtgacaagtggactcctgattagaggacagactggtgaagagatgaccagggacgggccagctaggcacatgtcctgggtgatgggcaggaagagggacagatgtctggtgatcaaccatttgttcatccattcatctatggagtactcaccctgtgccaggcctgggcattcagcaaggaataacacagacaaaaacctgccccacacagccatcattctagtgacaagcaacacatacacaaccataaaaattaacttccaggctgggcgcagtggctcatgcctgtaatcccaacactttgagaggctaaagtgggtggatcacctggggccaggagttcaagaccagcctggccaacaagttgaaaccccatctctactaaaaatacaaaaattagctgggtggggtggtgtgcacctgtaatcccagttacttgggaggctgagacatgagaatcacttgaacctgggaggtggaggatgcagtgagctgagattgagccattgcactccagcctgggcaacagagcgagactcttgtctcaagaagaagaaaaaaagaaaaagaaaaagaaaaagaaaaaacttttgatgccagtagttctgtgaagacaacaaaaaagcagggctttgagagagagcaatgagggcataggtggctgattacatcagatgggttaatctccaagtgaaatttgggggaacggtgttccaggcatagggaatagcagatgtaaaggccgtgatttgggaataaacttggtgtgatggaggaatggcagagagggcagaacagagcaagagggcaagatttgtaggagatgaggtcatcaggggcctggcaggccatggtgggggtgtggattctatttttaagtgctgtggaaagtcaaggcagggttttagcagagcaaagatgcaacctggcttgggctttataaagctccccctggctgcatggagagaaataaaatgtaggcagcaaaagtggaagaggagaggcagctggtgcactaatccaggtgagaggtaaagatggatgggtagggctgaaggatggtggggcaggtggtgagaagtgacttggttctggagacatatgaaggaagatggtcaggcaggccgggcacagtggctcatgcctgtaatcccagcaattttagaggctgaggtgggaggattgcttgagctcaggagcttgagaccagcctgggctacatagcaaaacctcctctctacaaataaaaaaaagtagtcgattgtggtggcatatgcctgtagtcccagctactgggaggcagagataggaggattgcttgaccccaggaggtcgaggctgcagtgagccaagattgcaccactgcactccagcctgggtgacagagccagaccctgtcttaaaaagctaaagcaaaaaaaaaaaaaaaaaaaaaaagaaacaaagatggtcaggcagacaaaaggggcagacagccagacaggtcacccctagaggaaggcgcacgcagacagaataggatgagatgagcagggaaggagaagtgaggtggagagaggatgggacctacagattcagagtgggaggcctctgaacttgtccacagttccttgttcctccctaggtcagcaatctgaagatggtcttacggagcctagtagagtactcccaggatgtgagtaactgtaaagggattcagggggttgagttgggagaagggtgggcccatgagcccctgacacccccttctccccaggtcctggcgcatcctgtgtcagaagagcatctcccagatgtgagcctcattggag

SEQ ID NO: 23129 - DNA, 1050 bp, Homo sapiens
tactgtttgcttagctgccatgaaaaccggttccagcctcatcccttgagccttaaaaaggagcagctctgaaccattagcagctcaagcaggttgtgaacaatcacacaaaaagaaacacctggtgctctcatcgattttaattttagggtctgaaactgttgagagcatccaggagaggctgagacaacaaggtgaactgggtacgaggaggtgtgggagccccaatgtcagtgctgcattcatttagatattcagcaaactgatgaaacctttggggtgctgcaaaacaaatgagtagggtgtagtctgcaccctcaaggtgtcgtgcgctggaggggactgatgttcataaactttggcagctttgtgaccagcaaggcctaggtatagcggggggtagagaagcaaaagttccaaatgttccattatgaaggaggcaggaagggaaagtcattccaggcaaaggctgacatgtttggggaaattgtggtaggtccccaattgctgcagatggaggggctgtagaaaacagtaaggctagatcgggcttggtggctcacgcctgtaatcccagcactttgggaggccaaggcgggcagatcacgaggtcaggagttcgagaccagcctggctaacatggtgaaaccctgtctctactaaaaatacaaaagttagctgggtgcagtggtgggcacctgtaatcctagctacttgggaagctgaggcaggagaattgcttgaacccgggaggcagaggttgcagtgagccgagatcgtgccactgcactccagcctaggtgacagagcaagactctgtcttgaaaaaaacaaacaaacaaaaagaaaacagtaaggctgcactgggcacggtggctcacgcctgtaatcccagcaatttgggaggccaaggcaggtggatcacctaaggtcaggagttcaagaccagcctggccaacatggtgaaaccctatctctactaaaaatacaaaaattagctgggcatgatggcaggtgcctgtaatcccagctactcaggaggctgagatg

SEQ ID NO: 23130 - DNA, 1035 bp, Homo sapiens
ggctaaggcaactacgtggtcagtgaaggcatcatggaggaagaagtgccacctaagcaaaatctagaggtagataaagaggtaaaccatgagagtatctggggaagggtgtcccaggtagtggtcacagtcagttcaaaggcccagaggtgggaatgtgctttttgtattaggagaagagtgaggaggctggtgtggctgaaggcggagggtgagaggtgatagagcagttggcgcagggccctgtgggtcatggggagaacttgaacttttcctctgaagaagatgggagccatggaaatctgagcagaagggtgcacgtgctgacctcatgataaactctgttccctcccccacaagcccaacgatgatcaaatatggcatcaacaatatccgggagctggtgggccacaaggtgaacctgcagatggtgtatgacagtcccctgtgccgcctggatgccgagccgaggccccctcccacacaggaggctgcgtgacatgggccactctaggacaggtcatcctccccgagtccctgctgctgcgctcctttgcatccctggccagtgaccttgtatttatgaggcctctgtgaggccagcccccaccttcctctttcccacctgtcccaggaccagaatcccagggacagaggactgggtagcaggttccttctgttgtcctgtgtggtgtgtctactgtgagggtgggccctgaggagacctgtgggccacctattgtctaataaagtgggcagttgcccccatctggtggctttccttaggggtgaggggtcttgttgggtccccctagctcagtgtgccacttgatggtcaaaattctgggtactgggctgggcgaggtggcccgcgtctgtaatcgcagcactttgggaggctgaggcgggcgggtcacgaggccaggcgatcgagaccatcctggctaacagggtgaaaccccgtctctactaaaaatacaaaaaaaaaaaaaaaaagtatgggtactgagccaggcacagtggctcacttctgta

SEQ ID NO: 23131 - DNA, 1029 bp, Homo sapiens
ccctggacgccacgcacctggctgagttccaccagatcgagggcgtggtggcggatcatggtctcaccttgggccacctcatgggcgttctgcgggagttcttcaccaagctgggtgagcaggggggcaggggtgggccatggtggtgaggcagcgggcaggtgtgttgatcaccagcattatcctccaaacccctgctctcctgcccgccccccacttcctgcaggtatcacgcaactccgcttcaagccagcctacaacccatacacagagcccagcatggaggtgttcagctaccaccaaggtcagggtaggccctggtactggggtgggagggaggtctcaggctactatggtttggcctgggtccccccattgccatgcctgtaccccacctcccaagctcaccacctagacccagaacctgtaccagcagtgcccagaaactcaacacgcactgcccgtcttttctgtcctgcctctgcaggcctgaagaagtgggtggaggtcggaaactcgggggtcttccgtccagagatgctgctgcccatggggcttcccgagaacgtgtcggtcattgcctggggcctctccctggagcggtaagtgcccaagtggaaactcggggtgtccagctgcctcaaataactctccaggtataggggcctgcgtggtttcagcaccacccattcattcatccaatggacaaaactttcatcgtgagtacaaactgaatgctcagccccgtgctgtgaacatgacagcttatgtccctccctctgaatctggggtcccagtggagcgagaaggatgataactagcaagaccaacaagtacatcaggccaggcgtggtagctcatgcctgtcatcccagtgctgtgggaggccaaggcaggaggatcgcctgagccaggagtttgagatcagcctgggcaatagagcaagtctccgcctctacaaagaataaaaacaggccaggcgtggtggcacatgcctgtaatccaagcactgtgggtggctgaagcagg

SEQ ID NO: 23132 - DNA, 1051 bp, Homo sapiens
ttcacaatattgaccaggctggtctcagtctcctgatctcatgatccacccacctgccttggcctcccaaagtgctgggattacaggcatgagccaccacgtcctgctaattttttttttttttttttttttttttttttttttttgagacaaggtctcactgtatccaggctggagtatagtggcttgaccatagcctactgcagccttgaacttctgagctgaagggatcctcttgcctcagcctcccaaatagctgggactgcaggtgtgcaccacgacactagctaatttttttaaaaattcgttggtagagacagggtctccctatgttgcccagcctgggctcaagtgatcctcctaccttagcctcccaaagtgctggaactaaaggggtgagccgtgcccggcctttaatgtatttagctatacatggcaactgtattggacagtgcagttctagagttctgtgggacatagttcttggagaggatggcagtaggatgtgctaacttatgtgggcgtggctgtcaggatcccagctggaagtcgatgtggggcactcagccccagcactcagagatgacggaagcgcctctgactggtgctctcccatctccctcccaccccaggtccagtggctcctggacaactatgagacggctgagggcgtgagtctgccacggagcaccctctactgccactacttactgcactgccaggagcagaagctggagcccgtcaacgccgcctccttcggcaagctcatccgctccgtcttcatgggcctgcgaacccgccgtctgggcaccaggtagggccatccgtctactcccagcagtccctggggaattggtgggcatgccaaggcccacccccactccgagtcatctcaggcagtccagtccagcccagtcccgccggcctctgcgaggctcctcgacagccccgctcactcccactctaggcctttgcactggcggtgccttccacctcatgtgcttctcacccctccttacttgcacgtcccctgactgcctcaactaaaact

SEQ ID NO: 23133 - DNA, 1010 bp, Homo sapiens
acgatttgcagcctcaagcctgtgtcaccggtgcccatcccgtcacgcgatatctgaaggagagaggcttccccagcctgggataggtagcttggctcaggggaaacatatctgcattcctgatggtcttctccaatcacagcgtcgccttctctagtcccttccaatcacagcatcgccttctctagccccacccccttcctgcttcactcactgcctgatcaccttctgttatgatctctcatttacctttgcacgtggcttcttgcctgtctccccaactagacggttccgggggccggggcttttcattcttgtccattgctgtgtccaaagtgtgtgaaacagtgcctagcacacagtaggcactcgaagtacttgccaattttatttttttaatgaagtgtgtagcattccaagttccctaacccttcggtatttttttttttttttaattaaaaagacagggtcggccaggtgtggtggctcatgcctgtaatcccaggactgtgggagactgaggcgggtggatcacttgaggtcagaagttcgagaccagcctggccaacatggtggaacaccaactgtactaaaaaaatacaaaaattaacctggtgtggtggtgagccctgtattcccagctccttgggaggctgaggcaggaggatagcttgaacccaggaggcggaggttgcagtgagccaagattgcgacactgcactctagcctgggtgacagagcaagactctgtctcaataagtaaataaataaataaaataacaaaaataaaaagccagagtctcactgtcacctaggctttgctgcagtggtagtatggttatagctcactacaaccttgaactcctggactcaagggatcttcctgcctcagcctcccaagtagctgggattgcaggtgtgcaccagcatgcctggctaatcttcatattttttgtagagatgggttttcactatgtggcccaggctagtcttgaactcctggccttcaa

SEQ ID NO: 23134 - DNA, 1060 bp, Homo sapiens
aagccacagcccctgggcctccatccctggtcctgttctggggggcatccagagctgcacacattcatttattcagtcattcagcaaccatctaccaaagcaacctttttgcagcacacattgcatgctgggtgtgcaggagtgagcaggctgtggcccccgccttggagaagtaggggctcttgctcaggtcatgtgctcttggtgtcactttgtgtggtagacatagggcaggacagagagatcgagagctggacctgatgtgtgacaaagaccatgcttccatatctccttccactgtccccctcaactccctctctttgttcacccacaaccactcgggcctgtgcggctccctcccctgccaccttcagagtctgagccaggccacctcttgactgaccacactgtctttctggatgtttaatttttttttttttttttgagatagagtttccctcttgttgcacagctggagtgcaatggtgcaatcttggctcactgcaacctccaccttcagggtggttctcctgcgattctcctgcctcagtctcccgagtagttgggattacaggcgcccaccaccacacccggctaactttttgtattttcagtagagagagggtttcatcatgttggccaggctggtcttgaactcctgacctcaggtgatccacccgccttggcctcccagagtgctggggttacaggtgtgagccaccgtgcctgcccctgcccccctccctttttttttttttttttgaggtggagtttcactctgtcacccaggctggagtgcagtggcatgatctcagctcactacagcctccacctcccaggttcaagtgatcctcctgccccagcctcctgagtagctgggactacaggcgcctgccaccatgcctggctaatttttgtatttttagtagagacggtttcactatgttggccaggctggtctcgaactcctgacctcaagtgatccacccgcctcgtcctcccaaagtgctgggattacaggtgtgattacactgcacctggcctaatgctatgtttttaa

SEQ ID NO: 23135 - DNA, 1076 bp, Homo sapiens
tacacaccagtcttttggcctccctgctctggtttcctcatttgtgatgggatcatcatagctcctctctctcaggggacgcatgcgagggtctcatagccaggatggccttgagtgggcacttcagggaggtcagctgggggtgagggcctggacatgtcacctccccttcctagagcagccgccctgttgttttgggcaggatccagggactggcccttttctttatttttgcttttctttctcatgacataagctaaggcacgcaggacctgtgttgagagcaggccatcttggacagacctgttgccctctgagcatttcccacagtaaacatagtgacgatgttttgactggtttagggtctgcctgagggctgggtctctgtctcgactgactcagtgctctggtgggaatggcagcacagcctgggcattaggctagattcgtgtgtttttttggtttagagatggggtcttgctatgctgtccagactgacctcgaactcctgggctcaagtgattctcctgcctcagccttgtaggtagctgggactacaggcgcctgccactgtgcacagctagtgtgtttttaatgtgctctgtggtggacggaggcctcagtgggagcccggatcaaagctggccctggtccttctcagagtgggaatggaaggggtgagatcatcagggcatcctgaggggctgtggaaggggtgggtcaagatgggattggggaccatcaggtcataaagagtcatcaaaacatgtagcaattggccgggtgtggtggctcacacctataaccccagcactttgggaggccgaggcaggtggatcacttgaggtcaggagttcgagaccagcctggccaacatggtgagaccccatctatactaaaaatataaaaattagctgggcgtggtggcgcgaacctgtaatgccagctactcaggaagctgaggcaggaaaaatcacttgaacccggaggcagaggttgcagtgagctgagatcgtgccactgcgctccagcctgggtaacggagcgagaatccatctcaaaaaaaaagtaatgaa

SEQ ID NO: 23136 - DNA, 1071 bp, Homo sapiens
ccagctgatttttgtacttttagtagagactgggtttcgccatgttgaccaggctggtcttgagtgcctgacttcaggtgatccagccaccctggtctcccaaagtgttgggattacaggcgtgagccactgcgcttggccaaggccggccctgttctgaagtcagccgcagctgccaggttctcagtgcagcctgggcctgctcccagccctgtcacccctggccacagaagggcactgtcccactgatgagcttacatctggtgtcaagacccataactgctcccagacagagggcccaaaaagcccctgtggccccatgcagctcacaggggctttttggactcaaaacaccttcccactgggaatgctactcagccgagaatcccaagtccagatggcaggcacgtagggaactggcacgggtccctgggaggcagctttccccatgactctgctttccggcaataaactgacgagtcaggagcatagaacacccagagttcaaatgcagccctgccaccacttccccgctgtgtggcctggggcaagcaccttaacctctctgagcctcagctccctatctagcagacagaacccaaacccagacatggttgttggaaagtttaaaatgaaataggccgggcgtggtggctcacacctagaatcccagcactttttgggaggctaaggcaggaggattgcttgagcccaggagttcaagaccagactgggcatgataatgagactcccatctctgaaaaaaatgattatatatatatatatatatatatatatatatatatatatatatatgtatgtatatttcaatatacatatacaatatatatacatgtgtacatatatgtatacagtgtatatgtgtgtgtatatatatactatatatgtatatatatgtacatgtagatttcaatatataagtaaaaaaatacacacacacacacacacacacacacacacacacacacatatatatttagacagagtcttgggtctcccaggctggagtacagtggtgcaatcttggcttactgccacctccgcctccca

SEQ ID NO: 23137 - DNA, 1037 bp, Homo sapiens
ccgccttcccaaagctccctctccaggccggccatggattcaaagccaggcactgtgacacagggtcagacaccagcccaacaggaggagaacaagagcactcttgggggaagtggtgtttatgtgcactttcttcccgtaaatatttttgtgatcggactttataccaggcactgctataaagcagcaatgtaactagcagaaatgtaacctgagccacagaagcaattttaaattttctgtttgctccatcataaacagtaaaaacagccaagcacggtggcgcacgcctgtagtcccagctactagacaggctgaggtgggaggatcacttgaacccaggagttcaactccagcctcgacaacacagccagaccccatctctaaaaaaacacccaaagtttgtaattaaaagagaaaatgaaagaaacaggtgtcattcatgaaattcattttaatgacatgtttggggcttttttttatgtttttttttttttgagacagagtctcactcttgtcgcccaggctggactgcagtggcgtgatctcagctcactgcaacctccacctcccaggttcaagtgattctcctgcctcagcttcccaagtagctgggattatgggtgccaccaccacgcccagctaacttttgtatttttagtagacttggggtttcaccatgttggtcaggttggtctcgaactcctgacctcaggtaatccgcccgcctcagccttccaaagtgctgggattacagatgtgagccaccacacctggcctaatgatatgttttaattaagccagtatatctacagtattaccctttccatatattatcaatgtgaaaatatcattaatgaaacattttacattccttttgtttttttcccagtcctccatgacttcggaaatatttcctttttttctgtactgaagtatctttaaaatccagtgtctattgtatgcttacaacagttctcaactctgatggtaaatttttcctggaaagataagaaaaagcagggaagttgaaaaag

SEQ ID NO: 23138 - DNA, 1043 bp, Homo sapiens
gggggctcctgtgtggagacacctgactgcccaatgccaggcacccccatcccaccacccctcccaacggcccgcccctgcccccagcacagctgccagcagcttccaggccccaggccagggccggatctggcccctgccacccgccttaaggaatgtgccctctgccatcttgattttccgccccctgtcctcaccccgctgaccccacgtgctccccggggccccctctgccggtggcagaggggatgccccagaccttagccaagcaggccgcggggagggcgtgccctgagcctaccgacccctctgcccacagaacacagcccacttggatcagtttgaacgaatcaagaccctcggcacgggctccttcgggcgggtgatgctggtgaaacacaaggagaccgggaaccactatgccatgaagatcctcgacaaacagaaggtgaggtggcctgtcctcgctcagggcctgcctgtcaggcctttgcctggactgtgcccactccttagagtgccctatccacccgttcactcacttgcttttttttgattcagagtctcgctctgtcgctcaggctggagtacagtggcgtgatctcggctcactgcaacctccacctccctagttcaagcgattctcctgcctcagcctcccgagtagctgggattacaggcgcctgccaccacacccagctaatttttgtatttttagtagagatgggttttcgccatgttggccaggatggtttcgaattcctgacctcaggtgatacacctgcctcagcctcccaaagtgctgggattacaggcgtgagccaccgcgcctggccgcttggtttttttgtgggggacaggatcctgctctgttgcccaagcaggaaagtgcagtgacgtgatcatagctcactgtagcctcaaactcctgagctcaagagatcctcctgagtagctgggactacaagcgcacactaccatgcctggctaatttttttttgttgtttgtttgttttttgttttagacagggggtcttgctgtg

SEQ ID NO: 23139 - DNA, 1062 bp, Homo sapiens
gcagcatagccccaggccaccctagcccagcccctgcattgccgtttccccagaggtggcccctccacctctgctctgacctctccccatctctctgcccctccttttctcacaagtgccatgagttttcaaacatcttcgggtctcagcctgctgctgccatgaactttgttgggttaagggggaggggctctaggaaggaactggggggaaggggacaggtaggtggctggagggaccctttttgctgctagaaagcccctcccttctcccggggagctggggctggcttgtccccatcaattaggggagaaggggtcagaccaaagatggtggtttgtcccgtgtaagggaacaggtgtggggaagaggtggggttgggttccaactctggctttttctggtagaaaggcctaacccattacaccagaagaccatgggtgaagtctagatggggaggagaagtgaggccagggacagtcttgccagacgactctgaggagggcaagggacagttccatggcccttcccggactgcactaggctgggagctctgttgtgtggaggggtggtcagaggtctgtgaagagcgggcaggaggcatgagcaggcgaggagctggcctgtcccgggaagcagcccagcctgtggctgcccccgacaccaggaggagggccaggagagttccagggggctgaggcacacagagaggccaacttcctccctgcccagccttccttgtatctctccagactcggacaatcaaagggagagagggtgtatcgggtcctgttccagccggcatcgccgggtggcttccaggcctcagagctgtgtggcagggccccctgctggggctggacatcactgcagtccagtgcaaagccgcccccagagcccaggtgtccccccaacctaaccagacctggtgccttgacgcccccaccccagctgggacggtacagagaagggtcttggtttcctctcctactcccttccttaggctcctgaactcgtttgctcctaaatcttgttaattctttttctctggattttggtttc

SEQ ID NO: 23140 - DNA, 1032 bp, Homo sapiens
acatttcattgatcgtaagtttgcagagacaccacctcacgtgcatggcttcacatgtattactctccagtgaacagcgcaggggctttaaagtccatttaaagaaaaatgccaaggatataatagtgtcagctacactcacaatgaaagagatgaggggtggccaggaaagcactgtttagcgggtgactcctccttcttagccctgaggatgatgctgtgctggggctgaaaatagaagaaccctggtgggaaagagagagcaggcaggaaacaaaaagtgcccacacaagtcctctgggcttggtgtgttagttcgttcttatactggtataaagaaatacctgagattgggtagtttataaagaaaagacatttaattggctcatagttctgcaggctgtacaggaagcatagtagcttctgcttctggggaggcctcaggaaacttacaatcacagcagaaggtgaaggggaagcaggcacgccgtacatggctggagtaggaggaaaagagaacaggggaggtgctacacacttttaaacaaccagatctcaacagcacggaggggatggtgataaaccattcattagaaactgcccccatgatccaatcacctcccaccaggccccacctccaacactggagatcacaattcaacatgagatttgggtatggacacagatccaaactatatcacttggtttccagctccactgccccttcccaatttgggggtgtctatgacaccatgaccctggagcatgcacccccacccccgccaccccgtctatgtgtttctttcccaatgccctgtttctcctctgaaggtgtaacaaccgcacccagtgcgtggtggtcgccggctcggatgcctttcctgacccctgtcctgggacctacaagtacctggaggtgcagtacgactgtgtcccctacagtgagtcatcttgttccttgtgcggatgcgggcccttctcgcatgagtgagtgaggaggagacaccttgacccatcacacatgtgcacaca

SEQ ID NO: 23141 - DNA, 1034 bp, Homo sapiens
atgaagggggcccagatcccagatccccaccttggttcccccaccccccacccaaggcactcagactcccacccactcgagcacgcagagggttgccatggcaactgcaggctagggcaggctagaggcgccccctctcccccagcagccgcttctcctcctgttgctctccccatccccatcacagggcacccgaggacagagtctgggcctcagtggcccaccctgccgcaccgacccttgacttgagacagacgcagggcttagatgcgaacatacaggcaggtgtgcagccccgtttcccatgggtgagatagggtcgcctatggctgggtgcaatggattcctgggtacacctgtaatcccagcactttgggaggctgaggcgggaggatcgcttgagcccaggaattcaagaccagcctgggcaacatggtgaaacctcatctctacaaaaaacacaaaaattagccgggcatggttttgtgtgcctgtagtcccagctactcgggaggctgagctgggaggatcacttgagcctgggaggatgaggctgcagtgagctgagagtgcaccattgcactccagcctgggcgacacagcaagatcctgctgtctcaaaggaaaaaaaaaaaaaagagaagaaagaaggaaagaaaaaagaaagacaaataaggtgaccagagactactgaggtgcaaggtggggacggacacaggtgtgggctcacctggcttcccaggtgtagaacgtccaggcgtgaccagctctgaggttgcatagacactcaaatacagtgtgggcccgggggtgggggctcttctggccccccaggatccccccacagctcaccaagcccaacctggggagccagccctccctgggttcaagcccccttaccagttgagtgtccctgggtatatctcttcaatgacaggacctcactttcctcctctgtaaactgtgggtacaagcatctctccttcctaaatggttattaggattacatgagttacacgtggaagctgctcggg

SEQ ID NO: 23142 - DNA, 1080 bp, Homo sapiens
cctggcccggtttcttgcaaaactttctgaacccgctctgactactaagtggttaaaaatatccactccacccaggcaattttgctaagcttatgtcagggggagaaagggagactccggagagctcacaaatgaagcaaattgctgaaaatcggatttttactgtcttatctcggagccacatgagaggagaggagattgcaatttctgcgggaactttctcacatccccgagtttgaagagagcaagtggcaggggaggaggtgcagagagaaggctgggagagggaaccagaagagaagagagaggtgtgagaaggaaaaagcaagtagaggctgggagcggtggctcacgcctgtaatcccagcactttgggaggctgaggtgggcggatcacttgaggtcaggagttcaagaccagcctgaccaacatggtgaaaccctgtctctactaaaaatacaaaaattagctgggtatgattgcgtgcgcctgtagtcccaactacttgggaggctgaggtgggagaatcgtttgaacatgggaggcagaggttgcaatgagccaagatcacaccactgcactccagtctgagtgacagaatgagactctctctcaaaaaaaaaaaaaaaaaaaaagcaagaagacagagggggaggaaagaatacacaagagaaaaggaaaacagccacgtgagacattaaggcagaactgagaaaggtagctgggtgcagtggctcatgcttataatcccagcactttgggaggctgaggagggaggattgcttgaggccaggagttcgagaccagcctgaccaacatggcaagaccccatttccactaaaaagaaagaaaagggccagacacagtggctcacacctgtaatcccagcactttgggaggttgaggcagccagatcacctgaggtcagtattacatgcgtccatatgacgagaccaccaaacaggctttctgtaagcaataaagctttttaatcacctgggtgcaggcggactgagtccaaaaaaggagtcagcaaaggggtggggcagttttataggatttgggtaggtagtggaaaa

SEQ ID NO: 23143 - DNA, 1051 bp, Homo sapiens
acggcctgcagcagtactacgtcaaactcaaagacagtgagaagaaccgcaagctctttgatctcttggatgtgctggagtttaaccaggtgatacttccatcagcctgtcctggggctcaggaccttcgggaggtcactgggccacagggactgtgtggccctgactgccactccttccctcaggtgataatcttcgtcaagtcagtgcagcgctgcatggccctggcccagctcctcgtggagcagaacttcccggccatcgccatccaccggggcatggcccaggaggagcggtgagtgcgagccgcccgccaaggctgcagggagcaccaccaggagcccagtgtctgacggcctccacttgtttctcctgcaccccagcctgtcacgctatcagcagttcaaggatttccagcggcggatcctggtggccaccaatctgtttggccgggggatggacatcgagcgagtcaacatcgtctttaactacgacatgcctgaggactcggacacctacctgcaccgggtgagcagcctcacgggcatgttgctttcccctggcggtggggtggggccccagccctgcttttcctcaagtcctgaggtagtatctgtggcctgaccctgatcctgtctgcctgcaggtggcccgggcgggtcgctttggcaccaaaggcctagccatcacttttgtgtctgacgagaatgatgccaaaatcctcaatgacgtccaggaccggtttgaagttaatgtggcagaacttccagaggaaatcgacatctccacatacagtaagtgccttgggcagggccaggggtctggggcagagggttcctcccccggcccttcagttcactgcatctcatgtcttacagtcgagcagagccggtaaccaccacgtgccagagccgcccacccggagccgcccgcatgcagcttcacctcccctttccaggcgccactgttgagaagctagagattgtatgagaataaacttgttattatggaagcctggctcccaccccatctatttcttggtcatcttggc

SEQ ID NO: 23144 - DNA, 1035 bp, Homo sapiens
aggcacttggtatgcattagattaataaagcaaagaggtaggcagactttgtattaattccattttccatcttctcagctttatttttattggcccaggcccaataggaggcctttcatgagagcacttaattattcccctgtgcagaccacagagagtgggagaagctggggctggacagatactgcttgctctctcgcaaactcagttcccaccagcatcctggcagccccacccctgggatctttgggctcctgccccatgaaagcccagtgggttccttggggagtgatagggagggggcttctctgggctgagtagtctgaggaggttcactggagctgaggcttgcgtgtggagaaggaggcatttgtgcagagacctgggggcagagcattcctggcggtgacagccaggttcaaaggcttggggcaggggctccaggggtctgagcagctgaacaaggctgggggtggtgtgggatgaggtgagcaggggtcaaaccaaggggattgcctggcctgtggtgagagttgggattttaactctgtgagccatgggaagcccttggaggtggagggtgttctgtctgtgggtgtggccagaggggcatgggggagagatggggtagcttgggggtggggaggtggagacagggcgaagctgcgaggtgcagcccaggtagagctgatgggctcactcatggaaggaggcggcagagaatgccatttgaatgaagcttcatcatccttctgtgcccactcgcgggaccctgcctctctctcttctcagcatcatggcagaacaggatgtggaaaacgatcttttggattacgatgaagaggaagagccccaggctcctcaagagagcacaccagctccccctaagaaagacatcaagggatcctacgtttccatccacagctctggcttccgggactttctgctgaagccggagctcctgcgggccatcgtggactgtggctttgagcatccttctgagggtacgccttctgggtgttatcctcttgccca

SEQ ID NO: 23145 - DNA, 1022 bp, Homo sapiens
gccaatggcctgggctggatgctgagtccccatgaggcactgggaggcttgtgcccctgtgaattgtggggaactggaggccagggctggatgctgagttcccatcaggcactgggagacctgtgccccagtggattgtgggagctgatggccagggctgcatgctgacatcccatcaggcattaggaggggtgtacccccagtagattgtgcaagactaggggtggatgctgagttcccaacaggcactgagagacctgagctccaatggactgtgggaggccagggctggatggattgattggatggatggattgagaggcctgcatcccagtcgattgtgcaaaactgacgaccagggctggacgctgagttcccatcaggcgttgggaggcctgcaccccagtagattgtggggagctgatggccacagttaaatgctgagttcccatcagacactgagaggcctgcacctctacagactgtgggagctgatggccagggctggatgctgagttcctgtcaggcattgggaggccagtgccccatgagatggtggaggctagaggccagatacgagatgcacttctccgtgatgccttggagaaactcaacgctgtgggaggcaggcttgcctggtgccaagcactgtggggatagatgggagggggtcaaggagggcaatagtgggtttgagcaagaagtagacgcaggggtctccctaagtgggatgagtttctgtgtcctccacaagcatttcctgagcactcactgtgtgccaggctccgttccctgaaagcagcaatgaattttttttttttttttttttttttttttgagatggagtcttgctctgtcaccaggctggagtgcagtggcacgatcttggctctctgcaacctccacctcctgggttcaaaccattttcctgcctcagcctcccgagtagctgggattacaggcgcccgccaccagacccagctaatttttgtatttttagtagagacaggatttcaccatgt

SEQ ID NO: 23146 - DNA, 1065 bp, Homo sapiens
agtagctgggattacaagcatgcaccactacgcccagctaatttttgtgtttttagtagagatgaggtttgcatgcaccaccatacctggctaatttttgtatttttagtagagacggggtttcaccatgttggtcaggctggcctcaaactcctgacctcatgatccgcctgccttggccttccaaagtgctgggattacaggcatgagccaccgcgcctggctagggcttttctttgtttttttgagatggagtctcggtttgtcacccaggctggagtgcagtggtgtgatctcggctcactgcaacctccgcctcctgcattcaagtgattctcccacctcagcttcccgagtagctgggatcacaggtgtgcaccaccacgcccacctgtgtattgtatttttagtagagatggggttttgccatgtaggccaggctggtctcaaactgctgacctcatgtgatccgtcaacctcaacctcccaaagtgctgggattacaggcttgagccaccatgcccagccccagctcagggcctttctactggctgttctctctacttgggacgttcttgccccaaatcattgcatgaatgcttcctcctgtggttcaggtctcaagttcagcttcacgtgctcagagacgccctcactgatcttgtctatagaacttgtcttgctttgtctccatatcactattaaaaattatatgaggctgggcacagtggctcatgcctataatcccagctcgttaggagtccatggcaggaggattacttgagcccaggagtttgagaccagccgggacaacatagcaagaccctgtctctaaaaaataaaaataaaaaaattagcagggcatggtggcaagcacctgtggtcccagctactcaagaggctggggcgggaggatcacttgagcccaggagggcaagggtgcagtgagctctgattgcaccactgcacctcagccttggcaacacagcaagactctgtcaaaaaaaaaaaggaaaataaaggaaaaaatttatattagacatttacacatttccctgctccctg

SEQ ID NO: 23147 - DNA, 1035 bp, Homo sapiens
ttggtaggggggcgtctctgctgttggcagtgagaggtagaaacttggggttcttccttgctctcccctgacagacaaaaaagttcctcccccatggcttccaagctgtttccccctgtaagggaagctcgagagagagtctgctgttcagccatctgactgcttctaaatctgcttttcaggcctaaaggggagtggccccagtggcggtagcggcggtggtgccaatggtacctctttcagctacacattccatggagaccctcatgccatgtttgctgagttcttcggtggcagaaatccctttgacaccttttttgggcagcggaacggggaggaaggcatggacattgatgacccattctctggcttccctatgggcatgggtggcttcaccaacgtgaactttggccgctcccgctctgcccaagagcccgcccgaaagaagcaagatcccccagtcacccacgaccttcgagtctcccttgaagagatctacagcggctgtaccaagaagatgaaaatctcccacaagcggctaaaccccgacggaaagagcattcgaaacgaagacaaaatattgaccatcgaagtgaagaaggggtggaaagaaggaaccaaaatcactttccccaaggaaggagaccagacctccaacaacattccagctgatatcgtctttgttttaaaggacaagccccacaatatctttaagagagatggctctgatgtcatttatcctgccaggatcagcctccgggaggtaaggtgccaggtggggcggtgtctgtagagggcgatggctgctttttgaagcagtttagtatttgctgaaccaatgtgttggggtgtgtggtgcgtgccaggcttggggcacaacagtgaacaggactgaccagggcgctgttgtggagctttcgtggtggggacgtgtagatttgggggccaggtcttagctgcagaggcctgatgggtcttatctatggcagacggcctctgggcaagagctgagcctcttgagccagcttccatcta

SEQ ID NO: 23148 - DNA, 1049 bp, Homo sapiens
aggctgagagagaggccacgccgccggccagtgcagagctgggccttgggtgggttgcagacaagaaaggctgggagtgctgcctggagccccaggtgcaggtggaggggctgagggttactctgggagaaggtggattctgaactcggactctggagagcggggctgtagagagctggggacgggcatccctgtgggaggggaggcaaggatccggcacgggatgttgaggtgcctcagggtgatggggagccaccttctcctgtctggcccttggtgtctggagttgcctttgtgcaaattagaaaaggaggccccttcaggacagtgcatccgtcaaaggcatctgccatccactgccatctggatgtgaatgggggacaccccaagccgtgccttcctgaagccgtgtgcctcggtcccctggggatccccggaattggggtggggagcctccagcctggttgagccccgcccactccctgcagagatggtggccacacagcaggagatgatggacgcgcagctgaggctccagctgcgggactactgcgcccaccacctcatccggctgctcaagtgcaagcgtgacagcttccccaacttcctggcctgcaagcaggagcggcacgactgggactactgcgagcaccgcgagtgagcacccccacaccagcccccaacaccccggcccgcaacaccccatacccccagccttccacacccctggcccacccaagccccccacatgcccagcccgcccaagcccccctcccacccccgccaacacccacagcctgcaccccacccaggcctggcccctggcaggatgtggctccagaggccagggacctgaactgccactgaggtttctagccgggccccaccttagtcccagagagggctctctaggggcctgtttgatggggacagggcaggtggctgaagccacctaggggagtggccaagcccaggttccagtgggaagccctgccacctgcgtgggcagaccccagacccaagccacaggcactcggacatgtcttctt

SEQ ID NO: 23149 - DNA, 1177 bp, Homo sapiens
ccgcaggagcggcccccgccttacctggcagtcccaggacatggcgaggagtacccggcggctggggcacacagcagccccccaaaggcccgcttcctgcgggttcccagtgagcacccttacctgaccccatcccccgaatcccctgagcactgggccagcccctcacctccctccctctcagactggtccgaatccacgcctagcccagccactgccactggggccatggccaccaccactggggcactgcctgcccagccacttcccttgtctgttcccagctcccttgctcaggcccagacccagctggggccccagccggaagttacccccaagaggcaagtgttggcctgagacgctcgtcagttcttagatcttgggggcctaaagagacccccgtcctgcctcctttctttctctgtctcttccttccttttagtctttttcatcctcttctctttccaccaaccctcctgcatccttgccttgcagcgtgaccgagataggtcatcagcccagggcttcagtcttcctttatttataatgggtgggggctaccacccaccctctcagtcttgtgaagagtctgggacctccttcttccccacttctctcttccctcattcctttctctctccttctggcctctcatttccttacactctgacatgaatgaattattattatttttatttttctttttttttttacattttgtatagaaacaaattcatttaaacaaacttattattattattttttacaaaatatatatatggagatgctccctccccctgtgaaccccccagtgcccccgtggggctgagtctgtgggcccattcggccaagctggattctgtgtacctagtacacaggcatgactgggatcccgtgtaccgagtacacgacccaggtatgtaccaagtaggcacccttgggcgcacccactggggccaggggtcgggggagtgttgggagcctcctccccaccccacctccctcacttcactgcattccagatgggacatgttccatagccttgctggggaagggcccactgccaactccctctgccccagccccacccttggccatctccctttgggaactagggggctgctggtgggaaatgggagccagggcagatgtatgcattcctttgtgtccctgtaaa

SEQ ID NO: 23150 - DNA, 1024 bp, Homo sapiens
tgcatggacacacgcactgtgtccccacacctgatcgcatgcacacagttctccactagctcagacccagccacaccctggacccttctggcaggacagttagactatgccacaccctagagggacacagcccttagggatggcgatgttggacagggcagcacatgccttgtgccagttgcccctcccttcaacacacaccctattccagcaacgcccagcgctggctgcttctggagatgctgtgctcactcgtgggtacatgccttggtccctctcccaagagcaccacgcaggcctgcctggctggagtagatgcccatcagggaaaggaagacccgtggccctaggatcccctgccccttccccttctattacccctgaacctgggcatgaagccccagacctccctgtaacactcagcacccttacttcctgtctcagcacaccccattctgcacatcttagctctggcagcttcccgagcccccacatctggcataagacagcccctcctcctgccttcccctgctttgtggttcccagggctcgagctggcagggacagctgcagcctcaacagctggggctggggcggggggggggggggcgtgggaactgtggatggggggactccctgcacccgcagagacgcccccatccccatgcagctgttgcctggtggagggagggagggggtttgtcacttgggcctggggttcctgggcacctggctgatcctccaccttccttcacccccacacagcccccccttgcctggacggaagcccgtgtgcaaatggaggtcgttgcacccagctgccctcccgggaggctgcctgcctgtgagtgcctggctcagagccaccagtgggccctgtgtgtgggggcgggggggaggggcgatttgtcttctccctctgcctctgtgttcaccatggatgtctctaccacttcctacatgtgtgtggcttgggcaacctctcgtgtttccccattggaaactgagcaggggctctgcactc

SEQ ID NO: 23151 - DNA, 1029 bp, Homo sapiens
ggaggcaaccatccttctgcctgtctgtctgcctgtctgtctgtcctggccacaggaacttccccctggaaccccaggagctgaccacacccacattgctgctgtggggggagaaggacacttacttggagctggggctggtggaagccatcggcagccgctttgtgccgggccgcttggaggcccacatcctgccaggcatagggcattggatcccacagagcaacccccaggagatgcaccagtacatgtgggccttcttgcaagacctgctggactagtggtccttgctggcctgcccaggaggcatggatactcaggaaggaacacacacccattatctgtgtgtgcctgggagtccatacaatgtccatacatgggtgaactcttgaatcgctcataggcatgggactcctggatcccacacaagcgcacctatgggtgcctcgggacacaccaacccctatactcacacacaggcatggatgcatgtgtgtgtaacaaacactttgaccctgggaactgggtatacctctcttccagtggagccagatgccgagaccgagtgtcccacctcctcccttcctggggcctcactctgcgctttgccaaagtcgcttctctgccatagctgcacagaccttaaaccctgaccttcctgtccctgccttcgacctcctgcctgggtcttcagctcagtgctactctgaatacaatactgctgaccacatttggctacttcagcttaaatgtatgttaattgaaatgaaatacaatgaaaatgcagtgctcagtcccaccagctgtatttcatttttttccccttgagacagagtcttgctgtgtcgcccaggctggatggagtgcagtggacgcaatctaggctcactgcaacctccacctgccgggttcaagcgattcttgtgcctcagcttcccgagtagctgggactacaggagcgtcaccaggcctgactaattttagtattttcagtagagatggggtttcaccatgttggccgggctggtc

SEQ ID NO: 23152 - DNA, 1142 bp, Homo sapiens
gcgggagccacgcagactcatagcaaccaccccaagctgaagctgtgacgcagagcccggtacccatccttgtggaccctggctgaggtggagggtgtgctctagcagaaccctggccagactccagacagtattcttcccctccaccctactccatcctgtcccccctactccatcctgtccccccactcaccaaaggacttgggccacttctcccaccttgcctgcctcaacctaactcctcctttcatttaagctcagggttaaccagatactcttagatataagtctacatcccccaaaataggatcctcaccccccatgcacatacacacacattcctgtccaagaaagcccacaggtggctgctctgcctgtgtgtccacttgtgtatgtacatgccccagccacaaggcacgggtgacgcccaagaagagcccctaagatgtaagatacaagtatataatttatatgtatgcagagacaaactgattgaaacatttctagcactgtttattctcctacatcccctctttttgacctgaaaggtcctttattgtctttggatctgccaaacctccctgtgagggtgtggttcaggcatccagccagaggtccccccacttcttcgatgtccatgcccactcaggcactttctcatataccactgtgccacttcaagtgtgacgtatttaggttctttggggtttcttccatctcatcccacccactcatttttgttccttgttttgttcagacacttccccagcctgggtccaactgctgagctggatagttttctctgcagcttcctgctgaagatttaactcagccatggccttctccacacctccctgatgggtgtctctctacctgggttgtaattagaactgggatctatttaatttctccagccatttcccaacccttcccacagtactagaaatcttagtcctataccagagtaagaggtgtgtacaagcccccactgtactgtatgcacggatcgcttggccaataattatgtcagtgaatctgagacttgtattaaacactttagacatttgtagaagggaattcgtagacttttcacttacatacgaaaggtttttttttttttttgtgcagttctcattgcaaaa

SEQ ID NO: 23153 - DNA, 1023 bp, Homo sapiens
tctctgttctgcaggacctgaaaatcaagaacatgggctcctgggccagcctagtgcagaagcatccgaccaccccctcctccacagccaagtcatccagcgacagcttcgagcagttccgccgcgccgctcgggagaaagaggagcgtgagaaggccctgaaggctcaggccgagcacgctgagaaggagaaggagcggctgcggcaggagcgcatgaggtgggcgggtgtctgggtggggcatggggactcttggggccacaccagtccccaggctgactgggaccctctgcccaggagccgagaggacgaggatgcgctggagcaggcccggcgggcccatgaggaggcacgtcggcgccaggagcagcagcagcagcagcgccaggagcaacagcagcagcagcaacagcaagcagctgcggtggctgccgccgccaccccacaggcccagagctcccagccccagtccatgctggaccagcagagggagttggcccggaagcgggagcaggagcgaagacgccgggaagccgtgagtctggaggcctggtggggaccctggtctaaggattagctcctgagggagctgggaaagggggactggagcctggacagggaggggcagcgggggagccccgtccctgctggtcggcatgtggtcctctggactcagctgtagggccctgagtgctgtgtggacggggtgagcgctatgaggggtcagccacggggagggctacggggctgactgctggtagcgggtatgagggcttgtagctgcagggtggctaggtcatcctcctgactccctccttcctttctcctccagatggcagctaccattgacatgaatttccagagtgatctattgtcaatatttgaagaaaatcttttctgagcgcacctaggtggcttctgactttgattttctggcaaaacattgactttccatagtgttaggggcggtggtggaggtgggatcagcggccaggggatgcctcagggcctggccctcctgc

SEQ ID NO: 23154 - DNA, 1072 bp, Homo sapiens
agtggagaggggactgctctcctccaagtgtgcactttcctcattattctcaggggcgcagatgctcaggctggcgcaggggagaggctagggagggagccatggtgcccagaaggcctggcgaccagcccctgctgagagatggagctaacatcctgtgtttacggccaacggggttgccgctaggctggtgcagctgtcagtgagctggcgtgctgcagaccacctgagagctggccctagggtctcaggcagactggggagtggggatccacagtgggaaacctgtgttttggcagtagactcctgcatgttctcccacgggcctgtcccatccctgggattttattctaactagaaataaatgctaaccctcaataatcagtgcatgtaaataacttgatcgtgccaaggaagattgaggacccttcacggcagctggggagagccatgttgctctgaggtgtgtgtgcacagatggggtgggggtaggtggcacctcgggccttgtcagtattcctcttcccttggacagcctggtgccctctgcttcccaggtgagtgaggagacttgccttgaagtgggctgaaggaccctccaggactccagatgcccacattctctaccacaactgcatgcagaatgccgtgggcagctcactggcctcctggccttccctgtcgccatccttcaccctttcatctctaaccgttactctccccacactgcttttgtaatccatcagccagcaggaggcactgcaccccatggctgcccaggaagggctggctttgccacccgaagctagggcccccactcgcagcagagtgactggggtgaatggctgtattcttggatccaattagcattcctggtggccgctgacttttcactttccatgccagccaagcctccagcttgccttcctctgggtttttgcacctcctgttttctagttgacttctcctaccaggggttttgtagtcttctcatctgaggatctgagtgaccaagtggaaaccccagatgctgaaattgtcaggggacctgattaactaaaatgacatgacg

SEQ ID NO: 23155 - DNA, 1050 bp, Homo sapiens
ctcacaggtgggaaaagggatgtgcaggtttgtgagacgtggcttcattgtacatccttccccatgaccttcatagttcccagagcctttgctggctcctagtgggctctcaccacctcactctgcctcctctgttggtttgtggtctcctccctgctggagggtaagtctttggggagaggagacattggaaccctttcagtcaaagcatggggtggtccctctggccaacttggctagctaccgccagggaactcagtccttggagaccacagccagagggacttgtcattctgagcggtgcccatctgctgactgatatctcacgggggctcttctcttcctttgtagagtgcctggtgaagaatgtgatgggatcactagcatgtctgcggagagcggccctgggacgagattgagaaatctgccagtaatgggggatggactagaaacttcccaaatgtctacaacacaggcccaggcccaaccccagccagccaacgcagccagcaccaaccccccgcccccagagacctccaaccctaacaagcccaagaggcagaccaaccaactgcaatacctgctcagagtggtgctcaagacactatggaaacaccagtttgcatggcctttccagcagcctgtggatgccgtcaagctgaacctccctgtgagtagtgtgggcagggcccagggtggccgtcctggaggtcgtctcctgcatgtctcctggtcagggcagttcctggggggagggtaggagatgcatttggaatcatggtgagagctgcagggcccttgagtgagtggtttcagcagttctgatcagttgaaatcagggagaaagaatgagctaattggcttaacaataactggtttcttagatattggaatcctggggaaaattgtgtagaggttgaagcagtgggagaaaggaaggcccacagatctacttccagttccatggtgagttgaagtcagagcacttggccatcctagccccttcatttctcaggtgtggacatagttgatcaaggataagtagacgta

SEQ ID NO: 23156 - DNA, 1027 bp, Homo sapiens
gctgtgaaagaggcccattagctctgtaaatacagagcgtatcttagttctttgcacttgtccagtaaacactacaaaggaatgtgtggaagtgcgtcaggctttgatgggtaaaagacttgaaaagcaaccgcagtaccccaaggcgattttaaaactctgtgaagccagggtttgggggggttcggtggcagtggctcagtgcttctctgtatcgtgtgtacgttgtttattcaggaaggtagggagcagcagtatagtccatctgatgttttcttagcagcggctctcaagtagatttaggactgcagaaggagcagcttggaaggctctgcagtctgtgcagcctggtcaacgggagggcacaactggagaccatgccaggcctggctgccatgctatgttgtgtcttttgttaagaatgtagctgagggctaatgtaactgagggctactgctgtatcacatcctgtgactttgtgtgtcaaaggggaaggaacttttaaacgtctatctgttagaagctatgctggctgcttttatgtatcttttgtttactcctcacagatacaaggtagatgttacgaaatccacctagaagatggacctggggctgaggtgcctgcccaggggcaggatctgaacaaagatcttctggctttgaagtatctgtttgtttcatgtggtggctgttggtggggggggcttctgccgtcagagcctactctccatgagaggtgggcagaaagggttatatgcctagagaaccagggagaaacagttgctcttcagattagagaagtctctgtcaacacaactcctttgttaagggaattttcagaggatttagagtaagttgatttgtctccctttatgcccctggattttccaacttaaagctctgccgctggacggagtggtgcttcagaatctcagtgtggctggacggtcaggagactgcactttgggatgctgcctcacatccagatccttttggctccctgtccacttcagcggccatagtttac

SEQ ID NO: 23157 - DNA, 1030 bp, Homo sapiens
cgcttaactgggaaagttgttgctcgtacattgtctgccagcttactacaagcatcatggccaggctgggtttggctgctcagcacatcccctggcagggcactggcggcctggaaaatgtatagcaggcaggtgctcagtcagtcctagagctgatttcatgtgatatctgatgcatttattatagaaatgaaagcataaaaatgtgttttaactgtttcctactcccccggcacagtgacaaggctgattccaggcacagcttggttaggccagcacttgtaactatggtggggagcctcgaggcactgagtgagctcagcctccttgggcagaaaagcttgtttagttattgccagcacacactgtgtgttcctgtgggcaaacaaacagacggctggagatccgggggacctggtagtcgtcagcatttatgtcaccaccgtatgccttctctgaatgacttgcggaagaatagagtgggttgggattatgtggtaagtgtaaaaaagttagcgatcagagggactttgggtttacctctggagaggacataatgaaggtaatccttcactgtgacggatgagtggatatttctttgtaccctgagctctttcatcctaccttggtggtcaaatgtgagagcaagtgctttggggctcagagggcatcactccaagcattctgcatggagtctgttgtggtgaatgttcttgctggcatcttgatcaaggactttgtcatcattagccatcaaatgcttgttggtccttctcaaccctgtaatgttgatacttaaaaaactggaaacatcctgacagaaacagtcgagaagtggttgtgtgagctctggttatcgcattacagttaaagttggcagataggttctgtattcagtgccccatcaaaaacagaacacagactatataaggggaatattgtttgtaagtaactctgtgggctaattgtgcaaataggtgctagaatgctgggcagcctttttccttcttcgtggctttgttgcatttta

SEQ ID NO: 23158 - DNA, 1065 bp, Homo sapiens
tagttgggactataggtgctcacttccgcgcccaggcttttttcctttttggcattgtcttgtcctggaaagggcatgagatagactcagtgttgcattttgtgcttaaagatctctgtacctctgatgtgttttatatgggcaattagaacttgctgaaaatggaatatactacctaagcaggtgcacagatgagtaccactgtgactagtggtactgaagctcaaaatggacattcacccactggaatttggagacattggcagtgatctggagcaggttgcttaatctttgatcctgtttccctgtcagtgagattgggtagcagaagcactccatccacctgtcagagttagctctgcttgttactgatgagggtcaagcacagcagagggaattgctcctacccaccctgcagcgctcttacttcactgaaggtgctgtaggtgattgacggtgcagtgttttggttagcctttcaattttgagtgattctgatttgtgtcactcaacttgaggagacttggcctgaccagttcagtcacctctgcttcctgtgtgtgttcctttccctacttcatttccttgcccatcctgaattttgagtttaccggttttgtgtttgttgcatgtataggtatacctcgttttattgtgctttgcagataattgcggtttttttatttacaaattgagaatttgtggtgaccctgcattgagcaagtcttttatcagtgccatttttccaacagcgtgtgctcacttcatctctgtgtcacattttggtaatgtgaccaacgtttcagactattatatctgttatgattcgtgatcagtgattttgggtgtcattatcatagttttggggaaccacaaaccatgtccatctaagaaggtgaattcagtctataaatgtttgtgttctgactgctccagctactgactatttcccatctcttttcctctcctcagacctctctattccttgagacacaactgtcttaaaattaggccggttaataaccctataatagcctttaaagtgttcagatgaaaggaagggtc

SEQ ID NO: 23159 - DNA, 1036 bp, Homo sapiens
ctcaggctcccaagtagctggggctacagtcgtgtgccaccatgcccggctaattttttgtatttttagtagagacggggtttcaccatgctgggcaggctggtttcaaactcctgacctcgtgatcctcccgcctcggcctcccaaagtgctggtattacaagtttgagccaccgcgcccagcccagatgtttaaagtttaaggagtttcagcttatgttttttgccccctttttaaaaatttatgtcctcaatttttttcttacaaatttttatttttgccactttcttcatccagtgtcacagcttatactattacttttttttttttttaggtagactctcgctctgttgcccaggcgggagtgcagtggcgcaatcttggctcactgcaacgtccgcttcctgggttcaagcgattgttctgcctcagcctcctgagtagctgggactacaggtgcacgccaccacacccagctaatttttgtatttttagtagagacagggtttcaccacattggccagtctgctctcgaactcctgacatcgtaattcacccgcctgggcctcccaaagtgctgggattacaggggtgagccaccgcgcccagccaacctaccgttttaagagacgaggtctccactgtgttgcccaggctggagtacagtggtgagtcacatgcatgaccccactgctgataggtatgggagttttgacttgccccctttcttttttttcttcactacgcgacccacccccccccccccccccggccccgcaactttttttttttttttttttttgagacggagtctcactcactcttttgtgcaggctggagtgcagtggcacagtcttggctcactgcagcctgtttcccgggttcaagcagttcttgtgccacagcctcctgagtagctgagattacagatgcccgccaccatgcccagttaatgtttgtattttaatatagttggggttttgccttgttggccaggctggtctcgaactcccggcctcaagcgatccgcccgcc

SEQ ID NO: 23160 - DNA, 1076 bp, Homo sapiens
tgtatccttcgaataacttccttttccttctttctcccagcctgtggcagccagtcttctactttctgtttctatgagtttgactaccatagttattcatataagtagaatcagacagtattttttgtttgttgagtatttttcgtttgtttgtttgagatggagtttcattcttgttgcccaggctggagtgcaatggcgcgatgttggcttactgcaatgtctgcctcccgggttcaagtgattctcctgcctcagcctctcaagtagctgggattacaggcacccgccaccatgcctggctaatttttttttttttaatgtatttttagtagagacagggtttcatcatgttggccaggttggtcttgaactcctgatctcaggtgatccacccacctctgcctcccaaagtactgggattacaggcgtgagccactgcacctggccgattcagacagtatttagaattttgttactggcttacttcactaagcataataacctgttctccaggtccatccgtgttgtagcatgtcagaattccactcctttgttgatggagttgggttgcttccacctcttggctgttgtgaataatacagcagtgaacatgagtgtgcaaatatccacctgcctactgttttttgtttttttgtttttttttgagacagagtttcgctctgttgcccaggctggagtgcagtggcacgatctcgactcaccgcaacctccgcctcctgtgctcaagcaattctcgtgcctcagcctctcaagtagctgggactacaggccccttgccaccatgcctggctaatttttgtatttttaatacagacagggtttcgccatgttggccatgctggtctcaaactcctggcctcaagggatccacctgcctcggcctcccaaagtgctgggattacaggcatgagcccctgctcctggccatcttgcttactttttgaacacatgttagaactaagaacgtgggtgcggaagcctgctgaggggctttaaattccccatatcctgcctccacacggaaactgattttggggatggatattgggcat

SEQ ID NO: 23161 - DNA, 1014 bp, Homo sapiens
tttgtattttgagtagagagacggggtttcaccgtgttagccaggatggtctcgatctcctgacctcgtgatccgcccgcctcagcctcccaaagtggtgggattacgggcgtgagccaccgtgcccggccacaattcacacttttttttttgaagacagggtctccctcatccaagctggagtgcagtggcacagtcttggctcatggcaacctccaccctccagtctcaagctatcctctcacctcagtctcctgagtagctacgcctgacatctttgttttgttttgagagtctcgctctgtcacccaggctggagtgcaatgacatgacctccgctcactgcaacttctgcctcccggcttctaagcaattctcttgcctcagcctctggggtagctggaattacaggcacgcgcccccacgcccggctaattttgtatttttagtagagatggggtttccccatgttggccaggctggtctagaactcctgacctcaggtggttcacctacctcagcctcccaaagttctaggattgcagatgtgagccaccgtgcacagcctgtttttggttgttgtttgatttgacggattttcactcctgttgcccaggctggagtgcaatggtgcgatctcggctcactgcaacttccgcctcccgcgttcaagcaattctcctgcctcagcctcctgagtagctgggattacaggcgcacaccaccacgcccagctaattttttgtatttttagtagagacggggtttcaccatggccaggctggtcttgaactcctgatctcaggtgatctgcccgcctcggcctcccagagtgctgggattacaggtgtgagccaccgcacctggccccttttttgtacttttagtagagatggggtctcaccacattgcccaggctggccttgaactcctgagttcaagcaatgtgcctgtcttggccgctcaaactgcagggattacaaatgggagctacaagctactgtgcctggccga

SEQ ID NO: 23162 - DNA, 1044 bp, Homo sapiens
gcttggaacactcagtagggctgttgtcaccctgttttgacaggttttagagaaaatggggtcactttagttccttgaccatgtggagcttgtcgacatcctcatggatgctgtcattgaagcggttggatgtgcaagcctggaatgcaagggtggatctagaccagacttgggggcattgggcatctccaggaggatggatgtgagggctcctcccaataggacgtcggaaataagagtcccagcagggtcccagacttgagaaagccaggcccctgtgtagtaagaacacagattagtgaatttgctttaatctggggaatggtgaagggcttttctttccaaaacaatgtgtcctagagtgaactctagtgacctagataagtatcatgtttaatagttttgtcctctgttcttggaggctagaaaatttcccacttctctttggaatttgctttgtctgacatctttcatttcattcattctatgcgtccacaccctcacgtcctccattttgtgagcagggttttgggagcaggactggctcattttggcacattatatttgtgtgtggaaaatgtgaagtgcgaacgaaagttcaagcacatactcaaggctgagctgtggtactagaaggtgccagtggtgggtccacctggagtgagtcaagcagtggttgaggtgacttgaaaatatcccctatcgatggttcaggcaggatagcccctgagttcctaaggcagagattcttaaatttggtctgtgtaatcttccctctccctcatcatggagtttttccggcaagcacttgatgtttctggttattgagcagttacttgtgctgagtgccagggattgtctgggtgctggaggtcagcggtaagcaaggtggatgatgcacaccctcctgcctgcccattagttcatgtgctaggagactgcagggcaagtgatgcagcctgcttggcttttactccatgattacagattatgaaatataaatattaatacattaaacagttcttactaaatcattacattcac

SEQ ID NO: 23163 - DNA, 1049 bp, Homo sapiens
gtttcatcgagttagaccaggatggtcttgatctcctgacctcgtgatccgcccgcctcggcctcccaaagtgctaggattacaggcatgagccatggcgcccggccgcttctcggtcttgaggtgcttttttttgagacagagtcacccaggctggagtgcagtggtgtgatctcagctcactgcagcttccacctcccgggttcaagtgattctcatgcctcagcctcccaagtagctgggactacaggcgccggccaccacgcccggctggtttttttgtatttttagtggagatgaggcttcactatattttcagactggtctttaacttctgatctcaagtgattcacgtgcctggtcctcccaacatgctgggattacaggcgtgagccaccatgcccggcccttgaagtgctgcttactgtagggtagaattgagttctagctcatgggtgcttcccccccccaatccccttaaggattctgtttccaagagaatttcctgcctgcctcaggcacaccaagtggaactcggtcaacatccatgtccaatgcgtgtgctggatgtacttggtaatcagacactgttctgcattcactgcagacatgacagtgagtgaggcaggtgtttcagggatcctaatgtctccggtggtgattgttgcacaagatcctaatacccctgtgctagaaaggtggtgattcatttaacaggtgtgccctgaaggattttacttttacatcttttctttgacttcgtaaaatgacacgtgatctcattcagtaggaaattggctctgaatacctgtggggggaaaaaaaaaacaaagccagtccagagaaaatggtagaagtggttaaactccacgcacagtgctactagtaagctagttgaaaagtacacaatcaaaatagaatagatgactacagcatgattatgctaccctgaaaccgcactgcatataggataagacctacactcctgtcatgtagcaccctgggctcctgggttctgtgacacactgttgcctcattccgttcatttg

SEQ ID NO: 23164 - DNA, 1046 bp, Homo sapiens
cttgatggttttgaatactttttatttttattttttaagacagggtcttgctctgttgcccaggctggagtgcagtggcatgatcttggctcactgcagctttgacctcccaggtttaagtgatcctcccacctcagcctgctgagtagctgcaactacaggtgtgtgtcaccatgcctagcttatttttattttttggtacgaggtctcactttgtcatccaggctggagtgcagtcattcactgtagcatcggcctcctggcctaggtgatcctcctacttcagcctcccaggtagctgggactacaggtgtgagccaccatgcccagctaattttttgtatttttgtggagatggggtttcaccatgtttcccaggctgcaactcctgggctcaagtgatctgcccaccttggcctcccagagttctgagattacaggtgtgaggcaccgctcccagccttttttttattttttgaagggacgaggtcacactatgttgcccaggctggtcttgaactcctgaacttgagcaagcctcctgccttctttgtctcccagactgctgggattacacaggtgagccactgtgccaggctggttttcacatgtatcttacttttctagacatttacaactttatgacttggaaacagggtggatcacccattttggtttgtccttgcaaaaatcctccagaggtttcacagagttgtcaggtaacgtgtcaacagtgatgtgaaccttcccagggcccctgtgcccccaactttgtcagcctgtgctctttcctggggataaggaatttgagaatgtaccagaatgggtctgttgcaaaggccgcagatgagggtcttggaactagggctctacactgaagctgctgctgtttgtaaactgtctccatgatttgctgttggtatggagcctttgctccagaaggtaactgaatggttcctagccagcctcattatttatgtggtagtgttggatgtgggtaggcttacaagatttatgctgtggtcccttacgtggcttaatgtgtg

SEQ ID NO: 23165 - DNA, 1050 bp, Homo sapiens
actacactccagcccaggtgacagagtgagaccccatttcaaaaaaaaaaaaagaatccaaggtacatgagaattttccaggagagaagctaaaaagagatttcattgatagagccaactgacagtgaggttgaaggtgaggggtagtgaagaaccagagccttcatgatgggagcagcatatcgaagtcccaaagtgggtgctcatggagagaaggctggttggaagagctcccagttcttccttgtgaaacccattttgctcagtgttcatcccaggactttagcatttggggcaggtggctaagtcccagcccacaacctgacttcaggacctttgccctcctctcagttactaaacacttccatatttgacagttccatctattaaaggcacagaatctaaataaccaattgaagaaacatgactgggccgggcgtggtggctcacacctgtaatcccagtactttgggaggctggggtgggcggatcactttgagttcaggagttcaagaccagcccggacaacatggtgaaaccctgtctgtacaaaaaatacataaattagccaggcgtggtggcatgcgcctgtggtcccagctactcaggaggcggaggttgcagtgagccaagatcgtgccactgcactccagcctggatggcagagtgagaccttgtctcaaaaaaaaaaaaaaaaaaaaaaagagggaggaaacatgactgatgtatattttacctttgcagcttaagcaaggtaaaagtttccagagtcaagtgtgagctcaggcttctaagcgtctttttttttgagtcagggtcttgttctcttggtacccagccaagagattcctgcagagattctctgcagcctcgaattcctgagctcaagagatcctccccactcagcctgccaggtagctgggactgcaatagtacaccaccacacctggctaattttttttttttttttttttttttttttttgagatggagtcttgctctgtcacccaggctggagtgcagtggtgcgatcccggctcactgcaagct

SEQ ID NO: 23166 - DNA, 1034 bp, Homo sapiens
ttgtgtccaccatggacaggcctcgtggctgctgaagtctgacttggctcctccccctgtgacaggttatgaaaactacaattactatggcgcccagaacaccagtgtcaccacaggcgcaacctacagctacggcccagcctcgtgggaggccgccaaggccaatgatggcggcctggcggccggggcccctgccatgcacatggcctcttacggcccagagccatgcaccgacaattccgactccctcattgccaagatcaaccagcgtttggacatgatgtccaaggaaggaggcaggggcgggagcggcggcggtggggagggcatacaggaccgggagaggtgattatggacccaagccctcccccgggaccccacacatccccacctttgtgcgcatgggagtgggcacccactcttgagggagggcctgtccccgcctccctcttgggtgtggcattgacgagttgggctcgtggggggtcagtgatgttacagtaggacttccttgcttttcttcatggcggggcttgggcgtggttgttggctaagctccccgagactccttttttctacatcatgctattcctgtggccaggggctctgtcccctgctcagcagtgttccagggagggtgttggtcagttttggtcatcccagcacttaggtgggatgcagggtggtttggtttgctgttttgaatgtaggggcgtcgaggttatactgagggagtgtggcagtgggtgatcggggtgaccgcccctgatgggctgtgcttctgttgcagctccttccgcttccagccgttcgagtcctatgactccaggccctgcctgccggagcacaacccctaccgccccagctacagctacgactatgagttcgacctggggtccgaccgcaatggcagctttggggggcagtacagtgaatgccgagacccagcccgggagcggggctcccttgatggcttcatgcggggccggggccagggccgcttccaggaccggagcaaccctggcaccttcatg

SEQ ID NO: 23167 - DNA, 1031 bp, Homo sapiens
acagcccaggatacccagccctgctcatggccagaggccttgcttggacagctattctcgatggaccctctggagtggacagtgggtgattcagccagaggccgcagggcctgccctgtcctggcagagccaaattggtgacagtgcccatctgctcccacaggggccctaaccacccaggatgaaaatggccagaccaagcgcaagttgcaggcaggcaagaagagtcaggacaagcagaaaaagcggcagcgagaccgcatggtggaaaggtaaccagcttccctccacccctctgcctctgcctcgctgtggggctgccgccaggagagcagggccatagctctgccagctcgccgccctctggcctcccttgggagccgccacctgctcggccgtgcatggaccctgcttcccgccaggcccagctcccaaggcctgactcatcccctgcccctctgcggccgcctggcgaccgctggcgtctgtgggccgagacctgacaccgctcggcaccgttgctcagaagctctggcgctaggtcactcggcgcacgaaccccaaggtgcactgggggcctgatgcccctgagggagggggccagctcatcagagactcaaggtccaaggcgcctgtgccgccccagctagctgccaagaggccaccgccgtgcccaggagagatggcagcacctgtgggctgtggcagcctcgggcctgccttctgccctgcccgccggccctgtcaggccgggcctgtctgcggctgagcccttcacgccccttggtcgggtctgtctgccctcagggctcccgcactggcgcttgcctcctccgcctcagactcttgctcttgctggaccttcctcagcctcgccggcgcccggcccctgggctctccagacaaagctgaccccgtggcccagataaggacgtccggcagaggtagggacccgccccgaggtctcggtggcggctggcctcctccgccccttgccacggcggcctgctccggcccaggccccagacccc

SEQ ID NO: 23168 - DNA, 1113 bp, Homo sapiens
agcttacctccttttccctttcagatgagggcaccgagggggaagccacagagggccttgaaggcaccgaggctgtggagaagggctccagagtggtaagtggctctggctgggcattttctgtctgcaggcagggcgagctggcctaaagagtggtgctctccctgggggccagaggcaatgctgtgtcagctctgcgtgcatggtgaccagcatggggaggcagtgtggtctggcagaaagcacaggctgcctagctggaggcacagtttccttgttggaaaatgggatgagcccctgtgcaccaggtagtgggaggatgtgaggtttctggcacatagccgggccttgtcatttaaagccattgtaaataactgggctactctgggccaccctgcctataggatagccctgctctgtctatggagcaagcagctgttttactatataccgttgctctaataaacttggtttcttttaaaaaaaaaaaaaaaggcacctgttttaaagttggaatttgaaattgttaggacggagaggatgaggagggaaaagaggatgggagagaagaaggcaaagaggatccagagaagggtgagttttcctggggtgcctggtgctagggcggctcttccaggggctcacagtgggagggacccagctgagggcagggttgcggcagacatgcggccagttggggacctcccttgtgggcccgagtgtgtgctggcagggggctttcttttcgccgcctccacccccttcccactcttcctcctccttcccaggcggaggctgtggatggtggtgacccctgcctagcacactggttttgccttcagatgggggcagctagtaaaagtgtggggaaccccaggcacgccccctgccctcggtccctcagtaacgcgcagttccaagtcctcagtggctggtgtccgatctgggaccctcggtgcagtttttacggctctggtgtgcgtatcctctcccttagcacctctccagcccctgttgggattccgtgtccccccacctgagtgatgagcgccagcaggtacctaacagcaaatccagcgtcagcccactgttgccgcggtgcccggttggggg

SEQ ID NO: 23169 - DNA, 1086 bp, Homo sapiens
caagttccttagttgagagtgttgggaacagaaggatccttaaataacagatgctcagagccacaggcagccaggcaccagggcagcaagtggcctgggtcatttgcgcagtgctcgcgagctcaaggcttctcggttaggggaggtgcagcctgctctgaccagtcaggtcctgggaataattgtctgcgcctgaattatggccttgtattgtaagcaagtatagatgtaactgcccttttactttttgtaggatatggaacttggaactctgggacaaatagaggcaagtgtcattcctgtgattgctgtcctgtcccttggggttgtcctggctgtgtttctctgccactgccctgcttggccaaggttgggagtggggagggggcatgtttctggggttacctactccttaacaggaggccctcatcagaatgaccagggcccatctagcttcagtggctagggtcttctctctctgtgacagaagatacccttgtatctgtgtttgtctctgtctctgtctgcctcccctctgcctgcccccaccatctgtctgtctctgtctccctcactgcaggctacgagggctatggctatggctatggctatggccaggataacaccaccaactatgggtatggtatggccacttcacactcttgggaaatgcctagctctgacacaaatgcaaacactagtgcctcgggtagcgccagtgccgattccgttttatccagaattaaccagcgcttagatatggtgccgcatttggagacagacatgatgcaaggaggcgtgtacggctcaggtggagaaaggtgagtggacacctgcctaggggttgagactctgcaggggcggctcctgcctgctgcccactgcgttttcctctctgagtgcccctctgtgtctgcttcctccccgctgcttggtgctgctgtggctcccagcagggtccgttgcacttcccgtctctgacttgtgtctcctctcacccaccctcaacccctgccgcactgcctggtggtcagcctttcccagcttgcggtgagaggaacaagcccagactgggcagacttcact

SEQ ID NO: 23170 - DNA, 1728 bp, Homo sapiens
gatcagtaggccacccctggtcccccattgtctctgcagccccagctgtcttgtctggtggagattcctcacaagtgctgtgaagccacctccctgtccctggctccctggctccctgcctctgtgtggcctctccagcctcctgaccctggtgttgtgttgaattccctctctgagtgcctcccaccctcaccctcgagacaggcagacgttccccctcacaagttctgcccagagagatcttttctttgagatcccctgggatgggagtttgggctcagatttgcattagaccccagacctgtccatgctgtagtgtgtggaagcagctgctggcgtctgctgtcagtggcagcctcagtgtccctgcactggactggtgctgggggttatggtggaacctcagctttcctggggtgagtcgcttcgcagagtgagagcggacatcaaggataaggaagaaggccatcttcttagttctgggtatagacagcctgaaatttgtctgggctgagcctgtctccccaacccacaggcctgggttctgaggaaaacgcaatggtggccatggacttgggctctccctcgctccctaagaagagcctgcctgtccctggggccctggagcaggtggccagtcggctgagcagcaaagtggctgcagaggttcctcatggcagcaaacaggagctgcaggacctcaagggtgagtggcccaggtggcatggcaggggatgctggccaggctggttacactcacaggagcactctcgtgccttggggttaatgtggggcccaaggttgcccgcagttttccctctggcaccttgaggcaccaaggttggcactcagctgtcttctctcttgaacttctactgtcctgggcatgcgtggccctgagctgcaccctcacggggcgagggacagcatccagaagcagtgggtgtggtggtccagagctcatactcagacccagctcatttgctgaatctggcctttgctagctgtgcagtctctcgcatgacaccatttcttcgtctgttgatcctaaggttgttattgactagtgacgggccctggggtggactccagggaggtgagaggagcaaaatgaatttggcccttgctcttgagggccattcaagttggggaacggggagacagagaagcagataggcaaggataaaggctctgtggaagagggtgcaggagactgcaaggaccagtgtttcgggcaggagttgagccacagagggtggttagaacttagttcagtgaggcatgtggctgtcaggtcagcgtttgtgtgaacctgttgccagggcaccccgtaggcctgaaaggttgtgaaaggtgtcccactggctggatgacagaagggctctatctcctgctgtgtgcccttgggcacaacttttccctctctgagtctcagtttctaacccttattggcaaagcagccaagctattctctgcgttgttagggtcattgtgaggtttggggggcctgacggaggcaaaacacttccatggagcctgggtgagtgggactctcaggggaggagaagcgggagagctgggccgtgggcctcacagcctgctctcccggcctctgtgttgcccttcagcccagagcctgaccacctgcgaggtctgcggtgcctgctttgagacccgaaagggcctgtccagccacgcgcgctcccacctgcggcagctgggagtggc

SEQ ID NO: 23171 - DNA, 1959 bp, Homo sapiens
cttcaatgcatgaagcagattttctcaaaattcggtaaatatttttagtggaaaatctcaacgctgcgatcgcagggacctcagattcttatctcccggggctgtgctgcttgacacagctttgatctaaggcagagtgcgcgcggggctggtgcctgcaggactcccagcctgcaggtcccttacgtggtcccgtgtgtcacattgtaaaaaacaaactcccctcatgtgtcttagatgggagccagaggaagacgttgacgtgtgttggggaaaagcactctttcaagacaagtccccgagcagtgatgaattttagaacctatactgttttctttctcccctctccccgcagctaagctttttttctggcaggatggggagggtggaataagacatgtcagtggccttggatgagctctgctggagtggtgccccgcccgggccactgctctcctaggcagcgtgactctcagaaacctggcagttgtatgggcatctgtgttgtgtaggatgaatgacagttgtggttgtgtgggatcacctgttgtgtagggtgaatgacagttgcataggtgtctgtgttgtgtagggtgaatgatggttttgtgggatcacctgttgtgtagggtgaatgacagttaggtgggtgtctgtgttatgtagggtgaatgatggttttgtgagatcgcctgttgtgtagggtgaatgacaggtgggtgcctgtgttgtgtagggtgaatgatggttgtgtgggcaccacctgttgtgtggaatgaataacagttgtgtgggtgtgcatgttgtgcaggatgaacgagagatgtgtgggatcacctgttgtgtagggtgaatgacagttgtgtgggtgtctgtgttctgcaggatgaatgacaattgtgtgggcatcctctgttgtgtaggatgaatgggagttgtgtgagtgtccatattgtgcaggatgaatgacagttgtgtagccatctcctgttgtgtaggatcaatgatgcttgtgcatgtgtgtcccctgttgtgtaggatcaatgatggttgtatgtgtgcgtccactgttgtgtaggatcagtgatgcttgtgtgtgtgtgtcccattgtgtaggatcaatgatggttgtgtatgtgtgtccacagttgtgtaggatgagtgagagttgtgtgatcgttctgtgttgtataggataatagcgaaggtgggcagcttccctgaccacaaacccttgttttgtatttttttgttttctttttgtttttgtatgtatctctcatctgcagaactgcattttccaagtacagcactgaactgaactgtataaacagaacctagccaggatcaaacacacacacacacacacacactctctctctctctcactctcatgtttattactaatatttttattaatcggattgattgagaccatacctcacctgaaccttttatgctcctcctaagcaaaaaatttaaaccaagagagtttcctttccaaggtttttatagcattcaccgtttttatggtttgcaattgtatatttctattcaattttttgtttgtttgttgttttttgggtttttttttttttttttttgctttgcacccagctcttgaggatgcttttaagcggagggcttcctgcaaagcaagatagaaaagtcagaaccttgaaaaactttgctgaccaagaacgctagtgcagcagagccagccccatcacagccccgatcccgggtgctaggggcgtgcgcagcctcgagaagaagcttgagaaataggagaattaaagaaatttctatcagggtggagccggccaccaagtttttttttttttttttttttttttttttaacagcacatactgtggtaaaccatttggttcatattgtttttgctaaagtcagtcctgtgtgtggtttcggtacaccgcttgggtaactgttgaaact

SEQ ID NO: 23172 - DNA, 1024 bp, Homo sapiens
gttagtaaaaatgtagttattttctattttattacagacttaattattttctgttttagtaagagtggttactcatccttcttctgcccatagaaagtgattttctccctcctgggacaccccagccccttccctcagacgcctgagatatgctggcccttctgtggctgatggagaccctggctcccctgtgcctcaccggcgctccaagtgagggacaagcatccccccaggtggcggcgcttagtatctgctcatcacaggcctggaggcagcaggtgccggggagaggactgtgcttgccctccaggtgggagaggcctggaagcgtgtctctgtggctcagtgagcagtgcaggcgtgggtggcaggaagcagccccagggagagccctgggagagctctgggggacggcagtggggtccagccaggctctgagcaaggagaggggttcctggtggacgaggtgggccgagttccccagcaggagacctgagtgttgcaggacttggaaacaggaggctgagtcagcggctggggggtcagtgggttctggggactaaggaggcattgtgaggggaggggtgacttcagaggtgagcctgaaaaatcaggcagctggggcagcgatgaagtccctgcatgccttaatgagagcttggagcttccctataggaagtgcctacctacctacctacctgcaagacgtcgccacatatctgcctccctgtctaccacccacccgcctccctgtctctacctgcccatccatccatccatccacccacccgccattcattcgtccattaatccacatatatgtctatccattcatccaactaccattccatccatctgcccacccaccatccattcatctatccaattgttataactatctctgactgtctctctctttaagctggaggatatggtccgatttgggtttgagacagcaggtgtggggtggaggatgtggatgggtgtgatggaggctgaccgagggtccgggccagaggtggtc

SEQ ID NO: 23173 - DNA, 2011 bp, Homo sapiens
atgggtaggctgcctcttagaggggccacctccctgttctgtctctgatgtggctctgactgggccgagcaacctcgactctaggactacacaaggtccgaggcagccatatctctgtgacgggacgcaaatagcccagatcgatgcatctctgtaactagatgctagaggcctagatgactgcatctctataactagctgccagagacacaggtggccacgtctctgactagactccagaggcctaaacggccatgtctgtgcaactaaattgtagagacctagagagtcgcatctgtgtgactagatgccagagcctcagacgaccgcatcggtgtgactggaagctagagcctcaaatagctgtgtcagtgtgactggatgtgtcagtgtgactgtgtcagtgtgactagagccttagatggctgcgtctgtgtgactagaccctggagccttagatggccacgtcggtgtgactggacgctagagccttagatggctgcgtgtgtgtgagtagaccctggaaccttagagggccatgtctgtgtgactagacactagagccttagacggctgcattggtatgagtaaacgctagaagcctagacggctgcatctgcatgactggacactaaaatcttagacggctgtgtctgtgtgactagacgctagagccttaaatgaccacgtctgtgtgattagacgccagagccttaggtggccgtgtctgtgtggctagatgctggagccttagatggctgcattgctgtaactagacactggagccttagatggccgctttggtgtgactagatgctggagccttacacggccacgtctgtgtgactagatgctggagccttagatggctgcgtctgtgcgactagatgccggagccttagacggccgcatctgtgtaaccagatgccagagcctttggcagccgcatctgtgtgactagacactggagctttagctggctgcatcagtgtgactagatgctggagctttagacagctgcattggtgtgactggaagctagagcctcagacagccgcgtctatgtgactagacactggagtcttagatggccgtgtctgtgtgactaggtgctggagccttagatggctgcattggtgtggctagtctacagtcttagacagccacttttgtgtgactagatgctggagcctcagatggccacatctgtgtgactagatactggagccttagacctctgcactggtgtgactggacactgtagccttagacggccacgtctgtgtgactagacgctggagccttagatggttgcattggtgtgactaaacgctggagccttagatggccttgtctgtgtgactagacactgaaggcctagatggccgtgtcagtgtgactagacgctggagccttagtcagctgcatcggtgtgactagatgctggaggcagaggcagccatacctctaagactgtctgctggacgtggtggtagaccttttcccccacatctgcaatctgttgcattcagattctcgagggaaaccctgggagtgtgcctttgtactcttgacctgttctctgtctctaggccttccctgctggggagaaagttaaagacccccggcccctccctccacctctgccccactctgatctttctcttctatgctcttggaggaacacatgatcttttttaattttttttattttttgagatggagtctcgctctgttgcccaggagtgctgctgtggcgggatctcagctcactgcaagctccgcctcccaggttcacgccattctcctgcctcagcctcccgagtagttgggactacaggcgcccgccaccacgaccggctaattttttgtatttttagtagagatggggtttttcaccgtattagctgggctggtcttgatctcctaacctcgtgatctgcccgcctcggcctcccaaagtgctgggattacaggcgtgagccagtgcgcccggccaggaacacatgat

SEQ ID NO: 23174 - DNA, 1057 bp, Homo sapiens
ttgggggaaatgactgtccttagtggtaattcacagatgaccacactgtgaggtgggagcctgagaactagctgtcgcagagtcatcacccaaatggccaagccgcctccaactggctagggacagtgggtctcagctgcctcagatccagtgtcccttttagaaaccaacaaaacacagtgtcccctttatgactctgaaaccaacacacatacagttcctggttagcgccctgacaccctgactgtcatgtctaggggtcagtagagggaaagtaatttataatgcatgctgcaattgacacatgatgtaatgacatggaaatgacacaggaaatcactaatccacctggatcaaaagaaggaactcagaggtcattccatgcgggcagcaaaggggaaggaaaggatgatcaggctcttgaataaccatgagaaaagaagtctagatgtgtctgcgagtggctggggcggggcatggcccaatgtagatgacacaccaggagggactgggaggagggggagcatgaagacagaggctttttccctgcgatggctgccaccgtacgggtcagcagagcaggatgtggtgtcagagccggatggccgctgactgagccacccctaagcttgcttctccttctttctctcagaaccttccacaggtgggccttggagcccacactccttgagagatggcaggagcagagaaggggcgggagtggagaggcagctgcagcccacgagcaggctggggcccgcaggggcagactggggagagacagtggcagtatgaaatcgtcagggcctcgaactgtggggataactaggcatttatcagcaatgttctttgagatctgctcattctccgcagctctgttcacggactgcatttgggtataaataagtctgttagaacggtcccagctctcttttggtaaaaggggaaacttctgttgtaatggcttctgccgcagctacacgggaggtgggaaacgaggtccctcgttgagagggcagcatgggtgaaggaagacatttttcatagatgccaaagg

SEQ ID NO: 23175 - DNA, 1047 bp, Homo sapiens
gcctcaacagcacagggagcctgtcccccaagcacagcctcaagcaaacacaggtacggagccctcagcgggcacagccccctctcagagcacagtaggatgtttctcgggagttcttaacatgcaaccccagaacggtcaagcttgtgatgaaatgtctttaaaaaatgcttgtggccaggtgcggtggctcacgcctgtaatcccagcactttgggaggccgaggtgggcagatctcaaggttaggagatcaagaccatcctggccaacatggtgaaaccccgtctctactaaaaatacaaaaaaattagctgggtgtggtggtgcgcacctgtaatcccagccactcgggaggctgaggcaggagaattgcttgaacctgggagacggaggttgcagtgagctgagagcgcgccactgcactccagcctgggcaacaagagcgaaactctatctcaaaaaaaaaaagtattcatttatctcattatttcaacatggtctcccctatgttactcaggctggtcttgaactccttggctcaagtgatcctcctgcctcggcctcccaaagtgctgggattacaggtgtgagccaccgtgcccagcctgtgtctgcagagctcttgccaagagttttgaaagtcaggttaggggaggtactttactggcaacgaagctagtggggccaaactcactggtaggcacaggtcacccagcgtcataacccacctctctagtgatcttctggtggttctctcaagaccctctgactagaccgattttaccagtggcccctggtggggtggggtgggagggtatagctcctgcccccacgacggcattggtaggatcacagtcatgaaaacgagcatttctgggggcctacagtccacatgctccccctactccaacttcctcatctccaggccagcaatgctcttgtctgggcctcccaagggccacccgattttgccctcatgccaggtttgagtgaagccacttccagccaccagggtctgatatccttcctttgggacctgtggctgc

SEQ ID NO: 23176 - DNA, 1029 bp, Homo sapiens
tatttctgtcaatggatttgcctgttctggacatttcctatcaatggaattctctaacatggtcttttgtgtctggcctctctctcagcatcgtgttttcagggttcatccatgttgtagaatggatcagtgtttccatattccatttactggatggaccacatctttatccattcatctctctggacatgtgggttatttccacccttttgactgttgtgaatagtgctgctaccagcattcatgtacaaggatttgtttggacatccgtttttaattcatttgggtcaatacgtaggagtggaattgctgggtcatgtggtgattctgtgtttaactttgtgaagtcttcccttttttgaaagcactttgaaacgtgtatccttttcagcaaacccacccacctatgatttaattctgtgccagccacaaaggaatgtttctctctcttctcagcacgacaccagcagccctctgatggtcacaccgccctctgcagaggcccactgggctgtgagggtaagtgaacgggaatagctccctccttggctctccttcagatagaattgttccagcagttgttctagaattgttctggaattgttctagtttgatgttgttcagaacattttataggatgattgtgtcagctcttctgtctcagtgtgagtggccacagcacttggatgaaacgcctcttctaatgaacaccttttacaaaggctgtggcccttcactggaattgggagttgcctacctggacaactaagtgtcaggagttggattattaaagggctgcagtttaaatcttgcatctttaggtcacattctgtggtttttgctgcttgtgttggttattcagaatagaagaggaaacggtgagagcttgcaagcacgtggacccccaaatgtgtcccttgctttctcgcttctttccagccactttgcatgttaccattctttcctccctgatgttctgattgctttgtgaaaagcctctctcagcacttgaagtgttatttttaaaac

SEQ ID NO: 23177 - DNA, 1031 bp, Homo sapiens
tttttttgaagagatgaagtcttgctatgctgcctaggcaggtcttaaacccctagcctcaagcaatccttctatctcagcctcctaaagtattggaattacggtgtcagccactgcatctggctaggattcatcttctaaaacatattcccctgttccaaaaacctttcacagctcccattccccttcctccaaaagaactcagtttatggctgggcgctgtggctcatgcctataatcccagcactttaggaggctgaggtggatggattgcttgaggccaggagctcgagaccagcctggccaacatagcaaaaccctgtctgtactaaaaatacaaaagttagccaggcatagtggcaaacgcctataatcccagcaacttgggaggctgaggcacaagaatcgcttgaaaccaggcggcggaggttgcagtgagctgagatcgcgccactgcaccccagcctgggcaacagggtgagactcagtctcaaaaaaagtcagctttgatgaccttagtaagccctgaatcgactccacctaaccttgctgggtccctttcctgcacttctggctcttggcaacactttctagcctcagcatccttagctgtgttgctccggttgctagaacatcactgtgagctcctgccgtatgctgcctgccctgaaggacggtctttgaggcctcccctgtgttgtcctcccttagccccacccgaatgagagttctctcccttgtaccttccgtgggtcccttttgtgaccgctgtacctaggaagcgcgtggtaactgggctcagtgatgaggagagactgccctgggcccaaagagctacaccttcctcctttcccccttgttatgtgttcttcatccaggagcttttgctgtatttcagtaggtgcctccattctaggaggcttttattccccttttacaagtgaggaaaccaagacccacagaaatagagtaacttgctgaagtctcatagttggtgggcgcagagctgaggtcacacctgcgtcctcctg

SEQ ID NO: 23178 - DNA, 1022 bp, Homo sapiens
cttagcctcttcctgttcctttccctatacatttgttgaatgaaggcgtggcctggttttcttcgtttggaaatgtcagcacttctttacacttgctctcgagtgaaaatctacaccatgggttactgttggcccaggtgtgaggcatggccctcccaggcccttactgtctagctcaggagatcacttgggttcacagataactctgggggaaccaagggtataattccaaaatttttggttgggggcaaaagggaagcaccctgcagcaggtggctgtgatctggttggatttaggtgacagagcacacttggcaagcagatggccaggtgaaggtgagcaaagtggataacccagcgggctagcctaggggaggaggggtgtgttttctccacccccactcctgtctgcacttttcccatcagcatctttttcagtctgttctgtactccatgacatcatctcagaatctccttccttatatactcttttctgaccctgaatatcaacgtaaattcgaaaggtctgcacctctgcctctttaggagtgatttttttttcccaacagcatctcagtgatttgtgtgtctccctgtccccctgctcagctctcttctgctttccaaaaagccttccgtggaaatgcatccagatctctttcctccttgtactccccgaggttaccggtggcccctccgtccttaaccccggtgccctgtggctgcagccgatcctcctcgaactccgcaacactggagcccgtcggtcttcactcttcatcctctctcctttcagtctctccttcttgtcccctaatttcagcctccctacctgcatcttatctctctgtgcgctccctcccctggagcttctgtgcagaggacttcaaacctgccttctagagtccagaaggtgtctctctcctgcacctctgccagcctgctggactctggaatgggccatttccttgccatgccccaaagtggtctgggccattctacttcctacttgcccactccct

SEQ ID NO: 23179 - DNA, 1042 bp, Homo sapiens
tataagttgatattttttttctggaatgtagccatttgctgttatctgggaaacaagattctaacaggaaaccagcctaagacacttcaggttgagcgctgcctcggagtctgtgcccgtcgcgtcccctgcttgagttttgcacttggaagaaccctgcaccggctggcgtgtgcgacggcccagtcccatccagagcatggagcccgaccccagccagcgccttccactccatcatttcatttcacacccccgaagggaggggaggccaggaggggagctgctcctgccagaagctggtgggtgaccgttgggaatcggccacacctggtgtccatgggcagcctggtgcaattccattcatttgtacagaaacatttttgaaaaattcttttcaataagatgcaaaatcttccaacttttcaacccaacgtgatgaatatttgattttgttctagatttcctgtagctgtgaattgttaaaatgtatgattcaggataaaacgtaaacacgtgctgttagtaatttcttgtggatttcattgttttgccttcaaataaagcctttttttaaagacctttctcccgcacatgtgtaagtcagaagtgtgcacgggctgagtgaggagacacatgtcctggtttgagctgtgcagcctggggtcagaggccgtgtccaggggctcacatggcgtccccagcgtgctgacctggtcccatgtccttaccctcgagcagggcttctcccatccaccctgtctccctctggctcactgggatgccaggacctgcctgggtggagctgctctgcagaggctggtggcccctgtcctgctgtgagtggggacagctccactgaaattctatttccactggcctgtggtgtcatagagctgggcatgctgctgggagagctgtcactgagctgggatttggctcagaggagtctggggccctcaccgcagcaccacctgccccaccatggaatgtcacacctggatgctgactgtgtgtgtgtgtgtccatcaccccagtaccacct

SEQ ID NO: 23180 - DNA, 1042 bp, Homo sapiens
ccgggacaggtcaagtgacaggtcttcacgtcccttccccgagctttgatggtttgggcttctctgtagtatagatcaccattgtcctgcgagtgcaggggagtttaacgctgcaaggcacggcagggtgttctgtttcctgtcctccttaaacaggttaagctagttgagtgtcagtgttttgtcatcctggaaagaacaaggtgcttttgtaaggaaagggggaatgtcagaaatgtcagccgtgttgcccctgggaggcctcagatgcagctttgctatgggtcacatacccctgggccaaggcaggggccaccttatgtggcacagcatggctgtgaaatgccctgcagcgtgctgggtccactttcagcactgaggcacagccccgggtcttccagggcgtgactttcccccttgcccgtggggcctggttggcttcgcagcgtggcctttccaggtgactccctgtctgcagggacaggtgtaaggatggcaaggagactggctctggactgagacttggtggttgtggctttgagcctcccatccccagcttcaggacacgaaattgaacctcacaaaagattggacacccccataaagacagctcccacctccaagtgctggccaggagccagatggtggtggctgttttgcaggtaccctctgctggggggggcagttcttgtccctgttttgtaggtgtggaaacaggcccttagtgtctccaggctcagtctttttgcagaccagagggttgggctcaggacaatgggcacgcccctcactgagggtgcccgctaggccagcagtgcatcctgcagtccacactgagaaacagcagcctggcctgcttgacttggccatgtggggtcttaacacgtttaaaagtaatttctcaaggcaggaagattgcttgaggccaggagtttgggaccagcctgggcaacaaggcaagactccatctctacaaagaataaaaataagctggcatggtggtgcacacctgtcgtcccagctacacagtggtctgaggcag

SEQ ID NO: 23181 - DNA, 1049 bp, Homo sapiens
atgttatgtcagctgacacatgggacactcctgaagaggtgactggccccccaccctgtttggcggtgagtttccgcaccaccggcctcagaagtgtccctcttgcttcgtctcttgttcgcttgctttgtaaatactttggtcccaagctgagacaattgctgtgtaaaacgtgaagagtcaatcccaaagggtgttatttgtcagaagaacttgccgtgtgccttcaccgaaggcagtcaagtctgcagttggatttttctcactggtgaatgacaagaaacagggataattttgcactgcggagatattacgggagttgtctatatgattatatatagtacctgattctttgaacatattattgaactccaaaatgaattcgacctccattcaggcttcctgaaatctctgaagttgctgaaatttgtatattattttccttttccaatgcaagatctgctggtgacgggaaatgactgtctggttttattatggtttataaattaataaatgggctatttaattctgtatataaatttacagcaagtacgtacactggaatgaatgaggcaatcacgttacaccaaatcagcagatcaaaagacaaacacatatttctgagacttgaaggtccacatccccccgccccctgccaagatggagtcttgctttgttgctcaggctggagtgcagtggcgcagtctcagctcactacaacctccatcccccgggttcaggtgattctcgtgcctcagcctcccgagtagctgggattacaggcatgcaccaccacggctggctaattttttgtgtttttagtagagacagggtttcaccatgttggccaggctggtctcgaactcctggcctcaaatgatccgcccaccttggcctcccaaagtgctaggatgacaggcatgagccaccgtgcccagcctgattgacaatggcctcttgaaggctgggttttcccagccggacagtgcccgccccacatgctccactcccacgctttcatctgcaggcctgccttcctctcagccacc

SEQ ID NO: 23182 - DNA, 1031 bp, Homo sapiens
tcactgagttaaccacagtggattgttaggtttaatttccacattgctttaattcgtggctttgcaaaaatctcatgtggcttcccttctccctccttatataacaatttggaatagctttaggattgccaagaaggtaaactggagaaaatttgtgtggtcatagtaacttccaggacctctgcattgaaaacgaaggctctctcaaaacacgttgagccttgctgagcaaacatgtttgcctgagagagagcagcagagccagtgccaccattgaccacagctttggagggacaggagaggtggccttctgtctagcagcatctccaggacccactcagagatggcacccttgacctggactttgatgaagctttgtgaggaccaccaagagtcactgtgttctcatgatcctctgggatggccagtgcaggtgacagctgacaacgggacaaagcgtgtttgctctctaggtgttgacttgccacagagggagacccctgagatgtttgtgatattggagtgaacatggtggccagcaaccgtggatgagggacttcatccacccatcatttggcatgtatcaagtccctgctagttgccaggcactgttctaggcacttaggaggcaacagtgaacaaaaccaaggtccctgcacctgaggagcagacctgcaggtggaggctggaccacatgtgagaaagcgggtgtgttgcaggcagtgagggctaaagaaagtctgagcagatgtgtgggcaggtgggaggaagagctctgtgagccagatgaccaggggaggagctccctcatgcctccctgcctctcccttgctggaaagggcttgctttccagacccagtgaatggtgaggtggtgatttggccctgtcctctgcacagcctgggccagagggtgccgatgaaatatgcagtgacttcggataggcacctcggcatcaggttgttgggtctatgagatgtcactgagggccgtaggaggatttcttcttttctccttgcaggctgtgggct

SEQ ID NO: 23183 - DNA, 1050 bp, Homo sapiens
acgctgtcagcccaacaaggagttaggggtgtgaccgagtgggcacctcctcatcaccctggtgatgattcttctgtgttgagagcactgtgaacacggtttcctatctggtcgggtggtgggctccctcaagttgggaagtaggaagtggcatcatctgtttaggaagatgagctgtccttgggcacaaggatgcctgttgtgtttgtcacgccaggttgtcttctctttagggcgctgttctctgtgctcaccatgggcacttggaatgaatgacaaggcctagcagtgggggggtgtctgcctacctggttcccttgccccttgctgcattggtctcttttttctctacacaaccctttccagtggtgcctgctccccctaagcgttttggctttgtgtagcactgctcacggtcttcggcccttaagactttccccaggtagtctcagagccacagcttcgttggcacctggacacttgctctctcctgtgcctggatgtctagacagcccactccaaagtggatacaccttcttcatctctgcctttgtcatgctgtgctgtgtctgttggtggtgccatgatctactgctctgtagaccaccttagggccatcctggagtccttcttcctgcaagctggacctccagggggtctagtgcagcagtgtcctagtcagtctcctgcctctgtgtgtctgaaaacagatagggatgtttgacttttctggtggtgtcgtgttgctggctggatagagtctcagctctttaggtggcatatagtggagaagacagtctttctcctgggtggaggacttaagcagaatggagttggaaccattgactctgccattcaccttgcaaccttcgacaaggttaggtttgcagcctttgtttttccagaaagatgtaaaaaatgctgcataggaaggcttttaagaatggaacatggccctgtgcctgaagcatcctgggtgctcacatgcatgctacctaataatacacaggcttggtggtagagagcccatctagctcccatggccttcct

SEQ ID NO: 23184 - DNA, 1042 bp, Homo sapiens
cttacccagagtcattaagtgacagtccttagagtcctttcaactctgaacaccaccacgctgccttgaaagttggagagatggctccggaagaggcacgagggggcagcatttttgagctggtaagaaaacgtgtgaggatcctgtaacgtcccctacaagtgtatgtgagattacagattggggctggatttacctatgttacatctaacagggtggtgatatgacatagcctgtcccgtgaacatcttaaggtctctgtcacagacagaaacctgggccagaccacggtgtggcaactagcaaccgatgtggaacttttcatgaatctgtgtgaccagtttgctctctacttcaacattacagcacttttgatattaacttaaaatgccatttattctgcagaaaagcagaatggtgtaaattgcaaaatgaaggactcttgattctgaccctatccaaaatagtagaggaccctaaacccaaacatgtaaatgccacctgatccacaattgcccagattcagggactctcctgtctttactctgtatattgtggccaggacacaggagaggagcagcgtggtgttctctgacttcgggaaatggaaaggtagcaagtatcacctgtgacacaggtgtatgtccttgtctttgactcattctgtccctcaggagaaagtggactttacagtctctcctcactgaggtttctgggtggtcctcagaatatgttgtcctggttggaggtcccagagccctggaggactgtccaagaccagcatgtggtcaggggctttgttctggatacagatgtaaaaaggcaccatggtcacgtcagcccctgggcagctgtgtaagataggacatgtagcttaagggcgccaaggtctcttaggtgaaggaggacacttggctttccttttcttggttttggggtctgcgagcatcttctcagatggagctctagtttaaccaggctgactccaggtgactccagtccagcgggaggggtcccctggccacttccccactatcatctc

SEQ ID NO: 23185 - DNA, 1070 bp, Homo sapiens
actgatctctggactagacagttttttaaaaatgacatcttatgaccgggcgcagtggctcacgcctgtaatcccagcactttgggaggcggaggcgggcagatcatgaggtcaggagatcgagaccatcctggctaacacggtgaaaccccgtctctactaaaaatacaaaaaattagccgggcgaggtggtgggcgcctataatcccagctactcgggaggctgaggcaggagaatggcgtgaacctgggggggcggagcttgcagtgagccgagatcacgccactgcactccagcctgggcgacagagcaagactccgtctcaaaaaaaaaaaaaaaaaaatgacatcttactagtggatcctgtttcctgttcattggtgtctagtttacattattatcttggcagttggtggtaaacctaggcaaaagagtgtggactgtgccaagggaactgtggaaatgttaggggaaataaagctttacatctaattagagtacattgtgtgcatgagaaagaaggtggaaaaggtggttgcagcagaaagcaagttggaggtgtagctcagacctgggttctgtgtcttggcccttctgcacctccacgtcctcatctgtgatatgggtacagtgaaggagacagtcttgatatgggcctataacatgcctgatgctgggcagccactcagtagttgtcactgtttttattaatgttgttgcttttattaaaagactttctcagctgggttttgcaagccttcagtgagatggtggtatattagtcagctagagctgtgtattaggccatcttgcattgctataaagaaatgggtaatttataagaaaagaggttaatggccaggcacggtggctcatgcctgtaatcccaacacttagggaggctgaggtgggtggatcacctgaggtcaggagttcaaggccagcctggccaatgtggtgaaaccctgtctctactaaaaaaaattacaaaaattagccgggcatggtggcgggcacctgtaaatccagctactcaggagtctgaggcaggaaaatcacctgaacccgg

SEQ ID NO: 23186 - DNA, 1049 bp, Homo sapiens
ctccccgagtgtgcccaggaactcagagagggcgcggcccccggggattccccccccccgagggtgcccaggactcgacaagctggaccccctgctcccgggggggcgagcgcatgacccccccgccctcgcgctgcctctttcccccgcgcggccgccccgtgttgcacaaacccgcgcgtctcggctgcccctttgtacaccgcgccgcggaagggggctccgagggggcgcagcctcaaaccctgcctttcctttacttttacttttttttttttttctttggaagagagaagaacagagtgttcgattctgccctatttatgtttctactcgggaacaaacgttggttgtgtgtgtgtgtgttttcttgtgttggttttttaaagaaatgggaagaagaaaaaaaaattctccgcccctttcctcgatctcgctccccccttcggttctttcgaccggtcccccctcccttttttgttctgttttgttttgttttgctacgagtccacattcctgtttgtaatccttggttcgcccggttttctgttttcagtaaagtctcgttacgccagctcggctctccgcctccttcttcccccgccggggcctggcgggctgggcggggcctggttcgcttcccccctacacccccgcctttctctcctccctctgtccctagctcctccccttgttggagggagcagagagcgggtgtctgagagcggcccgcacatctggcgcgcagcgagcgccccctagacgcgccttggcgcggggccggctgatgtccaggttggggaggggtcttggggtctttgatctgcgtttggaactagctaatgcccccttgccttttgggaaggagagatttcgaggtggaaagggcacagccccagcccaaagcaggaaggaagagacagaaacttagtaaactttttaaccttttggtccttggtttgcctgtccgtataaaatggggagaacagtcgaaaaacttgccccataaagttgtgacgattaagagagtttatgtttacagagcagtg

SEQ ID NO: 23187 - DNA, 1050 bp, Homo sapiens
cctctgaatctggacccctgaccccaccttcacggggttgaggtctgcagagtagaccgtgattccagttcctgttggggtcagtcctcctgtccccagacctccctggcccacgactgagcctcccagcgggctctgtggagggcctgagctatgctgcctgcagcgctggcctctggcccctggcacccagcacatgggccacagggccagctcctcttgctggccttggctctcctgctgtttgaagctccagctttgatttcctcaagcgttcgtccagctagaaagttctctgaaacggctccctaaacggggcttacagagctggggtccccaagggagacagagagggagggatcaatgttgggtcccggcctgaccaacctgctgcgtccaggcctggcctgtggtgagggtggcgtgaaggggcgccaggcacacagagggtgtggggacaggcgtgccctgcgtgcagcctgctcaggattactggaggtgccgctgtagcgtccactcagtccctggggccctcatctcccgggaaccccctgtcacctccccagtggccacatgctcccacctcaggggcttcatggaaaatgtcatttgtcctcatggtctatctctggcctcaggcctgctggggagtcccctccccttccccatccctggggctggatacacagaaatccctctttctgttttcctcctggcaggtagatgaggggctgtgggtggttgtggcgcataggaggccccccccccgccagggagcccccagcctggcctactgccctggtctctgctccacgcctctcctacctcctcctcctcctccaggaaacccttctggctttgtcctttaggaagcctgccccaacccccaatgtgacttagtgtcctctgtcgcctagtcccccccccccgcatccctgggggctgggtctagtcccataatgaggatgccctggagttcctgccttcctcagatgctctgccccacggaggagatccaagcaccctcagtcaccacctcacacatgagga

SEQ ID NO: 23188 - DNA, 1083 bp, Homo sapiens
cttgacaggacaacagggctcgaggggggaggcgcttcttcctgaagtggccgtatcttgccctgaccgccacccccacccgggactgggcctctcatcagcacagggctgggcggggtggggacaggtggtgaggctgctgtgcagcagcgctagaagctctagaaactgcttgctgggtttcgtgccatagcctgtcggagggcgtctgggtgggtccagtctggctgtgtcggatggtgccttggtgcagaaccgcgtgcctcccatctgcggccagcggggctctgtccacttccggtattggaatcaccaggcgtgttgcgtgcgtgagcatgtgcggtcttgtggacacctccaggtcctagacatgagaagcctgttgattcagaggctgcgtggtctccaggggttggtttggcctctgcctccagcttcgagtggacggatggctttccctgagcagcctgcctctgtggccaggcggtgatgctgccgtcacatgtggctgggaggagaggcgatgggaactcacatcgtccccatctaagtggggccctccctccctcagaggcaggccgcaggatgcagagaccccgggctgagagacctctggagcgctgtgggcaggaggcaggggcctccctgcagtgagctcaggccctgcccaggttcctgcacgaggaagcctctgggccctgcctgggagagctgggcgccaagtcacctgcccaggccctgagtccccacagaaccatggtgtgtccgccccacgagccctcgaggggttcctgggagagtgagcacccaaaggggctgttcctccccgcccagcgctaggccaggccacacctacccaggtgtggaggagagtgtctgacaggaggacttggggattcgggcaggtaaggccttttggggtcaaagttagccagatgagaagtgggaaaaccacgtgcaaagttctgggggcaagcccatggcgtgtgttccggaaacagaaagttccatctggagggagtgtcgtcgggctgggagaggaccgccagggcggggcaggatctcgggccctagagagccctg

SEQ ID NO: 23189 - DNA, 1028 bp, Homo sapiens
ctccgcctcctgggttcaaacagttctcctgcctcaggctcccgagtagctgggactacaggcatgcaccaccatgcccagctaatttttatgattttagtagagatggggtttcaccatgttggtcaggatggtctcaatcttttgacctcgtgatctgcctgcctcggcctcccaaagtgctgggattacaggcgtgagccaccgcgcccggcccagtatcattttttaattgcacaaaggttggcgtcatgatagactgtctaactgccagcgaagtgtctagcggaggcagagcctgtcgcctgtaaggaaggccatttaggggtctgggaactgtgggctgaggcccggaggtggtggtccatctcagggcagagctacacctcctgaggggcccatggcgcagggctccagggctacagccaacctctagcctgtctctcttctagttggtggagctgaaaaatggggagacgtacaatggacacctggtgagctgcgacaactggatgaacattaacctgcgagaagtcatctgcacgtccagggtgggtgctgcacccaccaacgggggtgggatgcagggggtgcacactcagcctcctccctccctccctgggcctcatgggaggagtcagtgggggaggccgcctaggactgctcgtccttccaggggtcagtcaggagggacagggcagggtgagctaggccaccaagtctcccagtgtgccctggactttgaccctgtgggagactttcctgctgtgtgtctgttggtgccacccctgacctggaaggacctaggactggggactccctgtggctcaggctggggcagccccctccaggggaggcccaagactcccggactctgctgcctttagtccagcctggatgttgcctgcactctgcgggccatggtagtgtggccctgggatgtccgggatgcccaggtcacggtgggcaggagcagcgccagggcccggtgggtcaggagccaccagccagagcccaagaccggaagt

SEQ ID NO: 23190 - DNA, 1509 bp, Homo sapiens
tgtcctcttgtaaaggggggataggcagccatgagcccctgggggctgcggagcgagcgaggtgaacctatacgcgccgcgctcgtggacgcctggccacttccgccaggcggggacccgatggccacggtggctctgggttgtcgggcctcgaaccgggtctccagacgttgggcccctccctcccagcgcgggagaggcggggaagggggcggggcgggggaggggccgcagcgcttttctccggaggtcgcgcgcccgagagcccgcgctgtccgccgccgctgcctgagtcgactctgcgccggtgagtgcggttcggggcagggacggcctccgtggggacccaggctggcttggccccggccgcttagagtccccgctgaccccctgctcaccccgggcccccagcccgccgcgatggaggccgccgcccagttcttcgtcgagagcccggacgtggtctacggccccgaggccatcgaggcgcaatacgagtaccggacgacgcgcgtcagccgcgagggtggcgttctcaaggtggaccagggggctgaggaaggaggcgtgctggggagagcggggcggctcggggagaagggcacgggacccgggattcactgcgcggcctgtcttcaggtgcaccccacgtccacgcgcttcaccttccggaccgcccggcaggtgccccggctcggggtcatgcttgtcggctggggcgggaacaacggctccacactcaccgccgcggtgctggccaatcgactgcgtttgtcctggcccacgcgcagcggccgcaaggtgggggcgggaggggcgtggtgggtagggaggcttggtgggagtccttgcgggcgggggcgggagcctgcagggggcggggctctgcgggaccaggggggctgtagggggtggggttccgcggggcgaggggctgcaggggcgagggacctgcccgggtctggaggcctgtagtgggcgagggacctgcagggggcgaagctctgtggggcgggagggcttgcagggggcggggcctggctgcaggcggaccccgtggaagggtttcgcgaggtagcggggactcctcgggagtcttacaggggcggagcttaaggtgccggaggtctcaggggaggggcctgggggcagcggcttccgtcctggctgtgagcctggaactgaaaaatgcccgaaagtggggcggggcttgagagtctaggtggggcccaggccgggtcgcggccctttcaccactcccacccgtcacctcgccgtgtctgctgacccccaggaggccaactactacggctcgctgactcaggcgggcaccgtgagcctgggcctggacgccgagggccaggaggtgttcgtacccttcagcgcggtgctgcccatggtggcgcccaacgacctcgtgttcgatggtgggcggagccctgggccggggtggggcgggatgggagatggggtctggaggggcccaggatccgggcagggccgagtgtg

SEQ ID NO: 23191 - DNA, 1043 bp, Homo sapiens
agatggagtctcgctctgtcgcccagtctggagtgcagtggtgtgatcttggctcactgcaacctctgcctcccaggttcatgccattctcctgcctcagcctcttgcgtagctgggactacaggcgcccgccaccacgcccggctaattttttgtgtttttagtagagacagggtttcaccgtgttagccaggatggtctccatctcctgaccttgtgatccgcccgcctcagcctcccaaagtgctgggattacaggcgtgagccactgggcccagcctgaactcctgttttaaaagcatcctgtgaagttttttttttcctttttactatataagcagtataactcagggtagaaagcctgcaatgtacctaaaattagcaagtctgttctcattgccccaggtaatttctgttgacacctttgcaccctcctctgtctcgcctgggtgtaccgtgttgtcatagtggcacaatcatatggttttgcgtctcttcttccctgaacactttatgttttaatgctgcaccttctgtgcatcgtggagcctgacaggtcagtattcttcgggcatttttgtgttcttggcactatgcttggttctggggatgtccggatgctgcaggccttgtgtgtgtacaggccagtccactgtcccgtagtgaggctacatagagcgatgaggtgaggtgaggcaggtgacccagcacaggccacggcctggcatgcccatgtgtctgtgagtggagcctggagtatgaggctgcgattttgaggccagggaaggcagctcagccccgcttggcttgctcctctttggacaaattgagctgctggtgatggagggctgtggtcagtccttctcaccgttcttcagatggggagaccgcaagtatataccctactgttaacacccctgtccttcccccaggcccatcgggggcctcagctcttcatgagatgctgttgttgcgccccgtgtcctttttatatgttggtgaaaatgttttcacaaagaggcgtctctcttgaaggatgctga

SEQ ID NO: 23192 - DNA, 1122 bp, Homo sapiens
ggaaaatgctgggcaaccccagccggctgcctgctaagtgccctggcaagggtgcctgggtgagctggggcacagaatgggcaggggctgtgtgcagggcacgcctagcagagggattttattttgcatacatggatgtcctcggagactgggccgtcctgggcgatgcaggggacgtggagagagcccagccctgtgtgatcatgagtggagtcgaaggtggaactcaagctggagggctgggggtggactgtggagcctcttccagggcacgaggggcggtgtcctggaggaggggccatttgatttgggttttgctgcatgagtaggagtttgccaggaagtgggaaatacatagtcaggcaatgatttgttgggaggtctgtttgggctgtgctggcagctgaggccccagaggccagtcttgacctccctccacccttctctcccctcctttttatccacagtccatcccatggaagtggctgtttggggcgactgctgttgccttggggggtgtggcactctctgtggtcatcgctgccaggaactgaccacctaggtggctgccaccccctctgcacaccatggaccctgccctgcgctccccaactcccccaggctccctgtccactgccctccctggtctggccccctcctccgggttaggggagcaaggattgggggtcgtgcagcccagccagcaggagggactgaggccctctaggaggaaagcccagagggagggggccctcattccttcagacccagttttcccccaccctccttaccccgctgggctaggtctccgccagggctggcctcagtttctcctcaacaggcctgggggcagcccttcccctgcctagtccccgcctgagtgccagccccccaccccgcctgccgccccctgtccaggttccctccccgccacagtgaaataaagcatcccaccctgcagtttccacggactcctgagctttcttctcccgctgtctggggctgggccagagacagcctgtgatgcatctggagtcacacagcatggtggatgtggttgagccagctggagctgggggtctcctctccgggcacaacatactcactttacagaggagaaac

SEQ ID NO: 23193 - DNA, 1120 bp, Homo sapiens
tccctcccttgtagcagaattcctagatcctcctgggtcctcctcaaacccagctgtgccccatcttcctccccccatcccgaagaccactcctgtccagctcccatgtggctctcttggtgctaaccccagagagtcccctccccttcttcttctttttttttttttttcgagacagagtctcgctctgtcacccaggctggagtacagtggtgagatctcggctcactgcaacctccgccttccaggttcaagcgattctcctgcctcagcctcccgagtagctgggattacaggcgtgtacaccacacctggctaatagttgtattttttttagtagagatgaggtttcacaatgttggcccaggctggtcttgaacacctgacctcaggtgatccacccatcttggcctcccaaagtgctaggattacaggtatcagccaccatgcttggccccggctaatttttaaaatttttgtagagatggggtctcactgtgttgcccaggctgatctcaaactcctagggtcaggtgatccacctgactcagcctcccaaagtgctgggattacaggcgtgagccactgcgcctggcccttgaagccctttatttactctgcactcctgctctgtctctctggcctcctggctggcctccttctcttctggggccctttctctacccacacttaatccacaccgactcctacatttctctcctagccacgcagctcccctgagtgccattctccatctcccgtgtttgacatttccagcatcttctaaaatatctcaaatcagcccccaatttcaccccagactccctctctagtgatagactagtgtcaacactagtctatcggtgttgacagcaatttggggcaaaacccttgcaagagcccagggggtcttgtctcctctgtctccctctcctcctcatctatgaagaaacatctagaaagtgcctgcatcatccttctctctctgcacactcgctctggctcttttcaccacagtggtggatagaagccaaaaggtgtccatcagagtaaggccatctcggcccggcatggtggctcacgcccataaatcccagcactttgagaggctgaggcggat

SEQ ID NO: 23194 - DNA, 1120 bp, Homo sapiens; identical to SEQ ID NO: 23193

SEQ ID NO: 23195 - DNA, 1014 bp, Homo sapiens
gtctctcgggccgccgcgcgcccccttcagacagtgctgcgtgggggaaccgggtagatgcgggggtgtggccgggctggggtgagtctgggacatggggggcccgagacaggtgggatgtttgagacgtgggggaccgaggcacggccctttccggtcagtttgggaccagggggccccgcgcggtggatggctccggccaccgcgcgctctttccggcagggccgagccagacactgagaagcccaggaccgggaacgggagggctcggcgcaccgcggcctgcgccatgcgcctccctgccatgcgggctgcgccccggcccggagcgaggtccgctgcccgttttctgctgggtccgtgcggcggcggggccggcttgcccgctgtaatcgggaagaggcaggagctgcccggtcgctgccttgtgcctatctggggtcagcgccaccctccgaccagggatggcaagggcctgggtgctctggccacgccagtggtcgctcccttggaggtgacatggcccggggcttcagggttggactgtgctgcctccaagaggcgacagcagaattccccagtttctgcggagaccatcgcccctgcgagagagtgaccatgatggtgacattggcgcctgaccccactcacttccctggggaggggtcgctgtggcaggagctggttggaaggtgtttgggcctttagcttggcctggacacccccgtggaccagctggtgtcaccccgcccgtctggctggagggtgcagggacaatgtgcccagcgccaacaaaggggcctttctctgctggccgggaagaggctggcccttgtgaggtcgatgatgggatgttgtctgactgccactctccccactcccgtccccatatcacccacatgagggagagaccccagccacacccctactgtgggagggggagacagggctgtccagggcccctccctgggtccgcagtggtctttatcctgcttgttgcccctgccttcttcc

SEQ ID NO: 23196 - DNA, 1014 bp, Homo sapiens; identical to SEQ ID NO: 23195

SEQ ID NO: 23197 - DNA, 1014 bp, Homo sapiens; identical to SEQ ID NO: 23195

SEQ ID NO: 23198 - DNA, 1625 bp, Homo sapiens
ctttctattcttttttttttttagttgccccctcacctaatttccacctcagttttgaacaaaatcgttctcttcctgaatagatcaaaaccactgatgtgaaagataagccttgaagcagcaattgcccttaaaacatcatccctgccctggatcggcctggagccagtgcccaagtacggtttggtgtgtacatgaaaacaaacgtctctgcagtctctggggcggaggtttcgctggcttttctttctctcaaagaaaaaaacatgcaccattttcaatgtgcttttgcctctcctctctgttcacatgcttttagcagcaagtcccctccaaatctgtcttggttccccttcagaaggtggcgctgcccccgaaaggcacctcagcctgtgagtgctgaggaaccagctcctctggctgattttccagttggactggccattgctctccagaagtgctctgttagcaaacgtgatgtggaaacgatcacagatggtgttttctcgttgttcgccagaatttatacgggggagacaaattcccggtaattaccaagtctgcactcgggtaccaaagctctgaagctctctgaacagttgccatacttgagttgatgaatgtgttattcatggtgtctcatctcatcaatgcatcttgagagacttaatgaaattttagcaacagtatagaatagctctatcgggtggggagtaatcattaaacagatgaaatcggccccagatttacatgtctctttagaatccacagtgtaagcaaactacagttacaaagggatgggggttgtaaaccctctgagactctgcacttttcgcacgtatggcatcgtcaagtgctgtcttattacagcctttgtaaggagaggcaggctcctcctggggtgggctctgcagctgctctatttccaggcatgtgatcgcccccgctctccagattccccagcactctgctgcgtgtaactccactcaattctccactcatccttccttgtgaagcaggatcgttgaagttttaagtatgggcaaaaatctggaaaacttaggatccctctgacaccccaggattaggggacacagcagtggctagggcatcagccacagaactgagcgggaaatgccacttgtattggctgtaaagaaatcctggctttgggccaggcacagtggctcaagcctgtaatcccagcactttaggaggttgaggcggatggatcacctgaggtcaggagtttgagaccagcctggccaacatggtgtaaccccgtctctactaaaaatacaaaaaaattagccaggcgtggtagcgggcacctgtaatcccagctactcaggaggctgaggcaggagaatcacttgaaccggggaggcagaggttgcagtgagctgagatcatgccactccactccagcctgggcgacagagcaagactccatctccaaaaaaaaaaaaaaaaaaggccggcacggtgactcacgcctataattccagcactttgggaggccgaggcaggtggatcacgaggtcaagagatcgagaccatcctggccaacatggtgaaaccctgtctctactaaaaatgcaaaaaattagctgggcgtggtggcg

SEQ ID NO: 23199 - DNA, 1051 bp, Homo sapiens
tttctgtcctggtgtagattttttaaccagcttgttggccctggtcattttggccacatttgtgaccatcataaaagctaagtggtatttctgtgtagtttccgtctggaactgctttcccattcccgggaacccatagccgggccagccagggtcccgaacacaggcccaaagtttattaaaccccgatcataacctccagcaggcatttcatttaatactgagcttagttcctgctgggtaaggcattccgaggtaaccagggccctctgggcaccccctcaaaagccagctcttcgagggtgagtactccttgtttctactgtgagtcgcgtcttgattttccctttctttgatgtctcagtgtgtgtcccaaacacctgcatctcatggactgtttgtgcccatgcccagttcctggcatgccaggccctgggctcaggtgcacaactgactctctttttcactccctaggggaaccccctcggaaggggaagggttgggtgctgacgggcaggagcacaaagaagacacattcgatgtgttccgacagaggatgatgcagatgtacagacacaagcgggccaacaaataggtatgttcacaggccagtgtgtaaggccgtctgccctcgctggcgtgctggtatgcagagaaatttcccccaacaaagttgatgttccctgctcccccaaaaatgccacacacaaaaaaaatcacaaaattctgtgagggaaacaaaagggtctatggatgtggatatgccccattcttaccttccaggtttgctgaaggagcaaacctcacactggccaagggcagatgcgcatggcctgcctggtgccccggctgtgagcccctcaaggcctccaggccagcctccgtggatgtgcgtgtggaaataggccacgcctgtctcttctcttgctcaagttttctctcacagatgacagccacctaccacataacatgaccagcaaacggactgttcctagtccagagggccttgccatcatgcaagtggaagggcgactgtgacagccactgccac

SEQ ID NO: 23200 - DNA, 1063 bp, Homo sapiens
cactggtaatctggaacctcatctaataactgatatgtcgctacttaatatcaaacaatctgaaagccacctgaaatactgccatacttactaagcaatattcttctttaacacaaactgaaatcaaatattcacaaaagtctgttatgtttgttgtggggtggttatttatttatttatttttaaagagatggggtttcgccatgttgcccagactggtcttgaactcctgggctcaagcgacccacctgcttccgcctcccaaagtgctgggattacaggcgtgagccaccacgcccatcttaaaagttcgttatgtatgaaatcacagagaaaatcacagcacacccaggaaattcacgtgggccacattatgccaatacagcaaactagaaaccagcaacaaccaaaataaaacatgtttctgaataacttttgagtgaagggtaatcatagctgaaattagaagcaatttagaaggaagtggcaagaagaacattatataccagatgcagtcataaaaatacttaagagaaagagtgacttcaggtgactttattagaaatagtgggccaggtgcagtggctcacacctgtaatcccagcactttgagaggctgaggcgtatggctaccttgagcccaagagtttgagatcagcctaggcaacatggtgaaatgtcctctcaaccaaaaacacaaaaattagccaggcgtggtggtgcgcgcctgtagtcccagctactggggaggctgaggtgggaggatcacctgaacccagaaggtcgaggctgcggtgagctgtaatcaactcatgaagctagaaggaaaatgatgaaaaaagtaaagacactagaaggagaaggttttttttttttttaaagatagggtcttgctctgttgcccagactggagtgcagtggtgcaatcacagctcaccacagcctctcgacttcctgggctcaagtgatcctcccaccttagcctccagagtagctgggactataggcatgcaccaccaccctggctaatttttttattttgtggaaatgggatcttgttttg

SEQ ID NO: 23201 - DNA, 1092 bp, Homo sapiens
caggctgctactgcccagcctgggttgacgtcatcagggcaaactcaggcttggtgcttataggtcttctgttttagtaagtagtcgatccagatttttaagtgacaccacacgcattttaaatgttggcagcaaatacagattggcaaaaagcactgaggtgtataaagcagttttgctgcctggtgatccgtggactgtttgtttgcactgtttgcattctctggtctaaagtatcttttggcttcttcttttttttttttggatggtttatttcagatctcttaagggcagtcccaagatccagagcagagatgtatgatgacgtccacagcgatggcagatactccctcagtggatctgtagctcactctagagatgccggaagagaaggcctgagaagtgacgtatttccagggccttccttcagatcaagcaacccttccatcagtgatgacagctactttcgcaaagaatgtggccgggatctggaattttctcactctgattctcgggaccaggtcattggccaccggaaattggggcatttccgttctcaggactggaaatttgcgctccgtggttcttgggaacaagactttggccatccagtttctcaagagtcctcttggtcacaggagtatagttttggtccctctgcagttttgggggactttggatcttccaggctgattgagaaagagtgtttggagaaggagagtcgggattatgacgtggaccatcctggggaggctgactctgtgcttaggggcggcagtcaagtccaggccagaggtcgagctctaaacatcgttgaccaggaaggttccctcctaggaaagggggagactcagggcctgctcacagctaaggggggtgttgggaaacttgtcacattgagaaatgtgagcacaaaaaaaatacccaccgtgaatcgtattactcccaaaactcagggcactaaccaaatccagaaaaacactccaagtcctgatgtgaccctggggacaaacccagggacagaagatatccagttccccattcagaagatccctctggggctggatctgaagaatcttcggctccccagaa

SEQ ID NO: 23202 - DNA, 1028 bp, Homo sapiens
gtgggggccgcgccgacaggatccatcgggggtccctgctatatcggggtgtgtggaacgggcaggggaggccgtgggaggtggactcaggaggtctggttggcctcagggcgggcaaggttctcagagtgggagacaggaaagttggaaccttcaggtctcacgcggctctgggtccaacctattgagtgtgttcttaaaacttagcccagcccctgggggtcaggctggtgcagggagatgggggactcccacaaccctgacgggaccggcctgggcagagagagggacgtggaactggagggtctctgcctgggaccatccccgaggaggggcgctggagatggccctgaaggaagggcactgatggccggaattattgaaagtggggcgtcgtcccaggcggaggtgcaggacgccgtaggagatgaaggcacaggctcccgggaatgaggagggaggctgcattgattttatcagggttcttgagttcgagaatcgtaaatccagtgaagggaaaagaaggagctgatggaagactccagaaaattcttgcagatgtctgcagagccctgaccctgagacaggaggctgggtggagggcagggccatcagaacatccctggacagacctctgggagccttaggtggagagatgcacccctccaccaccttttcccttggggggttttggggggtggtggggtcattgatgaagagcccaaaggtccaggaagacctctgagactccagtggttgggtgcagggagggctgaggagagagctgagctgtggggaggtggagggatggtctctagctatgcctgcagggtgcagaaccaagttgggggctgactgtgagactgggaagggcctgaaccacctggaagggtatgggatgatgggtgagtgctagggtctcccaggagagcctggaggaggctactggttgagctcagcagagaggtctgggctggaggtgtcaccgtgctgaggttttgatgggctggctgattgggtggttaaaa

SEQ ID NO: 23203 - DNA, 1510 bp, Homo sapiens
acgcccaagtgcacgcccatcgccgcctccagggtgacgccctgtatgcaaataagcccgtcccgcccaatcagctcccgggggcaggaccgcccgctcccaaggcacctgcggccgcgggcccctgatcttcgtgcagccgccgcgggtccgtgcgcccagcgtcccagggcccaggccgagcaggtgcgtgtcatatcgggttgagactcctgtggtgtcctctgaacggcttctgcgggctgggtgggttttggaggtccgggtgtactgctgggcgtcccagggtggggtgtgtgtctaaaggggtgtgtgtcgtggggtggtgagtccccgaggttgtggcaggagggggttgtgtctccaaggggtgtgtgtctgaagggtgtgggtctggaagttgtgtgtccaagggctctgcgtctgagatttggtgtgagttggggagttggagagttagctgtgtgtccaaaatcatggtgctgtgaggccctattatgtgtctgtgagctctgtgatgtggcatgtgatgtccctctctcctggtgtgcactcctttagcattagcgcatcccctgtgcacaaccctatgccttcttgctgtgggtgtacactcgtttgtcacagcaggatggtaggcacaaaaccttggaacgggggagcaacagctgccggggccaactctcctccctttgcctcaatgggtacaggaacaagagtcacatccccgtgtggttgttagcacatgacaaggtggtggcagcattactttcacggtcacagtcctccctccctatctcttttggggtccagggctgcagatatgggtgacctgtgtccttggccaccctaacccctagttgcagacccaattagtcagaaatagctggccgggcactgtggctcatgcctgtaatcccagcactttggaggctgaggcaggaggatcacttgagcccagtagtttgagaccagcctgggcaacatagtgagacccccattttctttttcttttcttttctttctttgttttttttttgagacagggtctcatcctgtcgcccaggctggagtacagtggtgatctttgttcactgcaacctccagctcccaggctcaaacaattctcctccctcagccttctaagtagctgggattacaggcgcgtgccactaccgcctggctagtttttgtatttttagtagagatgggctttcaccatgttggccaggctggtcttgaactccagacctcaaatgattcacctgcctcaacctcccaaagtgctgggattacaggcgtgagcccctgcacctggctttaaaaaaaaattttttttgagacagagtctcactctgtcacccaggctggagcgcagtggctcaatcttggctcactgcaacctctgcctcccaggttcaagtgattgattttctgcctcagcctcccgagtatctgggactacaagcgtgtgccaccatgaccagctaatttttgcattttttgtaga

SEQ ID NO: 23204 - DNA, 1030 bp, Homo sapiens
tgagcgacctttcctgggagttctaccaggagcatcaggaaggttgagctgggtgtatgggaaccaggccggggcgaggggttccggggggacctgagaacattgtgtggagccctggatccaactgtacctgacactagccaatttcatttcttcagtttcatggacccctaaattatgatttttgccaaaatggctttgagtccgtttctgctgctgtttgcagaagggcctgcactgaccactgtgaatgccaagcctgggtgaccaggcctccacaagttatgcatctccaaggccagctgtgtgccaatgcagttaccccagaatcccttgttccagtacaatgtattagggaggtcagataagagttgtttggggtcgaggcaggttccagtcactgctctgggagggtccctcagcttggcactgtggggtggttgatggagacggatgggaagagcaggggtgtcccgaggggagacagagggcatcctgttaggacatcgggcctgtcaaggcatctgaaggcctggaaagggggttcagccctacctctcctccttctaggtcacactggggggcctctgtgccattatcccacctctccactgtcctactcagcttaggagtggggaggagcctaaagccaccccatttagggcactgattggtgtgtggcctccagagtccttctcccttcttacctgctctgaaggcacctctcaatgtccatctgtccttcgtgcgaccatttctccagcaaacactggtatttgtgagccagccctcttgctcagaccttcaggacaaactggcagcagaatgggattattgcctgcctcccaggacctgcctaggatgtctggggcgctaggagctaggggtgagggaggcaggtgtggggggccccaccagacccttctagggctctgagtcactcatagcccctggatgcaacctcaaccagcgactaacagtcatctctctctcttttttttttgagctggagcctcactctcgcccaggc

SEQ ID NO: 23205 - DNA, 1067 bp, Homo sapiens
tcctcacatggcagcaagaaggagaagtatgagtgcccagtgaagggggaggccccttattaaaaccacaagatctcgtgagaactcacttatcaggagaacaggatgaggggaaccacctctatgattcagttgtctccacctggtccctctcacaacacatggggattatgggaactacaattcaaggtgagatttgggtggggacacagtcaaactatactattctgttacagttatgacctgcatggcaaggaggcagccgtctgactatctaagggaaggatgtgccaggcagggggaacagcctgtgcaaaggccctgaggcatggtggccaggtgttcacagaaagcccagacctgtgagggaagggagttgcaggaggaaaggtctctgcttccaccatgaggactcaggagagccccaaccaagagagctgggaggaaggccctctaggtgggggtggcctcccttgccaaatatctcctgcgccccctacaggcagacatgcagcgttgggaggagcagagccagggagccatctacactgtggagtacgcctgcaggtgagcgccacagcctccccgctgcagggccaccttttgctgctctggcctcctgggcattcaggggcatcccagccaactgcccagtaagccccaccctgccaggcctacccgagtgggtgtatggggtctgtaccacgattcacttggccagggccccaggtgggtctcttccctgtgctgagcccctccccagctgccacaggaaagagggatagggattctggaagatgcctctggggaccagcatttctctcccacagccaggacagatgggccagtggggtggatggcagccagggggaagcccaaagcacagatatggctgtttatttttaaattttttttgagacagaatcttactctgtcacccaggctggagtgcagtggcatgatctcagttcactgcaacgtccgcctctcaagtccaagcagttctcccgcttcagcctcccgagtagctgggactacaggcgcccgccaccttgcccggctaattt

SEQ ID NO: 23206 - DNA, 1032 bp, Homo sapiens
tccacaggcagcttcacagcacctgatcccggcctgaagcgcaagtcccctcctgaggccctgtcagggtccttacccccagccaccacctgccccgcctcgtccacgcctgcgcccactatcatccctgctccagctgcccccgggaagccagcctccgcagccaccgtgaagaggaagcggaagagccggtgggggcctgaagaggataaggtagagctcccacctgctgaactggtgcagagggacgtggatgcctctccctcgcctctgtcaggtgggcagaccctctccccctccctgtgttggaagggtctgacttctttcactgagcataatgtcttcaaggttcatccacagtgtagcttgtatcagaatttcattccttctgtggccatatcttccactgtgtgtacataccacatttggcttacccactcatctgtgaatgaactcttatattcacagaggttgtttacactgcttggctgttgtgaataatactgctgtgactatctgaatcgttttcagttctcttgtcggtatacctaggtgtggaattgctgggcctattgcaattctgccttttttttcttttttcttttttctttttttttttgagacagagtctcgctctgttgcccaggctggagtgcagtggtgcgatttcagctcaccataagctctgcctcctgggttcacaccattctcctgcctcagcctcctgagtagctgggactacaggtgcccgccaccatgcccgcctaattttttgtattttttaatagagatggggttttactgtgttagccaggatggtctctatctcctgacctcgtgatctcccgcttcggcctcccaaagtgctgggacgtagagatggggtttcaccatgttggccaggctggtttcgaactcctgacctcagatgatccacccgcctcagcctcccaaagtgctgtgattacaggtatgagccaccacgtctggcctgtaattctccttttaactttgaggaacctgcaggtgcac

SEQ ID NO: 23207 - DNA, 1049 bp, Homo sapiens
atctgcctgggactggaggcccccccgacaggtgtcctgaatgtcagactggccctggggatcattgagttgttgaccacacctcagggttggatcactagtccactccaagtcatcatgtctttccttcatttgcctgattaaggctatataaataagaaacctagtttgctgtcattgtaggtagacactgactgtggaaccctttcaaaggagaagcaggcaaggatatggaattctgtccaaggcccagagcccggtggctctgcttggtcagaggggtccagggcccagccgctgcagcccagcctcacccctgatgtcagaactgagagatgctattggtgcaggtggccccggccctcctgtgtgtcctttctgttctggggtgttgctgacaggcgcccagcttgtcaggtgtggctgtcggggaggccaggctggttgaggtcgcctggggtgggtaccccgggcagccagaggagacgaggctgaagggagctcatttccgcactcactgcagagccagagccggaccaggaaagaactgggtgggtcggggggacgaccaggtattcaagcccctgcagggtgtgcaggtttgctcctgtgtttaatctccatgcagggtcagctgtgaggcagccccaaagcacagaaatgctagttagacccacatggttggcagacctcccctcacccccaaatctaacagccgcctcatgtggccactcctggcccttccctgtcacgcctgtgggccaggcataccccagccactttgggaaacaatttgtaaccaactgcatggctataaagaagctggaggcctggtgcggtggctcacgcctgtaatcccagcactttgggaggccaaggcaagtggatcacctgaggtcaggagttcgagaacagcctggccaacatggcgaaaccccatctctactaaaaatatagaaattaactgggcatggtgtcatgtgcctataatcccagctacttgggaggctaaggcaggaaaatcacttgaacccaggaggcaaaggttg

SEQ ID NO: 23208 - DNA, 1047 bp, Homo sapiens
ctccaaaagggcatcctcacatcccttctaggaggagcttctaaggctcttccgctgagcccttgaggccccaaagcactgcccctcaccatgggttacctgtcccctgagtttaggccagaggtatgagctgcaggttggagggtgctctcttctatccctgggaaaggacggtcactggtcacgggtgagcttgtccagaccgcccagtgtaggagggcaaaggggggtggctgtggtgacagcattgccagcaagtccagccctgtccacattcaggacgagtccctgtgacacctgaactgtgtgaagggctagccggtgaggtcacatcaccctgacagcacagactgaagcgactgtggagttgtgccatgacagccttgagatcccttgcttctggctgtgtgtccgagcggatcagaggccagcttggcccccgggccattagaatggagctggcgtgtgtcctttccttaaaggggtgccccagcagctccaagggtaccctgttgggaactgctgcattacaaggggtattggccatctcggggcccttgaagcccattatgacccactgtctgcatggcctcagaaacgcacctgttcctgtaaacagcaaccaggtcaggattgttgctgggcccatggcaggagggcgacctagggtgaaagacagtcacggaatgctctcgggacctcacaggggccctcgttgggctacacactccccacctctcccccattcccagcagcccaagcaacaaggggaataagattagccacaggtctggcatgttgcccagttgccaggcacttgctggcagcgagaaatttctcttgtgcatctcctacaaggactgcagtctgtgtagtagctgacaaactcacagcctcagaaacaggccaagggaaaaatgcaaaagcaagttccacatggctcagtggggaggctaatccgtatataaaaatatatctttatagctctgttcactgaaaaggccccgaaataatgattaagcctgtggcattgagcatccctagctc

SEQ ID NO: 23209 - DNA, 1046 bp, Homo sapiens
cgagaagtaagtgctgccttggaggaggtgatgtccctgcagctgagaatagcaggaggatgactccacagacttcagcaggagaggctgggggttgtccagggtgtccagggaggggcactaggccaggcagagccctagctctgtgccagggcagcaggaagccacacagtgtgtgtgagccggagcaggagagggggccctgactcccatgtgtccttgcaggcaggagcagttcgtggacttgtacaaggagtttgagccaagcctggtcaacagcaccgtctacatcatggccatggccatgcagatggccaccttcgccatcaattacaaagtaaggcctgggccctgcccaaacattcactgtctgcccacccagccccaccccatgaagccatctgtccctcatccccacagggcccgcccttcatggagagcctgcccgagaacaagcccctggtgtggagtctggcagtttcactcctggccatcattggcctgctcctcggctcctcgcccgacttcaacagccagtttggcctcgtggacatccctgtggaggtcagtggccctgtggaggtgaccctggggctcagcttgatgggtccctcctatggcagtgaccctgagctgggctgcaggtctccagctcaccatccctccctgccccgacagttcaagctggtcattgcccaggtcctgctcctggacttctgcctggcgctcctggccgaccgcgtcctgcagttcttcctggggaccccgaagctgaaagtgccttcctgagatggcagtgctggtacccactgcccaccctggctgccgctgggcgggaaccccaacagggccccgggagggaaccctgcccccaaccccccacagcaaggctgtacagtctcgcccttggaagactgagctgggacccccacagccatccgctggcttggccagcagaaccagccccaagccagcacctttggtaaataaagcagcatctgagattttaaaaagccctgcctccacctcgtctgtgccacacggtg

SEQ ID NO: 23210 - DNA, 1001 bp, Homo sapiens
cacggtctcagctcactgcaacctctacttcccgggttcaagcaattctccttcttcagcctcccaagtagctaggattacaggcgccagccaccatgcccatctaatttttgtatttttagtagagatggggtttcaccatgttggccaggctggtctccaactcctgacttcagatgatgcgcctgtgttggcctcccaaagtgctgggattacaggtgtgagccacctcacctggcctttttttcttttttctttttttttttttgcaagaactcaggtgttaaattgaattttaaagatcaatcttacgttggtttttttgcttttccaatatttatctgcttttatctactaaagcatttattgagtgttgtttgcctcctagaatcatgctccttggctatttcttttgaaatcagtttaggttgttttgttttgttttattttgagactgtctcgctctgtcgcccaggctggagtgcggtggtgtgatctcatctcactgcaacctccgcctcccgggttcaagcgattctcctgcctcagcctcccgagtagctggaattacaggcacatgccaccacccctggctaatttttgtatttttagtagagacggggtttcgccgtatcagccaggctggtctcaaactcctgacctcaggtgatccgcccacctcagccttccaaagtgctgagataacaggtgtgagccactgcgctcggccaaaatcagtttagttttgacctatctcgtgttgtgtgttttttcattgcatttgttgtgggggtttattgttggtggtttgttttcttaaagtagtttgtagaaagcaacacgggcactctctgaggtctccttagggtgtcaggtgaaatggggaagtctgggaactgtcctcacgggagccagctgggggacttcaggaccagtggctctgaagccagcaatcttcccctccgtggagcctgctcctccgggtctgacaccctcctgcc

SEQ ID NO: 23211 - DNA, 1001 bp, Homo sapiens
agggggagccactggctctcacagccctaggcaggtgggctgcacccctcagagcatcttggggacaggcaggcctacagctctgatgctccccgaggtgggtggccagaggctcactttagacccaggataggccacgtccttgggtgtccctctgggttggaatctgccctgccctggccgaagccacagtgccagggtcctccaagcccaggtcttccagctctggaccaacacctgctctagcccagagccccgatcaggccctgggggaggcaggagggaggtgggggaggccggggtgagaggtaggggcttggctgcctctttggagcaaagcccctcaggactcgtacttatttgtttccagatgagaaagtattcccccgaagtattaaaactcaggggctgaaaattcaccagcgctttcattttgccagtgccctgaagcgaatgtccgtgcttgcctcgtatgagaagctgggctccaccgacctctgctacatcgcggccgtgaagggggcccccgaaactctgcactccatggtgagctggccccagcctggggcaaggggtgggggcgcggggcagcccgtgacatccccctgcattccctgcagttctcccagtgcccgcccgactaccaccacatccacaccgagatctcccgggaaggagcccgcgtcctggcgctggggtacaaggagctgggacacctcactcaccagcaggtacgggcccaggctccccctgccttcaccatgtgcctggcccgtcagctcctccctgagtcacctcctgtgtcccacagtgccaggttgaatggttgtgattttgtcctccttgccccgcctccagcttctacctttggagactccaaatggcactcagtctgtccactgctgtggggacccacccagtcctggctcacgcagagcacacgcagggcttacctgccccagtcctggtgtgtccctagctctactcttttgccctggtct

SEQ ID NO: 23212 - DNA, 1057 bp, Homo sapiens
ctccaaataaataaataaataaagattgatataatattttttgagataggatctcactctgttgtccagactagagtgcagtggtacaatcatggcccctgcagtcttaacctcccaggctcaagtgatcatcccaccttgttccctactacaggtgggcaccaccacacccagctaatttttgtattttttgtagagataggctctccctgtgttgcccaggctcctctcaaactcctgggctaaagcgatctgcccaccttcgcctctgaaagtgctgggactacacgcataagccactgtgcccggcctattatctttaaatgaggctaagtcataggtcaatagaatgattcccctcacctcaccccttacactcacagcaacagcagcagaatacatacatacagcagaggacaaaaaactgtacaactcaggcttaatttcagaagtcctttagaatacttcagtaaattatataactgattacgtggacaaatgtctacacatacacaatataccaagactgagtcatgaaaaaacaaaaaatctgaacagagctgtagtagcaggagattggcatagtaataaaaaaaaaatagccaggcacggtggctcatgcctgtaatcccagcactttgggaggccaaggtgggtggatccccttaagtcaggagttcgagacaggctagccaacatggtgaaactccgtctctactaaaaatacaaaaaattacctgggcatggtggtggacgccggtaatcccagctacttgggaggcagaggcaggagaatcccatgaacccgggaggcggaggttgcagtgagccgagatcatgccattacactccagcctgggcaacaagagtgaaactccatctcaaaaaaataaaataaattaagaaaaataataaattggctgggcgcggtggctcatgcctgtaacctcagcactttgggaggcagaggagggtggatcacaaggtcaggaaattgagaccatcctggctaacacggtgaaaccccgtctctactaaaaacgcaaaaaagtaggct

SEQ ID NO: 23213 - DNA, 1030 bp, Homo sapiens
agtcctgggtcatatgttttggctgggacctagctgtggtttttttgtttttgttttagtttttgtttttctagacagagtctcactgtgtcgcccaggctggagtgcagtggcgggttcttggcttactgcaacctctgcctcccaggttcaagtgattctcctgcctcagcctcccaaatagcagggattacaggagcatgccaccacacccagctaatttttgtatttttagtagagatggggtttcatcatgttggccaggctggtctcgaacttatgacctgaagtgatccatccgcctcggcctcccagaattctgggattataggtgtgagccactgcacccggcctagctgtggctgtgtattttagaatgaagctgtgactaatgctgggtattggccttcatctagggtgcaggctggtggggagattttttttcttctgtgcaagttgtgggcccatcaagtagtcattcctgaaaaagtagtcatctgaaaaacagaaagaacaaaaagagtggggactgggaagctgctattagatggtgtcttgaggtccacactctccaggacccttaaatacctctgctgctgctgttgctgctcacgcctctaacgcaacaaagacccagatcctccaaggttgtcagaaataaccctcatggcatcctttagttcagcaaagatgttagttcagacctaaataaagccttgtgtccttaaaccacacaaagcatctctcaccatgcaggaggcccctaactgatagtagttatttgaagatctctggaggaaaaaaaataacacatgctgtagtagagagggccctcccctccccagagtatttccagtgagcagaaaacaaaaagtgaaggagagccgggcgcggtgcaacacgcctgtaatcccagcactttgggaggctgaggtgggtggatcgtctgaggtcaggagttcgagatcagcctggccaacataccgaaacaccgtctctactgaaaatacaaaaaaattagctgggcctg

SEQ ID NO: 23214 - DNA, 1053 bp, Homo sapiens
agtgaattactgaactataaagggtggtgtgggaactccagatttgtagttggcgtgtagaagcatgggtggcctgggcaccctaccgtgtggcttgcatctgacatgggggcagtcttgtgggactgagtccttaacctgtggagtctgactaattctgggtacttagaattgaattaaattttagggcacagtcgatgtcagagatttggagaatggcgttggaaaagacaccttgtattggtgttgggaagacaaaaaacggttcaccttcacacatgcttctgtgtccctgcccccaggtcacataggctttggtaaaatcatagtaggttgggcttttgttgaaatggaattttttgagaacaggtcttcttaagaagaacattatgttctgggaatattacaaaactgttacttttcctattcatctctcaaattttagagagaaaactttgccttatgaccctcaattctttaatggatccaagaagggtaattgatttgatgtttattttttacttgcacggctgggattgacaatttctacgttccttacttgtgagaccagaaattggaagtctctgacttcatttttttgtgatgtttgatggatgatagctttaaaatctcattattgccaggcatggggactcacacctataatcccagcactttgggaggcggaggcaggcagatcgcttgagcccaggagttcaagcccagcctggccaacatggcaaaaccctgtctctactaaaaacacaaaaattagacgggtgtggtggtgcacatctgtaatcccagctattcaggaggctgaggcacaagaatcgcttgaacctgggaggcgaaggttgcagtgagccgagatcacgctacagcactccaacctgggcaacagcgaaactcggtctcaaaacaaatgaaataaaataaataaaataaaatctcattcctccttttctactatgtaccctacatccagatgtggtaggaagaaagcctgggtcaccctcatttggtgctggtgagacattcaatccacattag

SEQ ID NO: 23215 - DNA, 1027 bp, Homo sapiens
tatttttaatgtatctataactgtatatttaaaatgtgtttcttttcaacaccgtatatttgatccattattgacagtatctgtccaccatttgttgtatttagaccattgatgtttaacatgttattgatttagttgtattaatgtctccctttttctttttatgtttttctatttgttgttgttcttcctttcccatcttctattctttttctaccttatctgctttcattaagcattttacttgatgccatttttctccccacttagcacatcaattatagttttttgttgttttttaagttttactcattgcctttgagtttgtagtacatgcttacaagtaacccaagtcctcttgtaaagaacactgtactacctcactggttgtgcaagtacctcatgaaaaagtattcccaattcctcctttcctgtcctttgtaacattgctaccatacgtatcatttatccataagctggacttaccaaatatattgttcctgttagtgttttggacaaactcatctgtcagattacaaaaaagagattgtattttacttgtatttattttttctctaatacccttctttatcgtttttcttttttgtagggaattttttaacagttctttcaaggcaggtacgctagtgacagattatcttttcttatctcataaagctttcatttctcttccattttgagggatattcttgctctatacagaattctatgtggttgggggttttgtcttataatgttttaaacatttcactccagtctcttcttgctttcactttctgtaaagagtcttgggctggtcctggtggctcacgtctgtaatcccagccctttgggaggtcgaggtgggcagatcacttggggccaggagtttgacacccacctggccaacatggcaaaaccccatctctactgaaaatacaaaaaattagctggacatggtggtgcgtacctgtaatctcagctactcggaggctgaggcaggagaattgcttgaacccaggaagtg

SEQ ID NO: 23216 - DNA, 1052 bp, Homo sapiens
ttgagcgatgcggatcctgagagcgctcccgggtaagcaaattccctggtggaacgcctcaccagagcagcgtgtggcagcccccgcggaggatcaatgcagtgactgaacaccgggaaggaactggcacttggagtctggacatctgaaacttggtaagactagtctttggaacttgcccactccatttgagtggaagtgtggcctgatcacctatggcgtgcctgtaccggcactttggtttttgtttttgacttgacttggattgcttgatactttggttttggttttgaccttgcttggatttctagataccccgattttggtattgattctggtttggtgtaaactgtaaaagtatgtgtgtgccctttttacccgttatttgttttgtggtgtgcgtgtggtgcgagcgtggtgttttgtcttgaagaagcatgggtcaggcacaaagtaagcctgccccagtaggagctatgttgaaaattttcaagaaaggatttaagggagattacagtgttactgtgataccaggaaaacttagaactttgtgtgaaatagactggccagcattagaggtgggttggccatcagaaggaagattggacaggtcccttgtttcaaaggtacggcacaaggtaacctgtaagccagggcacccagaccagttcctgtacatggacacttggttatagctggttttagacccccaccccacaatggttgagagaacagcagcataagcaagcttgcagaggcaaggaaagaccagcagagagagaaagaggaagagacagagagataaagagggagtcaaggaaagagagagagaggcagagaaagagaaagagacagaggcaaaaggaaagtcaaagagaaaaagaaaatcagagaaagaaagagagatatacaagtagttaagaaaaaagtgtaccctattcctttaaaagccagggtaaatttaaaacctataattgataattgaaggtattctccataaccctataagactccaataccactttgttgtcagtgtaaacaagggcgtattc

SEQ ID NO: 23217 - DNA, 1050 bp, Homo sapiens
ggagagaatcgcttgaaccccggaggtggaggttgcagtgagctgagatcacgccactgcattccagtctgggcaacagagcaagactctatttcaaaaaaaaacaaagaaatagaaatagaatccatgtatttctgaatcctgaaaaattattagtaaatgtttattatatagttttctttgaacatctggtctgtctgcaaacatatagaccttttttttttttttttttgagatggagtcttgctctgtccccaggctggagtgcagtggcgtgatctcagctcccgggatcgagtggttctcctacctcagcctcccgaatagctgggactacaggcatgtgccaccatgcttagctaatttttgtatttttagtagggatgggctgtcaccatgttggcaaggatggtctcgatctcttgacctcatgatccgcccgcctgggattacttatatgaaataaaattttaaataaaaaatagcatttgattacaactattggtgagactattagtgtgaagtcatatttttacttacattgacaaaataaccattctgtatattggatattgacttctattgacaaaatagccataacaatattctgatttagaataatactccttttctgctgtatatttgcaagcttttatcaaatattacgggagctcaatagaaatcaacaatatgaatctttatttaccacaaacattattgatgcctatgcttgtttttcttaaaatctattagctttttatgacacatttatactttttcagttgtttattactgagaagtggctgtcctgccagaaaactgctattctcagctgtatccacaatgactaatagtgagtggaagtgcagtggataaaagcaaatgtgtcttctctgtattttttttcatccattggctaaaaaacaggaggatgcagaagatgaaagaaaatacaatccctgaaagatcatgaagaagctctcaatcagacaaaaaaccccataggagattttttttttttttcattattgtactctctgcttctatgag

SEQ ID NO: 23218 - DNA, 1053 bp, Homo sapiens
gtgcaccaccacacccagctaatttttgtatttctagtagagacagggtttcaccatgttggccaggctggtctcaaattcctgacttcaggtgatctgcctgcctcggcctcccaaaatgatgggattacaggcgtgagccaccgaacctggccacatggattctgttttctttcctcagtgttagagaatacatcagagaatatatttgttaaaaatagcagattgaataattccagtaactctcataagtcacagcaattctctcttttcacatggagtcaagaactctgcccattgacagttggtcactatgttttgttttgtttttcaggaactgttgacattcagggatgtgaccatagaattctctctggaggagtgggagtttctgaaccctgctcagcagagtttgtataggaaagtgatgctagagaactacagaaacctggtctctctgggtgagaataacttcaatacacaatttctatttcacacaaaagattttattttcttcctctgtagaatgtttggtggggatttctgctttgtataaatgagttttagatctctgctttcaaggaaaacttggggatttgttgggatagagaagaaaattttcaagatgttttatgtttacattaactttcttctaccttgaggtgatgggcatttttcactctagtttagtggtaattctatttttttattttattttattttattttttgagacagagtctagctctgttgcccaggcttgagtgcagtggtacaatccagctcactgcaacctccacctcctgggttcaagtgattctcctgtcttagcctcctgagtagctgggactacaggtgcccaccaccacggccagctaatttttgtatttttagtaaagaggaggtttcactatgttggccaggctggtctcgaactcctgacctcacgtgatccaccctccttggcctcccgaagtgttgggattactagtgtgaactaccctacccagcctttagtggtaattcttggaattccattataaaaattccttta

SEQ ID NO: 23219 - DNA, 1054 bp, Homo sapiens
gtgcagtggcgcgatctcggctcactgcaagctccacctcctgggttcacgccattctcctgcctcagcctcccgagtagctgggactacaggcgcccaccaccacacctggctaattttttgtatttttcagtagagatgggatttcaccatgttagccaggatggtctcgatctcctgaccttgtgatccacccgcctcagcctcccaaagtgctgggattacaggcgtgagccacagcacctggccagaaacaggattttaaaaatgcacatttaaagaggatgtcactaattgcccagaataactcagaatattctggaaaagagaatagttagataagacttgctctttcaaatgctgaggaaaggctacttaaatacattattagaggttataaaacctgggagatatctgtagcttgaactttgcataaagatgtttctttatgcttagattcaggttataatttactttttgttgccaataatatcatagctctgatgattgtctgcccatgtgtgttgacactgtacatcaatttgttctattgtagttcatgttaatttctttttttttttttctttttttttgagatggagtctcgcactgttgcacaggtttgagtgcaatgtcacaatcttggctcactgcaatctccgcctcccacattcaagcaattctgctacctctgcctcccgagtagctgggattacaggcacgtgccaccatgcccagctaattttttgtatttttagtaaagatggagtttcaccatgttagccaggatggcctcgatctcctgacctcgtgatctgcccaccttggcctcccaaagtgctgggattacaggcgtgagccaccgcgcctggcccaattcatgttaatttcaatcacttggttaaggctctctgtgacagattttttttaattataaagttaattatttttatctttattattcgtaagtaccttgggagatttactgactgatgtacataaaccatcacatttaatctgcaaacttccctttctttttagattctctttgctt

SEQ ID NO: 23220 - DNA, 1030 bp, Homo sapiens
tcctcagccaccctgtgttattttcctggttttgagtttcagaactgtctggggatgacatgagatgcccacagtggctgtgtctcctgaggtgtctagtgaatatcagcccctgggccatctcctctcaggggcaaccctgccaggtatgggaatgtggcctctctgtggagtggttggtgcattgtgcctgggagaaatcaggtatacctttcctctgaaagcaaatccattaggacattaagattttcttccccaactcccagtttccatttcttagagatacagtgctggccaggcaatttggatgctagtattgaggagaaaattttctcagattggtgaagagagaaaaaaaatatccccaaggacaaggaacacccaacccagtgaggcagtgcaaaaacctgcaaagcaaaatgcatctaagggacacagtggggcacagcacagtggctcttggtagaatggttattgtccacttcagtgagcaggatggggcgggaaaatgtcccaaatgatagaatggcttgacttgacatctgagtcagatatgtctgtgttccaatcagtattgccgcttcctgagtttgtcaccttggaaagatttctttgcttattttaacttcagtttttaattaagtgtaaattatcagtagagcttgaaaggtagtctgtactggcaacctggttttttcaccaacccaggcttctgtgccacctgattatagtctcatctgcctgcatggacacaggaagaagtcagagcatagcctctcctgggacacaatctatagcatgaaccagtccttccgtaaccctgcactgtcccacccatggcttctagatagcaactttccctcgtttgccttttagttcccccacaaaccctttttttatgtgcacacagtgtgcccaacgccacccctcagttgtcagatgtccagtagttcaagaccatgggcctagacctaccttttgcagaagcaaatacaaattagaaataaggggcttcattcccccacttgaa

SEQ ID NO: 23221 - DNA, 1043 bp, Homo sapiens
aaaaacttagccaggaacagtgatgcatgcctgtaatcccagctactcggaaggctgaggcaggagaatcgcttgaacccgggaggcagcagttgcagtgagatgagatcatgccactgcactgcagcttgggcaacagagactctctcaaaaaaaaaaaagaagaaagaaagaaagaaaaacaaaatactgttaaatgtatataaatgcagcttgtctacaaacattacacataactatgctaattattctgaagtaataaatagaaagccaggcacaactacagactccactgttcagtttacgcactgaactgttcttctttttgcagtataagtacttcagcctgcaaatattggataatttccttggataatctggtttctgtcaaagaaacatagtatcttttaatgtttaccattatgtattgctaaatttgatcctatctttgtgctaagcttctgtgtgcccttaaaattagcttttatctaaataaatctgtgtctatttaaaggactaaaaattaaaaaataaactttttggaaccaaaaacaaagcaataaatctgaagttctagataatctggagtcagaaaaaagacaaaaggtatttagctgttaatataatttacatatatttttaaaaatcagagaaaaataactatatataatctaaatcccttaagaaatgagacaatggcaaaaatttttttggaagtttttttttttttgagacggagtctcgctctgtcccccaggctggagtgcagtggcactatctcagctcactgcaagccccacctcccatgttcacgccattctcctgcctcagcctcccaagtagctgggactacaggcgcccgccaccacgcctgactaatttttttttgtatttttagtagagatgggtatcactatgttagccaggatgatctctatctcctgacctcgtgatccacccacctcagcctccaaaagtgctgggattacaggcatgagccaccacacctggcctttttttggaagtttttaaggagttttgaa

SEQ ID NO: 23222 - DNA, 1057 bp, Homo sapiens
gggtggctcatgcctgtaatcccagcactttgggaggctgaggtgggtggatcacaaggtcaggagttcaagaccagcctggccaacatggtgaaacccctctctacaaaaaatacaaaaaaaattagccaggcatggttgtatgcacctgtaatctcagctacacaggaggctgaggcagagaattgcttgaacccaggaggcagagtttgcagtgaaccaagatcacaccactgcactccagcctgggcaacagagcaagactccttctcaaaaaaaaaaaaaaaaacctatgaaaatattagagaagatccaaataaattttaaaattgccgtattaaccagagtgatctatagattcaataaacctcctatcaaaattgcagtggtatttttttcatagtaatggaaaatacatttctaaaagttacgtgatactaaaataactttgatagccaaagcaatcttgaggaaaaagatcaaagcagaaggatatcatacttataatttcaaactatatttcaagactatatagtaataaaaacagaatggactgtgcagaaaaaatgaacaaaaaatgcaacaaaaactaatactgtcacacatttcagatctgaagcaaaaagacaacttaaaaaagggttttagtttctcaaaatcacgcagatatttgtgtgtccccaaggcaacggaaaagcagccagattgtgcaatcacttatatgccataaagaggaatttcgctctcactgtgaacttgaaggaagctcaccgaaagaatagtagaatccttagagaatttaaaagcatgagacagatgtccctttgtgagagaaaaattaaataaataaataaataaataaaacagctgcccaggaactatttcctttggaacacagcttcccagatcacattttaaggactggctttctttttgaccttgggacctcttatctgcattgtctgttgtgttcattttcattcgcacctacctgggggtttggcaatcatctcatgtctcttcatagtcagaggttttattccttgctccagacagg

SEQ ID NO: 23223 - DNA, 1158 bp, Homo sapiens
tcaatcttgttgcacaagctggagtgcaatgatgcaatcttggctcactgcaacctccaactcccgggttcaagggattctcctgcctcagcgtcctgagtagctgggattacaggcgtgcgccaccatgcctggctacttttttgtattttcagtacaaacagggtttcaccatgttagcctggctggtctcaaacttctgacctcaggtggtctgcccgtctcagtctcccaaagtgctgggattatagacgtgagccaccacaaccggcaccagtgaatttatttaaaacattcttacacgtcagaaaaaaactgtgatattgctaaagttataataatttttttaaaaagctgtcaaatgcaataatgccatcagcaaaattgtactaccaaataaaacaagtgcttccaaaataaccaaatcctgagaaagtatattggcactgcatacaccatacacatcaaagatgctaaaaggagtttcttccactgaaaataacataatgcaagaaaacaacagataatctatgaaaatacataactttctggaaaagatatccacatacacaaaaatggaatttcttaacatcataatggtacagaaaacatttttaatactctctaaatttaaaagataaaagtatagaaattattgttaacatctgttaataaatatacaacataaaaaatataattagcaaaatcagtaacaaagttgaaggcaaatgtaatgatgaagaatttcagtatataactgaagttaatttttttaccacattcaaatatattgttggatcttttaggttttatgtaatcccccatgttaccactaagataatagctgtatagatacacaaaagaaaataagaaactgaaagcatatcaatacaaaaaattaaaaaaacacaaaaaagacagaaaatgagtgaaaaagatagaagaatcaaataaaacaattaataaaaataacagtaagtttttctattgcagaaaacgatttaaatatatatataatcatctttccaatcaaaagacatatttttttttattttttgagacggagtttcgctctgttgtccaggctggagtacagtggtgtgaccttggctcactgcaacgtccgccttctaggttcaagcaattctcctgcttcag

SEQ ID NO: 23224 - DNA, 1053 bp, Homo sapiens
tctgtaggttgtctgcttactctgttgatagtttcctttgctgtgaagaatctctttagtttaaataggtcccatttgtcagcttttgcttttgttgcaattgcttttggtagcttcatcatgaagtgtttgcaggtttctatgtctagaatggtagcttttatgttatcttgcagggtttcttataattttatgttttacatttaagtctttaatttttcttgagttgatttttgtatgtggtgtaattaaggggttcagtttaagtgttctacatattactagttagttattccggcaccatttattaaatagagaattttccccacatttcttttgtcagctttgtcaaaaatctgatggttgcaagagggtggcattatttctgggctctctgttctgttgcattggtcttgtgcacatgaattttttataacatctttctctcttctgcttttccccccataaacattttttttttttttttttggagagggagtttcgctattgccaggctgaagtgcaatggcatgatcttggctcaccacaacctccacctcctgagttgaagcaattctcctgcctcagcctcccatgtagttgagattacaggcatatgctatcatgcccagccaattttgtatttttagtagagacagggtttctccttgctggtcaggctggtctccaactcccaacctcaggtgatctgcttgcctcaacctcccaaagtgctgggattacaggtgttagccaccacacctaggctaacattctttcaagtgcatcctgtttgcaaaacttagattaccaagagttcaaagactttttaaaaagttccaaaaaaatttttcttattctctttttccttaagggatttagattatgtgtagatatttttctctgctttcttgaaatatctgtaaaccatattaacagttaaataaactttgtctttttttttttttttttttttactttagattatcttttctagtacatctgatttattggtttatttctaattttaaaaagtttgtttctctccttttt

SEQ ID NO: 23225 - DNA, 1053 bp, Homo sapiens; identical to SEQ ID NO: 23224

SEQ ID NO: 23226 - DNA, 1096 bp, Homo sapiens
cactccatgctcatgaatttaaagaatcaatataattaaaatgtccgtgctgcctaaagcaacttacagattaagtgctacttctctcaaactataaatgcaactttttatggaattagaaaaagaaaaccattctaaaagtcatatggaagaataaaacagcccatttagccaaagcaacattaacaacaaagcaatcctggaggcctcacattacctggcttgtactacaaagctacagtaatccatattacatggcttgctacaaaaatacacatgtagaccaatagaaagaagagaaagccctgaaataagtttacatttctacacccaacttttttctgacaaagtcaacagaagtaaacaaggaaaaattgtctatccaacaaatggtactgggaaaactggttaatcatatgtagaaggagaaaattgaaactgtacctctcaccatataaaaaatgtaattcaaaatagattaaaaacttaactgtgaaacttaaagctataaaaatcgtagaacatcaaaaaagtactcttctagtcactggcctctggaaaggatttatgactaacaccataaaagtgaatgcaacaaaaataaaagtgaaaaattaacacctaattaaactaaaaaacttctgcacaccaaaagaaaccattgacaaatatgcagacaacctagagtatggaataaactattttcaaacttcatacaagaaaaagttaatatttattcatatatattatgtatttatataatatataaattaagttaatggttagaatactataaaaatttaataaggaaatacacaaatgatctgagtagacacttctcaaaaaaagacatgagagttgccaataaacatgcaaaaaattgctcaccatccctaatcatcagagacatgtaaatcaaaatgacaatgtgatgccatttcatagcagttagaatggctgttattaaaaagtaaaaatattgcagatgttgaagttgtggagaaaagggaatgtatatatactgttggttgaaatgcagtttaatgcagcccttgtgaaatgcagtttggagatttcttaactgaaaatagaattg

SEQ ID NO: 23227 - DNA, 1033 bp, Homo sapiens
tctcaaagtactgggattacagatgtgagccacagcacccagccaaaactaaaatgatatattttaatctcgtaacaacttcaatttaatacaaaagctatacctttatatttttcagtagttattgatattgaagattattttatactatgcatctactaacagatttatattttatatttcatattctatagaagtagtttaaggattttgtgtaccatcattatgatagtaaataattctatatgtgtctgtatatttacatttaatagagagctttattttatatatggttttatgatgctggccagcatcattttaattttcaaaaaaatggactcattttaatatttctctttgtttatatgcagagtctcactatgttgctcaggctgatcttgaactcctattctcaagtgatctggctgccttggcctgctaaaactgtaggattcataggcccgaaccacagtgcctggacaccatgtagtacttttcataggactgtgcttgtagtgatgaacacccacaccttttattatggagtctttatttttatcttgtttttaaagtaaaataattttggatcaagtattattggttagaaatatttttttatcacatcaacatttggaaagttcttaggtttttcttttcttttttgagacaaagtctcactctgttgcccaggttggagtgcagtgatgtgatctcggctaactgcaatctccacctcccgagttcaagtgattctcctgcctcagcttcctgagtagctgggattacaggcacgtgccaccatgcccagctaatttttttttgtttgtttgtttgttttatttttgagatggagtctagctgtgtcgcccaggctagaatgcagtggcttgatcttggctcactgcaacctccacctcccgagttcaagcaactctcctgtctcagcctccggagtagctgggattacaggggactgccaccatgcctggctaattttttttgtatttttagtagagatggggtttcaccatct

SEQ ID NO: 23228 - DNA, 1020 bp, Homo sapiens
gggttcaagcgattctcccacttcagcctcctgagtagctgggattacaggcacatgccaccacacctggctaattttttttttttttttgtatttttagtagagatgaggtttcaccatgttgtccaggttgaccttgaactcctgatctcaagtgatccacctgcctcctaggattacaggcatgagccactgcactcagcctgtagcatacccttgagagcacatagcgcctgcttaatacaccttgcattagtacatgttgttttccaaatgcagacttattcagacattgctgccttctgtttcctttgtaaactttgaagagccagcaaataatatgaaactttaggatgaagatgggttgtctttatttgtaccagaaatacttgtgttgtgacaagagtgctgagtgtaagggactctgtgctgtgcctgctttctctaactactgctaataatgagcccgggggagcaacattaacattgacaggggtcttgtttaaaacatttatccatggatcctttccaaacctgcagaatcccattacgtagagtgggtccaaaattaccaagtgaattttaagctcactaaagcttgagaggcaatgcttggctaagtggttatcagcccaggcttctcattaggattacacagccagtttgcagaaatctctgtacttcacccctcctcacaggctctgtttattgctccaggtggacacatccatgttgtatttgtttgttttgagatggagtctcactctgtctcccaggctggagtgtagtggcttgatcttggttcactgcaacctctgcctgccaggttcaagtgattctccttgagtcagcctcccaagtagctgggattacacgtgcatgctaccgtgcctgactaatttttgtattttttttttttgagatggagtgtcgctctgtcaccaggctggagtgcagtggcgcgatctcagctcactgcaacctctgcctcccacattcaagcgattgtcctgcctcacc

SEQ ID NO: 23229 - DNA, 1062 bp, Homo sapiens
ggaggaggaagttgcggtgagctgagattgcgccactgcactccagcaggggcaacaagagcgaaaccctgtctcaaaaaaaaaaaaaaaaagaaaaaagaaaagaaaagaaaagaaaaggatttgcatttcctatataaaaggtttttttttttttgagacaggtttcactcttgttgtccaggctggagtgcaatggcacgaactcggctcactgcaatctccgcctcccaggttcaggtgattctcctgtcttggcctctcagtagctgggattacaggcctgcaccaccatgcctggctaataatccttttctttataagtctcagagagacattaaaatgagaccacaattatgtctttcttttttctttgagctatgtagttaccacttgaaactgcttgctattgccacaagtagctataaattgaactaaaaatgccacactggacactataacccacaccctatagcctaacaatgtatatccaatcaataatcaatttatttttgtaaataaaaaaatgttgacagacaactttgtatcaacccactctatgcgcctctctttttgtctttccaatccaattgtaactgctgctaatcaaagtatatattccaggcaacttgaatatttgctcccaggttacaatcctcaagtttggcccaaataaattgtatacttacattcatgtttcctcagctatttccttttaggtaaacatcatttggaacgtgccagagcggcctctgaggggatctctcctttgattgtactttgctttctgtaacacctaaggatgcagagtcaggttgatcccacttagaatctgcacataagatctggcttctgcctgggattacaagacagggccagactttgaattgggaatgtactgaaaaccaatagaaggcattttctgcactgtgagatgtcaacatagacatcctacagctccctttgagactgtggctctttgagcttttcagattttgtccagtaagatcttgtagcaggtctgccacagttacgtgagaggctccagatgtaaacagaatc

SEQ ID NO: 23230 - DNA, 1039 bp, Homo sapiens
cctcgtgatgagcctcccaaagtgctgggggattacaggcgtgagccaccgtgcccagcccattctaaatacattggcctctgatggtcaccattttacatcaatgaggttatgttttttggaatccatgtgtaagtgaaatcatgaactattaaccttatctcaattaatgttctccagcttaatccatgtgattaaaaataatgaatttttttttaaaggccaggtgtggtggctcacacctgtaatcccagcattctggaaggccaaggtgcattgcatgagcccaggagtttgaaaccagcctgggcaacatgaagaaaccccatctttactaaaaatacaacaaaaaattaactgggcatggtggtgcacacctgtaatctcagctactctggatgctgaggcatgagaatcccttgaaccagggatgtggaggttgcagtgagccgagattgtatagacagagacttggtctcaaaaaaattcttttttaaatagtattccactgtatatatctaccacattgtctttctttactcattagatgctgaactgttgattttttttttttttttttttatgaagtctcactcttgtcaccctggctggagtgcagtggagcaatcctggctcactgcaacctccacctcctgggtttaagtgattctcccaactcagcctccagagtggctgggattacaggtgcccgtcaccatgcctggctaatttttatatttttagtagagacagggtttcgccatgttggccagtctggtctcgaacttatgaccccaagtgatccgcctgccttgtcctcccaaagtgctggaattacaggtgtgagccaccacacccagcctgaactgttgattctatattttggctattgtgaagagtgctgcaaacaacatagaagtgtaagtgtttcttcattctgatttcatttgttttggaaatatacccaatagtgcaacagctgtattacatggtagtttgattttaagttttttgagaaatctctattttgttttcctaa

SEQ ID NO: 23231 - DNA, 1051 bp, Homo sapiens
ttttcaatagaagcaactgctttcagtacattttgtatgtagggtttatggagttccaatatacttttcagaattttgttacttttgaaagttattttctttttatttggcaggacagatttgctgatagtattatgcttacttgattgctgtattttacaggagtttgactttattacacacttcccttctggcctgcaaaatttttattgacaattcactggctgtctcataagactatgctggcaaatgacgcatcacttttatcttgcagctcccaaggttctcttgtctgtgacttttgaaattgtgcttatatatgtgtttgttataaatatctttgtgtgtttcctagtttgtttgttgagcttcttcatctttacatcgtttctttcaatatttttcagctattcttttttatatttattacctccacaatttgtttttttgatattctaaatatttatgttcttatcttcatttttctgattttctatagttctctgtcttcctgtttcactcactgagtattattcaatttattttcaatttttaaaatcggtgtgtatacatcttttttatagtttcttttttaaaattttatatttttatggaaccatattgccttattttgtatacattgtaatccttgattgaaatttggacattaaaaaaggctacctgtcacaatctttataatgtagctttgtcctggcatagtctgaacaatcgtcttggttagagattctgggagtctctcaaacatgttcttagaatgtgtcttgtctgagattttgtctttctcttttagttaaaggagtttattcatgtttcttcttaataataatcacgtgctacacctgttttctgtctgtggtacagcagtctctctgttgctgaaacatttacctttggtctcagcaaagttaagactgtcactccaaagtataccaccgtttctttcagcattatatttcaagagagacacaaaccagtgtctggaaaggctcctagaagcaagtaataaagataaatgtgccagtattttact

SEQ ID NO: 23232 - DNA, 1018 bp, Homo sapiens
acccacctgaatagactgttaaaatagtcttatagtttctttttttatctaagtaaacaaaagatatcatttgcaaataataattaactaccttcccattttattacaaatattaacatactttttctggcttatttttttcaagtatcattttatacatttacacacatatacaacaatgaaaattattcaattattcaatgtgttaatttttattaaaaatgattgttaggctgggtgcagtggctcacgcctgtaatgccagcactttgggcactttgggaggccaaggcgggtggatcacctgaggtcaggagttcgggaccagcctggccaaaacggcgaaacctcgtctctactaaaaaatactaaaattagccagggaaggtggcaggcacctgtagtcccagctacttgggatgatgaggcaggagaatcgcttgaacccaggaggcggaggttgcagtgagttgagattgcggtcggcgtcccccaacttcttagagggacaagtggcgtttagttggtggagcgatttgtctggttaattccgataataaatgtcaaatataacaaaaaatgcacaggtattaacatactgaatagggaaatgctgtaagattttactctaagagctaaaacaagtcaaggatgtgcactttcttcagtcttactaaacatagtactaaatgtccaagacatagaaaataaagaataaaatcaaaggcatccagattggaaaaaaaggagttaaattatcattgtatgataatcttttatctcaggctgggtgctgtggctcacacctgtaattccagcactttgggaggccgaggcaggtgcatcacctaaggtcaggagttcgagaccaacctggacaacatggtgaaacccatctctactgaaaatgcaaaaattagctgggtgtggtggcgcatgcgtgtaatcccagctacacaggaggctgaggcaggagaattgcttgaatgcggcacgcagaggttgcagtgagccgaga

SEQ ID NO: 23233 - DNA, 1027 bp, Homo sapiens
tccagcctaactctggcttgaagtaaaaatacatactaaatttccagttctgacaatctcgagaactgaaaatttagtactttacttcaaggaactgtcaactttctttccctaattcacattatgaactatttgtcctttagtgtatatttttcatactgtattttaattatttactgacaacacattgaaaacattttaaaaatttgttttctgtttttaaatattttccatgagaagaaagcaaagagtaatcccctgacactgtattttaaaaaatatctgtgcctctttttcttttatcttccctaagcacagagatcataatgctttgggggtcagtgttttttgtaaactttatggggtgatgtgtcctcagctaccctttagttttttcctggtcctgtactatctgaataaaccaagatacccaccatgtctatctgctagagttaatatcagctcttgggtcattttctcttatagaacaagctgaggtatggagtgtagcctctcaagaagaaggtgaatgccctggggcttagagggatctcctggtgtattcttcctttgaaaagctaaccctttgagacattaagattgtttttatccaagccattttccatttcttggagacatattgctggtcagcgatcagacgctggtattgaggggaaaacagaaataatttctgccagctggattctccaagatttgtgaaaaaaaattgtatccccaaagacagataaaaacctcatctcagtgagctagtacaagaacttgccaagtaaaatgcacttggggcactcattggggcgtaatgcagtgtctcctgagaaggtggtcattggacacttaagtgagcaggatggggtgggaaaatctctccagggattggatggcctgacttgacgaatgagtcagacacatctgttttctaatcagcactgccactcctttgttttgtcaccttgaaaagatttgttcacttatattgactcttttaaactgtaaattgtattttatt

SEQ ID NO: 23234 - DNA, 1790 bp, Homo sapiens
ctcacagtatttaataggagagatgctctctcttgctctcgctctcttttttctttttttttttttttgagacagttttgttcttgttacccaggctgcagtgcaatggcgtgatctctgcccaccacaacctctgcctcccaggttcaagcgattctcctgcctcagcctcccacgtagctgagattacaggcatgtgccaccacgcccagctaattttgtatttttagtagagatggggtttctctatgttggttaggctggtctcgaactcccaacctcaggtgatctgcccacctcggccttccaaagtgctggggttacaggcatgaaccactgtgcccagcccaagatgctgtctcttaacagctaggcctagagtcatgaatatgattctgggtctccttgtacaaaggtcatgaagaattgccactttcttgcatactgtataaatctcttgtggtacagagagtgtcattacagggttcagcatacagatgagattgtttctcatatacactccccaccaactgttagaattgtcaccctcacacatggacagagcccactggtgaggccctgaatctcacacacacacacagtctacagttaaaattgtgactgtcatatgtgaacatctggctagagttgaaataatgacttatttctaaatccagttcataggtgagaattctacctgtctaagcctaggtaggatagtcaacatgtccctaattggctgggggacatgttgactctcctacctgggcttagggccaaacagttcatggaagggatgaaggctctcagctctcatgcacagatccagttggtgagattgtcactagcatacttagacccaacatactctgatacctagaactgggacatgtgcaggatttttaattactggaccttcctgcaggtgtgattgtgacatatgtctttgttacacacctgagtggtttgatgttcctgccttggttcaacccaaagtgaagattgtgatgtgtcactggacccagcatctcagtgatgtgactcttctttttggacaccacaaattttgggtattgtcaaatattgctggatcctgtacccatgttatgtgactctccaacctatgtcctgcatgttgtgccatattgcagcacaatgtgtcacattagacatcattacatattgctgggctcaacacccaagtgatgtaacattttcctgggccttgactacagggggctttgtgacataactgaatgcccataaccatggtaatgttactcttctcctgcctggtctctgctcacagggaaattgtgacataccattggcctagcatcttggtgatgtgactctcctctttttctcaggccccacatatttgggtattgtgacatacccaaatgtgacactgggctcaacacctaagggacgggagttctctacctggccccttcctgaagggggcattgtgacatacttctgcacaggtatgtcacagttattacctaggagatgtgactctcctcttttgccagcaccctgcttacagggaaaattgtggcacatttctgtggccagcaaccaggtgatgtgtttctcctgcttgggtctttattacagaaaagatggttgacatatcactaggcccagcatctaggcgatgtgactgtcttcttctgcctggtccctgcttacaggaacattgtagcatattgctatgcccagcacttttctcttcttttaggttttgcctgcaggagactttgtgacattgctgggccctgcac

SEQ ID NO: 23235 - DNA, 1033 bp, Homo sapiens
tctacctgtgccctgctttcaggagggattgtaacatccctggtcaagcccccagtgatgtgattctcctgtttgatgcctgccctcagggaggattgtgacatagccctggcccaacacacagttcatgtaactcttgaatttgctctttacatacaggtaggattgtgacatatatctggccaagcgtacagatgtaatgatgactgtcataccttgaagaagccaatagcagagagaatgttgctctcaggcttaggaaaatgaggaagtctttctgtacaaaagtcataaagaattactactctctcacatatattacgccctagtgtgttacagagaatgtcataacagggcccagcacacaagtgagattgtgtttgtcctatgcacactacaccaacctttacagttgtcaccctgacccattgacagagtctgctagtgaggttctgaattacatgtgaacacagtccgcagttggaattgtgactgtcatatgtgaacatctggctacagttgggatggtgactcatttctaaatccagctcataggaaggtgaagactctcctatctggactcagttggtgagagagatgttgactctcatatctgggcttagaaccacaggaaagattctggagctccttgtgcaaaggtcatagaggattatcaatcttgcatattgtataaagtcctcaggtgacacagagtgtctctcgaatgcacacccaggcaacagtaaagattgtcattctcccacataaacacatcccactgttgaagttctgaatttcacagaggctgtcaaaagttggataattgcctctcatgtgtggatctggtccacaggtgggttagtgacttccagaccaaggttcagcgcacatgtaaggctgtgactacactaagaagatacagtctgcagaagaaactgtggctcttttgcacacattctgtcaatcattgtgattgcgactcatgtacttagacccaacatacaggaggtgttgactttcatacctttagaac

SEQ ID NO: 23236 - DNA, 1035 bp, Homo sapiens
gacaacaattggagatattaaactgaccacagaccccacctttttctgctaataagtagtctagtgctagcctgttttgataaattgctgcacgcatttggttttcttgttgcgtgagcatttccaaggctgaggcggtttggttagtgattatctctagaaccccctgtagtctaattattatatttagagtatatatgggagtgcaataaccccatgaactatcctcagtccaagtggcaggactgttaatattcgatgatccgttgcggaggccattcatcctgttgccatctttggcttcctcctgcctttatggatcatggttgtttttgtttgtttgtttgttttaaattattattacatacaggtactccgagagtgttgcccacgttaatgttttggaggaaggagtagccttgggggtgagcttgaccctagtgcgatgaatccagttgaggagtccttggactctcactgcagttggcatgctgcgtatcacagtgtaggggcctgtccacttcagttgtaggtttttgtgaggctcgggttggcagataaacacatctgtgcctgcaagacagttatgttgagaggacaaggaggtgttgacaggaaggggcatggcctcatttgccgcttcacgaatgaaagaccatgtctggattaaggaggggaggtaattcctgaatggctcagaatctgggaagggtagaggccccaagacaaaagtttggctatcgggggaaccagcccccaatatttcaatgtaggttattttctgttttccctaagtgtcggctggtctgagaaataaagggaaagagtataaagagagaaattttacagctgggcctccagggatgccatcacatattggtaggaccatgatggcgaccccaagccacaaaaccaacaagtttttattagggatttcaaaaggggaggggcgtacgaattgggagtgagtcacagaggtcacatgcttcaaagggcaataaaagatcacaaggcaaaagggtagagcaggatcac

SEQ ID NO: 23237 - DNA, 1049 bp, Homo sapiens
tgtttaagttcgaaactatttttagcagaaaaaagcaatattggaacaaaatcattttaaggaggtgtctaatttactacaaaacaaaaattctcaaaaatgctgaaagcaaatttatactctgctttgtattgaatttcttgctgtacaatcttttggcttatggttcagagtctccccatgcaaattctgttttaacttgactggtactcatgctagacccataattttttgttgttgttgtttaataggttttttgtttgcttaattgtttgttgttgttgttgtttgtttgtttttgagacagagtcttaatctttctcccgggctggagtgcaatggtgcaatctgggctcactgcaacctccgcctttcaggttcaagcagttctcctgcctcagcctcctgagtagctgagattacaggcatgcatcaccacgcccggctcatttttgtatttttagtagagacggggtttcaccgttttggtcaggctggtctcaaattcctgacctcgtgatccacccgtctctgcctcccaaagtgctggattacaggcgtgagccgcctcgcctggactaatttttgtatttttagtagagacagggtttcaccatgttggtcaaactggtctccaactcttgacctcaggtgatccactcacctcggcctcccaaagtgctgggattacaggcatgaggtaccaggcccggctggcctgtgtaatagtttatgaagaattcattatgtgagcctgtctgtaattataaaaatacttttttaaaattttattgttccataagttacttatgtacaggtggtatttggttagttgagtaagttctttagtggtgatttgtgagatcctggtgcatccatcacccaagcagtatacactgcaccatatatgctgtattttatcccttcccctttcactcttccccgcaagtacccaaagtccattgtattattcttatgtctttgcatcctcatagcatacctcccacatatcagtgagaacatacgatatttggtttaccattcttaga

SEQ ID NO: 23238 - DNA, 1051 bp, Homo sapiens
ggaagggcagaacctccccaagtctgtagctgggaagagtttgggatggttacagagtacagttcaaaattctcagtggaaccaagttaagtggaatattttcttgtctgtagccaaaaacagtagtcctgtagtttgctgcctgaatgaggcttgccttctaaaaaggattaccttcgatcttgggcttcagcagagtttcataactcccatcctggatctcagagctctcttaaaggcacttatttttgagatggggtcttgcaacataacccaggcaggtcttaatattttgaccggaagcagttctccaactttaatgtgccatgtagctgtcattacaggtgtgaaccatgatgcctggttctctcacaaacgcatttttgtcaggaatggctgccaaattttcttgctgtcaggagataagcaaatagggcatctttttttttttatcttattaatgtcactctccatataaatttttatttttattttctacttcaaatttgtctgtagttttggattcagacatttaggacaatatactagaatgtacatgttgtgtgtgagttaggtaattagtatacaggcaggcaaataggaattacagaattttcagccacttttgtcagcctgtaactaaataataacataatgtattcctcaaatatttgttttatacatgaagctctaaccatattttgctaaatatatacataatttagcaatttaaggctatagttggttctaaacttgaattacagtaattttattttgtgtaaaaatagcacatatttaaaacataaaaattgacactagtttcttttaaatgcttatctattaagtttctcattagcatctcctatttatgattgtactacattttctctgggattttattgccatacaatagataccagtaatttaaagtgcctgccttccatgactgcacagttagtcaaacattgccgttttctagacaaattatttgttaacgtacattaatgttgccaactagattttatgagtaaacatttctttcattattttc

SEQ ID NO: 23239 - DNA, 1038 bp, Homo sapiens
ttgagtatgaggggaacttgtagggtccccggtgtttgcttctgagttttagcctcagaagcacttggcaaggggtcgcttggcaaggatggtcgctactcaccctgagaaccaggtggccctgtaaaaggttatctataatatctacttctgccttagaactttcctttggggggtaggttctgggagtttcacagattgttaggttttgatatagggtcatgaagggctgtacataggagatttctgaccatttgccctgcctcttgcaaaataggcctgattgcaggatagcgtcataattaatgctaccattgactgcccagtgttctgaactgagcagctcataatagggccagacagtattgcagaaaaatattatacattttcttgttagattgtcagggtcaaattgattctaatggtggaagatatagccaagcagggaatcagaattggaaatagagttccccacagtggaatcaggtgaaatagattaagagttgctcatagtggtctagaaaaaagaagaggactttgcaaagtagagggctcattaggtgacccaaatttttcctggggcatctccctggaaaacttcttggcccagactggggtctctgggaacatcccctctttaggccccagacttagtctgtcagatggctctgaccttagataggtgccagcacaactttagaatggttccctccaccactgatgacctactatgaggtgttgttttttttttttaatttttttttgagacagagtcttgctctgttgtccaggctggagtgcagtggcatgatcttggctcactgcaacctctgcctcctggattcaagcgattctcctgcctcagcctcctgagtagctggcattacaggtgcgtgccacaatgcaagactaatttttctgtagttttagttggtcaggcaggtctcgaactcctgaccttatgatctgtccgcctcagcatctcaaagtgctgggattacaggcatgagccaccacgcccggactactatgagcttt

SEQ ID NO: 23240 - DNA, 1040 bp, Homo sapiens
cgcgcccggccgtcttgtgccagttttcaagaaaaaaaatgtttgcaacttgtatctattcagtatgttggctgtgaatttgtcgtagataactcttttgaagtatgtaccttcaatgcctagtttgttgagggttataacatgaaggatgttaaattttactgaaagctttttctgcatctattgagttaattttgtggtttttgtctgtagttctgtttaagtgataaatgacatttattgatttgtatatattgaaccaaccttgtgttccagggataaatcctacttgataatggtggattaactttttgatgtgctgctggatttggtttttcagtattttgttgatgattttttgttaatatttattaaaaatattggcctgaagttttttgtttgtgtgtttgttttgtctttgccaggttttggtatcagaatgatgctgttcttatataataacttggggagaagtcctttctcaattatttggaatagttttagtaaaaataataccaacttttgtttgtacatctggtagaattcagctgtaagtccgtctggtcctgggctttttttggttggtaggctacttattattaatttgattttggagctttttattggtttattcaggggttcaatttcttttttgttcagtctagggaggaggtatttgtccaggaatttattcatttcttctagattatttagttactgtgcatagaagtgctcattgtagactttcatccttgtttgtatttttgccaaatcagtgataatgtccatttgtcattactaattgtgttttttttttttttggatcttctctttttttcattaatctagctagtggtttatttatcttactgagttttttcaaaacatttacttctaattttttagtcttttttgtagttttttacatcatctaaatattcttcagttcagatatgattttagttatttgttgttttcttctaccttaggggttgatttgctctcacttctctcattcttttatttaggatgtcaggtta

SEQ ID NO: 23241 - DNA, 1039 bp, Homo sapiens
atttttaataagattatttaaatatttacatttaatttttgttctctttttttttttttttttgagacggagtctcgctctgtcgcccaggctggagtgcagtggcacgatcttggctcactgcaagctccgcctcccgagttcatgccattctcctgcctcagcctcccaagtagctgggactacaggtgcctgccaccacgcccggctaattttttgtattttttagtagagatggggtttcaccgtgttagccaggatggtctcgatctcctgacttcgtgatccacccgcctcggccttccaaagtgctgggattacaggcatgagccaccacgcctggccagaaatttaaatgtttacattaaaaatttaaataacatttaaaattaaataggaaattattcctgtatttctctttgtcagctttgttgaagatcagatggttttaagtgcgtggcattattttttggctctctattctgttgcatttgtctgagtctgtttttgttccagtaccatgctgctttggttactgtagctttgtaagataaagttgggtaatgtaatgcctccagctttgttatttttgcttagaaaagtgccttggctattagagctcttttttggttccatatgtatttaattttttttttttttaagttaagaatatttttgaggccaggtgtggtggctcatacctgtaatcccagcactttgggaggccgaggtgggtggagcactcgaggtcaggggttcgagaccagcctggccaacatggtgaaaccctgtctctaataaaaatacaaaaaattagcctggtgtggtggcatatgcctgtaatccggctacttgggtggctgaggcagccttgaacccaggatgtggaggttgcagtgatccaagacctcaccacagtactccagcctaggcgacaagaaccaaactccgtcaaaaaaaaaaaaaaagaatatttttgatagtttcatagaaataacatatctgtaaatttcttttggtggtatggccatattaatac

SEQ ID NO: 23242 - DNA, 1037 bp, Homo sapiens
acagagatagtatcagaatatttttgggtcaaggtttccctttggaaactttatgggtgatgtggcctcagccaccttcagttttttctggtcctgggcttcagtagtttctgtgaataaaccaatatatctaccatggctatgtctgctcgagtgtctagtgaatataatctactgggttattttctttcataaaacaacctgaggtatggagtgtagcctctcaatggaaacagatgaatgcccttggactgataggactctcccctgcgctcttcctttgaaaaactaacccttgcgtgcacggtggtgcacacctgtaatcccagcactttgggagtctgaggcggtggatcacctgaggtcaggagttcgcgaccagcctgactaacatggtgaaaccccatctctactaaatacaaaaaaattagctgggcgtggtggtggctgcctgtaatccgagctattttggaggctgagagccgagatcgcaccattggattccagcctgggcaccaagagtgaaactccatctcaaaaaaagaaaaactaagcctttgagacatgaagattgcctttactcaacccagcttccatttcttggagacatattgctggtcagccaatcagatgctggtattgagggaaaaacacagagataatttctgtcccctgaattgtctaagatttgtgaaagaaaaaatagcatttcaaaagacaaaaaaaagtgacctcagtgaaatgatgcaaaaacttgcaaagtaaaatgcacttggggcagtcactgaggcatagtgcagtgagagggtggtcattgagcacttaagtgagcaggatggggtgggagaatctctcaagtgattggtgacctgacttgacacatgaattagacacacctgttttcttttttttttgagatggggtttcactcttgttgcccaggctggagttcaatggtgccatctcggctcatggcaacctccgcctcccaggttcaagcgattctcctgcctcagcctcctgagtagcagggatta

SEQ ID NO: 23243 - DNA, 1003 bp, Homo sapiens
aaaccccatgccacgcagttatttggtaaagcgaatgattaggggtcttggagtcaaaatgatctcaaccaattctcaaactttaaatgggttagaagcccagctcgatggcatggggccaggtatgaaatgcgagtgcctagcgggcaacttttggtaagcagaactgctgctgtgggatgaaccaaatgccatgttagggtgcctgatgctgatgcccattagaccccagaaaatgtgttggttgatatagacagcaggacggtgggcatggaagtcagaatccactaaggagtgtttaacaacaaagaatcaactcgccctgaaaaatggatggtactgaaacattgggcccatacccggccattgccagcagttgagagtggatgggagtggtgagggtggtcgctcccgctggagccccgaggatgctatgctgctatgagtgggaggaccgctgcaatgagccttgaagccttgggcatgagcctgggtggagctgtcccaggtgcagatcttggtggtagtagcaaatattcaaatgagaactttgaaggccgaagtggagaagggttccagttgaagatgggtcactcggtccccagagataggagagtgccattccgaagggatggatgatgacttccattgccctcagccaatggaaacggagtcaagttcagatttctgaatccggagtggcagagatgggcaccatgaggcattcagggaggtaatggaagtgatcctggagaagctggtgggagcccaggggagagttctttttgtgaagagcagggcaccctgtagtggattcacccttagagagaggtctgtgccttggaaagaatcatagatcaggaggcacctggtgagctctcacaggcccttgaaaatctgggggagagggtgtaaatctcacaccaggctgtaaccatatccacagcaggtctccaaggtaaacagcctctggcatgttagaacaatgtaggtaagggaaatc

SEQ ID NO: 23244 - DNA, 1027 bp, Homo sapiens
atttttgagaccattgatgccagtactgaaaaacagaatattttgcaatgaaaactagaaacaaattattggtgaaaatactttctgatgtgtagattcatgtcactgaatggaacctgtgttttgattcatcaggctggaaacacttttattgtacactctataaagggacatttctgagcgcaatgaggcctacaggaaaatccaaatatcctgtgatgaaaagtgggaacaagctatctgcaaaaatactttttgatgtgtgcatttacctcaccaagtcacactgttatttttattcaccagattggaaaccctttttttgtagaattcacgaagggatatttctgagtcctttgaggcctacagtgaaaaactgaatattcctcattaaaaattagaaacaagctaactgtaaaaatgttttgccatgtgcagatccatctcacagtgttgaacctttgttttaattcaacagttagtaaacactttttctgtagaatctgtgaaaaaatatttctgagtctattgaggcctacaatataaaaccgaatatgccatgataaaaactagaaacaagatatctgtgaaaatgttttgtgatgtgtaaatgcatctcaccaaatggaacctgagtttggatttaccaaattagaagtcctcttcttgtagaatctacaaagggacatttctgagttcgttgaggcctattgtgaaaaaccaaatatccccggataaaaactagaaacaagctacgtgtgaaaaccctttctgatttgtagattcatctcacagagttaaaccttcgctttgattcaaggggttaaaaacactctttctctggaaacaacaaagtgacattccttaacccactgaggcctgtagtgagaaactgaatatcacaaaatagaaactaggaagaagctatctgtgaaaatgctttgtgatgtgtaaattcatctcacagcgttaaacctttgttttaattcaacctgttaaaaatactcttattgtcgaaactaggcgg

SEQ ID NO: 23245 - DNA, 1031 bp, Homo sapiens
gagtgcattgagtcatatgttgaaaaatcgaatatctcgtgataaaaactaggcaggaggtatctgtgaaaatgctttgagatgtgtgggtattggcctcacagagttaaacttttgttttgattcaacagtttggaaacatactttgtagaatctacaatgacatatttctgagcccattgaggcctgtagtgaaaaaccgaatatcccatgataaaaactcaaaacaagcgatatgtgaaaatgctttgtgacgtgtggttcatctcatagagttaaacctggttttgatccactacattggaaacactcttattgtagaatctacaaaaaaaaatttctgagaccattgaggtctctagtgaaaaactgaatatcccatgataaaaactagatacaagctatctgtgaaaatgctttgcaatgtgtggatttgtctcacaaagttaaacctgtgtttgattcaacgggttggaaacactttttttgtagaatctatgaagaaacatttctgagaccattgaagcctatagtaaaaaattgaatatcctgtgatataaatgagaaacaagttatctacgaaaatgtatattaatctcactgaatgcaacctgtgttttacttcaccaggttaaagatgctctgttggtaaaatctgtgaagggacatttctgagcacattgaggcctatagtgaaaaaacgaatatcctgctataaaaactagaaacaagctatgtgtgaaaatgctttgcaatgtgtggattcacctcacagatttaaacctttgttttgtttcaacaggttggaaacactctttttgtagttgaacgaagggacatttttgagtcccttgaggcctatagtaatgaacagaatatcctgcaataaaaattagaaagaagttatctgggaaaatgctttgtgttgtgtggacttatctcacagtgtcaaactattgtttccatgcaacactataaatgcacactttttgtagaatctatgaggggacatttctgagcccattgaggcc

SEQ ID NO: 23246 - DNA, 1026 bp, Homo sapiens
tatgaagggaaatttctgagcccatttaggcctatagtgagaaacagaatatcccactgtaataagtagaaacaagctatctgtgaaaatcatttatggtggctggattcatctcaccaaatgaaacctgtgctttgattcaccagtttggaaacactatttttatagaatctatgcaggaatatttctgatcccattgaggcatatgctgaaaattcgaatatcccatgataaaaactacaaacaagctatctatgaaaatgttttgtcatgtgtggattcatctcacagagttaaacctttgttttgattcatctgtttgaaaacacgcttttttgtagaatctaagaatcaacatttctgagtgcattgaagcctatagtgaaaaacaaaatatctgatgataaaaactagaaacaagctatctgtgaaaatgctttgtgatatgtggattcatctcaaagaattaaactttattttgattcaacaggctggaaacactgttttcgtagaacctacaaaaagacattggggagcccactgagtcttacagtgataaaccaaggatcctgtgataaaactagaaacaagctatctgtgaaaatgctttgcagttggtgaatttctttcatagttaaacctttttttattcaatacgttggaaacaccattttttagtgtctctaaagggactttttcagccctttgaaacctatagtgaaaaaccaaatatcttgcaataaaaacaaataaacaaaaaagaactacttatgaaaatgccttgtgatgtgtggattcatctcacagagttaaaccattgttgtgattcaacaggttggaaacatgctttttgtagaatctacgagttgacatttctgagccctctctgggttatggtgaaaacgaaatatcccatgataaaaactagaaacaacctatctgtgaaaatgctttgcaatgtgtggattcatttcacagaattaaaccattgttttgatttaacaggttggaaacactctttttgta

SEQ ID NO: 23247 - DNA, 1599 bp, Homo sapiens
tgtatctgagcccattgaggcctatagtaaaaaatggaatatcttgcaataaaaaactagaaacgagctatctttgaatatgctttctgatgtgtggattcatctcacagagttaaaccttatttttgactcaccaagatggaaatacttttttttgtagaatctatgataagacatttctgagtctattgatgtgtatagtgccaaacagaatatcccacaataaaaactagaaacaagctatctgggaaaatgccttgtgatgttttcattcatcttagagagttaaaccattgttgtaattaaacaggttggaaacactctctttgtagaaactacgaattgacatttctgagccctttgaggcctacagtgaaaaacagaatatccagtgattaaaactaaaaactttctgtctgtgaaaatgctttgtgatgtgtggaagcatctcatagagttaaacctttgttttggttcaacaggttggaaacacttttttagtagaatctatgagaaaatctttgtgaacccaatgaggactctgtgtgtgtgtttgtgtgtggggggggtgggggggcaggaaacaacgaggatttcatgatggaaactggaaagaaccatctgtgaaaatggtttgtgatgtgtggattcacctcacagaattaaacctttggtttgatagaacagattgaaaacactgtttttgtacaatctaaaaagagacatttctgagcccattgaagcctgacgtgaaaaaccaagggtctcacaataaaaacgaattacaagctatctgtgaaaatgcttagcaatgtccggattcatctcactgaatagaccctgtgttttgattcaccaggttggaaactctttctgcagaatctgcaaagaaatatttctgagcccattgaggcctacagtggaaaactgaatattctgtgataaaactagaaacaccctatctgtgaaaatgctttgtgatgtgtggatttttctcatcgaatggaacctctgttttgactcacaagggtgaaacactattttagtagaatctaggaagaaacatatctgagcccatttatgcctacagtgagaaactgaataccctgcaataaaaagtagacagaagctatttgtaaaaatgctttgtgatgtgtggattcagtgttaaacttttattttgattccacagttttgacaccctatttgtagaatatatgaatgaacatttctcagcccattgaggcctatcatgtgaaaccaaatattttataataaaaactggaaacaagtgatctgttaaaatgttttttagtgtgtgaatttgtttcacaaagataaatctttgcatggattcaacaggttggaaacattattgtagaacctatgaagggatgtttttagcctattaaggactatatatataaaaaaaactagaaacaagctgtctgtgaaaatgctttgtgatgtgtggattcatctcacagagttccacctttgtttttattcaacaggttaaaaacgctctttttgtagaacctacaaaaagacatttctgagcccattgaggcctacagtgaaaaaccaagaatcccataa

SEQ ID NO: 23248 - DNA, 1162 bp, Homo sapiens
gggtgatcccaggcattctaatgggagagacccctggccgaccccagtcagtctaattaaatagacacctgggtgaccccaggcattaaaataagagagactcctacccaatctcagacattctaatgggggagacttctggcagtttattgatagagacacctgggcgacctcaggcattctaataagagagattcctggccgaccccagacggtctatgcatagggacacctgggcgattccaggcattataatgggagagtcttacggttgaccccaggcagtctatggatagagacaactgggcgattgcaggcattctaatgcaagagactctctgccaacccgaggcattctaatgatagagaaacctgggagaccccaggcattgtaattatttaggcaccagtgagaccccaggcattctaatgggagagaattttggttgacatcagacattctaatgagagactcctgtctgatgccaggcagtctaacaatagagacacgtgggcaacccaggtattctaatgggagagacttccagtcatccctagacagtctaatgatagagaaactgggagacccagacattttaatgggagagactcctggccaacccaagcagtctatggatagagacttgggtgacaacaggcattctaatgagagagatttctggcccaccccaggcattctaatgatagagacaagtgggcaaccccaagcatttcaatgatagagacacctgggcaaccacaggtattctaatgttacagactcagggctaacctcagacattctaatggagagattcctggctaagcacaggcagtctaatgatagacatacctggactaccacaggcattttaataggagagactcctggccgactaaacgcagtctaattaaagtgacaaatgggcaactcctggcattctaatgggagagactcctggccaactgcatgcagttttattaaaaagacacctgggcgaccccaggcattcaaataagagagaatcctagctgacccaaggcattctaatgggagacactcctggctgacccaagcagtctgttgatagagacacctgggtgactggaggcattctaatgggagagattcctggctgacctcacacagtctaattataga

SEQ ID NO: 23249 - DNA, 1050 bp, Homo sapiens
atatgagtaaacaagctatttagataaactactctacattcctatgttagttacccttgctatagttcaaagaggattaggccatcttcagcaaagctatctgaagctatgcaaacccccctggccttccaagaaggtttatgttttataattttcccacctatcctgactgaaaccctgcatctcccccttttctgttttctgcattaggtctttttgattggagaatgcagatgtatgcagcaacaggtttgtaaggcatggcagccattgcttttattccggctttgcatcctagaattagcaaatcacataatgtaatcatgattataattagcaacattattttccagtcaaagagtgacccatagtgttacttggcatctcagttcactctatgccatcaatgaggaaccccaccgggagaatgttaatttcttttagccaagcagtctcactgttagaagctctgaagggggtgtttgttaagtaacagggcataaaaaagggtggatttcagagatgagcttaatagagtgtagcaagtactggttgcaggcagagtgagagaattaaaaaggaataaattatttggcttagccttatgcctcttcagcataatgtctggggcctgcatcatccatggaagctgcatcgtctggggctgcaggtcctgtagggtcttttttagactggctcgggttttttcttctttccatcatttgatgaggacgtagtctccaggctcgtgctagtgtactggaaattctaggggtggtgcctgtgctaagagaccttttataatctttgttaaagagcaggttagtgctttaagaaaaacctgttgtgctttattttgaagtctggtttacaaaaaaactggacgataccttttttaactttagccaatatgtttctgtctgatctcagaagctaagccaggcaattttctccatttctggtactgggttgtgtcctagccacaccatggtatggtttaatgcattgtgctggaatccaaagaggacctgagggtgtggaaaaacaagc

SEQ ID NO: 23250 - DNA, 1051 bp, Homo sapiens
attagatcctatttgtcaattttggcttttgttgccattgcttttggtgttttagacatgaagtccttgcccatgcctatgtcctgaatggtaatgcctaggttttcttctagggtttttatagttttaggtctagcagagccctcagaaataacaccacatatctacaattatctgatctttgataaacctgagaaaaacaagcaatggggaaaggattccctatttaataaatggtgctgggaaaactggctagccatacgtagaaagctgaaactcgatcccttccttacaccttatacaaaaattaattcaagatggtgagatcatctttctaatatgctgctgaattttatttgctggaattttgttgagttttgcatctgtgttcataagggataattaatctgtagttttctgtagtgtctttttctggctttgatatacggtaatgctgagattgtggaatgagtttggaactgatctctccttttcaattttttggaagagtttgaaaaagattttcagtctttcaaaatgtttggtagaattaactactgaagccatcaggtcaagggcttttctttgtcagcaggtttttgatttttgatttgatttccttataagttatggatcaattcaatttttctattcttggtaatcaagtcttgctaggttttttatacctagaaatttgtccatttcatctagattgttcattttgttgtcacacagttgttcacagtacactctttaaaacattttatttcttagaatcaggcaggcagatcatgagatcaggaaattgagaccattctggccaatatggtgaaaccctgtctctactaaaaatacaaaaatcagctgggcatggtggtgcatgcttctaatcccagctacttgagaggctgaggcaggagaatcgcttgaacctgggaggcggaggttgcagtgagctgagatcgggccactgcactccggcctggtgacagagcgagactctgtcaaaaaaaaaaaaaaaaaaagaagaattagtagtaatgtccccatc

SEQ ID NO: 23251 - DNA, 1190 bp, Homo sapiens
ccacctcctgggttcaagcgattcttatgcctcagcctcccaagtatctgggactacaggcatgcgccaccacgcccagctgatttttgtatttttagtagagacggggtttcaccatgttgaccaggatggtctcaatctcttgacctcgttatccggctgcctcctcctcccaaagtgctgggattacaggcgtgagccaccatgcctggccacatctacttttttaaatgtgtcattatatttgtgatattgtcatgatgttttctacttatattttattcaaaaattttatactttaagttcttacctttaggtctttgatgcatttttatttgtttatggtgtagggtaaatgttcaacttcatccttttgcttgtggatatccattttttcccagcaccaattgttataaagacagtcctttgcccattgaacggtctttgtatccccatcaaaaattatttgaccatatgctgctttatactgttccagtgtccatatgtgtgtctctttgccagtaccacactattttggaactttgtattaagctttggaatgaataagtgtacattttgtaacactggacttctttttcaagataattttgactcattggggtcccttgagattccatatgaaatttaggtaggatttttctatttctgcaaaatagaattttttgctttttttgttactcccgacgtattttattcttttcagtgctattgtaaatgtgcttgtttgcttagttttgttttctaattattcatcattactgtatagaaacacaagtgatatttgcatgttaattttgtatgctgctactatgctgaatttattagttgtaatactttttgtgtggatctgtgaaatctctagagctttccacataaaattatattatctgtaggctagagtaattttacctctacatttccaatttggatagtttgtttctttttaattcttaatttgactagaacttccaacactatgtggaatagaaatagcaaaagcagacacctttgccttgttcctgagcttagagcagaagctttttgtctttcaccctggagtacattgtttgatgtggttttttaatgtgtggatttcacaatggtagtattttagttttaaaattcctacttttttgagtgttttcaccctgaaaagattttgaatttca

SEQ ID NO: 23252 - DNA, 1073 bp, Homo sapiens
gtggatggatttctgcaaaaggggaccaagtacttggtggtttattgtagaaggaacctcctctgaaaaaacctcacagggaaattctcaacttaaatggtagctaacagaggcgccaggtgcttaaggtgtgcattggtgaggtaggcactattctgatgaatggttgatggtgagaaaactgagactcgggagttcatgtaaaatccccatagctacatgtctcgggggcggaactgagatttaacttatggcagcctgactctagaaactgagatttacccaacatgtgtgttgcctccctttctagaaaaggagttccacccaaagggaataagtcacatctacttttctaacagaaatcccagtgtcaaaatagctatgctggtgttcccaatccgcttttcaaaagaggaacagccaccattaacctttctggtcagtgaatgaaagataaggaagtgagtgaaagcaaagtgttagcaaggcccgactgtgagccggacactgttacacactaaatgcatcatctcattcaaaggagagaacatcttcattaacaaatgtgacaccgtcttcattaacaaatgtgacacccttgcctgctgagcaccccctcccgccctgacccccagctcctcagtcagattctgtctgccacactccagtgaaactgctcatgtcaaagtcaccaggggcttccacgttgctgcttccagtgaaccatttaggacttcatcttgtttgatctctcatcagcatggcacagttgtccatgttttccttctgaaaagtgctgctcttttgacctttttttttcctctctttttttgagatggagtctcactctgtcgcccaggctggagtgcaatggtgcaaacttggctcgctgcaacctccgcctcccaggttcaagtgattctcccacctcagcctcacgagtagctgggattataggcacctgccaccacacctggctaatttttgtatttttagtagagatggggtttcatcatgttggcgaggctggtctcaaactcctgacttcaggtgatctgcccgccttgcctccc

SEQ ID NO: 23253 - DNA, 1066 bp, Homo sapiens
tttctctgtacatcatagtttatcatttgactattaatgtgcagtagtacagacttttttggtaggagtctcctcacctacaaaggttcattggaacaggagctagatcttacgtatctttcactctcccacacacccagtagaatgccttctacagagcactgtccagatatgccactggggaatgctcagacattctcataagaattttaagagacttagacattaaggaacgcttctgaagtagactctaagcatataggcaaagctgtattactcccattttttacatgagaaaatattcacagatgagttttcacatgttcaagatcatatgactagtaggtgggagaggtcaggaaaaaaaaattcacccaactctaaatattcagagttctgggctttctgcaaatatggccaccaggcaataatgtaacaactgtgaggaaactagatcaaggattaccaagcaacatttcttaacttgaccacagatttttaggaaggggattgggaggacagagagaattttagaggactttaggaaacacttcactctgccatttaagcagaggtcttcccttggagagttgtctggccacagtatggtatgtgtagtgaagcagtaagagagagagcggagagttagtttgagattgggctacagagagtgttgaatacgatgcaaaatacattgaacacaaggcaatgacgttgaaagtattctaaagagactttattgggtgcacagtgacttggcagggcgagaagaagaggtaaagtcttaattaggaggcgtcactgtggtctacgggtgagtcagaaaggacccaagctcgagaacacagccgcagtgaggccacaggccagcaattgtgctggagagtctaaggcatcaagtcaatcatcattttctaagaaatgtttcacttttaatctcaaaagtcactcaggccttgtcatatctatgttactacactggtgtttttgtttttgtgtgtgtgtgtttttttcttcgggtgtggctttttaaaaattaccatttaatttcttaagaagtagtccc

SEQ ID NO: 23254 - DNA, 1048 bp, Homo sapiens
ggagatgggatttgtacgagtgacggtggaaccccgctcttgacagtttgggaggactcgacacactttgcccatctcctcaccccactcccaggatcatcttctgggctttccaatttgggggttggtgtgaggatttacaagccaaggtaggccgcaggttctctcgcttgtttgacaccttgggcgtttagccaggaaaggactgctcatatacgtgggggtccatgaattaattttacctctagagaaacatcagaattgggcagtagggctccaggcacgaatgcaaacctcacgtggcacaataacaaccccatgaaccaggcagcatggcggatatggtttgttacggtctccccctacttggaaattcagggccattttgtcctgaggttaccaaacctttgcctggctaaagattgggccactgtccggaagaacctttcaccccagcccagaatggccctggtttccctgagataagacaggaagttgtaaagtcgcactccgcgtctgtcgtagtgctcatgttctgcggttgctgttgcgagagagtgaatggaggaaggcattggtcgcccaagtcaggcctttaaatgggtgcagggaggaggggggatgttgccaagggagggaggttttaatcacaggtgcgcgggtgaccctgacctcaccccgcccaagccccggcttgctgcagtcctactgtatatcttccgaccatcacatgtacgcagtatcttaaaataacatttgtgataaatgtgcaatttaactaatttatggtgctatgatgtgctcagggctacatgcaagatgaaaatcttaaatggagcttgaacagctcacttcacaacaagaaatcaatatgccacatcttagcaattcgctgcagtcaacatttagcaaaaatatcagtgatgtatctttaagttttaggcagcaagaattctataattaaccaaaatccttacatgtaagttagagagggttggttatgatgaggacccaatctccctggcatctctattctattttcattctg

SEQ ID NO: 23255 - DNA, 1160 bp, Homo sapiens
ttctgagagtcctcaactgtgaaaggcaaattgtaagagtgagcacttcggactgggcgccgtgactcaagcctgtaatcccaacactttgggaggccgaggcaggcagatcacgaggtcagaagttcgagaccagcttgaccaacatggtgaaaccccgtctctactaaaaatacaaaaattagctgggcgtggtggtgcgcgcctgtaatcccagctactcaggaggctgaggcaaaacaatcacttgaacccgggaggcggaggttgcagtgagccaagatggcactattgcactccaggctggatgacagagcaagactccatctcaaaaaaaaaaaatgaaaataaaaaaaagagtgaggacttcatgaagtccttgtggagggtgtgtgggttagtgctgggaaggccctggaatagcacttggccctagtcaggatccatgtcaccaaatggtagctagcatttattttgaataaaataaaatctttgcaaaaaaatccgtctttctgagacccatgtgcttctgctggcaccagccgatggctcatcccatgacagtgcagccagcgggtgccatctttttgccagtgccctttgtcacttgtgggctttggggttttagaaatctggcctgtgaggccttgacaccttgctgggaagaaatgccaacagaggagagaggaagatggggcggggtcggggcatgagagcctgtaccagcacccaccagactcctgagtgattctgtgcctcatgcttgagtgattccgtccactcagccaccccaccgagatggtcaggtgccagatgggccctgtgcaggccccgtgcaggtcaagtggtccatgccatcatgagctgagccctccaccttggtgactgtgggtgcctatgtggaccaagtgcgtctccggtgagccaggtctatgccatctcagaggctgccgtctctgtcctgtgttgcagcacgaccaatgtcgcagtgcagacccgggcgtattccttagcgtagtggagaaaggtccctttacaacactcaggcctgcgggtcagcagctccaccatcttcagtctcttcccagagagatggggggcgatttgccggagtgaaggcttggctgttaggaatctgatgttgtcaaccccacccatta

SEQ ID NO: 23256 - DNA, 1048 bp, Homo sapiens
atgttttctttctttggcttacctctaatgcattatgtatcctggaatgatacgaagttctgtaattaattctgttagatgtaattgctataatcactttgatgttacacataataaaggtaatatggtaagtacataaaaaatgtaaacaccttattgtaatactcctgctaaaatgccttctcatcaagtctggtttatagacaagtgttcctatttttggtcataggtgacagtttattcgagctgtgttcattgatattctaaaggagaggcatttattggaaaagatgggccttggtttggagggatctccaagctggttgcctaggaatcttaatgcccgttttcttaaagatgtggctaattatgaaaaggtgaccattgtcttctgagtagaccagagaggtaaacacttcagaagtagccgtggaaccagggaagaatgtggcctaggagtgagtgaggagccaggagaatgctagcagaggattcggatcaaaggagctgttctgtaggttttcttatggtgtgggactgtgggaagtgctgtgtgtgtgtgtgtgtgtgtgtgtgtgtgtgtgtgtgtgtcagagagagagagagagagagtgagtgcatgctagcaggtgaacagagaaggccacctttctataacagtgcaataagggaaataacatgcaggatatctactttattattttcctacacctttcatgggggtgggggctacagatggtgcctcactgttgcatgacatgtccgggagtggctgatgttgcctgttggactgaaacctgtgtggtatttgagacacactcccaccccatcaggcctctgtgcacctaccctggatccagaccaccacaggacatcagggaagtttgcctgagaccccaagtgcgcaatacttgtgggatgcttctgaaacacatgtacattatgtacattactctttgccaatgcatcttgcaagaggctagaatgtggtggggtaggaaacttgccatttaattttaccttcctggagatcctagagtcaaactag

SEQ ID NO: 23257 - DNA, 1096 bp, Homo sapiens
atctataattccagcactgtgagaggctgaggtgggaggattttttgagcccaggagtttgagtcctgcctgggcaacagagtgagaccctgtctctacaggaaaaaaaaaaaattaaaaaaaaaaaccatccaggcatggtggtgcatgcttgtagtcccagctgctcgggaggctgaggtgggaggatcgcttaagcccaggagttcaaggctgcagtgagctattattgcatcactgcactgcaacctgaataacagagagagatcctgtctcaaaaaagaaaaagaaaaaaaaaatgaatgagaatgaggtgtcctgatcagatactgtgacacttctgagttctgtctgttactgcacatttgcttggtgaggaggtcgaggagagcacggaccttgtcgaggcttggtacatccatgagcgatgccatttccccatctctttgcagtgtgtgaaggctctggtttactacgacgtggagtcgtgcagacttgacattggcaatgagaaaggagacacccctctacacattgctgcccgctggggctaccaaggcgtcatagagacattgctgcagaacggagcgtccaccgagatccagaacagactgaaggagacgcccctcaagtgtgcattaaactcaaaggtagctcttcccatctctgaggggcaagatgacttcgaaagaagatcgatgtccgtagcttaggtcttggcctactagacaaattgtgcattattgcctgagggcagaacttggcttgcaccctttctgccgcatgtgggacgtcatcattaatgggttttactgatatattatttttggtttgagtgggcgtttttctcagggttgttccaggaactcctgcaggcagagtttgttctggctgccgagtgctattgatttattggcaaatggagtgggtagaaacgaggctccgcaggggcagggactggggagggagcaggatgtgttggaactcttttttcccggtgcttcaccttcaatgcctagagtctttattgagactcggccagttctggacatcgagtgtggtttctttcatacataatttgttaatgagctcacct

SEQ ID NO: 23258 - DNA, 1033 bp, Homo sapiens
tagccgggtgtggtggcggacgcctgtagtcccagctacttgggagactgaggcaggagaatcgtgtgaatccgggaggcggaacttgcagtgagccgagatcacgccactgcactccagcctgggcaacagagcgagatctgtctcaaaaaaaaagaagttcctgcttcccagaggccacatgaaggccctccagccacggcccttccttgaatgggatggtgtgagtccttcatgctgcagctggagggggggccatctctgacttcaagcattaaatacccgaggactggctctttagatcccattgcctgtggcccactttggcctctaggatcttctttctttgtctgccaactgcagtggtgaggccacttgggagccttgaggtcatttcttctagcctaacatctaagggcctccctttattttaattttttattaaaatttcagattattatgtttaatttcaaacaaagaataatacaatggaccaggcacagtggctcatgactgtcatcccagcactttgggaggccaaggtggaaggatcgcttgaggccagggattcaagaccagcttggacaaaatagtgagatctcatctctacttaaaaaaaaaatgctggtcatggttgtgtgcacctgttgtcccagttacttacgaggctgaggcaggaggatggcttgagcccagaggttgagggtgcagtgagctatgattgcgccactgcactccagcctcggtgagagagcaagacactgtctccaaaaaaaaaaaataaataaaagcgtaaagaaaagaatagaaggaaaccatcatccatgtgaagtgttcttttttttttttttttttttaaagacagagtcttgctctgcagcccaggctggagtagtgcaatcatgtgatctcaactcactgcaacctctgcctcctgggctgaagcacaacctcccgagtagctgggattacaggcacatgccaccatacctggctaatttttgtgtttttagtagagacagagtttcaccat

SEQ ID NO: 23259 - DNA, 1034 bp, Homo sapiens
cattgcttccttttagattccagagtgtttctgtaaccattcagcacctgaatcacagtatttcatcttgtaaatcaattgcaggcgtcagcttcagactcaagcaaaactggttttagaggaaaacaagttgttgctggagcagttggagattcagcaaaggaaagccaaggacagccaccaggagcgcctccaagaaggtgaggtccttccagtgaggactggtcatgcattgatgtcactattgtcattttacccttctatctctctcctgccgggggccccagttgaaaatgagagaagtcatgttttgcatttttgactggaatgtggctgtttataacctttccacgtcactaccctcaatgcatagattgctttttcagactccacagtgtctctcatcatcccatgggtttgtaaatcactcgtaggtaatagtgctagactcagcagaactggttttggggtaaaatagtaccttagaaatgggaatgatcacgtgaggtaaacatctgaaataacacagggtctcttcccagatgtttgttggatgcgtaagcagaaccattcactttctaaacagttcccctgtgtccttccttccttcagagctgcgggcctgggaggcgacatcactgcaggttagatttccatcaaacaccttccgagagtgtccctcttcccatctcttcccatgcattcccccaacccctaggagcctcatagtctgtgacagtgcacaactgtaagggggccaggttaagagtcatcgcttctgctttaaaaccgtaattcatgagtacaaaagatagtggcattttttccctttgctttactgatttttctttcttagtgaagaatggcataggctgggaagctgaaacacaagccatcttgcatgaggctgtggcaccctgagaagcagatggaggttttccctctccagctgcttttggaatggcagccccttccacagcatggcaggtccatgaacagcccctgctgttgctgcagttgcagggctagcactt

SEQ ID NO: 23260 - DNA, 1042 bp, Homo sapiens
gtggctctcacctgtaatccagcactttgggaggctgaggcaggcggatcatttgaggtcaggagttcaagattagcctggccaacatggtgaaaacccatctctactaaaaatacaaaaattagcgggcgtggtggtgggcacctgtaatcccagctacacgggaggttgaggtgggataatcgcttaaacccgagaggcagaggttgcagtgagccaagattgtgccactgcactccagcctgggcgacaaagctagactctgcctcaaaaaaacataattttttttttttggtagagatggggtctgggtatgctgcccaggctggtcttaaaccttggctcaagcaatcctctcaccttggcctccagagtgttgggattacaggtgtgagccactgcatctggcttgagtttttatttaaagccccaaacattaatgagtccctgctgtgtgctgatacccacaactgacagcttatggccacacggtctgtaggatagacaagcccataaataattctgtacacaatggtaaaacaagaactgctgttgatgtgtgtaccagaagggcagtgacgtcagcctggagagttggcctgggcctggcagggagtaaggaaagaattctgggtgcagaagacagcaaataccaaggcctaaaaaagaatgaattatttgctgtttgggaaatggaagcccacgctgagtgctgaagcacagggactctgcgcaggaagaggaggggaagcaagaaatgaatttgggtccttgtgatggcagtggctgctgccatcacgctgtgtggctagggctgcacacttcatggagccggtggaagccccgtccctcatgagttgggactggagccgcaaaccgctgctgcagacccaggccttctgctctatggagcaggcaggagccccaccctcttgggcagggctacagccacccaaactgcagctgtggatccgagcctctctgctcctgggggagccgggaacaggcagaatttgcccttccagatgcagctgcagccgcg

SEQ ID NO: 23261 - DNA, 1053 bp, Homo sapiens
gttctgatttttttagttactaacatttcacaaagcagaacttaaaaagctgtcaagttatcttagtattttctaagacagatggtatctttgtgcttattttttgtttttgtctttttttcaagacagggtctcgctttgtcacccaggcaggaggacagtggcgcaattgtggctcatggcagcctcaaccttccgggctcaagcaatcctcccacctcaccctcctgagtagctgggactacaggcatgagccaccatgcctggctaatttttttgatttttttgtagagatggggtcttgccatgttgcccaggctgatctcgaaatcctggactcaagcaatcctcccacctcagcctcccaaagtgctgggactacaggtgtgagccactgtgcctggcctgtgtctattttttgaatgggcaatttgtaccttttgatccccagcccctgcttccctcactagatgcagctgctgccatcattttcttgtatccttccattgttgggcctttcatatacaaacacagcctgttctgcctcatgcatgttgagttttcaactttaaattttttttttttttttttgagatggagtctcactctgtcatccaggctggagtgcagtggtgcaatctcggcccattgcaacctccacctcctgggttcaagcgattctcgtgcctcagtctcctgagtagttgggattacaggtgtgtgccaccacacccagctaatttttgtatttttagtagagacagggcttcaccatgtcggccaggatggtctggatctcctgaccttgtgattcaccccccttggcctcccaaagtgctgggattacaggtgtgagccactatgcccggccgttgagttttcaactttaagtgggaacttcagacttcatactttctgtgtgcagaagacatatgcagtgattataaacaaactgtacatctgccaaaaaaaaaggccggggggagggaggaacaaaggaaaggaggaaggaactgttgcgcagttatttatttacattggaaacagccctcg

SEQ ID NO: 23262 - DNA, 1050 bp, Homo sapiens
ttaagacagggtcttactctgtcacccaggcccgagtgcagtggcatgccctcagctcactacaacctccgcttcgcaggctccagtgattctcctgccttggccccccgaatagctgggactacaggcatgcgccaccataccccactaatattttgtatttttagtagagatggggtttgggcacgttgcccaggctggtctcaaactcctgagctcaggcaatgtgcccatctcagcctcccaaattgctggcattacaggcatgagccaccgtgcccagccaagattttcaattagagaaatggaaagagatatcttccttaaacatgtgcctacaagatggctattatcatttctgaccatagaaaagatgtcaaaatgggccgggcacagtggctcatgcctgtaatcctagcacattgggaggccaacgcggtcgaatcacttaaggccaggagtttgagaccagcctgggcaacatgggaaaaccccgcctccgctaaaaatacaaaaaattagccaggcatgatcgcgggcaccttgtaatcccagctactcgggaggctaaggcgggaggatcgcctaagcccgggaggttcaggctgcagtgagctgagatcatgccactgcactccagcctgggcgatacagcaagaccctgtctctttaaaacataaataaatgggctgggcgcagtggctcacgcctgtaatcccagcactttgggaggccaaggtgggtggatcacctgaggtcgagagttcaagaccagcctgaccaacatggagaaaccccgtctgtactaaaaatacaaaattagccaggcgtggtggtgcatgcctgtaatcccagctactcgggaggctgaggcaggaaaatcacttgaacccgggaggcggaggttgcggtgagccaagattgtgcaattgcactccagcctgggcaacaagagagaaactccatctcaaaaataaaataaaataaaataaataaataatgcacattttagatagatatagcctataccgtgaatttatagtgcaaagg

SEQ ID NO: 23263 - DNA, 1050 bp, Homo sapiens
ctcgccgtctctcgggtgtcaaactgaccgtgtccttggggtaaactcctgcaaatggaattgctggaaaaatgttgatgcccaaagcccagtgccatctagaaaagttgttctcccttcacggctggggctgggttagtgtctggtgagcagataccatgtccttcccggggatgttctcatttaatcccgtgagggggagcggagaggagtgtggcatcctctctgcattatagagaccccacagtagacagatgggtcttagaggagccaggtggcctctctccagaagccatgttctcagccagcgtgcaggacacccctcctcccaaaccatgagtgccggtgtgcccacccaggcctcaagattaattgtgttatttccattattcacctttatcattctgattagggaaaagtaataccccgtctttatttttgctgatttgattactgacgagcttaaacttctcttgtaagtatttcttgggcatttatctttgtgggttttcagtcctttgcccatttgcaatcgggacatttgtgggtgacttattgctctgtaattgggctctttgtactattgttctgtgtgttggaaatatttttcccaatttgatgtacagaaattgtaaatatcagttgtcatgttggtcctttcctgtatagtttatgcctttgcgaaattgctttttctactacctcaatataatccagttatcagcatgttttttctatctttatagtctgatgactttcttttaaataacagtttttgcataattatgaaatatttcaaacactgctgtgtatagtttaatagatatctgtgtatccacatggtttcgtcttttatatttaatacgttaattgagctaaactgcatttaagaataatatataaacaaggattctggcttttctgcccccgcgtaattactaagtgacctgttgtctttggagtaatgtctttgccccccattgtaaaattccatttttgctgtattctaaattcccaggtgtattagtcagtatagggtagcctttgggg

SEQ ID NO: 23264 - DNA, 1050 bp, Homo sapiens
atgctaagactgatcactgggttacattttcccccttgacctggagagtaatctacctggtgttactttggtaccatgtgaataaatgcagccttcatacatatatctgttttgttttgttgttcctagagttttaatttgcctttcgtctttcttattgagagaagaaacatatcttcttcaccatatcactaagagctttaagcttcctattgattttatctgcagaaaggaatccatgccattctttttgtggatgtttttctcagagccacatacttggagttctaatttctactgattgctttctaggcttgctgtccagtgtctaattatacttttggattgactccagtttttaaaaatatcccattatatcacctccttctctttattggcttgtgctttctccctctccccacccttctacccttctctctctgctggagtacatccttaagtacttccccaatttctgagtttttgaatgtctaaaaaggactagtttccttctgtatttggttagtagtttgtctgggtgtagggttctataatttttgcatggagtgcaacaaaaagggggtgagtgtaacagagtgggtcatgcgctctttgacattgtctcagttaagtctcagtgtcgctatctgtaaaatgggaaggtagtacctgttctaggttgggttccatgggaagctgagtctgtgagccaagtaggcaggaagcgtattgaggagtgctctcaggatcagcgtgtgtgtcagagtaagggagcaggcttgggctgcgatgctgtcacaagggcatctcagctgctcccatggggagttttggtgctggagtggcccccagagatgtccccagctgaagcgagggagctgagtcttggctccctccatcgaatcaaggagaccagtagaggggtgtggcctcaggggatgagttgggcagtgcacccagcatccactgcaacttacaggacccaccatgcggcgggtccccagtaaatggcaatttaaagtgaagggaagctgcgtttgcctgctgaga

SEQ ID NO: 23265 - DNA, 1050 bp, Homo sapiens
gtccctggctaggtttcaggcacactcagctcgcagctgagctaaaccatcattttcttcatggctttggtttcttggagaggacttattgattgattccccagaggatatgtaattccaaccagctcttttctttctgtccttccccttgtgggattttatcctttgcatcactgggtcatggagtgtgggagggatagttgttgcgggttcagtggtgttgaattcccgcccacctggctccaatagaatcattccctgcacatccatctccaggagagatggaattcctggccctttaaatgagttttgttcaacacggtgccactttgatgcttagaggctgattttggaaatccttcatccttgtctcactactattttaatcagtggagtgtttagatctcagttaattgatatcttaattcagggtttaatgctcagaggcagtgctgtgacttgtgaatgtttaaggaaaaaaataaggttgcacaagtacatctttgcctcatctactttttgtgatttttggtctgtagcaggagagtaggcctacatggggtaggagactttgcctcccagcctccctgtctgtttgagcagcctccaggcatgttgatgcccacagcgtggccatgagctggggactctctgtgaggctgtgcagtgcccacatttcctggcacgttttttcctggccaaagagcctgagctgacttctgccccaagttctctttttagagacagggtcttatgctcttgcccaggctggaatgcagtgttgtaatcatggctcactacaacctcggactcccaggctcaggtcatcctcccgcctcagcctcccgagtagctgagactacaggtgcacactcccatgcctagctgatttttttttttttttttgagatggagttttgttcttgttgcccaggctggagtgcaatggctcaatcttggctcactgcaacttccgcctcccaggttcaagcgactcttctgcctcagcctcccgagtagctgggattacaggcatgtgccaccatgccc

SEQ ID NO: 23266 - DNA, 1031 bp, Homo sapiens
tgagccatggatattttttgatttctcatttaattctactgtgattaatgaatgttctctgcatctcagccctttaaaatatgttgaaacttccagcacgtgaccattatgataaatgttcacatacacttaaagaaagcatgtattctgcagttatgggccatagtgttctgtatatgtcaattacgtcaagttggttaatttcttgtttatatcttctatatctttcctgatttccctgcttgcttattctgtcactactactttgttttatggctgaaaaatatttttttctatggatacgtaccacatttcgtttgtccattcatcagttggtggacacctgggttgcttccaacttttggctgttctgagtaatgctgctatgagcatagatgtcagacttcttgtgtgaacatatgctttcagttcccttgggtatatacctagaagtggaattgcagggtcgtctggatgcctttcatgtcttttcttgcctgtttgccttggctagaacctccagtacagagttgaatagaattggagacagcagacatgcttgcattgttcctcatcttaggggaaagcttttagtcttttaccattcagtatgctatgatgttagttgagggagttttttgtagatgctctttatcaagttgaagaagttcccttccctccctagttcattgagtatttattatgaaaaggtgtttgattttatcagtttatttttctccatctatttatacaagcatatggttttattatgtgttctattaatatgattgatgtgttacattgatttctttttgtatgttgaaggaatcttgtattcctgggaaaaaatcccacttggtcatgatgtatatatatcctttttatatgttgctggattctgtttgctagtgttttgttgaaaaatttttgtctctattcgcaaggaatttgggtgtgtaattttgttttcttaaggtgtctttgtctagcttagcatcaaggtaatactgaccttgtagagtggttgaaaa

SEQ ID NO: 23267 - DNA, 1050 bp, Homo sapiens
tgaacctggaaggtggaggttgcggtgagccaagatcacaccattgcactccagcctggcagcctgggcaacaagagcaaaactccgtctcaaaaaataaatgaataaataaaattttaagatcgtaggtagaatttgtcaatgagaaaattattgaaagaagccagactcaaaaagttacatcttacatgatttcattgataagcagttctggaaaaggcaaagccaccggaatgaagaacaagctggtggccactcaggattaagggcaaggagaccatctgactacaaaagcacagcacaaggagtatctgaagttaggaagcaacatctctactgtagtggaagtgcctatgactccagccatccatacaaaacctacataagacagagttctcaaaactcatggaaatccacatcaaaaagattgagtttgctgcatgtaaattttttaacatttaagactcaaaaagctatgaagtattgatacacacaagaccaatgaagccaaaagattataagatctgtgaaggaactcagaccaaaaatagtgcatgttgtatgattccatgtacatgaagtgctagaaaatgcaaactaatctatactgacagaaagcacatcagtggttgcctagaaagaaggaaggggacaaagaggcaggagacaggcacttaaagaggtacaaggaaactttcataagagatgaatctgttcatattttgattgtggtggtaattttctggtttttcacaactgtcaaaagttacaagttgtacattttagatatacatgcttcttatatgtcatttatacttcattaaagctgttataataaaaataaaaatatacaagatataaaaatacaattaggaacaacttaatagaataaggcatgtaataatggaggaatatgcactttttaactgcatggggatcatttaaaaaattgaccatgtattagagtataaagtagatctcaacaaatttcaaaggattttaaaatagaggatataatttgatctcaatgcaattttcataaaaatcaat

SEQ ID NO: 23268 - DNA, 1775 bp, Homo sapiens
gtgtttgctcttgcttctccagttcttttaattgtgatgttagggtgtcaattttgatctttcctgctttctcttgtgggcatttagtgctataaatttccctctacacactgcattgaatgtgtcccagagattctggtatgttgtgtctttgttctcgttggtttcaaagaacatctttatttctgccttcattttgttatgtacccagtagtcattcaggaggaagttgttcagtttccatgtagttgagcggttttaagtgaggatcttgatcctgagttctagtttgattgcactgtggtctgagagacagtttgttataatttctgttcttttacatttgcagaggagtgctttacttccaattatgtggtcaattttggaagaagtgcgatgtggtgctgagaagaatgtatattctgttgatttggggtggagagttctgtagatgtctattaggtccacttggtgcagagcggagttgaattcctggatatccttgttaactttctgtctcgttgatctgtctaatgttgacagtgggatgtttgttaaagtctcccattattattgtatgggagtccaagtctctttgtaggtgtctaaggacttgctttatgaatctgggtgctcctgtattaggtgcatatatatttaggatagttagctcttcttgttgaattgatccctttaccattatgtaatggccttctttgtctcttttgatctttgttggtttaaagtctgttttatccgagactaggattgcaacccctgcttttttgttttgttttgttttccatttgcttggcggatcttcctccatccctttattttgagactatgtgtgtctctgcacatgagatgggtctcctgaatacagcacaatgatgggtcttgactctttatccaatttgccagtctgtgtcttttaactggagcatttagcccatttacatttaaggttaatattgttatgtgtgaatttgaccctgtcattatgatgttagctggttattttgatcattagttgatgcagtttcttcctatcattgatggtctttacaatttggcgtgtttttgcagtggctggtaccagttgttcctttccatgtttagtgcttccttcaggagctcttgtagggcaggcctggtggtgacaaaatctctcagcatttgcttgtctgtaaaggattttatttctccttcacgtatgaaggttagtttggctggatgtaaaattctgggttgaaaattcttttctttaggaatgttgaatattggcccccactctcttttggcatgtagagtttctgcggagagattagctgttagtctgatgggcttccccttgtgggtaacccgacctttctctctggctacccttaacattttttccttcatttcaactttggtgaatctgacaattatgtgtcttggagttgctcttctcgaggagtatctttgtggtattctctgtgtttcctgagtttgaatgttggcctgccttgctagattggggaagttctcctggataatatcctgcagattgttttccaacttggttccattctccccatcactttcaggtacaccaatcagacatagatttggtcttttcacatggtcccatatttcttggaggctttgttcgtttctttttattcttttttctctaaacttctcttctcatttcatttcatttatttgatcttctgtcactgataccctttcttccagttgatcgaatcggctactgaggcttgtgcttt

SEQ ID NO: 23269 - DNA, 1045 bp, Homo sapiens
tatctcatgttacttaattaaagttttgtacttttaggtttataatccattttgaggtagttcttgaatattgtataccatgtgaggtttggggtcacagctttacagtgttgttttttggtttttgttttaatacagatgtccagttcattcaacaacatttctttaaaacacgatcttcagtgagttgcctttgcacctttctttaaaattatttgatcttatatttgttggtctatttctgcacttccttaatctgtatttttgctaatattttaaagtcttatttaacataattttacactatgtctttaaatcaggcaatgtattcctttaactttgtacttcttttcaaattttttctgtttttattttgttttgtttttggcttttctaagttcttcgcatttccatatgaattttagaatttagttgtcattttctaataaaagtattgtggattttgattgggattgcattgaatatatgtatatcaatttgaagagaattttaacgttaacaatattgagtgttgtaacccataaacgtggcatatctctccctttatttagatctttaatttttctccgcaatcttttatagtttcagtgtatatatcctgcaaatcttatatgtctcaagtatatgttgtatgctcttgtaaaaagtactcttaaatttcaattttaaattagtcattgttagtacatagaaatacaatttttatagaaatattcattatctaccctgtaaaccagaggtgtccaatcttttggcttccctggcccacagtggaagaagaatagtcttgggccacagataaaatatactaagactaacgatagaatgatgagctaaaaaaaaaaaattgtaaaaaaaaaaaactcataatgttctaagaaagtttacaaatttctctttttttattacactttaagttttagggtacatgtgcacaacgtgcaggtttgttacatatgtatacatgtgccatgttggtgtgctgcacccgttaactcgtcatttaacattaggtatatctact

SEQ ID NO: 23270 - DNA, 1043 bp, Homo sapiens
ttttttttgaagggtttttttgtatctctatctccttcagttctgctctgatcttagttatttcttgcattctgctagtctttgaatttgtttgctcttgaatctctcgttcttttaattgtgatgttagggtgtcgattttagatctctcctcctttctcttgtgggcatttagtgctataaatttccctctacacactgctttaaatgtgtcccagagattctggtatgttgtctctttgttctcattggtttcaaagaagatctttatttttgccttaattttgttatttacccagtagtcattcagtagcaggttgttcagtttccatgtatttgtgcagttttgagtgagtttcttaatcctgagttctaatttgattgcactttggtctgagagacagtttgttgtgatttctgttcttttacctttgctgaggagtgttttgcttccaattatgtggtcaattttagaataagtgcgatgtggtgctgagaagaatgtatattctgttgatttggagtgtagatttctgtagatgtctattaggtccgcttggtgcagagctgagttcaagtcctggatatccttgttaatcttctctccattgatctaatactgacagtggggtgttaaagtctcccattattatggtgtgggagtctaagtctctttgtaggtctctaaggacttgctttatgagtctgggtgctcctgcattgggtgcatatatatttaggatagttagctcttcttgttgaattgatccctttaccattatgtagtggccttctttgtctcttttgatctttgttggtttaaagtgtgttttatcagagactaggattgcaacccctgcttttttttgctttccatttgcttggtagatcttcctccatccctttattttgagcctatgtgcatcttttcacatgagatgggtctcctgaatacagcacactgatgggtcttgactctttatccaatttgccagtctatgttttaattggagcatttagcccatttacatttaaggttaatg

SEQ ID NO: 23271 - DNA, 1039 bp, Homo sapiens
caggcacataccactgtgcctggctaatttttgtattttcagtagagacggatttcaccatgttgcccaggctggtcttgaactcctgtgccttggcctcccaatgtgctaaaggagttctttatattttcttgataagagcccttgtttggttatttgtgggaaatgtgttccccaacactgtggatcagctttgtattttccttatggtttttaatgagcagaagtttaaagtttaatataattaaatttatcaatgttatactttatgcttcatgttgtgtgtgtgtgtgtgtgtgtgtgttgtttaaaaaacatttttatctctttattgttatttttaatatggttttattcctttggaaaaaagattctcatgtcatggtcataaagatattcttctacataaagatttgtaaagtctttattgttttggattgcccattgaggtctctaaagtacatggaatggacttttacgtgaagtgtgggtaagaactccctttctttttaattatatagattccctgctgtcccagtttaggacagggttgtgtaatcttttggcttccacgggccacactgaaagaagaagaattgttttgggtcacacataaaatacactaacatggcccggcgcggtggctcacacctgtaatcccagcactttgggaggccaaggcaggtggattacgagatcaagagattaagaccattctggccaacatggtgaaagctcctctccactaaaaatacaaaaaaattagcttggagtggtggcacacacatgtagtcctagctacttgggaggctgaggcaggagaattgcttgaacctgggaggcagaggttacgatgagccgagatcaggccactgcactccagcctggtgacagagcaagactccatctcaaaaaaattaaattaaattaaaaaaaaatacactaacactaacaatagctaatgagctaaaaaaaaaaatcacagaaaaactcataatgtttttaaaaagtttacaaatttgtgttgggccacattcaa

SEQ ID NO: 23272 - DNA, 1201 bp, Homo sapiens
ccaacatggcaaaaccccgtctctactaaaaatacaaaaattagtcaggcgtggtggcaggcgcctatatcccagctactcgggaggctgaggcaggagaatagcttaaacccggggggcggaggttgcagtgagcagagatcacgccactttactccagcctgggcgacagagtgaaactgtctccaaaaaaaaaaaaaaatttgcttaagtttaaggccaggtgtggtagttcatgcctgtaatcccatcactttgggagcctgaggcaggatcacttgaggtcaagagttcaagaccagcctgggcaacatagcaagaccctgtctctacagaaaatttttaaaaattggccagcatggtggcacatgcctgtaatcccagcactttggggaggctgacttgggaggatcacctgaggccaggagtttgagatcaggctgggcaacatactgagaccccgtctctacaaaaaacaaaaatcaaaaaattagctgggcatggtggtgtgtgcctacagtcccagctgctccagaggctgaggcgggaggactgcttgaacccgggagtttgaggctgcagagagctatgatcgcactgcactgcctggatgacagaatgagaccctttctctaaaacaaaaaaaattttttttgcttaaatcatgtagtgttgtaaaccttgtttggtttcttaactttttcacttaacatttttttttcttttttttttgagacagagtctcactctgtcgcccaggctggagtgcagtggcgtgatctcagctcactgcaacctccacttcttgggtttaagcgattctcatgcctcagtctcctgagtagctgggattacaggcgatcaccaccatgcccagctaatttttgtatttttagtagagaactgggttttaccatgttggccaggctgatctggaactcctgacctcaagtgatccactcgtcttggcctcccaaagtgctgggattacaggcgtaatcactgcgcctagccaagatttggtttttttagagggctttacttccatgtgactagtatcttgtactgttggacatttttaccatgtgtatggattatacttacaaaagaaaagaacaacataaataaaaataaactaaaagttggaggaagtaaacgacaatctaaacagcagaccctcctcagcctactttctccccac

SEQ ID NO: 23273 - DNA, 1638 bp, Homo sapiens
gcgcgagccccggggcggacgcgcgctggggggaggcggcccggggcgcgcgcgctggtctgtctccgggggcgggcgggcgcgcgcgagcccggggctccgcggggcgcgaggtcgccgcgcgccgccctggtgaaacgcgggtctggatggaacgtcggggtacccggtgcaggggctggggtcgtcgggggccaggtgggctgcccgagtttggagacagtaaagtaggtcggtggggggctgggggggatgggctggaaggggagaggagcgcgcgcgcgtcccggacggccagcctgcggtgcgcgaaggcggagggccggggcgcatgcgcacgcctgggcggggccggggcgcgcacgcaggcgggcggcggctgcgcggggcacgttctccggccggcggcgcgggcgcgggccgggccaggctgggtctcttcctcccggccccggactccggtgcccccgggacgcggcgctttacagacgcatacgggagcagccccggtcccccgccccgcgcggccgaacaaatggttctctccagagcttgtgattatacgttttattagactcgggaggggtatggcagggcttcatcagtgttccttcaaattaaaaaaaaaaatacaaaagctacgtagaaaacgtcagatcagacgactaaactttcccgactcagggccaagttctgcaagggagaaagaaagaagggtatgagccgcggggaccggctgggggcccagggacggtctggacgccagggagggcggccctcaccttcttgagcctgcgctctcgggacgcctgcgagtcggtctccgagtacgggggcggcgcgggcgggtagtaggcctcttcctcctcctccttgtggggtctcctcctctcctccgaccccttcttcctcacagcctcctccagtagccgcccatcataggggaggtccccggacctggagccgttgtcccgagggtcccgggtacggtggtggtgggacctggggtcggcaggagggcgctcccgagacctgaagtcgtcgtagtgggggtcccgggagcgtgggaagtccctcgagtcgtcttggtcatagaggtcgtcccggctgcggctccgcgggggcatgtaggcccggcttctcccaccattactcgtgggagacctgctccctgactcggcggtgctcggcggggtgaggtcgtccagggcgtccacggagcgggcccggggccgcctggcccgccagcccccgcctgcctgctccctggcgggctcctggtcccatcccctgggactccggggggagtggccaccccactcctcatcccggatcggggtgagggcagggccccgggaaggccgagatcgccagtcgtcctcgtggagggaggtgacttcactcatggctgcagggaaggggggtgtcactgactgctggaggagcccggggtccagggtttgcaccaagagtccctgcggcaggtatcagggagacatgtttcacccccccaccttaaaagccctcagaccccaaggctcctgcttaccccgctccacacggccactgggggggccaggtcgagaagggtcgaagttggccagctccttctccatgtagtacaggacccgcatggag

SEQ ID NO: 23274 - DNA, 1095 bp, Homo sapiens
aaccgcgggaaggaaaaggagagcagctggtttcactcgcaggatcggggagccaaggctccgcggagatggggctggatggccgcggaggtggagcggaagcggctcgccccagggttaaaatgctgccattttggggctgggactggtctgggaggggactgagggaaagtctcccctttctctccccggcagtgtgaaaagccagggaatgaagcccgcgggagcggggaatctgggattcaggtgagagccaaagtctcttaagtctcctggggactgcagttcctgcccaggactgtgcccactcctcctaactcaactctgctcaaccccctcctgccttgtctgcagggaactgactatttcggcagaagaaaccaaatgcactcctaaaaatgctaacgatttccaaagtactaattaattgcaaatcttgctgtgatatacctcaccttataccacagatggggctgggagaaattccatgtaaaccggtccttttagaagcacaattgtcttaaatgtcctctatccagccggggaacagactgtggtgaactctgggggattcagagtgctttggaaaaacattccccccagttatgctggaaatgtgggctttatgtcagcacctgtggtgctgagagttagtgtcacggagatcttgtgaaagtgcaggttgctctaacagggctgggtggggctgagcctgttagccgcgttgctaacaagctcctgggtgaggcgttggtgggaaaggacccacgtggccaggggcaaggccagaccggaggtgctggggctgagtagagacatctctttttagataatctatgagggatactaaccttttatgggaacaaactggtttttttaaaaaaaaatttcttcccatttgtaaccctctttctagtttgtgtttttttcctttttgagatggagtcccgctctgttacccaggctggagggcagtggtgcgatctgagctcactggaaactccacctcctgggttcaagcgattctcttacctcagcctcccgagtagctgggattacagacgccagccaccacctctggctaatttttttttg

SEQ ID NO: 23275 - DNA, 1045 bp, Homo sapiens
gatcagaacccgccctgaccggcgcagagatacgggacgcagccgtgagcactgttttttatttcaccatggacccatcggcgtggggcgcccgccccgggtgtccttcctcccccgggcagccagatgctggaacgggaggcacatgttccggccccggcccctgggaaggaaagaaaggaccttcccgtttcacttgtctcggctgaacatgtagcggaggaggtcgaccacccggtgactgtagccatattcgttgtcgtacctgtggaggaggggtcgggaggttcaagggggttccttccgaccaccccttagttcccctccctctaagtctccagctccttcccccttaccatgaaatgagcttcacgaaattgtcattgagcgcaatgccggccttagcatcgaagatggacgagtgggtatcaccgaggaagtccgtagagacgacctggaagtcagaatttcaaagataagtgtgtccggcagagcaaggacctccaggagctgaggccccgactcttaactctatcgcccatccatgcattcatctataatatttgatgtagccctactgtgtccagtctctggactggagggtatgaccaagtgcagggtatgaccaaggcactgtgtcagggtctggccaaagggcacaggtcacaaacaccctcatgctgtaccagtacatccctttcctaggaataatgcaagcgtttggaatgggccagcatggagggcctctctgaggggtggccatgagcctgggtctagatgactagaaagatctgaccggctggggccctcagcacagtgtctgaggtagaaggagctgcaggaagggaggacctgagggttttagccctagtgtcatgaaaggccacaggagtgttttcaatcctgaaaacgggtgatgcaatgtgattccattaaaacaaaagatcccagtgactgtgggaaagtggacctgcaggagttaatgcagggagacagcaccaaggtggatgtacaggggtccaccatgaccatggcatccactcct

SEQ ID NO: 23276 - DNA, 1129 bp, Homo sapiens
gcgggtgcctgtagtcccggctactcgggaggctgagacaggagaatggcgtgaacccgggaggcggagctggcagtgagccgagaccacaccactgcactccagcttgggtgacagagtgagactccatctcaaaaaaaaaaaaaaaaaaaaaaaccctcccaaagtgctgggattacaggcgtgagccaccatgcccagcagtcattcctttcaatggcaaaaaccgcaattatttttgcatcaactacacacacagacacacacacacacacatatctcatgtcacctgcagatacagttttatttcttcctttccaatctaaatgcctttttttcttttttgagacagagtctcactctattcctcaggctggagtgcagtgttggtgtgatcatagctcactgcagtctcaaagtcctgggctcaagtgatctccctgcctcagccccctgagcaggtaggactacaggcatgtgccaccatgcttggctaattttttaatattttttgtagagatggggtcatgctgtgttgcctaggctggtcttgacatcctagtctcaagtgatcctcctgcctcccaaagtgttaggattacagacgtcagccactgcgccgggccctgtttgcgtttttttcttgcagtgactagaacttccagcactatgtcaaataggagtgtcaagagcagacatcctttccttgttgttgatcttatagggaaagtattccatccttcatcattaaatatgatatatatttggtgtgtttaaatctattattgttattactattattattattattattatttgagacggagttttgctcttgttgcccaggctggagtgcaatggcgccatctcggctcactacaacctccgactcccgagctctaagcgattctcctgcatcagcctcccgagtagctgggattacaggtgactgtcaccacggctggctaatttttatatttttagtagagacgaggtttcaccatgttggccgggctggtctcgaactcctgacctcaattgatttacctgcctcagcctcccaaagtcctgggattacaggagtgagccaccgcgcctggccgttattaatatttttgatgtttaagtt

SEQ ID NO: 23277 - DNA, 1058 bp, Homo sapiens
acccaagccatcctgcactgagcacagatggcagaagcagacagcactttgacttggaagagtagggacactgctggtgctgttttgtttttattttgagacagagtcttgttctgtcacccaagctggagtgcagtggcgccatctcggctcactgcaacctctgcctctgggttcaagcgactcttgtgcctcagccttccaagtatctggggttacgggcatgcaccatcacacccggctaatttttttgtatttttagtagagatggggtttcaccatgttagccaggctggtctcgaactcctaacctcaggtgatccactgctgggattacaggtgtgagccaccatgcctggtctgttgctgttcttaaaagtactccccctccctagactcaaaaaccttgcccccccttcctcttcctgggctgactcggtaggaatcatctgcagttgtctctctggaaagagcaaagaaacaacaggttatgcagacacaagcctgtgtcctgccagagggtagagcaggtagagagattaggtagggcatgattggaaggggagtatgtgataaaaggcaatatgatatcagcctctcagtcctttttaatacttatattactttctttttttttttgagacagagtttcactcttgttgcccaggctggagtacaatggcgctatcttggctcactgcaacctccgcctcccggttcaagcaattctcctgcctcagcctcccaagtagctgggattacaggcaactgctaccatgcctgactaattttttgtatttttattagagatggtgtttcaccatgttggccaggctggtctcaaattcttgatgtcaggtgatccacccacctcggcttcacaaagtgctgggattacaggcgtgagcctacatgcccggcctaatactcgtattactgaataaaatttgaaatctgatttttttttttttgagacagagtcttgctctattgcccaggctggagtgcagtggcgcaatctcggctcactgtaacctccgcctcctgggttcaagtga

SEQ ID NO: 23278 - DNA, 1519 bp, Homo sapiens
caagtgatcctccttcttcagcttcccaaagtgctaggattacaggcgtgaaccaccgcactccgccaagggtcagggtctttaaagactcctggattctgtgggagggcacctaggtgtgaggctggccctgacctctgccattcccttcccctcaggagatcaagagcaacaagacagttctgcacttggccgtgcaggctgccaaccccactctggttcagctgctgctggagctgccccggggagacctgcggacctttgtcaacatgaaggtgggagctggggctgggaagtgcagattgtgtggggtacggtagggggggcagtgggatgttaggggtcctgggggctgtggacgtggaggggacgatgtgtgggatctgcaggggaaagtataggaagcagacacagattgccccagaacatgtagtccgtggacacagggatgcatgcagcgtggctgtggccgggggaggtctgggatgtgaaaggacaagtgtaggacgtagacaaggcagaaattgaagtgcagtttagaggcctgggccagctgagcccagatccccaccagccctccccttacttttccaggcccacgggaacacagccctccacatggcggctgccctgccccctgggccggcccaggaggccatcgtgcggcacctgttggcagctggggcggaccccacactgcgcaacctggagaatgagcagcccgttcacctgctgcggcccgggccgggccctgagggggtaagtaagcactgagcctgcctgtagagtggcctctgagctcgcgggcgcgggatgacctccctgccccacccaatgctcgctttcagagaatgacttctaatctcggaaggtgacttcagccctcaggcaaccctgactctataatgtgacctctgacctcagtgtttcatcctttaccccagaatggtgacttctctgatctctaccccaaccctgacctcacagtgtgacctgtacttccaaccctgaatcttgcttgacctcaaggtgtgacctttgatccccccaagtgtgacctcctaccccctgcccctaaccttgggtcctgacctcagatgtgacctttgacctcttacctgttcccttcaattccctctcattcctcacccccaggtgggaacccccagccagcagcccctttcccttcactgaagttctgcttcctgaccctttctcagtgtacgaacccaggccttgaccttcttcccacatctttatttttatttgtttgtttgtttatttatttattttgaggcagcgtcttgctctgttgcctaggctggagtgcagtggcatgatcatagctcactgcagcctcgagctcctgggctcaagggatcctcccacctcagcctctccagtagctggtactacaggcagtcaccaccacacccagctaattttgtttttttttttttttaagagatggggtcacactatgttgtccaggttgatctcaaactcctggcctcaattg

SEQ ID NO: 23279 - DNA, 1050 bp, Homo sapiens
ctatacatgcagccccaaccagaatataagctccataaaattgtggatttttgtcttattcccgctgaatataacagcccatgcctagaacagtgccttgctttcatgaatatattacattccggctggcgctttccttcctccaatgcatgcacagctgaaaaagcccttatctcccatcgcactcctgttgccttgtcccatgttctgacataaagcggatcatccacatgtggggatgaatcttgtgccccgctggaagagatccctgtggctgccggccctggtgcctggggtgagacctaacagtagagagctcactactaggaaaggagaggcattcccaacacagagaagtaggggcggacaggtcccgaggctggagggcgtgtgcagatgggtcgggggagcaaggggctgtcagcttcattaaggctgagagcaggcaggagcgaaacagctggctttgctagccagttacacactcaccgctgtccacggatccctgacactggacgactgttgtgccggtggcccccccaggctgctgcagtctgaggagaaaagccagatggtgacactgcgtctctcctgccccttacctccaggcacagtgaggggcccacctgggatataggcatctccccggagctggtcaggcagatggccccagttggggggctgtggacgccgactcctgaccaggaaggcgcggggcatgccctccggaaggctctccacacacaggggctgcttccacctgctgtcagacctcagccccaggatgactatccctggtgggaaaggaggggaagcctctgaggaacctcattctcttcatgcaaatttcctggctggccctgggagtggactaagctggctcaggttacccctgcctggggacctgcccatcttctcccaggttttggagggaaccatccagcctccaggggtggacaagcactaggaccaccaagcagagccaggcaaggggagatgggcctggggagcttttgaggataggaagaagaaacaaggccccagggggac

SEQ ID NO: 23280 - DNA, 1031 bp, Homo sapiens
ccccatccccttgccggcttccttctccgtccctgcgtcgagctgtggctacatttctcgatgagggcagagggcgacaggcgtgacaaccaccttcttgaagctctgcgggcaccctcctgcgggtggacgatgagcgcctgggaggccgttgtccttggttggggagcgctcgtctggatccagcctagcaaagaggctgctccggatggggaggggatgaaaacccctgcgggtccgacgccgatgcccacgttgcccaggccttcacagacccccaaactggaaccgccgggacgacgactgccaaccggccacacgacccaggcagagacgcggggagaggctgaccagaagaaaggccgacgtgcaagaaacccaccctccggcgcacagggcacatgtgtcccgaggcgcacgcacacacagacggacagagacagaaagagagggccacggaaagagcgagaagggagagagagagagagagagagacctgagagagagacagaagtccgcacacagacaggcactgcgcgcgcacacacacagacgcaccccccccaacacacaaacacacacacccatgacgaacacacacgtacagcagggaacaccctcccgcaggcagcccctgaagctgccgggttctgctctccgcgactgagagccagcggtgagagagccgcccacgggcacgcaggcggacctgtgctcgtcatcacaagggctccacttttggggagactcacccgcacaccgtccgcgcacgcctgaggctgggatcccgcgctgcctcgccggcgatctgtctgaggtttcttcctcctggggtttcttcctgctgctggaccctccgcgaatcccggcctccggagaccgtcctggtaactgccctggccaggactggtctcagcccagactcagacgcacgatcacacagggctcctacttccccaagtgtcagggacccatccccgggcaacggtggctttcactgtgacccaagcggcggctcgggcctcgcgcat

SEQ ID NO: 23281 - DNA, 1957 bp, Homo sapiens
tcgaatggaaaatgatgaggggacacgatgttagagttgcagtgggaaggggtggaaaagagggattccagagtgccaggcacacaggttttctggaaggtttacatgaggactgctgtggtttgaatgtgttccccaaagttcatgtgttggaaactcaacccctaatgcaacagtgttgaccagtggaacctttaagaggtgattaggtcatgaaggctctgccctcatgaatggatgaagctagagtgggttagttatcttgggagggggttcctgataaaaggatgaggttggcttccttccctttctctttccccctcccccctctcacatgtggtcactctcttgcccttccaccttccaccataggacggcacagtgagaccttcaccagatgcaggcccctcactttcccagtgttcagaaccgtaaaccaagtgaactcttgcttataaatcacccagtctgtggtattctgttatagcaacacaaacggactaagagagggacactcagtgggctcttctacttgatggagcactccctgcgtggtgccttgtatttgtagacatgatgctgtaaatgctctttgaatgtcttgaaggcttttatgtttgaggagtttacagagaagcacctacaggcttcaggtcccttcttctgttgcttctttgctccttagttcctcccctaacctggtgctaaattagatcatagtgtggtccttggaccaacagtatcaatagcacctgaaaatcatgctggaaatacagattcacaggctgctccctagaatactgaagaagaaactctaggagtgagacccaacaatctgtatttaacaagtccccaggtgagtctgatgcacacagaaatgtgagctgctgtattagatggtgttgagttcatgccaccgaatcactgacacacacgtctgctcactgcttgctctttgcacaggcccctggatcctcctggaatccccgatccctcttgctccctggcagagttttctagtccctcttacttgaagcatgtctttcagagcccggcaccacccatcttgagtatctggtgagttctgtggtctgcatgtccatgtttgggacattctgggaagggtggcccaggctgtgatttgccatctactgcaggctatggatggtattcagaagggaggggagatgctgtgtgcgtgttctgaagggtttcccactaaacagatcaaccctctccataactatttgatttttactttatctcctcgttgacttcacagtgtcagtgcagtttgtgtaaacatctctatggggtgatgcatgcagataaatgtttatgtgaacatataaagtctgcatgtgtgggtgaacactccacatcaggtcattgtccatcattacatatctgtggtgtctggctcattcgtctcgttttctgtcattttacctacttttacctgaagtacaatgactatttaataactattaaatgtttcatttcagctacacctctatggtatttttttcacctcatatcataccttcctccctcactggacttcagtgtgggacctgcaggtctcaggccttctgggaagtcccagcttttcttgaatgttttctctctctggccagctcaggctggagcagtgggtgttggtgccatcctgtggctataggtgataagccggctgttcttcactgacctggtcttaccttgaaccctggagttctcacatgcatggatttaaatgctgtgtctttctaagggcacattatggccattttccttatctccctcccaaggggctgtttgctgtgtttattgactccctgtttaaaaaacatatatatatatatatatatagacgaattaggttgtaccccataaattgcatgtttgaaaaatatttcaaagaatagtttatttttttttgctgatttttatgtatctt

SEQ ID NO: 23282 - DNA, 1084 bp, Homo sapiens
ccgtggtaaccagaaagctgattcagcagctcaagatgcagtgtgactttcagtcacgcctctaaacttgctgcccacagtctcctttccacagccagatctgcctgacaatcccgcatactcaacagaagaagaaaactggcctcagaactcagagccaataaaaatcaggaaggttggtggattcttcctgactctagaatcttcataccccgaactcttgggaaaactttaatcagtcacctacagtctaccacccatttaggaggagcaaagctacctcagctcctccggagccgttttaagatcccccatcttcaaagcctaacagatcaagcagctctccggtgcacaacctgcgcccaggtaaatgccaaaaaaggtcctaaacccagcccaggccaccgtctccaagaaaactcaccaggagaaaagtgggaaattgactttacagaagtaaaaccacaccgggctgggtacaaataccttctagtactggtagacaccttctctggatggactgaagcatttgctaccaaaaacgaaactgtcaatatggtagttaagtttttactcaatgaaatcatccctcgacatgggctgcctgttgccatagggtctgataatggaccggccttcgccttgtctatagtttagtcagtcagtaaggcgttaaacattcaatggaagctccattgtgcctatcgaccccagagctctgggcaagtagaacgcatgaactgcaccctaaaaaacactcttacaaaattaatcttagaaaccggtgtaaattgtgtaagtctccttcctttagccctacttagagtaaggtgcaccccttactgggctgggttcttaccttttgaaatcatgtatgggagggcgctgcctatcttgcctaagctaagagatgcccaattggcaaaaatatcacaaactaatttattacagtacctacagtctccccaacaggtacaagatatcatcctgccacttgttcgaggaacccatcccaatccaattcctgaacagacagggccctgccattcattcccgccaggtgacctgttgtttgttaaaaagt

SEQ ID NO: 23283 - DNA, 1025 bp, Homo sapiens
tgcaggaaacagcaccaagggtgattgtaaattttgatttggcgcggcaggtagccattccagcgcaaaaatgcgcaggaaagcttttgctgtgcttgtaggcaggtaggccccaagcacttcttattggctaatgtggagggaacctgcacatccattggctgaaatctccgtctatttgaggctgactgagcgcgttcctttcttctgtgttgcctggaaacggactgtctgcctagtaacatctgatcacgtttcccattggccgccgtttccggaagcccgccctcccatttccggaagcctggcgcaaggttggtctgcaggtggcctccaggtgcaaagtgggaagtgtgagtcctcagtcttgggctattcggccacgtgcctgccggacatgggacgctggagggtcagcagcgtggagtcctggccttttgcgtccacgggtgggaaattggccattgccacggcgggaactgggactcaggctgccccccggccgtttctcatccgtccaccggactcgtgggcgctcgcactggcgctgatgtagtttcctgacctctgacccgtattgtctccagattaaaggtaaaaacggggctttttcagcccactcgggtaaaacgccttttgatttctaggcaggtgttttgttgcacgcctgggagggagtgacccgcaggttgaggtttattaaaatacattcctggtttatgttatgtttataataaagcaccccaacctttacaaaatctcactttttgccagttgtattatttagtggactgtctctgataaggacagccagttaaaatggaattttgttgttgctaattaaaccaatttttagttttggtgtttgtcctaatagcaacaacttctcaggctttataaaaccatatttcttgggggaaatttctgtgtaaggcacagcgagttagtttggaattgttttaaaggaagtaagttcctggttttgatatcttagtagtgtaatgcccaacctggtttttactaac

SEQ ID NO: 23284 - DNA, 1063 bp, Homo sapiens
tatacatagtatatattatatatatattatatatatatatattttttttttgttttgagacagagtcttgctctgcgacccaggctggagtgcagtggtgccatcttggctcactgtggcctctgcctcctgaggttcaagtgatactcctgcctcagcctcctaagtagctgggattataggtgcacaccaccacgcctggctaattttttgtatgtttagtagagatggggttttgccatgttgcccaggctgggctcaaactcctgagctcaggtgatctacccacctcagcctcccagagtgctgggattacaggcgtgagccactgtgcccagcctgtaaattcacattttcaaagggcgttaagggaattattaattaaactggtatattattctgataaaatacaaatattttttagttctagaggagaaattatgttcttcctgtttttttttttttgtttttttttttttgtttttttttttgagacagagttcccctcttatagcccaggctggaatgcaatggcataatctcggctcactgaaacctccgcctctcctgggttcaagtgattctcctgcctcagcttcccaagtagctggaattacaggcatgtggcactacacccggctaattttttgtatttttagtagagatggggtttcaccacgttggccaggctggtctcgaactcctgacctcaggcgatctgcccacctcggcctcccaaagtgctgggattacaggtgtgagccactgtgcccagccctcctcttcttgttgaatagaattttccactgagatacagagtcagagcattgataaaaaaaatacaagccagcttaagttccacctctggtttctgggatctcttggggaggaacccattggtgttatttcctctgagagctgcttcttccaaagcaggtatagcacttcctacaggaggtcccagaaggttgcagcacaggcggggtcaaatcctgactctggagttcaagaccagcctggctaaacatgatgaaaccgtctctaccaaaaatacaaaaattag

SEQ ID NO: 23285 - DNA, 1041 bp, Homo sapiens
cccagcccacatggctaatttttaagcattttttgtagagacagtgtctcactgtgttgccaggttgctctaaaactcctggcctcaagggattctcccaccttggcctcccgaagtgctggtattacaggtgtgagccactgtgcccagtcatttttgtctattaattgatgtattttatgcatctacatttcattaattttcttacatatttgggtttaaatctgctgtcttcccagtgtttttctgtttgcttaatatgttcttacttttttcattctcctgccttttttggattaatcaagcatttttattctagtttttccttttataacatgatcattatacatacatttatttttcttcttgtggttgccttagacaataacaagtacattatttacttattgcattgaatctgaaattagcttctttatatcttgttcaaaattgtagggatcttaatagaatttttttttttttgagacagagtctggctccgttgcccagaatggagtgcagtggcacgatctcggctcgctgcaagctctgcctcccgagttcacgccgttctcctgcctcagcctcccgagtagctgggactacaggcgctcaccaccacgccccgctaatttttttgtatttttagtagagacggggtttcaccatgttagccaggatggtctcgatatcctgaccttgtgatccacccgcctcggcctcccaaagtgctgggattacaggcgtgagccaccacacccggccggatcttaatagaatctttaaaaaatgtattcatttatttttagagacaaggtctcactgcatcacccaggctggagtgcagtggtgtgatcatagctcactgcaacctcaaactcctgggctcaagcaattctcctacttcagcctcttgggtaggtaggactacgggtacacaccaccatgcccggctaatttgttttattttagagatgggggtctcactgtgttggccaggctggtctcaaactcttggtctcagatgatcctcctgtctca

SEQ ID NO: 23286 - DNA, 1053 bp, Homo sapiens
tgactggtgccatactgttatgtgcctgattgcagaggccactgaggcttgcctgttgctaagggctgttggagcccagggcctctgatgtcagcctgatggtggtggcagcctggagatggagttcatcatgcaagcctgaagcctgggctgcatgatctttcctgatgccagagcaggtctagagggtcagtctgtggctactggcctggagtctggggttgggagtctccctgttgctgggttttactatggcgggcctggtgttagggaacaggcaaagttctgtgctcacttccctgacttttccccaagtgggcaatacctctgtctacactgtgctgccttgagctggggaggggtgacatgggtaatgtcgagccgtccttcctgcactcttcaatgcttcttttcttattattgtgctacaacccagtactgcgatctctcacctggttgccttagctattgtgaaggcatttttgttgatggataattgctcaaactgatgtttctgcaggtggaccatagatggaaagaactattttgctatcttctgagatttagcattttttgaaagattattagctgggcatggtggtgcccaactatagtcccaactgcttgggaatctgaggtgggaggattgcttgagcccgggaggtcgaggctgctgtgagccaagatcatgccactgtagtccagcctgggtaacagagtgagaccgtgtttttgaaaaaacaaaacaaaacaaaacctactgttagttattcctcttttttttagtgaattgctgatgatcagatttctcctggtgaagtagaaatccttgcttcagagacaaatacctgagttgaaagagaaactggcttttaggctgggtgtggtggctcacgcctgtaatcccaacattttaggaggctgaggcgggtggatcaattgaggtcaggagttcgagaccagcctgggcaacatggtgaaaccctgtctctactataaatataaaaattagccgggcgtagtggcaggcgcctgtaatcccagctacttgga

SEQ ID NO: 23287 - DNA, 1004 bp, Homo sapiens
ttagtgtctcttctgtataatgtcattttgatccattttgtattaggctaatttgtctttttcctaagatttgtaggaattccttgtataaattctagatactcatttttgatcaatcgcatgttttatagatatgttttccagtttgtgtcttttttattcactttcgttatgatatcttttgaagaacagtaattctttgtgttaatattgtcaaattgtatgtttagtggttaaattatatattgcttataaacatttttatctttttcctgtatgctttatactttttggatcttcagaaaccccttcctagcccaattttctactttgattcccaaaattttttttttaagacagaaaaagtcacccaggctagagtgcactggaacaatcacggctcactgcagcttctacctcctaggctcaggtgatcctcccacctcagcctcccaggactgcaggcgcatgccatcactcccggctaacttttcatattttttgtagagacagggttttgccatgttgcccatgctgatctcgaactcccaagaatttttatgtttccgctttcttattaaagacctattaatgcaactttaattgatttttatgaatagtatgagatggagatcagttatttttcctatatagaaaacgaattggctgggtgtggtagctcatgcctataatcccagcactttgggaagttaaggcaggagggttgcttgagcccaggaattcaaaaccagcctgggcaacagagggaaacaccgtctcttaaaaaaaaaattatgtttccctctcaaatgaaaactccgtctattcttcattgatcaacaatgctcctctgtcatatattcagatttcatatatgcattgggtctttcttgttacattgagcctttttatccctgccttaattactcttgtttatataacaagtcttgatttctgataggacacatctctccaccttttctttaggcatattttggttatac

SEQ ID NO: 23288 - DNA, 1035 bp, Homo sapiens
gttacagtaatgaatagaacatgcgtgattgggtgcagtggctcacccctgtaatcccagcactttgggaggctgaagcaggaggattgcctgagatcaggagttcaagaccagcctggccaacatgatgaaaccccatctctactaaaaaatacaaaaatcagctgggtgtggtagcatgcgcctgtaatcccagctactcaggaggctgaggcaggagaatcacttgtacccaggaggtggaggttgcagtgagccaagattacgccactgcactccagcctgagtgacagagagagactctctcaaaaaaagaaaaaaaagaacatgcataatctctgttcccagaacctaccccacagtgtagggagagacatgaaaatagatgaatatataacataccaggtaatagtaaatactaaaagaaataagaagtagaggaaggggataaaggatgatattttatgtgaaggggcaagagaaatttaccatatcttactaaatgatatggtaacgtttgggcagagacctgaagaagcaccatagtaagttactgtactgggcggaggaccactccagatggaggaatgcagaccttcaagggcctgaggcagctgtgcgttggctgtgtttgaggagcagccccagaggccagtgactggaggagtgagagcagaggggtacgtgggtgggagatgagatcaaagaggcaggagtgggaaagagtgggtcagtttatgtactgtctgccatacaggccatgggaaatcttttcattctaagacaagaagtcatcagaaggctgtgcacctagaaatggcttgatgcaactcattatttttttttttttttttttgagacagagtctcgctctgtcgcccaagctggagtgcagtggcatgatctcggctcactgcaacctccgcttcccaggttcaagcgattctcctgcctcagcctcccgagtagttgggattacaggtgcgtgccaccatgcccggctaatttttttgtatttttttttcagtagagaca

SEQ ID NO: 23289 - DNA, 1077 bp, Homo sapiens
gacggagttgcaccatgttggccaggctggtcttgaattcctgacctcaggtgatccacctgcttcggcctcccaaagtgctaggattacaggtgtgagccaccacgcctggctaattttgtatttttagtagagatggggtttctccaaaggctggtcttgaactcccgacctcaggtgatccgcccaccttggcctcccgaagtgctgggattacaggcgtgagccaccgtgcccggcctgatgtttttgaatgattatgaaaatgggtatacagcattaaaaccttagactgattttaaatatattaatttcttttaaactcaatataatgttaatattactgtagcacttactagcatttctgaaggttggtcttgagataagattgaaaatgacagttgttgattttctgaggtaatatacccaaataaaatatatgtatgtgtacatgaatctaaactgtcttcttctgttcctcattttgctttacttaaataatctttcatattttttaagtgttttgcccatgtgcttgggtagccttgaagtcaccagaataactaggactcaaattcagaccaaaccaggactagctttttgtgccatgagttagccatggtcctggacccagcaaaaagaatgattatgatggtcagagtaagatgagcaattgcaacataatattctctaatattgtatactgtaaatttattcagctgccctcgtttactcacagtttgcttatttgccaccataagaaatggtacaataaaaattcatgtaatcaccccttagatttcagttgtttttatttctgtgggtcagattacagggaagggattggtagatcaaaggattgatgttattttaaaatttttaatagatgttgtcagagtcaggtccaaaagaacaacatatcctctggctctacaatagatcctatgatgctacttaattgtatgcttctttgatgagtataaacctcacttgctcccagatttgcctctttgagagttttcatattgttagctcatttttctataggattatttgtctttttgcctccctttttct

SEQ ID NO: 23290 - DNA, 1040 bp, Homo sapiens
ttcatactgatgataaaccctatgaatgtaaggagtgtgggaattcctttagtgttgttgggcatcttacttgccaaccgaaaatttacactggtgagaaatcatttgactgaaataaatgtataaagtggttttttatttctgattttcacaggaaaatactgtggatggatttaataggtaatcaaggcaattcagtatctccctctcttaaagtctgtttttagacttcatggtcattctgtatgtagacgtagaattgcttagtcatagctgatatatacttatagctttgttagatgttgccaaatatttctcctttttatgttaaaaagtttttttcatgagtttctcatcctggcatgttttgtttacaatagcttttgatgtttgtattattgctcttttgactattcagttttttaattgtaatattacttcaatatcttttctgcattgtaattctttgcttgtgatatctatacttacttattttcctccacagagttagcactcctagtcagatacaatgtatttttacagtcttacagctcatcattttgtgtaatgttgttttgttttgttttaaatgatagaagtgtgatctcctttccattttcatccaattgttgacttctctttaaatttctactttattttgatacaacatattccccccaaaaaaacacatacataggaactggttatattccaccataacacacacacacacacacacacactatatacatatagtgtatatacacatatagtgtatatagtgtatgtgtgatgtatactatacatatcacatatactatatgtgtgtatatagtgtgtgatgtatatgtgtgtgatgtatactatatatgcccacacatgcactacataacacactatatatatatatatatatacacacacacacacacaatatatgtatatatagtatatacactatatactgggcactatatatatatagtgtgtatgtgtgttatattggaatataaccagttcctttaagcagtctttttacc

SEQ ID NO: 23291 - DNA, 1049 bp, Homo sapiens
gacggactctcgctctgctgcccaggctagagtgcagtggtgcaatctcagctccctgcagcctccacctcctgggttcaagcaattcttgtgcctcagcctcccaagtagctgggactacaggcgcatgccatcacgcccagctgtttgtattttagtagaggcagggtttcactggtcacaaagttctgagctcaggtaacccacccaccttgccctcccagagtgctaggattacaggcatgagccaacacgcccaggcaaaatgaggtcttaacaaactgcaccttgttattatcctcggtaaaatttatttttggggaggaaaaccacaaaagtgttagtatatatggattatcaaattttgatctgcgttagcattacctctacaagatgctaatgactagttctacatctacagattttgattctgtttaaccaatgagcttaccaggtgatgaccaacacacaaatttcagatccactgacttaatctgttacctttatcacaatcctcataatctttatgttctgctgttactctgtgagctctctttatctttcatgacagtattttaaccaattcatgtatatggtgaattattcttaaattgtctcttctttctataactgttttatttttgtagtacatgaaaattattttttcctttctttcagatttggagtccaggaatgagactaagcatttatctgtaggaaaagatattattcaaaacactggttctcagtgggaggtaatggaaagtagcaagttatgtggccttgaaggttccattttcagaaatgactggcaaagcaaaagcaagattgacttacaaggacctgaagtgggatatttcagtcaaatgaaaatcatctctgaaaatgtgcccagttacaaaactcatgaatctcttactttacctcggagaactcatgacagtgagaagccctatgaatacaaggaatatgagaaggtcttcagttgtgacttagagtttgatgaatatcagaaaatacatactggtggaaaaaactatgaatgtaat

SEQ ID NO: 23292 - DNA, 1050 bp, Homo sapiens
cgcttgagcttcagggctctttcgttgttggactacgtttcccacaggcctcagggccgcggatgaacttcgacctttgcttccttttccggtgttgtggttattgagttaagcctggcgagtcgaggtgacccgggccgggctgcgggaggagctcgcggtgaggtggccccgcgctgccgggcgaggtcggtccacgtggagccgggagcctgaggcctctgtacgcgggagctgcggacgatggtggttagtgctattgtttacgacgtcattgtggtgtgtgtgtgtgagagacggagaccctagtgtgtgccgtgggtgctgtttgatcggactcaggacggtgagtaggggcggggtctatcgtgtgaccctggtctacggtgacgtgatcgtgtgacagcactgttgtgaccaactataagtgtgaacggggtagaagtgtttttttgtttttttttgtttgtttgtttgttcgtttttttccgtgagcctgtaggagtttgttttgggtaaagcgtcatttttccgactctgtgatgtctgtgatggaatctcttcgtgaggtcttatacacacacacacacgcatatagatagattacatagatgatatatagaagatagataaatgatagataatagatagatagatagatagatagataagatagataaatgaagtttcctgggaagacgtgaaggggagggcataggtgtagtattcattcctgggataactccccttgcatgagtttggaggccatttatacattaaagaactacagtatttcctgagctgtgttccctagaaactgctaggcattggtcgtacctttttctcggatgtggggaggagtcgacagtattctagtttccctcttcgatctgggtgtgtttgttgtgtgtgatgggcttttctggtggtgaacactgtgttcttatttaaccagtccaggatgtcatgagtcctttctccctcttggttatgtagttctgcaagtgaaggccccctgaagtggaagacagcattggtactaatggccaa

SEQ ID NO: 23293 - DNA, 1045 bp, Homo sapiens
atatttgtgcattgctattggttgaatctgcatatatgaagagctgattacatatactactgaatttcttgcctacaagtgctatcaattactgagatataattgtggatttccaattatgcttgtggatctatttcttttgttctgttagtttttgcttcataaaatttaacactctcattataggttcatactagcatacatattcctgatgaacacagtcatgtgtcatgtaataacattttactcaatgatggacacatatacaatggtggtcccataagattacaatggagctgaaaaattcctatcacttgtggacgttgtcatgcaacatatcactcaggtgtttgtggtgacgctgctgtaaataaacctactgtgcttccagttgtataaaagtatagcacatgcaattatgtatagtacgtaataggtgataataataagtgattacattactagtttatgtaatttattgtactatttgtattattattttagactgtactccttctacttattaaaaaaaaaaagtaactgtaaaacagcctcaggcaagtccttcaggaggtatccagaagaaggcattgttttcataggcgatgacagctccatgcatatttttaatcctgaagacgacattccagttggacaagatatggcggtaaaagacagacatattgatactctagaccctgtgtaggcccaggctaaagtgtgtttgtttttaacaagaaagtttaaaaagtaacaaacatttttaaaacaaaaaaatttttaaatagaaaaaagcctatagaataaggacagaaatatttttgtgttgctatataatgtgtttgcgttttaagtgaagagtcactacaattcagaaagataaaaaatagtaagtttataatgtaaaaatattacaggaagctaaggttaatttattattgaagaaaacttaaaaaaataaatttagtgaagcctaagtgtactgcttgtaaagtctacagcagtatacagtaatgtcctagtccttagcattctctcacaactc

SEQ ID NO: 23294 - DNA, 1053 bp, Homo sapiens
gttatctctcattgctaccatagatattttatttctcttatagtacaaaaccaggagttaaaatatatttcttatctttcagacttggcatccagagatgagccccagaagttatctccaaaaagggatatttatgaaacagaattatcccagtgggttaacatggaagaatttaaaagccatagtcctgagagatcaattttcagcgctatctgggaaggcaactgtcattttgagcaacatcagggacaagaggagggttattttagacaacttatgattaaccatgaaaacatgcccatttttagccaacatactttactcactcaagaattttatgatagagagaaaatctctgaatgtaaaaagtgtagaaaaatcttcagttaccatttattttttagtcaccacaaaagaactcattctaaagaactttctgaatgtaaagaatgcacagaaattgttaatacaccatgcctttttaaacaacagacaattcaaaatggtgacaaatgcaatgagtgtaaagaatgttggaaggcctttgttcattgctcacaacttaaacatctaagaattcataatggtgaaaaacgctatgaatgtaacgaatgtgggaaggcctttaattatggctcagaacttactctacatcaaagaattcacactggtgagaaaccttatgaatgtaaagaatgtgggaaggcctttagacagcgatcacagcttactcaacatcagagacttcatactggtgaaaaaccctatgaatgtaagcaatgtgggaaggcttttattcgtggctttcaacttactgaacacctgcgactccatactggagagaaaccttatgaatgtaaagaatgtggaaagacttttaggcatcgctcacatcttactatacatcagagaattcatactggtgagaaaccctatgaatgtcgggaatgtgggaaggcctttagctatcactcaagcttctcacaccatcagaaaattcattctggcaagaaaccttatgaatgtcatgaatgtgggaaggctttttgtgat

SEQ ID NO: 23295 - DNA, 1092 bp, Homo sapiens
tttctgcctacagacatctctcactctgcatcatcggattcatcctggagagaaactgtataaatccacagaatgtatggcttttaagtatggctcagaacttacacaacagcaagaaacccatactggtgaaaaactctataaatgtaaggagtgtgggaaggcctttcatcacttttcctatcttgttaaacatcagagaattcatactggggaaaagccctgtgcatgtaaagaatatggaaaagcttttatttctggctcacatcttattcaacaccagaaaatgtatacagatgagagacctcatgagtgtcaggaatccgtgaaggcctttagaccgtctgcacatcttattcaacattggagaattcatactggtgacaaaccttatgaatgtaaagaatgtgggaaatcttttacttctggctcaacactaaatcaacatcagcaaattcacactggtgagaaaccctatcattgtaagcaatgtggaaaatcttttactgttggctcaacactaattcgacaccagcaaattcacactggtgagaaaccgtatgattgtaaggaatgtggaaaatcttttgcttcaggctcagcactaattcgacatcagcgaattcacactggtgagaaaccctatgactgtaaggaatgtggaaaatcttttacttttcactcagctctaattcgacatcagcgaattcacactggtgagaaaccctatgattgtaaggaatgtgggaaatcttttacttttcgctcagggttaattggacaccaggcaattcacactggtgagaaaccctatgattgtaaagaatgtggaaaatcttttactgctggctcaacactaattcaacatcagcgaattcacactggtgagaaaccctatgattgtaaggagtgtgggaaatcttttgcttcgggctcagcactacttcaacatcagcggattcacactggtgagaaaccctattgttgtaaggaatgtggaaaatcttttacttttcgctcaacacgcaatcgacaccagcgaatccacactggtgagaaaccctataattgtaaagaatgtggaaaatcttt

SEQ ID NO: 23296 - DNA, 1029 bp, Homo sapiens
cataccactaactaaagttcaatatctagttacagctttttaggtaaaatgtacatacagtaaaattgtgtaatcttaaatttaccatttgaagaattttgacagattcaaatacttgtgcaaaccaaaatcctgtcaaagtgaagaaaaataccatcaccctagaaagttccttcatgctccttcctagtcatttcccactctatatccagaaacaactgccattctgatattttcccattgtagattaatttttgtctcttctagaacttcgtataattgggattgaaatatgtgttttttgtatgtaaggcttctttcactcagtataatgttttaaaaatgtatccatgttgtatgtgtgggtgtttgtggtatactcaatagttcttattgctgagttgtattccactctatgattgtatcacagtttattcatattcttgttgaacttttgtgctatttccaagtttttggctattatgaataatagtgtcataaacattcttggacatgtctgtttatgaacatctgttttcatttctctggggtaacacctaggaatggaattgttcagacacagtgtataggtgtatgttcagttttataagaaactgtcaaaccatacccaaagggattgcaccattttacactcccattaacaaagtatgagagtttcagtctccctacctctttgccaacatttggtgctgtctttctggctatatatctcattactgtcccacagtatttttaatttacatttttctaatgactaatgatgttgatcactttttatgtacttattggcaaaacatctttctttgtgaagtatctggtcaaaatttttgcccatctttaattggtttgttcatctttttattgttgagttatagaagttctttttttttttgagacagactcttgctctgtcacccaggctggagtgcaatctcggctcactgcaacctctgcctcccgggttaaagcaattatcctgtctcagcctcctgagtagctgggactaca

SEQ ID NO: 23297 - DNA, 1077 bp, Homo sapiens
atataataccaagttaggtatatctcatacatgaagtgcctactcactactgccattttgtgtcttaaaagacatctacagattcaacatgttcaaagttgaactctcaatcttcccctaaaaccctggaactgaagttttctccatcctggttgatgaaaacattgtattcccagatgctcaagactaaaatctttgacttaaagtcaccctagacttgtctcttttacatctagcccttaaacaaatcttgcttgctgtcacatttactatatacctagaatacaaccaataaccactatacccattgttacctcttcttccgaagccatgacatcctctttcatctgagttactacaacctcctcatcgatttttttcaacagttgtgtttccctcaaaataaagtatctttccaatggcttgcacgcttggcaagacatagctctctgttatctctcagttctgctctagcaaccatccctttgcacagtgttcttcaataacttctccacttttcctaaaacacttcagtgtagtcccattgtaggacctctctcctctgcctggaatcaccacactccttcaagtcttggctcaagtctatccttcttgatggtctaccttgatcactgtatttcacaaagcaatctaaatgatcatatccctcccattgtcttttcaatgactttttccccataacacttatattctaacatactctgtgtgtatgattatctcctcctgttagaattgttcactgacaaatatccaaaacacctaagatagtggctggaatatattaagtacctaataactgactacttttagaacaataggctcctgtgaggaaaacataaccatatttactagcagactgcctttgtatgcattggcagtggtctgatttcttgttcaggttgtcacattaaatcactgtaagtggattaagggtggaggattgagggcttgccatcatagataacatcttaccaaagcaatattgctttcaattgctgctagtgggctgcctagctctactctaaatttatctcgttcacaagacattactgaaag

SEQ ID NO: 23298 - DNA, 1078 bp, Homo sapiens
atacttagttcccagccatgacaggatggaaggttagacaggcctcattatacccctctcttttgtggtttaaatataacaactgaccaacatgaatgttaaaacagagatcataagattgacagaacagatgctttgtggcaataagacataagctggacgcaaagccatgccaggcaagggataggtcacatccccctacacttaaggaataaattcttttctggccaggcacagtggctcacgcctgtaatcccagtactttgggaggccaaggcgggaggatcacctgaggtcaggagttcgagaccagcctgaccaatatggtgaaaccccatctctattaaaaatacaaaattagctgggtgtggtggcgcatgcctgtaatcccagctactcaggaggctgaggcaggagaattgcttgaacccagaaggcagaggttatggtgaggtgaaagtccatctcaaaaataaataaataaataaataaaaagaataaagtatgttctaactgcctctaactgccacaaggtttttttttttttcctctctggcagctaaacaagcactggcctcaacataaacaatattaaaacaatttgcagctccaccagatgatgactgacctccacccactattccaccagctataactatagctttgactggacaagagactaacttcagtaactttctcctgatgaaaagaccactgagcacagactggtcctggctagtatacacacactgcgcacttgtgtggcttcctgacctgaaaagaccttttgatataataggacctaattgtaataaatttaaatgttgtgtctctaccccaaagtgaacatggttcatatgtcacacgcatgtttgttcagtgtgtatgtgtcaggaccacctgtaggaggtaaaataaattaaaatgggctgggtgcggtggctcatgcctataatcccagccctctgggaggccgaggcgggcagatcacgagatcaggagattgaagccatcctggctaacacggtgaaaccccgtctctactaaaaatacacacacacacacacacacacacaca

SEQ ID NO: 23299 - DNA, 1031 bp, Homo sapiens
cctgaattcagagacctgctcatacatgactttttttttcttagaataaagtaagctagagaaaaaaatgttattaagaaaatcaaaaggaagatatttgtattcaatattcattaagtgaaagtggatcatcgtaaaggtttttatctttgtcatcttcacatctgagctgactgaggagtaggaggaaaaggagagtttggttttgctggctcgggtggcagaggcggaagaggaggagaaggtggaaggggaggcaggagaggcatgcacactatatgtaacttttattgaaaaaaattcatgtatctgtggacttgcgtagttcaaacctgtgttgttcaggctcaactacaatttatattctctctcatcaattgtgcaatgagtctctgatcttccagtcttgtccattcccaaatgttatgtatgttttgaaaataatctttcttaagtaatatgtatatttcagttttttattttgaaattattacagattcataaggagttagaaaatatagtacaaagagttcccccataaattccagtttattgtggtacgtgattctttttagtgattcttgaattcagtttgctgacattttgttgggaatgtttgcatttaaattcatgagagatattggcctgtagtttttttttttgttactgtgtttgtctgattttgacattggagtaatactgggcttaaaaatattagtttggaagtgtttctcctcttttattttctggaagagattatgtaaaaatgacacattcttctttgtaagttcgatagaattctttggtaaaagctgggtatggtgatatgtgtctgtagtggcagctactcaggaggctgaggcaggaggatcgcttgagcccaggagttcgaggctgcagtgaccgatgatcacgccactgctcttcagcctggacgacagagcaagatcgtgtctcacaaaaaaaattaaaaagaagaagaaaaaaagaattctctggtagaactatctagcctagaggtttctttttcg

SEQ ID NO: 23300 - DNA, 1050 bp, Homo sapiens
gcagtaagccaagatcgcgccactgcactccagcctggggaacagagcaagactgtctcaaaaaaaaaatgaagtaaattaaaaacaacaaaacccatgttccgtaatcccatatatagtcactccaccgtgcaaagctgactatgcacattgaacaggaatgtgcccttacagggatcagtgtccttcagggatgtggctatcgatttcagcagagaggaatggcggcacctggacctttctcagagaaacctgtaccgggatgtgatgctggagacctacagccacctgctctcagtaggtaagcacagtcaccttggtatctgaaaggaggcctcactgagagtgttttcattctcagttgacgaatgctgttggcatcttagataggtgatggttttgtccttttttcctccagggttctctgtttgtttagggtactcagaatattactcagagatatctggttactttcctaaagaacaaaccatcattgaacaataagactgtatttgttgggctctgaaacgtaattagctggacccagacctttatcatttcccatgaacagggtatcaagttcctaaaccagaggtggtcatgttggagcaaggaaaggaaccatgggcactgcagggtgagaggccacgtcacagctgcccaggtgagtgaagtgaggtgaatgtgactcaggttagatgggagacaggaggaaatctcagctgtcttgaaaaacactggaacctgtgaagtgctattaagaccactcttcagtaaggctctgaattttttatattgcttgatgcctctcagatcactaaatgccttctacctggatgaccttccttgttgattataagtcatgtgccagtcagcctcattaaagataaatctttattatattccttttctgtaacagtctttttttccctgccttccatattgtcctagagtctctcgtttacatccaggtattcctggatctgctttctttcaaaatttactctgtgtcacacactcccactcgtgctacaccccttttatttctgt

SEQ ID NO: 23301 - DNA, 1050 bp, Homo sapiens
agaaaatgcttttaagaaaatcaaaaggaagagaaaatatatttattatttattaagtggaagtgaatcatcatgaaggtctttgcccttatggtcttcaggttaaggaggctgaggaagaggagagtttggccttgctgttttgggtggcaaagggggaagaggtgaaggtaaaagggagggcaggagagggaggcacactcggtgtaattttactgaaaaaagaaatctgtgttacaaatggacccacatagttcaaacccatgtggttcaaaggtgaactgtaattcacattctctcatgtgacttgtacagtgagtcttgtcaatgattttccagtcataactattccaaaatattccaaatgttttggaataatctttctttaggagtatattttttaaaactttttattttgaaataattatagatccacagagaattacaaaatgatacagagggttcccccatgaatttcagttattgtagtacacgattctttttattcattgctggattgtttgctgatattttgttgaggatgtttgtacctaaaattatgaaagatactggtctatagttttctttttttgtgctttctttggttttgatgtcagagtaatactggctgtacaaagttaatttggaagaggtcttcctctttgattttctggaagagtttgtgtaaaaatcacattaattcttcttcttcttcttttttttgagggggacagagttttgctcttgttgcccaggctggagtgcagtggcacaatcttggctcaccgcaacctctgcctcctgggttcaagcgattctcctgcctcagcctcccgagtagctgagattacaggcatgcaccaccacgcccaggtaattttgtatttttagtagagacggggtttctccatattggtaaggctggtcttgaactcctgacctcaggtgatctgcccgcctcagcttcccaaagtgctgggattacaggcatgagccaccacacccggccaagactaattcttctttgtaagtttggtagaattctctggc

SEQ ID NO: 23302 - DNA, 1051 bp, Homo sapiens
ggagtagaagcctttaaggaaaggcatatctattaagtgtagacttctaaaaatgagtaaagacataaagagtatagttttaaataggcctcctagttttctagaatatttttcatcattcagggtacgaataatggatccagagcatagaaaaagtatatgtttcaggaatacatgtgtacagatgtgaagaaatgctaaatgtggttgattaatgccactagtgacaattaggagacctaggtttgaggtggaaaaggcaatgattttttaaaatgttattttgtgttagggcacagattgctgtgaataaagtagtaatagcagctaagcagttttgttattttcttttttctttttctttctttttttttttttgaaacaggatctcgttctgttgcgcagactggagtgcagtggcacagtcacggctcactgcagcctcacactcgggctgaagtgatcctcccaccttagcatcctgagtagctgggactacagttgtgcaccaccatgcatggcggatttttttttttttttttgtagacacaaggtctgtgtctactgtgttgcccaggctggtcttgcacttctgggtccaagcgatcctcctgactcagcctcccaaagtcctagcattacagttgtgaaccactgcaccccactgtgttttattttcaattagtagataaaagtgtattaataagaaaattcttgttacagctattgtgctgaaatgaagtaaggctaaaactagtgttgagccctctgtcactgatggcagttatgggtgaaaaccaaattgggcagattcaccagttgctgctgccaggagaagcctaattagacagtgtcagggttggggttgagtgtggaaattttttggaattctcaaatgcttgagtataacaatcatgccgttaataataggaatccagtatctccaatacttttatatagaattgcctggaggctgctatgtttgtgtttgttaggctgtgttatcatccattaagtaaaaatgatataatttctgttgtttttcatccaa

SEQ ID NO: 23303 - DNA, 1026 bp, Homo sapiens
gtagcagagatgtaataattgtctaatccagagttcatagaaaaatttcaccaattgttacaattttgtccttatagctttttttttcttcttcttttttttgaaacggagcctcactctgtcccccaggctggagtgcggtggcgagatcttggctcactgcaagctccgcctcctgggttcacgccgttctcctgcctcagcctcccaagtagctgggactacaggtgcccaccaccacgcccagctaatttttttttatttttatttttttttactagagacagggtttcactgtgttagccaggatggtcttgatctcctgacctcgtgatccacccgccttggcctcctgaagtgctgggattacaggcatgagccaccgcatgcccagctccttatagcctttttttgccccttatctggcgtccaatccaaaatcatatctaggatcaaacatttaatttaattaaatcatctctttagtctcttttaatggaaaacaattcctggacttttctttgatcctttgtgatcctgacttttttgaaaactacaggcctgttattttgtagattgttcctcagtttgtatgtgtttgatgtttcctcatgattcaattcaagtgtgctttttttttttttttttttttttgagatggagtcttgctctgttgcccaggctggagtgcagtggcgcgatcttggctcactgtaacctccaactcccgggttcaagcaattctttgcctcagcctcccaagtagctgggattacagatgcccgccaccacgcctggctaatttttgcatttttttgtaggaatactgcttcagttcattggccagcaccttcagttagttgctttttgtattatgtccagatctgataggtgtatcttcaaggaacttagtccagtaggatcttaatgatattggattcagaagtcttctcaatttcgtttcaatttgaatttctctttatttaaatgatgagcattttacatgttgaatgaccgttgactttt

SEQ ID NO: 23304 - DNA, 1068 bp, Homo sapiens
acaccaggttgatttttgtatttttagtagagatggggtttcaccatgttggccaagctggtctcaactcctgacctcaggtgatccacctgccttggcctcccaaggtgctgggattacaggcgtgagccaccatgcccgactctcacttcatatgtttaaagaatgagtaaaagaaagcaattactactgctaaatgtgggaaataatggactagacctgtactaatatatggtagtcactagcaacctgttgagcacttgaaattgagttattgagcactgaaatgtggctagtccaaattcaaatggtgtttttttgtaaaacacaagattctgaagacttagttattttaaaaaagttaagtatctcaatttttcatattgagtacatattgaaataatattttagatatattggttcaaataaaatacattaaaatgaataacacttttttgtttttaaaattgttataggaaaatttatatatgtagctcacgtatttctattgtcagcgctggcataaacaataaaaagtagacttggtttttttgtgtgtgtttctttaaaagataccaatatagtcaagacctttgcagttttgatcacagaaatatgaaagattacacagctacagctatatgaatgataaaagtgacagctatggatttttaaagttataagttgctatactacatatatgtaatgtgtgtgtgtatagtgtgtaggtatatatatttatatttatacacacactatacatgtattttaaaatattgaaaatccagaattattttatggtaaaaattactaaaattgacttcacatgctgaatgaagagagcctgagtagaccaacaaacaaatgaaaaattaagacggttagaagatacgctttctaaaagaatacatttagaatctaactttaaaaaaaaaaaatcctactctcctgagccagagtggtctcagagagactccgagaacctaattttttacaagtaaaatctttgaagaattggtaattgctaaatttttccaacatactattctacaagactaacctaaaact

SEQ ID NO: 23305 - DNA, 1035 bp, Homo sapiens
cacacgcctgtagtcccagctactagggaggctgaggcaggagaatcgcttgaacttgggaggcggaggctgcagtgagctgagatcgtgcctctgcactccagcctgggcaacagcatgagactccgtctcaaaaacacaaacagcaaataaaaaaacctgaagtccaattcccttccctttgcatgtgagctgaacctagatgaacagaatcttcaggatcacctttccctggtgctcatgctcacttgttcattcactctcgtgcaaatccggcctcctctacctagggcttctgcagaggctgctgacagagccatttatagaagtttcattgaatggtgattctcataattgtcacattagatattgctggagtcttaaccaagggtttttaacagtcatactctatctgttctttggagaacagataacctgcctgtgaagtgcccactctgctccctctctgaaataatcattgtgttaatgttgaggccatgcttcctatgggctgcccccagctccttttctgagcataacataagtattcatgctagtcaattcttacgaaacccagacccttcagctggggaactgtgaatcagccaggctgaaactgttttcatactgccccgcgttttcatagtttttctaccaatcttgcttcatccctctccttcagagtcatccatcttgtaccatggcctgaaggctttcactgcctttcctggacctctttttcattcatagccccctccttccttctgatctgatcttgctttttgcttttcagaggatcaaaatgaacacataccctaaggttacctacatactatgtttccctaacagcactctggattttatctttgtccagagactatttctgaagtttagcatcatttgctttctggagaggctgggagtttccaaaagcaagtcctggttcacttctgtttaacagtctttttctagcttatctcacttctagcacttaagcaacaagaagcaagacaccttcaacattctgcttgggag

SEQ ID NO: 23306 - DNA, 1015 bp, Homo sapiens
agctttttagtttaattaagtcccatctatttatctttacttgtgttgcatttgcttttgggttcttggtcatgaactctttgcctaagccaatgtgtagaagagtttttccaatgttatcttctagaatttttatggtttcaggtcttagatttaagtctttgatccatcttgagttgatttttctctaaggtgagagatgaagctccagtttcattcttctacacgtggcttgccaattatcccagtaccattttttgaatagtgtgtcttttccccactttatgtttttgtttactttgtcgaagatcagttggctgtaagtatttggctttattctgggttctctattctcttccattggtctacatgcctgtttttataccagtcccatgctgttttggtaacgattgtcttgtagtatagtttgaagtcagggaatgttatgtctccagatttgttctttttgcttagtcttgctttgaccatgcgggctctttttttgttccatatgcattttaggattgttttttctaattctgtgaagaatggtgatggtattttgatggaaattgcattgaatttatagatcgcttttggcagtatggtcattttcgccatactgattctacctatccatgagcgggggatgtgcttccatctgtttgtgtcatctatgatttccttcagcagtgttttgtagttttccttgtagagatctttcacctccttgattaggtatattcctaagtttgtttgtttttgttttgttttgttttgtttttgttttcttttgtggttttttttttttttttgcagctgttgtaaaagaggttgagttcttgatttgattctcagcttagccgatgttggtatatagcaatgctactgatttgtgtacattaattttgtatcttgaaactttactgaatttatttgtcagatctaggggctttttgggtaagtctttagggttttctaggtatatgattatatcatcggcgaacagcaagtt

SEQ ID NO: 23307 - DNA, 1049 bp, Homo sapiens
gtgtgtgaggtttgtctgtttctcctttgtgagtattgggatttgtctctctttgtgtgtgaatcccgtgtgactgtgtgtgatttgtgttgtgtgtctgcatgtgttcaggtagggatacgtcccggtgtgtttttgtttgtttctgtatcgtgtttctactcatgagctgggggcctgtttgagtcccagtttgggggcccctgggccctgtccccttcccccagcctgggtcccggagtgggaggaggggagaggtgaggctggaggggtcggcccacccctcccgagcctgggcggcccggcagccggggaaggggtgctgggcgaccctgtgcgcctgcccttgctgacagccgcccgcccgttcgccgcccctctagcctaggcgaggacttctaccgcgaggccatcgagcactgccgcagttacaacgcgcgcctgtgcgccgagcgcagcctgcgactgcccttcctcgactcgcagaccggcgtggcccagaacaactgctacatctggatggagaagacccaccgcgggccgggtaccgccgggagggctggcgcagggcggggcggggccaggccgccccaccgccgccgccctctcacccccctctctctccaggtttggccccgggacagatttacacgtaccccgcccgctgttggaggaagaaacggagactcaacatcctggaggaccccagactcaggccctgcgagtacaagatcggtgggtgcagccgctggggcccccatcggtgtcccagcgcctgctgtgtgtcctagcactcgtccatcacctttatcgccttctagcaagtgtctgcctggctggctgtgtgtctgtctgcccatgtgcgtcccgggtgtttcccagagattccacagtttctctgagtcactgagtggcgactgcatctcctcctacatgggcccaggtgcccagttgttgttatttatttatttatttatttatttatttatttttgagacagagtttcacccaggctggcgtgcaatggcgtgatcccccaacctccacct

SEQ ID NO: 23308 - DNA, 1018 bp, Homo sapiens
ggtttcggtgagccaagatcacaccactgcactccagcctgggcgacacagtgagactccgtctcaacaaagaaaaaaatatatagatataaaagataagtgtcaggccgggcatggtggctcacgcccagcactttgggaggccgaggcaggtggatcacctgaggtcaggagttggagaccagcctggccaacatggtgaaaccctgtctctactaaaaatacaaaatttagccagccatggtggcaggtgcctgcaatcccagctacttgggaggctgacccaggataatcacttgaacccgggaggcagaggttgcagtgagccgagattgcgccattgcactccagcctgggtgatggagcgaggctccatctcaaaaaaaaaaaaaaaaaaaaaaaaaaaaaaagtgtcttaatcagtgtgggctgctgtaacaaatatagagagggtggcttcaacaggaaacagttctcacggtcctggaggctggaagtctgagataggggtgttggtagatccagtgtcaggagtgccgcttcctggctcgttgacagccaccttctcccttcctcccggcatggcccagagcaagatcatctcatgttgtgtccctttctataagggcacaaatcccattaataagggctccacccacatcacctgatgacctcccagaggtcctacctccaaataccatcactcagcttcagcacaggagtttggggaagacacaaacattcaacccctactgttccaacccctgcttcacagatgagaaaactgagggagtaggtaagaagacgaggggcaaacatatagcatgggccaggtgaagtggttcatgcctgtaatcctagcactttgggagggaagcaaggcaggaggatcacttgggcccaagagtttgaaatcagcctgggcaacatactgagaccatctctacataaaattaaaacttagccaggcatggtggcactcgcctgtagttccagctacttgagaggctgaggcggg

SEQ ID NO: 23309 - DNA, 1031 bp, Homo sapiens
gggtcacgaagggcccgagtcccctaaattcaggggtgcgtgtgctcccttttgaaggactccctaattcgataggcctgtgtcttgcagtctggggtcatcaaaggctgttcctttctccccaggactgacaggctccaactacccgggactcagtattagccttcgcctcactggctcctctgcacaagaggaggcttccggagtagccctcggtgaagccccagaccacagctatgagtcccttcgtgtgacgtctgcgcagaaacatgttctgcatgtccagctcaaccggcccaacaagaggaatgccatgaacaaggtcttctggaggtctgacctgcagatcctggaggcctgcctgcggggggaggcggggctgcgggactgggtgaaagtggaacgttgtgggaagatggacatgagggcagggtattcccgccccatttgtaacccttcactcgttgcttcacagagagatggtagagtgcttcaacaagatttcgagagacgctgactgtcgggcggtggtgatctctggtgcaggaaaaatgttcactgcaggtaccagacgctcttcacacaccctgccagccttcctagctcctggcaatagacagtggagcagtgcttctgaattagggttttaagcagcttctgacttacacactttttttttttttttttgagacggggtcttgctctgttgccacgctggagtgcagtagcgcaatctcagctcactgcaacctccacctcccgggttcaagcaattcttctgtctgggactacaggcgtgggccaccacacccagctaatttttgtatttttagtagagacggggtttcaccatattggccaggatggtctccatctcctgacgttatgatctgcctgcctcagcctcccaaagtgctgggattataggcctgaaccattgctcctggcccctaactcacacttttatctgtgtgtttttttttttttttttggagacaatatctttctctgtcacccaggctggagtacag

SEQ ID NO: 23310 - DNA, 1087 bp, Homo sapiens
cactctgttacctaggaaagaggcaacactatccagcaggtaaaacttgcccacccagttgctgggagaggcccattgccttgggctggcgaaggagataggaatgggattctctatgggaatgaaggaagagaaggagaaacgccgtgcataattggtaattggctcatcttgaagcctcacgttgggcagtcactccttagacccctgccgttgacctgcagaaaatgggagatgggtacaaacttgaggggacctgggtttggggagcctccaaagacgggaaccaaccaaacttgtctctcctttgcagatggtccatacccttacactctgaagttgtgtttctccactgctcagcacgcctcctaattaggtgcctaggaagagtcccatctgagcaggaagacatttctctttcctttatgccattttttgtttttgttatttgcaaaagatcttgtattccttttttttttttttttttttttttttaaatgctaggtttgtagaggcttacttaaccttaatggaaacgctggaaatctgcagggggagggagaggggaactgttatctcccaagattaaccttcacttttaaaaaattattgtacatgtgatttttttttttcctgttcatacatttgtgctgcccatgtactcttggcacatttcaataaaattgtttggaaaataaacacagcacttgctgggattccaggatgtctgcttttctccctctctgtcctgaagacacaggcaggcctgagcacagtcacaggccctctggaggcatacagagacccaagaggagcagggtgggctgcagactgagaatggtgctagcaattgagtctttgaggaaaatccatcaggcttagtggcattcttactgggccctgcccgagcaagctctatcaggcccagtgggtcatcacacctataattccagcaatctggggaggccaaggtggggcacatactttgagctcaggagttgaagaccagcctgggcagcatggtgaaacgtcactacaaaaaggtgggtttggtggaacacctgtagtcccagctactcgggaggct

SEQ ID NO: 23311 - DNA, 1027 bp, Homo sapiens
gccatatgggttttgttttttaagtcatttggtttggggagggccttgttttttttctgttttgatatttttattttttctgcagtcaccggctgccaacataatctgcaccaactggagatcagaaaccaaaaaaaaaaaaaaaaattttaaccacaacaaaaaaaaaatcaaaaaaaccaaaacagacctaaaaccagacagccaaacagctcagaggcacacagttacctgctgccgggtaaccaggcgcgctcccaaggccaaaagcgcgagcgtagtggggccactggcacacctcataccaggagacacgcacacggagcgctacacagccagaagcaccgcaccaccgcactgcagcacatatgtgaggaggtgacaacatggagggacactacccacttcatacacctttatttccacttttctgatatcttctgaggacagaacatctgtgagccatttttgatttaatcaaaatattgacttttaaaacaattctttaaaaaaattgtagcggatgtgtaccgtgacttgtatttatgactgtaaaaccatgtgatgcagggtcgcagtgtatgtttgatgggacgccatctttcagaactgtgctaactcactgttgaagcgtccaatggtaagagaaaatacagatttgttttttgtgacaaatggacattgtactctgtacttctgctgtaagtagtccttttccattttgtaatgactggtaacaaaacccaggccgggtggcaggaaagggcagtggtttcgagccctgggttttggagtcagccagacctgggttcaaatatggctcagccactgtcttgctttgtgactttgggccaaagtgtcttttaactgctcagttaaaagttaacaactcagtcttcttatctgtaaaatggggctgaaatatcagaacctacctcatagggttgttgtgaggaatttcagaagctgtgatgtctgtaaagcgcttagcccagtgcctgccacttaagcgctaagttaaaggcag

SEQ ID NO: 23312 - DNA, 1035 bp, Homo sapiens
ctgtaatccttgtggccctgtccagagaattgtcattttcaggaagaatggagttcaggcgatggtggaatatcctttgctggaaaacaggtgttccttagggtagggactcttgcagggcttgacagtggccattctttgagccagcatgtgtctgctgaccacgggagtggctgccatgtgccagatgccttcacagagcccagtgactgagtagggaggcagttaaaggaccaggcatatcgtgtggacgtgcagatcttaggggagagagcagtgtgttgggagatacaaaggaatttatttttctttttgttttctttctgttatttacttatttatttattgagatggagtttagcccttgttgcctgggctggagtgcagtggtgcgatctcagctcactgcaacctctgcctcctgggttcaagcaattctcctgcctcagccttcctagtaggattataggcgcctgctaattttttttatttttagtagagatctggtttcgaactcctgacctcaggcaatccacttgcctcagcctcccagattacaggtgtgagccaccgcgcctggctaggaatttatttttaaagatgtttattctaagttcaaatatgagtgacaaagatttggggaacatagtctcaagaggtcctgagaaaatgtgcccctgggaaaaggaatttatttaaaaggggatatggggccgggcacagtggctcatgcctgcaatcccagcactttcggaggccgaggtggacagatacctgaggtcaggagttcgagaccagcctagccaacgtggtgaaaccctgtcgctaataatacaaaaaatagccaggcatggtggtgaacgcctgtaatcccagctactctggaggctgaggcaggagaatcgcttgagcctgggaggcggagattgcagtgagccgagactgtgccactgtattccatcctgggcaacacagcgagactccatatccaaaaaaaaaaaaaaaaggtggggcatgtgtgaaggttgctgagga

SEQ ID NO: 23313 - DNA, 1032 bp, Homo sapiens
cactgtgtacagcctgaaagagtgccagcccacccacacccctgagattgcctttcagacgtggggtggtgcagaagcgggcatcagaatacctcacaaatgcacagtggagctttgctaaggatataagagcctcctgttaggctgtggcaactcactcgcctggctcccaaagcacgaccactgtcagagaaaaaggttgaatgttaaaaaggatcctcagtcccaaagagagagaggcgaggatgtaaaatgcagcattgtccgtcacagggcaaaactggaaacagtccaaatggctgtcagtggatgggttaaatgaactatggttcatccatacaatccaatactatgtagctgctctgaaaaacgaggtgaggccgggcacggtggctcacacctgtaatcccagcactttgggaggcagggggatcacttgagcccaggagttttgagaccagcctgggcaacatagcaagatgccgtctcttttttaaaaaattattttttaaattaggtgggtctgtagcatattgttctgccgaaaactcaagatgttgtattgtactatgacctatttctgtaaaaaatattagttttatgcagagaaaactggagtaatttccattaagcttagctaacagtggttatctttataagggtgggcttgggcaattacaaggtgagtgccgcaagttatatgttgttgaagtatacatgagtataatcaaggtttttgcagaggttgtccaatctctctttctctctgtctctctctctctctcattctcactctctctttctctctctctttttttttgagacggagtctcgctctgtcacccaggctggagtgcagtggggtgatctcgctgactgcaacctccacctcccaggttcaagcgattctcctgcctcagcctcctgaatagctgggactacagacacgtgccaccatgcctggctaattttttgtatttttattagacacggggtttcatcatgttggccaggatggtctcgatctcctga

SEQ ID NO: 23314 - DNA, 1029 bp, Homo sapiens
tagtgccacctttccgtgactcctgctgtctccctgcagcccgtcggggatgagagccaggctcgagtgctccacatggtcggagacaagccaggtgggccacaccccaggcctgggagctgacaagccctgcggtgtgggggttctggggtctcggggtgggggcccctggggtctgggaacatgtctggagcctggagaactcctggcggtacaggaggtggctccagcttcctgccttggccgagctcgagctgtctctgagaggcggtccttgggttttcattctctcccccttcaccattgggcagtctcaccctgtgttgtgtgattgtatcgtatgtgtgtgagtgtgtgtcgtgtatgtatgtgttgtgtgactgtgtgtcatgtgtgtctgtatctgtgtgtctgtatctgtatgtgtgtgtctgtatctgtgtatctgtgtgtgtctgtatctgtgtatctgtgtgtgtctgtatctgtgtgtgtgtgtctgtgtttgtgtgtgtctgtatctgtgtctgtgtctgtgtgtgtgtgtctatgtgtgtgtctatctctgtgtgtgtatatctgtgtttgtgtgtgtgtgtgtctgtgtgtgtctatgtatctgtgtgtatgtatctgtgtgtctttctctgtgtctgtgtgtatgtgtctgtctctgtgtgtctgtgtgtgtatctgcatatctccgtgtatctctgtgtgtatgtctgtatctgtgtctgtgtatctgtgtctttgtgtgtatctgtgtgtgcgtgtctgtctttgtgtgtctgtatccgtgtatctgtgtgtctgtctctgcgtgtctgtgtatgtgtctgtctctgtgtgtctgtatatgtgtgtgtgtcttcgtacctctgtgtgtatctctgtgtgtgtatgtatgtgtgtgagtgtgtgtgtgtctctgtctctctctctgacccccctgctttggtccctgtctccggggctttttctccccaactctgtgcctcctctctgattctcctcctcccttcctcg

SEQ ID NO: 23315 - DNA, 1033 bp, Homo sapiens
aacaccggtgcctggggctccttcgcagacctgcttcgtgacctctttcgagtgagtggcccaagtgagaggccccgatccctggggcaaaggccccaaagaaagggaccctaccccccacactgtcctcatcgtcaccttcaccctctccttcccccatttatttattcattgattcattccatcaatcaacaaatacttgttgagggtactgtttcatatgccagggatacaaggaaagatcaggaaggttagcaaccacaggcagcaatgctctgtgcatcatcgcctgcagtttgtgagacaacagcaagacagctttgatctaaagacagggttttgggccgggcacggtggctctcgcctgtaatcccagcactttgagagcccgaggtgggcagatcactttaggtcaggagtgcgagaccagcctggccaacagggggaaaccccgtctctactaaaaagacaaaaattagctggacgtggaggctgaggcaggagaatcgcttgaacccaggaggcaaatgttgcagtgagccgagattgcaccactgcactccagcctgggcgacagaatgagactctgtctcaaaaaaaaaaaaaaagggaacatggcagattagcacccaagatggagtcgcttttgcctccacaaggagttactctatactagacactttacatataattctggcaacaaccctgtgacatagatactattattgcccccactttataacaggaaactgaaggccgggcacggtggctcatagctgtaatcccagcactttgggaggccgaagtgggaggatctcttgagcccaggagtttgaggttgcagtgagcctaggatcatgccactgcactccagcctggcaacagaataagaccttgactcaaaagaaaagaaaaaatgagaatctgttctccatggaatgatggtgccacctctacagtttatgaagtttctgtgtatacctacgtctgtccctggcactctgttttttttgtttttgtttttgttttttga

SEQ ID NO: 23316 - DNA, 1903 bp, Homo sapiens
gcatgggagggtgagggggagtaaaatatgaaagggacaacggatgggagatcacagtgggttggaaggatcatgcgagtggggcactggagggaatgaggtggaaagaaaaagtgatgggtggagagtgagtgtgagattgaggttctgaagaggctgctgttattcaaacaaggtctgggtttgaccacgagagggagatgttggggaaggaaaaagtcactagagagaggtcagggaacagagaggttggggctgcggaagaactatctggttatagaaatcactgagaatgatgctaagagcagcgggagcggccgtgagcccagagctaaaattagggagaagagaggagtcatgatctgggtcagcagatgacgcatgaagcaaggtagtgatgagattcatcgctgggggttttggggagggtggagggagaatggtcaggaagtagctcccaggagcacggagacctccccacttggaaggcccacaggagagctgggttccagttagagcaagaaggtggtaggaatgttcagagaagtaactgaggcaagaagagattttgttgaagatgggtcatgggttccaaaggtcacagtagctggcacacattggggtatggggtagaaatggtttcttccgcagtgggtttccttgtgggtctgtaacccgactgaggtttggccgctcaacactcaaaagccaaactcaggccaggcgtggtggctcacgcctgaaatcccagcattttgggaagctgagacaggtggatcacttgaggtcaggagtttgagaccagccggctaacatggtgaaaccccatctctactacagaaattactggctcggtgtggtggcacacatctgtaattccagctacttgggaggctgaggcaggagaatcgcttgaacccgggaggcggaggtcgcagtgagccaagattgtgccactgcactccagcctgggcaacagagtaagactcggtttcagaaaagaaagccaaactcgggccgagcgtggtggctcaagcctataatcccagcacttcgggaggccgaggtgggtggatcacctgaggtctggagttcgagactagcatggccaacatggtgaaactgtctctccttaaagatacaaaaattagccaggtgtggtggtgcattcctgtagtcccagctactcgggaggctgaggcaggagaatcacttgaacctgggagacagaggttgcagtgagccgagacgggccactgcattccagcctgggtgacagagtgaggctgcctcaaaaaaaaaaaaaaaaatagaaagccaaactcaagagagatgacagttggtgggaggaaaagcaagtttatttggagagccagcaaaccgagaacacagtggactatcatcctaaagtaccatcttaaatcagtacaattttttttttttttaggggcagagggaagagaagggcattgtgatcaagaggtgaccaacaggccaggcgcagtgactcataccaattccagcactttgggaggctgaggcaggaggatcacttgaacccaggaattcaagaccagccagggcaatgtagtgagaccccatctctacaaaacaataaataaaataaaaaactagctgggcatagtggcatgcacctatagtcccagctacttgggaggctgaggcaggaggatcactcgagcccaggaggtagaggctatagtcctggtttctagctccataaaaaagtaataataataaaaataaggaggtgaccactgcagacatctgagtgccagctagggtccgaggaggttgatgacttctttgtccttggttgggtcacaatgcccctataaatctttgaaaaaacaggctgggcgtggtggctcacacctgtaat

SEQ ID NO: 23317 - DNA, 1199 bp, Homo sapiens
aataataataataataataataataataataataataataataataaaataacacattgtcagggcaggcgcagtggctcacgcctgttaatcccaacaccttgggaggctgaggtgggcggatcacctgaggtcaggagtttgagaacagcctggccaacatggtgaaaccctgtctctactaaaaatataaaaattagccaggtgtggtggcgggcgcctataatcccagctactcaggaggctgaggcaggagaattgcttaaacctgggaggtgaaggctgcagtgagctgagatcgcgccactgcactccagcctgggcaacaagagtgaaactctgtctcaaaaaaaaaaaaaaaaaacacattctcggcccggcgcagtggctcacacctgtaatcctagcactttgggaggctgaggcaggtggattacctgagttcgggagttcgagaccagcctggccaacatggtgaaaccctgtctctactaaaaatataaaaattagccaggcgtggtggcagaggcctgtaatcccagctacttgggaggctgaggtaggagaatcgcttgaacccaggaggtggaggttgcagtgagctgaaatcgcgccactgcactccagcctaggccacagatcgagactccatctcaaaaaagtaaataaataaaaaataacacattctctgcacacacccttgcccactttggcttcctcctgcatgagaccctggttaaatccagccttcctctctgccgtgcctgcacccacacagcttgagtgagctaaaaaacaacacagccccctggccaggctaatttcaagtctgtgaacttgaccctcaggcggaccccaatgctgcctggcagccatatgacatttctctgatcccctccttcctcctgtcttctagacaactaattcacaccttttcccttctcctctaatcctttccaacacctcctccccccctttcactctcccttggcttcttattttgcagagaaaatgcaagagatgagaagtgaacttccacagccacccccgcctctaccacctacctgcacccttgcccacacccgttctcctgctgtgactgtcccatcacctgctcccaccttcccgcccacttccagccaccgtccctggttctcacctctctctgctgctcattcagtttcccccatgcactggat

SEQ ID NO: 23318 - DNA, 1038 bp, Homo sapiens
tacttcagtaaaaaatgtccagtgggccaggcacaatggctcatgcctataatcccagcacttcgggaagccaaggcaggaggatcacttgagctcaggaggttgagaccagcctggccaacgtggtgaaaccctgtctctactaaaaatacaaaaattagcagagcatggtggcagagtagctgtaatcccagctacctgggagtctgaggcacaagaatcacttgaacccagaaggtggaggttgcagtgagtcgagatcatgccactgcactccagcctgggcgatagagtgagattcagtctcaaaaaaaaaaaaaaaaaaaaaaaaaagcccagtggtttccaaagtgattccaaatggattccaccaggaatgtatgggagttctctttgatagtatttttagtgaattgcagtaacattgcactgttttgtgtttgctcattttcttttttcttttctttctttttttttttttttggagatggagtctctgtcacccaggctggagtgcagtggcgggatcttggctcactgtagcctcaacttctgggctcaagcgatcctcccacctcagcctctctaataactgggactacacacacacgccaccatgccctgctaatttttttgtagagacgggggtctcactatgttgcccaggctcgtcttgaactcgtgggctcaagcgatcatcccaccttagcctcccaaagtgctgggattacaggtgtgagccatcgcacccagctgtacatttgcttttacattgtcaaggtggaaacatctacagtctgttctgtttccatatttaagccctacatgctttaattgcaaagtttgctgtgtttttttaatcagcttttttgaggtgtaatttacataccaaaaaattcagccctgttaaagtggacaactttgtggcttttagtgactttacagagttgtgcaaccatcaccaccgtaacaaagcatgttcatcacccccaaaatatcccttgtgcctatttgtagtcactctgttcccagcctagc

SEQ ID NO: 23319 - DNA, 1056 bp, Homo sapiens
aaccccctgcactgcaactgcgagctgctctggctgcggcggctgacccgcgaggacgacttagagacctgcgccacgcccgaacacctcaccgaccgctacttctggtccatccccgaggaggagttcctgtgtgagcccccgctgatcacacggcaggcggggggccgggccctggtggtggaaggccaggcggtgagcctgcgctgccgagcggtgggtgaccccgagccggtggtgcactgggtggcacctgatgggcggctgctggggaactccagccggacccgggtccggggggacgggacgctggatgtgaccatcaccaccttgagggacagtggcaccttcacttgtatcgcctccaatgctgctggggaagcgacggcgcccgtggaggtgtgcgtggtacctctgcctctgatggcacccccgccggctgccccgccgcctctcaccgagcccggctcctctgacatcgccacgccgggcagaccaggtgccaacgattctgcggctgagcgtcggctcgtggcagccgagctcacctcgaactccgtgctcatccgctggccagcccagaggcctgtgcccggaatacgcatgtaccaggttcagtacaacagttccgttgatgactccctcgtctacaggtgggtgcgggtgctgcagtcccagggcctcctcccaagcccagggggaccctccctcccacctgcccattcccttggccttcttgctcagccagggttctagatggctgtgagagctgttcccgccctcctttgccctgtctcctctctctatttctcactgtctctgtttttcgtgcttatagaaaatattcgctgagcacctacatgaacccgaccagggctgggcactggagtcctaacagtgactgagctcagcatgaaccctgccctcatggggctcatggtcgatatcactgctccccacaacaatctgattgtgcacctcttcagttaaacattttggagcatgaaacacacacacacatttacagtgacatttatttatttgtttgttttgaga

SEQ ID NO: 23320 - DNA, 1035 bp, Homo sapiens
gcctgcagtattcagtacagtcacatgctgtacaaccttgtagcctaggagcaataggctacaccattacagcctaggtatgtagtaggctatactatgtacgtttgtgtaagagtactgtatgatgttcacatgatgtatatctcagaatgtgtccctgttaaatggcccatgcccgtatttatgtaaatacaccgtataacacacacacacagtgtagggcaaccaaactggtgccatgggagccatccttcctttcccctgccctcaataccttgagcttagctgcccttattcaatctgtatttattcccatttactctaagtattgatggggaaccaagtcagaccagacccctcactggggggcggggaagtgggaggtgtgtctttaactgcatcttccacttctctctcccaaattcaccccctgcagggtccgccttagtaagcgccgggccaaggctggggttcagtcaggcaccaacgccctgcttgtggtcaaacatcgggacatgaatgagaaggaactggaagctcaggtaacaagcaccactggctcagggcacccatggcagggagggtggtggttgtaggtgaggagggggacaaaaacccagcagaacaccctccttcccctcattccaatcttgctgcttccaggaggcacggaaggcccagctagaaaaccacgaaccggaggaggaagaggaagaggagatggagacagaagagaaagaagctgggggctcaggtaaatctggacaggccagactctgggagccctgggagggtggaaaagtgggtttcatctctctccactcccttccagatgaggagcaggagaagggcagcagcagtgagaaggagggcagtgaagatgagcactcgggcagcgagagtgaacgggaggaaggtgacagggacgaggccagtgacaagagtggcagtggtgaggacgagagcagcgaggatgaggcccgggctgcccgtgacaaagaggagatctttggcagtgatgctgattctgaggac

SEQ ID NO: 23321 - DNA, 1050 bp, Homo sapiens
cttcccagactttaaggtcaggcccaaggtgggaggtagaaagggacagcctatttgtgcctgttcccatctaaccccagtgcctccatctccctagatgtggatcaatccatgtgctcaggtgatctttgactcagacccagcccccaaggacacgagtggtgcagctgcgttggagatgatgtctcaggccatgattaggtaggtggtcctgctgtccaccttggcctgctccttgctgcctcttgtcctcacacttcattgctactccttttcccccaaccaggggcatgatggatgaggaagggaaccagtttgtggcctatttcctgcctgtagaagagacgttgaagaaacgaaagcgggaccaggaggaggagatggactatgcaccagatgatgtgtgcgtgggttgcggttaagttttggggattgggaagttttggggattgggatagggaagaaatggggctgaacctgtgccctcatcttcaggtatgactacaaaattgctcgggagtacaactggaacgtgaagaacaaagctagcaagggctatgaggaaaactacttcttcatcttccgagagggtgacggggtttactacaatgagttggaaaccaggtactcagcacactcctatctgattagcctggatctgtgcttcttaagaccctggggcatgcaagagccaccttggaggtcatttgtacctaagaatttgtcatatgcattggtaaacaagagcagcagatgtctggtcatgcacatgagctggacttggttctaacaggaggagccagaaaaaaaatctttttttttgagatggagtctcgctctgttgcccaggccagagtgcagtggtgtgatctcagcccactgcaacctccgcttcctgggttcaagtgattctcctgcctcagcctcctgagtagctggcatcacaggcgtgtgccagcatggccagctaattttttttgtatttttaatagagatggggtttcaccatgctggccaggctggtcttgaactcctgacctcaggtgatct

SEQ ID NO: 23322 - DNA, 1122 bp, Homo sapiens
agtacttgaaggccagtggtggcagaagccacagaaacaagaagcccagtgagatggctaagctgcccagcatgtaacttaaatccctgttcattccccattcctttagctgctggagccagttctgcttctcggcaaggagcgatttgctggtgtagacatccgtgtccgtgtaaagggtggtggtcacgtggcccagatttatggtgagtcccaggaactgggcgcatggaggaggtggctctgggagggaggccttcacagcgctcctgtaccctttaattgtgtgtctttctcacagctatccgtcagtccatctccaaagccctggtggcctattaccagaaatgtgagtgagcatgggtccttcccatgaggtagatgggtgtgtggggatcaagtcaaggactctgtgtgattatctaaatcctcgtccctgctcttcttgccagatgtggatgaggcttccaagaaggagatcaaagacatcctcatccagtatgaccggaccctgctggtagctgaccctcgtcgctgcgagtccaaaaagtttggaggccctggtgcccgcgctcgctaccagaaatcctaccgataagcccatcgtgactcaaaactcacttgtataataaacagtttttgagggattttaaagtttcaagaactgtgtgtggccttatgtgttggtattggatgtttaaccagacagaaatcagtaaacatcctggacctattgccagtctggattttgaccctccccagaagtggtcgcgctgggcttggtgtgggtgagtggaagcagaaggcagggggtctctgtctctacacctccagtagagtccagtgtgcaggcaaagctgagatggcagtcgtttggggccattagtggctgcagaccttggcggatatatggctcatccttgtggatgtctatttttttcaagcccagcctcccaaatagcttggattacaggtacccaccaccacgccatgctaattttgtatttttagtatcgatgggtttcactgtgttggtcaggctggtctcaaactcctgacctcaagtgatccgccttcccgggcctcccaaagtgctgggattacaggcgagagccaccaccc

SEQ ID NO: 23323 - DNA, 1173 bp, Homo sapiens
ccttcccttcagtccgcacacgacactcccaggccccgccccttccgcccacagagcccgccacttccgcctcacagggcccgcccgctctgagcgcctaagggccttcccgccgctgaccagacgccccgcccgttagccgcaacagaagccgtaaagctctctcccgtcgcgacgcagtgctcaaggcgcctgcgcagaccctgaaaagcggccagggtggcccctagctttccttttccggttgcggcgccgcgcggtgaggttgtctagtccacgctcggagccatgccgtccaagggcccgctgcagtctgtgcaggtcttcggacgcaaggtgagccagacgccggatgggaaggggaggggaaggagaaggccagggtctgggagaggtcggtgggcaggaatctagggggtaacatgggagctggagccggagctcacggggcccctgtttctcttgtatcttacagaagacagcgacagctgtggcgcactgcaaacgcggcaatggtctcatcaaggtgaacgggcggcccctggagatgattgagccgcgcacgctacagtacaaggtgctgggatccggcaccggcgttgagtggatggaggactcttggagacagagatgttgtagctcttgaaagctgggggggctggcatcagcaacgggatgtttagaagttgtgttgggtgtagaacagtggggtatttggcaatagagctgggcttggggttcagaagatgtaaaagctgagatggggttgttgaagattaagggtttgctttgagaactgggatgttaggaagctcacctcactggggcggggggacccaaagggtgaagggacaccgactattttttattttatttatttgttttgagagggagtctcgctgtgtcgcccaggctggagtgtagtggcgcgatctcggatcactgcaaccttcgcctcccgggttaaagcgattctcctgcctcagcctcttgagtagctgagattacaggcatgcaccaccacgcccggctaatttttgtatttttagtagagacggggtttcgccatattggccagagtggtctcgaactcattacctcaggtgatccaccagcctcggcctcccgaagtgctgggattgcaggcgtcagccaccgtgtgcggccgaattt

SEQ ID NO: 23324 - DNA, 1050 bp, Homo sapiens
aggagttcaagaccagcctggccaatatggtgaaaccccatctctactaaaaatacaaaaaaaaaaaaaaaaaaaatagccaggtgtggtggcgcacgcctgtaatcccagctacttgggaggctgaggcaggagaatcacttgaaccagggaggtgaaggttgcagtgagcagagatcgcaccactgcactccagcctgggcaacagagtgagactcgtctcaaaagaaaaacaaattttggtacatccatccatgcaacagaatagtaacaactaccaatacacccatgactgaatctccaaaacattatgctgagtgaaagaagccagacatcaggagatgtccagcatgattccattcatatgaaactccagagcaagcaaaaccaacctatacagacaatgcagattagtggatgtctggggctggagagggaggtggaaattgactgggaagagagagaaggaatgctttggggtgatggaaatgtggccatccagtccaccagccggtgcactccagcctgggtgacaaagggagactctgtctcaaaaaaaaaaaaaaaatgtcaggtgtggtggctcatgcctataatcccagcactttgggaggccaaggggggagtatcgcttgagccaggagttcaagattagcctgggcaataaagggtaaccccatctctacaaaaaatacaaaaattagctgagtgtggtggcatgcgcctatagcgctagctacttgggggactgaggtgggagagtcacttgagcctgaaagatcgagcctgcaatgagttttgatcatgccactgcactccagcctgggtgacagagtgagaccctgtctcaaaaaaatatatgggcagatgccaagttacagcctgtgcagcatagtgaaaccctgtctctaaataataataaaaataatatagatgctcaggcttcaccagagaccaattatcaaattatctgggctggggtctggccatcagtattacttgaaagttctccaagtggtgggctgggcacggtggctcacgcctgtaatc

SEQ ID NO: 23325 - DNA, 1944 bp, Homo sapiens
tgagactcaaaaaaaaaaaaaaaaaaaacctcaggctttaatcaggcaagttacctaacccatccaagcctcagtttacctgtctggaacatagacttgtgaagattaaatgagttaatttctgaaaggtgcttagagcagtggttggcccattgttacatcatctctgtgccttggcttcctggttttaagcctctgttgggaacctgggctctcaggcagatgggattgggtacttttgctacttgctgaataactcttggccagtgactttatgtctggacctcagtttattcatgtgaaaaatggacatgatagcaatagtcattagatggtagggttttgatttgggggttggaagagatgctgtgtatagtgtatgggcctaaagtaggcactccatgcatgagaactagcatcactgttcattaatttttaatttattttaggatggtctagtctatgcagtcgagttctcccaccgctctggccgtgacctcattaacttggccaagaagaggaccaacatcattcctgtgatcgaggatgctcgacacccacacaaataccgcatgctcatcggtgaggggtctgggggtggccccggtggggtaggacaggccaccgcaggcttctggaagaagccagtggatctctgattcggatggagttggagtggatgagcagacctcttgagtctgcaggaatagaaaggggtaaggggagctaggtgaggttgtggaggtggcagcttggcttcagagtcttggaagccacccttggagggccaacctcttctccttcagtctcctccccatctcctaggtctcctgtacttcctgcctcttgtatttattacactacccctccataaaaagcctccttttgggggtcctaatcattgtctggtgagagcatatcccagaaaactaagcatggcttgatctggaggggcccactgtgaatattaattactttgtttaaaaaaacattcaaagatataatataaaagttgaaaagccttataaaccaccgccagaagtaactgatgagaacaatttgatgtctgcttttcccaggttttaaataatcagttttcattataccaccttttcattttttgaaaagtcacactggcttaaaaacattatttttcattctgctcctttttctttctgtgttttatttttcccatgcactcataccatcccctttgttctgcaacttgttttcatttcacagtcctgcggacactcttgcctataagtgctcactcactcttacttgtctttttgatgacgtgtctgtctccccaccagacctgggagcgtctcgagggcagggtccgggtctgactcgtctctatgtcccccacgcccggcccagggctggccacagagtaggtggcaaccatggtttacaagaagagtggatgaatgatgtgactgtgggttttggactcatcttgggacactggagggagggggaccagtggaggtggggagtgaaactggaggcagggagaatctcccaggaacctgctggtgatgggcataggccccatgggaggatctggggtgatccctgtgactccaacttttaactgctgctcctttctccttagcaatggtggatgtgatctttgctgatgtggcccagccagaccagacccggattgtggccctgaatgcccacaccttcctgcgtaatggaggacactttgtgatttccattaaggtgcggggtttggaagagtctaagatggggtggcagtgttctagggaggtatcttctctatctgtatctgtcaaatagccacccaaaacagaggggccaagtctgcaaaactatagctttggatttaaagaggcaggagagtgcagcggtcaagtgcaaaattgagtctgaccatctgagtttaatcccagcctgctgtgtgactga

SEQ ID NO: 23326 - DNA, 1050 bp, Homo sapiens
aataaagcctgtctgagtctgttatttcttaaacatttcgatcttactgacaagtcgcaaactacttgtaaagtgcagcctatccttaaatgacagtttgttctgctttttcttgtttttcccctgagctgagagggacttctttaagcttggaagcagggagatgagttagggctgacatcatcctgtattcccctctgttttggggctggggttgacacttttcttccagctccaaggtcaggagtgggagagtatgaagacgtttgcagagtctagggggccctgttgtcacagcatgtgctcgtatgcagggctcactcttcacagtaattaatattgacatggaatgaattctgtgaatctgctatgcaaccaaggaaaccaggatattaacagtaacctacatctattcatgtactcctcccctatcccaaccccatattaatatctccttcccattcaccaatatcatgagttttacatttctcattcccttgctccttttcttgggcagtatgattgtggctgggtgtggtgcctgacacctgtaatcccagcacttcaggaggccaaggcaggaggatcacttgagccaggagctggagactagcctgggcaacatagtgagacccccatctctacactatgggagtagtggcacacacctgtaatctagctacttcagagaccgaggcaggagaattgcttgagcccaggagttcgaggctgcggtgagctgtgattgtgccattgctctccaacctgggcggcacagcaagaccctgtctcaaaaaaaaagcactaagcaaaaaaaattattatgattttaacatttattagtctgttgtgtataactgaaggtcattttcatgatcttgattgtgaatgtcttctattttatttgcccattctattgatggacatttgggttagtcttcacttttcttttgctgtggacattcttggaaatgtgtcctgctgtacacgggcacatgtatttcaggtttctcacctgagaggtattgctgggtacaaggtggtttaacc

SEQ ID NO: 23327 - DNA, 1030 bp, Homo sapiens
ctttctttgtttcttatgacaacatttttgaagaaaaaagttgttactttatataatgtctctcaattttgtagtttgatgtattcccataatgagattcaggtcatggatttttagtggaatactggaattactgcataatttatgtgtggcaaaggccatagtgcaaattaaatgacatgatctttgaataagatcaagactccttttgaaaggctgtttgatcagggaacctgcattgctctaccaccttatttcatggctatgagcatcaaattttagggagttgattctgacctataacaaatttagtgccttagctatgcactgatacctccagtttaaccactacttatttggtattccaagaactacccatttgtcttttttacagttttgaaattttcttacaaaagcaatacaacactggaacttttgggcccatgaagtccaagaggactttattaacattaaaacctaggggtttgctgcaacttggcctggttttctagactgtacaaaacaccacctatcttacgatttatattgagggacaagtcttgtgtttctgcatgggccagatcctttgagtggagatatttacaaccaagttaaaactgtttgtataagaatgtgtggctgggcgcgatggctaatgcctgtaatcccagcacttcaggaggctgaggcaggtggatcacctgagattgggagttggagacaggcctgaccaacatggagaaaccctctctctactaaaaatacaaaattagttgggcgtggtggcgcctgcctgtaatcccagctactcgggaggttgaggcaggagaatcacttgaacccaggaggcggaggttgtggtgagctgagatcgtgccattgcactccagcctgggcaacaagagtgaaactccgtctttaaaaaaaaaaaaaaaaaaagaatgtgtgccaccagccaggtgcagtggcttatgcctgtaatcccagcactttgggagggcaaggtggtcggatcatgaggtcaggtgaa

SEQ ID NO: 23328 - DNA, 1057 bp, Homo sapiens
gtttgggtctgccatttaagtttttaatccatttaatccattttcagttgatttttgtatatggtagattggggtccaatttcattcttctgcatatgcatatccaatattcctagcaccatgtattcaggagggtatcctttcccctgtacatgttcttggtgcccttgttgaaaatcagttggttataaatgcacagattcatttctgggttctctattctgttccactggtctgtgtgtctggttttataccaacaccatactgttttggttatcatagccttgtaatatattttgaagtcaggtagtgtgatgccttcagctttgttgtttttgttcaggattgctttcctattggttttttggctacatcagatctaagagttttttgtggattctttagtttttcctagaaataagagcatatcattggtaaagagggacagtttgattttctcctttccaatttggatgtcttttatttatttatcttgcctgattaatctggctaggacttccagtactgtgctgaataggagtggtgaaagtgggcatgtttgtcttgttccaattcttagaggaaagccttttggcttttcctcattcagtatattagctgtgggtttgtcatatatggcccttactttgttgaggtttgttccttctatgcctagtttgatgagagtttttatcttgaaaggatgtttattttcatcaagtgctttgaaatctattgaggtgatcatatggcttttttccttcattctgttatgtgatgtatcacatttattgatttgaatatgttgaactatccttgcattcctgggataaatcccatttggtcatggtgtattacctttctgatgtgctgttggatttggctagtattttgttgagaatttttgcatctatgttcatcagggatattggcttctagttttttgtagttgttgcatccttgtctggttttggtctcaaggtaatgctggcctcttagaatgagctagggagaatcccttctcttcaatttttgggaatagtttgagaattggtgt

SEQ ID NO: 23329 - DNA, 1269 bp, Homo sapiens
gctaaaagtgaaagaaaatgttgaaaaatataagagaaaaatgatgtgtcgcttacaatggaacaccaatcgattgacagctgacttcttatccaaagcaatggaggggatgaaggtagtgggatgatatattcaaagtactcaaacgacaaaagctctgtcaagcagtaacacactgtctttcaaaaatgaaggtgaaataaagcccttcccagacctaccacataagaaattgtaaaggttattcaaacaaagcaagtaaatctacatggaaattcaaaaccacatttttaaaaagaacaaaattaatataattaaaattacaaaaagcagcacaaatgcacatttctttttacttctcttaataaatttaaaaggcagttgtataatacagtatgtacataattatattgttgggcctataacatggaaatgtaatatatttgacaataacagcataaaggaagtaaatgacagcagagttgtattggagtaaggaaatgatacatgatagtaactagaattcataggaacaaaaaaagaaacagaaataggtggccaggggtcgcaagctggtggaggacctgcccatggaggagcccagggagtcagtgcttcttccctccctcccccactcccctccccactcccccccacctccccaagaatgttccactatgagtcttgggaggattgtcttctggatgaagatgaagatgaatttcagggactgagagaagaagatgaagagattgatcaattcaatgatgatatttttgggtcaggtgcagttgatgatgattggcaggaagcacatgagtgcctggctgaattggaagaaaagctaccagtggcagttaatgaacaaacaggcaatggagaaagggaagaaatggacttgttgggtgaccatgaggaaaatctggcagaaaggctcagtaagatggtgattgaaaatgaactagaagatccagctatcatgagggcagtgcagaccaggccagttttataaccccaaccaggaaatctgaattccagtatctgggatggatccaaagttatgaggcaaatctgaggaccactgctcacttaggaaatgtctacagtgtctgtattagaatatgccttgcctcagaggccccccagggtccagaaaatgattgggacctttctgaacatgcattaccaaggtggtcaacttcacctgtcattggcagtcctcctgttagagctgtccccataggcaccccacctaagcagatggccgta

SEQ ID NO: 23330 - DNA, 1029 bp, Homo sapiens
tgcctgacttaaattatattaaactgcttaataatttaggctccaaggaaatgttgaaaacaatggagtgaccagatagacggcagcggagcttagtgggctggaaataataccaagggggcagttatcttaacagagagatagggaaagatagtcaaaaagactcctgtttaaaaccattgtcacagcagggtaactgcatatgtttaaggctgaggaacaacacaaaatacttcacactgcaaggggaaagggaaatcgattttactaaaatagcttagccaaaacacaaaatacatagccaagcaaacaacaacaagaacaagctctggagaggggacaggcaaatcactacagtatgtttcctaatatgtctacttattaggaaaataataaaaagtaaattaagacatgcaaacaaatgggaaagttggacctatacacaggagaacagcaagcaggccaggtgcagtgggtcacacctgtaatcccagcacttttggagaccaaggttggcagatcacttgagctcaggagttttgagaccagcctggactacatgatgaaatcccatctctactaaaaatacaaaaattaggcaggcatggtagcacatgcctataactaggctaagacacgagaatcgcttgaattcaggagggagaggttgcagtgagccaagatcacaccactacactccagcctgggcaacagagcaagactcttaaaaaaaaacaaaacaaaacaacaacaacaacaaaaaaaaacggcaacaggttggcctatgacagggaacagatgtcatatttaatagacaaaaacttcgatgtagccattatatattcacagcagtaaaggaaaatataaagataacgtctcatcaaataaagaaaatcaataaggagaaatgacaaaatgaaccaaatgtaagttctggagttgaagactacagtaaccaaaataaaaaattcattagaagggctaaacaaatttgatcagcaagtaaatagaaaactttcaaacagatca

SEQ ID NO: 23331 - DNA, 1064 bp, Homo sapiens
ctcaaaccttgttcaacctcagagtattcatactggtgagaaaccctatgaatgtaaggagtgtgggaaggcttttagacttcacctacaactttctctgcatcaaaaacttgtacaggtgagaaaccctttgaatgtaagaaatgtgggacagccttcagacatcagtagcaacttactgaacatcagaaaattcatacttgggtgaaaacctttgaatgtaaggaatgtgggaaggcctttcaatatcattaccaatttcatggacattatagatttcatattcgtgagaacccttatgaatgtcaaggatgtgggaaatgctttaccagtggtagaaaccttagagtacatcagagaattcatactggtgagaaaccatatcaatgtgaagaatgtgggaaagcctttagtcatagttcaaacctgttaaacatgttaaaattcatactgatgagaaaccctatgaatgtaaggaatgtgaaaaggcctttagcagtaattatgatcttactgtacatctgagaatccgtactgctgagaaaccctgtgagtgtaaagaatgtggaaaacttttggatttagcttagtctttactgcacatcaaagaattcatactggtatgaaccgtatgaatgtaaagaatgtggaaagacctttacttgtagctcgagccttgttcaacatgttaaaattcatactggtgagcaaccctgtgaatgtaaaggatgtgggaagacctttagacttagttcagtcctttctgcacatcacagaattcatactggcatgaaaccctatgaatgtaaagaatgtgagcaaacccttactgtgaatgatctgcttacgcaacatcagaaaattcattatagttagaagttttatgaatataaggagtgtagacaagccttcactgtgtatgaaaaatttactcaacaccagagaattcatattgatgagaaatcctgtgaacataaaagaatgtgtgaagaactttcatcgtggcctgggatttgctcaacatcagagtattcatactgctgagaactcctttgagtgtaaag

SEQ ID NO: 23332 - DNA, 1047 bp, Homo sapiens
taccatctcacaccagttagaatggcgatcattaaaaagtcaggaaacaacaggtgctggagaggatgtggagaaataggaacacttttacactgttggtgggactgtaaactagttcaaccattgtggaaggcagtgtggcgattcctcagggatctagaactagaaataccatttgacccagccatcccattactgtgtatatacctaaaggattataaatcatgctgctataaagacacatgcacacgtatgtttattgcggcactattcacaatagcaaagtcttggaaccaacccaaatgtccaacaatgatagactggattaagaaaatgtggcacatatacaccatggaatactatgcagccataaaaaatgatgagttcatgtcctttgtagggacatggatgaaactggaaaccatcattctcagcaaactatcacaaggacaaaaaaccaaacaccacatgttctgactcataggtgggaattgaacaatgagaacatatggacacaggaaggggaacatcacactccggggaatgttgtggggtgggaggaggtggggagggatagcattaggagatatacctaatgctaaatgacgagttaatgggtgcagcacaccaacatggcacatgtatacatatgtaacaaacctgcacattgtgcacatgtaccctaaaatttaaagtataataataataaaattaaaaaaatatatatatataaacagaaaaaaaaaaaagaggagttggatgtttgttacaaagagcaaagccagacgattcttggaagatgaagcagtctaagcaagcaagaagataagagaaaggttatatcatgttctggttgctaaaaggagggagtggttagagatcagccacaaaggaggacagtgccctgataggaagttttgttctctgtgttaaggtttttggattttgtgctaagactaaagataaaccattcaaaaccagttttaagtatgatctgtaaactttgatctgaatcagaatcatctggtagagatattaaaaatacag

SEQ ID NO: 23333 - DNA, 1037 bp, Homo sapiens
gacttcaggtcattcatactggcgagaagccatttgaatttgagaaatgtgggaaggccttcaatagtggctcaaaccttgttcaacatcagagtattcatactggtgagaaactctatgaatgtaaggagtgtgggaaaactttcagatttagtttggtcctgactgcacatcaaagaattcatactggtatgaaaccctgtgaatgtacagaatgtgggaagacctttagttgtagctcaaacattgttcaacatgttaaaattcatactggtgagaaacgctataatgtaaggaatatgggaaagcatttgctgtggatgatcagctgtctcaacatcagaaaattcagaatagttagaaattttgtgacaataaggagtgtggacaagccttcactgtgtacgaaaaatttactcaacaccagagagctcatattgatgagaaatcttgtgaacataaaagaatgtgtgaagaactttcatcatggcctgggatttgctcaacttctgagtattcatacttctgagaaatctttgagtgtaaggaatgtggggcgttttatagccacactaaataccttagagttcggagaagataattcttgtgagaaagtctttgaatgaggaatatagggtagttgtcatgttcacaatgtactccctatgaaataatttaccagatacaggcatacctcgctgaattgtgcattgcagttattgtgttttatacaaactgaaggtttgtggcaaccctgtggtgagcaagacgatcaggtccattttcccaacgtcaggtgtgcatttcatgtctttatgtcacattttggtaattctcagaatatttcaaactatttcattgttatatatctatcatggtgatcaatgaccagtgatttttgatgttgctattgtaattgctttgggataccacaaattctgcccataaaagatggtaaacctagttgatacttgttgtgggttttgaaagaatagtcaaatatacaatcatataccccaacctagattcaaaattgt

SEQ ID NO: 23334 - DNA, 1094 bp, Homo sapiens
tggaagcctatcgctggggtctgagacaaaggagttaaagcacctacatgttgacataattttactttaaattcttctttcttctttaaaagttctgctcatttgcattctccatggagagaaaaagtaaattatactgacgctccgagagggaaacgctcttctcacatggggatccttgctcatggcaacaacctgtgcaccccgcgggctggaactcccacgaatccactaggctcggctcccttaggggtcagcccccatagtatgctgggatcaacctgaacggatcacagctcaaggcttctgaggctttttctgttcgggactgtatttcccagcggccaccgcgccagtccacttccggtctccggggtcgacgacatagcggggtaaggtcttcacgtctgaggaagagatctgtggctgcgggagatctctgcggattggggctccagcctgactgacccgacagtgcgggtggcctagggggaggcgctcagagtaggaacccgggggtgcagacgggatctgccggatccccaggcgtgtgtgtgcgcgggtatcagaggagggggattgtgagatcatgagtgacggaggggactgtgagtgtgtgcgtgaggttctatgcacaggcccgggagggcgtgtggacgcagcgcactttgctgagtgacactgtgccggtgcccctaggctcctgctgcttcctccctctttccgcttcacagctgcggggactgcagcagaggaatggccccagtagggaggtcagatattgagccgagaatgaagctttacacaagaaagcgcagaagtgcccccgagtgttccccaggggggcagctacatgttgagaaccacagcgtcctcagagctctgtccccagaaaccagctccaaactggttgtactggttgaatcgattcctcttccttttacttccttcctatttcgtgtgaagtgagggaaattgtggctatggagggagggtgttttcaaacttagtctgcgctccaagaaatgcctggagtctcacgcttgccgtatccttctccagtcgtatttttatccaaaagaaggacctggagg

SEQ ID NO: 23335 - DNA, 1023 bp, Homo sapiens
tgcccgccaccatgcccagctaatttttgtatttttagtagagacggggtttcatcatattggccaggctggtctcaaactcctgaccttgtgatccacccacctcagcctcccaaagtgcttggattacaggcatgagcccccgcgcccggccaattttagaagatagtttggcagtgtccaccaaagctgagcaccagtcatctgccctagctgtgtgcacaggagaagtggggacacacactcaccttagaaagtgtccccctcactcagcagcaggacttactctagccccaactggaacaacccaagtatccactgtgagaggaacagtcagatccactgtggagtgttctcacagtgggacgccacacagcagttaggaatgagctacagctacacacgacagtgtggacgcgtctcataggctaatgtcgagggaaagccgcacagaggaggtgagtccacagttcacaggtgtgtctgtgtgcagtggtacagatgggaagtagaggttaattcttgtgggggatggtcagtaaccgggaggggcacacagggccttccagggggagatgccacctcagcctcgcaagtagctgggactataggtgtgtgccaccatgcctggctaattttttttttcatattaagaaatatggagatggggtctcgctgtgttgcccaggctggtctcaaactcatgggttcaagcaatcctgccacctaagtcccccaaattgctgggattacaggtgtgagccactttgcctggctgcatatttcataattaaaggacagaaagtctagaaaaaaagaatagaagaaagctagtgcccccacgttcgaaataagaaccacagttcacaatggggacggtgggtggacagggcctggctctcggctctccctgcccagctgttcccaggtaccatgggggtgggccagagggtgaggagggttggatctggcctctctctgagcctcagagggtgaggctgtgtgtgctgggcccagcctggc

SEQ ID NO: 23336 - DNA, 1031 bp, Homo sapiens
attgtctgagacctgtcttttctctgtcatctgatggggggagggaggccgctgaggctcagggaatggcatgggatggcatggggggacgggagtgtgcttagtttgttgaaggtggcaggttggtggcttcctggtttggaaagaagggagaggggagagagagaaaagagtgtgtgtgtgtaagatggtggagggacaggcagatgctggtggctctgcgcattccctcaggtaccctgggctgcctcattcatactgggttacctcagtgttgggccatgggaatgacacggggagggcagggcacggctaccttgatgcttgctcagtcaggagtgactgtgggtggaggggccacctccccccagcatgggtgtcctgagtttggggtctggcctgcgcttaggccggggagctctgcttcccccagattggggtcgctggggacattgccacatctctctgctcagaatgggtccttgagagcgggctccacgccacccttgctggccttaccctttgctgagtgggcagaacagccagagggcctcagagcccggcgtcctcagggaaggggctggtgtggaatcccctcccgccctgaccagctcctctcttgtcttgcagactgtgccctgtccacggtgcctcctgcatgtcctgctgccctgagctgtcccgagctaggtgacagcgtaccacgctgccaccatgaatgaggtgtctgtcatcaaagaaggctggctccacaagcgtggtaagaggccgcttttgcccgccagattctttctcccacgctggctcctcctggaaagctgtgccctgagaggcagaggcggagggtcttaccagcctgaggagccagcattccgcagccccaggcccacagctgcttatgcccccatttcgtggactccttcagtggtcatctgggcaggagagcagggatctgactgtgcatgagtgatctcattcatagccccattttatagatgaagaaactgaggcccagagaggggaagtcacgt

SEQ ID NO: 23337 - DNA, 1773 bp, Homo sapiens
cagcaccaggaaggagccccacccaccagctccagctccaagagacgcagatctctgcttccccacctgcctccctagcccatctgtgctgtctggcatcaaaatcaggtcagtgagagggggcgagagaaaaaggacttagtaagtggcaaggaaaggaattgagcttattttgagcctgttctgggcacagggcttcactctgtacatgttcattccacagatacttattaagtacccactccactctgtgcccaacaccctacaaagctctggggatccagctgtggctaaggcagccaagagtcctgcctttgtcgtgctgacattccagtgtgggtggtgggctgtcagcgtaagcaaacacatacagtaacatcggtggtgatgggtgcttaggggaaaatgaagggtaagggtaaggggaggtagggtgggcatgctttgcctagggaggttaggaaggcttctcaagaaagggacgtgagcagaggctgaagagagtggagaggggcctgagtttccacctgagggtgcagtgcctgcaaggccctgaggtggggcgtccccatgtatcctggcagctgagggagccaggcactgctgaagtgaagtgccctcagagaagcaaagggggatgttgcaggccgcgtagggtcctggggctgctttggggattttggcttttatgttgcatgggagggttcgagcggagaaggggtgggagctgactcaggtggtcacggggctccaggctgcaggaggggcgtgggcagagtgctgacttctttcactctataacattctctcactccttccctgctgtattcagcagcagtttagtccttttcgttgctgagtagtgttctactgtggatctacgtgtttgtttattcattctcttgtgggtagactcctggtctgttaccagtttggggttactgtgaatattgctgctgtcaacattgtagtacaagtcttttgtacatacactaatttccttgagacgaattgctaggtcgtgggataggcatatattgagctttgattttgactgcttaacagttttccacagtagttgaaccattttgcacctcccaccaataatgagtaagggttctggttcctctacatccgagccagcagttggccttgtcagtttttaaaattcgagccatcccaggtaggtggttatgatttgcatttgcctgtaactaatgagattatgtatgtttcttggttgtgtgggtgtcctctcctgtgaggtgctcttgctctttttaccttgtcttgagtcaacagctgcagctctggcccaggcactcagaagactcatgcccaggaaccttaggaagtaatgagtgtggtggggccgtgcagggactcccctccgcagggcgtgctatgggggttccataggcgagtctctgtccccctgcctgagtgtcctccattggcagccccccgagtgatcaggccatcttttttttttgagatgtagtttcgctcttgttgcccaggctggagtgcaatggcgcgatcttggctctccacaacctccacctcccgggttcaagcgattctcctgcctcagcctcccaagtagcatgtgccaccacgcccagctaattttctgttttcagtggagacaagatttctccatattggtcaggctggtctcgaactcccgacctcaggtgatccgcccacctcagcctcccaaagtgctgggattacaggcgtgagccaccgtgcccggcctaagccagccat

SEQ ID NO: 23338 - DNA, 1066 bp, Homo sapiens
cctggccagtgatgataatatttgatacgtgttgagcagttgctcttacaggctcttttgggaggacttcatgtggattaactcactgaaccctccaatagccttagagataggtatatgcagttattatctctaatatacagatgaggaaacagaggtgaagaaagggaacatgacttggtgacttgcccaaggtctcacagcaggtgacacagccagggctgaaaagctggcatttggttcctgaggctgccttgcctcccgcacccactctcctgcctcttagtgtggcgtatttccttcggatttcttttttctgtgcgtgtgacatttaaacacatacctccccgtgccctgaagtctaagacagtatgccctataaggtccatcattgatcatataactgcttttctgaaaagaatgcgataggtgagttttgtccatggattgcaaggtacatgccaatctcaatgacatcagcatgtgaaacaatacgcatattgtagaattgaggtgacagggcgtgtgtgtgtgcgtttcagaaaaggcatcccgcctgcattctgtcgtgccgcgagccttcgttagcgaatgctgatggtcccagtgtcagcacagcagggctggtttctgtgtttctgtgctcaggatggcttgttgtgttgtgtggccagaccgtctccacgtgctgggtgctgtgctgagcccttccctgcattagcctgtgatgaaagcgctgctgtctgtccttgcaaggacaggaggaaacggaggcttgggagtctagaaagtgggcaaacaaggaccccagtccagatctgcctaactctcaaggctgtgtggcatggtgttgtgggggagccaggccgcctgtacttcctgagatgaagtcatagggcaagtcatttcacttctgtgcctcagtttcctcattgtcatagaaacagtaggagtgtctgcctcaaagtgttgctgtgagggttatattggtatgtgcgaagcactcaaatgggcctggcacgtggtatgggctatgtgagccttgctctttttagtagagtcatga

SEQ ID NO: 23339 - DNA, 1045 bp, Homo sapiens
gcatttgttagctttggctatcctgtctaatttgcgtatgtatttattttttattttgctgcctgttccctcattcccccaactccccaatggcagggagttctgttttggtcactgctgaatccctggtgacccgagcagtgatgatgcagagttgttgtgatatttgtggaatgaatgaatgcaggattttttgttttaccttcacttggcacaaatgctgtggttctgttcaccactcccccctgaagtaatgaaagttatgggcccatccctgtgctgagtggagctggggacacagtgggggctaggacagactgtatccctgccttgtggaacccacagtccagtgggagaggcgacattacccacatagtcatgcaggtgacagaggcaagtgctgtgaggggaagggaaggctgagctctgagagtccgctgctcgtgggagaggggtggtcagggaaggcctccgtgaagaagatgggtgaacagagtgccaggcaaggggtacagcatgtgcaaaggtcttggggtgtgagagcagggagtcttcatggggccaggagaaggggagattgtgtgttggagcgagcagaccagtgaggctggagagcaggcggggccaaggcagatggcccctggcagcctccataggggccttggacgtgatccatgggcactagggagaggtcctgagcaggggagggacagggtcagaactgcgtggaggatcccgctggttgcagcatggagccctcagagtgtatggagcccgtggccaagcagactagaatatttgacatgatttctgtgggtgctgtaaggccctgggtggcgtgagggggaaggtgtgtgtgtggggtggcagggaggagaaggaatctgctctgtgcttattcttgtccccgtttcttttgcagcctgcccacggcttcaacctgcctccagccccacctgctccaagcagacagatggggcgagtgtagggagtgtgtttaaaagaaaaaagaaacaaaaagtctctctcttttttttttttgaag

SEQ ID NO: 23340 - DNA, 1092 bp, Homo sapiens
aatctttctccactaggggtttgttcctctggtcctctcctgccagcttttagagggtttgcctgatggggctaacagtggcagtgaaaacagtaatcatgaaattgatggctgacagtaactgagtgcattctgtgggccacacactgtttggaatgcttcatatagataaacttgctgaatacttgaattctagagcggtaggcgctgttgttatgctctcccttttagatgagaaaacagcatctcagagaggcagatcatttccagagctagtggatgcccagtgtttatagcattcaccccatgccaggcgtgtgacagggcttttgtacatgtgatctcacttaagtctcaaaacatacctgtggttaggcctattttatggagagctacgagctagttagaagtgtgataccattttacagatgaggaatcatttcactcactgtgaagtgcaaagatttcccagaggtctcatagctgaagtgggagaggtgtgatgtgagcccttggccaaccttggcctcagatcgtcttgtcaaggagaaactggaggagtggcttttgtctgtgagcatatactctgcccagccctgtgctttgggctttatatggtatttgtgtccttttttgcagagtccgaaattgaagttcagaggaagaattgccttccaccgcatcttatcagaccctatgggtgccagggtaggatttgaacccaggtcactgagcccctagtgccatgcattccttgctcaccaggttccaggctgggtgaaaggaaggaaagacataggatagagtcacctctgtcctctgtcctctacctatagaggtgactgtcctatgtctttccttcctcttacccctgagcctcaggctgccctgagcatctctgcctacagccagtccagcatttcttggtccctcctcagagtggaggcaaggcatcctttaaccctgggcaggtgtgtgctgggagaagaagacagcaagagagccatgcagggggtgacacagctaccagggacctgcgttagctagcagcaggacggtgaagtcggttctagctctgcgaccttggaccac

SEQ ID NO: 23341 - DNA, 1335 bp, Homo sapiens
ggaggaggcgtcgccgccgccgctgccgctgccggcgccgttgccgctgccgggaaacacaaggaaagggaaccagcgcagcgtggcgatgggcgggggtagagccccgccggagaggctgggcggctgccggtgacaggtgagtgcgccagcgcgtgtccccgaacgccccccccacgatggtcgcgtccgggccccccgcggtgccgcgatgggctgtaccacccgtgcccggcggggggaccgcggccctcgagcccctccttcaggagctgagtgggggtggccgagcgggggcggtgggaccagcctcggggggccggggcggtggcggcgggccataccactgaggcggtggggggagcgctgcaagtttgcgggacggggagcgcaggccgcagcgtgcgcgggccgggggctggacctttcgggcgcggcgggcagatcgagcctggcgtgcgcgggctaagctatcgagggggcgcgccgcatcaagtgtagagggctgtacctttttggcgctgtggaagccgttgctgtgctgtatttacaggggtgggggcttctggggaggatgcttccccaactgtggctgggttatatcaccacggcgttgggggagccctgcttagaacgtaggggaacccaaatcagaggactgtgatgtttgtgatctttaagggactgggacggggcgggacaggccctagtgggttttaggggcgtattttgggaggactgtgatgccgattggtgaggaggggtttctgtttcctgtatttgacgtgtgtggcgttgggggtttacactgatctcagcctttattgaacttcttaacgactctggagggaacgtcatggttactggggtgctttggaccatggaggtgctgctctggattccattaccctctcagattatttaccaggcagtaacagttctttccttccataggggagggaggaaagctgtgttagaagtcactgaagttgtctgagccttaacattctgaagaggaagagggattgggcttggatttgaggagccgtgcccctgcacccgcttgttaaaacttgggaggaaggagtgtttgggggaacacctcttccccccagggaagctctctgggggcatcttgatcttgggattgtgaggacctcttcctctcatttggagacctcttggggctcagcaagacgcctgggctggagtaactagagcctccaatgggctgcttttcaacttcatccactcctaccttcccagagaagcagcaggagttcactcgtgggctgaacttggttggcagtggatgtgaagggtccaggaaccaac

SEQ ID NO: 23342 - DNA, 1050 bp, Homo sapiens
tgtgcacagctctgtgcttgatgcctggggtcataggttaagaacctcttgcctcctcttagcagccaagggatccatccttgaaaaccttcagtctgatcctgtaaccccctgggctgtaactctccggggctccccattattccagtaataaaggccatcttccccacatggtctgtagggccctgcatcatgtagattcatctcttgcatcgccccactttgcatgctcgcttgctcccctccagcctccttcccatcatggggcctttgctcctggtgaccccttggcctgagcactcttccttcccagactgctccatgttggcctctgtcctcctccaggtctcagcttgagagctgggaatgggcctgcagtcactgggctcccaggccttcccgtccaccatgctcttaagcctttgctggacccatccccacagcaatgacctcatggtgtcataaggcaaatgtggaaactgaggcccagggcgcttcatgtttctgacacccactcctatcacgccccgtccacctccatcacaaagtctcccctttgtcctgcaggtttggaagtgcctcaccctcttctggcctttgatttgtgtgccacaagcaaaaaagttaaaatcaggctgggcatggtggctcacgcctataatcccagcactttgggaggctgaggcaggaggatcacttgagcccaggagctcaagaccaacctgcacaagatgatgaaaccctgtctctacatttaaaaaaaaaaaaaaaaaggctgggcggggtggctcacacctgtaatcccagaactttgggaggccgaggtgggcggatcacctgaggtcaggagttcaagagcagcctgaccaacatggtgaaaccccatgtctaccaaaaatacaaaaattagctgggcgtggtggcgcatgcctgtaatcccagctacttgggaggctgaggcaggagaatcgattgaacctaggaggcagaggttgtagtgagctgagatcgtgccattgcactccagactgggcaacaagaacaaaaact

SEQ ID NO: 23343 - DNA, 1050 bp, Homo sapiens
ttttttgagatggagtctccctctgttgcccaggctggagtacagtggcgcgaccttggctcagtgcaacctccgcctcccgggttcaagcagttctcctgcctcagcctcccgagtagctgggattacaggtgcctgccaccacgcctggctaatttttgtatttttagtagacagaatttcaccctgttggccaggctggttttgaacacctcaggtgatccacccgcctcagcctcccaaagtgctggggttataggcgtgagccaccactgcacctgacctttttttttttcccttgagatagtctcgctgtgttgcctacgttggagtgcgatggcacgcttagctaactgcaaactctgcctcccaggttaagtgattcttgtgcctcagtcacccaagtatctgggattacatgtgtgtgccaccatgcccagccaatttttgtatttttagtagagacagagttttgccacatttgccaggctagtcttgaactcttgacttcaaacgatccacctgcctcagcctcccaaagtgcaggcatgagccactgcacctggctatttttggtttttaaaagcagtatgataccatttttttttttttttgagatggagtttcgcttttgtggctcaggctggagtgcaatggcatgatcttggctcactgcaacctccacctcctgggttcaagcgattctcctgcctcagcctcctgagttgctggcattacaggtgcctgccaccatgcccagccaatttttgttatttttagtagagatgaggttttaccatgttggccaggctggtctcgagctcctgactgtaggtgatccacccaccttggccccccaaagtgttgggattacagccattagccaccgcacccgacagataccttttttaaaaataaactttaaaattttaatatacacattagcttccctttgctgataactaagccgcccaaaactgtgctttaaaacacagacatgtatttttattttttgagatgggagtctcactctgttgcccaggctggagt

SEQ ID NO: 23344 - DNA, 1035 bp, Homo sapiens
aggctggtctcgaactcctggactcaagcgatccagtcaccttggcctcccaaagtgctcggattacaggcgtgagctgcttgtatcagtggttcattcctttttttgagacggagtctcgctctgttgccccaggctggagtacagtggcacgatcttggctcactgaaacctccgcctccaaccttcaagtgattctcctgccacagcctccctagtagctgggattacaggtgcacgccaccacacctggcagatttttgtatttttagtagagatggggtttcaccatgttggccaggctggtctcgaactcctggcctcaagtgatttgcctgcctcggcctcctgggattacaggtgtgagcgactgcagtcacaccgtctgattctttttgtatgtcaaatttgtaggcattggactacttcagcatgcacaccattaagtagaattcgtatttgtttccagattttttttttcttcaaagcgaaagatatgattgtcttagttcaggctgctataaccagatagtgtagactgtgtggcttaaatgacaaacatttgtttgccgcagttctagaggctggatacctgaggtcagggtgtcaaatggctcatttcttggtgagggctcttttcctggtttgcagatggatgcctgctttctgtatcttcacctctcaaggtggaggggagatctcttgtctctttttcctttttaagggcattaatcccggccgggcatggtggctcacgcctgtaaccccaacactttgggaggcccaggtgggcagatcactcgaggtcaggagttcgagtccagcctcaccaacatcatgaaatcccatctctactaaaaatacacaaattaaccaggtgtggtggcgcatgcctataatcccagctacttgagaggctgaggcaggagaatcgcttgaagccgggaggtggaggttgcagtgagctgaggtcatgccgctgcactccagcatagcatcagagtaagaccctgtcccagaaaaaaaataaataaa

SEQ ID NO: 23345 - DNA, 1077 bp, Homo sapiens
caggctctcacagggagctacggttgtgtacaaacatgcacacagtctcacaaagaacacccagcactctctcaggcaacagtcacacccttacaaataaccctcatgaaaacactctcaaagacaacctcatgttcccacacaccctaacggatgcaccactgcacacagatacaccctctgtgcaatacccacacacccacactctaaggcaacagccacagtcacacaggctcaccgccaacagctgcactcttggacacagacagtcttgtagatccctcagatgcactctccgaggcaatgtcatcacagacaatagccacaccttcacacagagacatagctacatggataacagccatggacacaccctttgaaagacgacagcctcatctcaaacacagacacaccctcacaggcaacaggcactgagccacaagttctcatagacaacaacggcactctcggatatagacagcagacacacactcacaaccactctcagacatcgatgcccttcagcaacaaccttcagggcctcagactcacagacaacaaccacacttttggatgcatccctcacggacagcattcacagatgcacactatcctacaccattctcagacatgcgttcttccagacagccttcagaaacacactcacagacattacttgcctgctcagatatagagcccctcatagacagcgttccagaacataccattgcacacttgcttacacacacacacacacacacatccccctctgctgttggtgctcccagtcctgggactgtcaggatggctgatcagtgaagactgtcctagtggctggccacctccacacccactccacacacccacagccctgcctctgacagtcatcagtgcaaggccccagaagccttgcctggggactagacacagttgtcacagaatggctgtgtctcagagttccagagacaagccaccatcccccataccccatgcacctgactcctgcacccctgacccatgcaattcccaactcctctgctgccctctgatcaccccactgcctgactctcatacccc

SEQ ID NO: 23346 - DNA, 1040 bp, Homo sapiens
gtctctttggggcgcaagacagtgaatgaccacagcacagagctgtctgggctgtgattggggagctcagaggacggtcccagaggaggttcctgacccagtcagatatcccagtagggcttcccagaagagatgatacccaaactgattcccaaaggtcatgaaggagttagcaaggtgaagggggtgtgggagaaggggagtgtatttggagcaggggaaatagcatctacaaagatggggcgatactagggagtgggatgcactggaggaaccagcggggcctgagcgtgggcagaatttggttgcagctgaggagggatggaaggcagggccatgggaggtggcaggcaagggtgcagtggaaaggatctttgggtgtcagacactcctagatttgaatccttaagtgtcatttctctcctctgaacctcagttttcccctccctaagatggggataataataccttgcaggtctatagtgagggttacgggacgtggggacaagtacctcacacatcgcttggcagatactgggggactgaaatgtagttcctctttttattccaggtgggagaaactatgggcacaactgcccagaggcaggactgtgccctgggagataagtaggcccctgattaggacactcccagagctggtgtgcagaccaaggggctgtggccagagatggccagggcagccttgacgttagacttgacagagctcatcagagattctcaccctcctctctctcatgccagaatttacagcatccaaccccctgaacatcacgagggaagacatgagagggccactttgcttgacaaggacgtttatcccttagggcactgactttcaaaagttattttgacagaactttttttccaattgcaaactccctcagaaccctgggcaagagcagagctgctctggtgaaggcagagatgggggtgcctcccaccccaccccacaggcaggtcccaaggcgctgccccataaagctgccagctggtttgaaaacttctgccccagggtgagt

SEQ ID NO: 23347 - DNA, 1088 bp, Homo sapiens
gccaactgtcatgtttcttccccccaaatttcaccccccacccagccatgcaccacccacccccactccaagatctgtgtcgcttctctcttccatccccctgtcctgctcagctccttctgagaggctgcagggtgttccctgggaaggagtctcccacttctggctctgccctccagcttcctctccttgtcccatccacctttcccactgcctctctgctcctgtgactagagaatgagggccccttctctccacccactcatctctgtgggtcccaaggatttctctgtgcactatagggaattctcatactcaccacccatcccctcacctctataggagctatttatattgggggaggcttgccccgcatctccaggctggcagctcctgcctcagtggctctcttgtgtctatgagccacatccttgtctttttggtaccctggtgtctgtaggcctcccttgtttctgtgaccttcttcggctctccttggctctctccctgccctgtggaccgctccccatatctgaggagtgctttctgtttccaggggcctctctcttgtgtctctggcttctcccgttttccttcgcgggaggtctctatgtccacattactgccccttgtctccgaggtccttttgcttgtctctgtaggctgctcccttgtctccatgggcctttctttcttatccctgggcttttcctgtccttgtccttgtggggtttgtgggcctcagcccacttctctggacagtcttgacggctgtctctcttctcttcatttctcttcatctctgtagccctctcccctcatctcagtggccttctccctgggtcttcttgcctctcatctctgtgggctcctgtgcccagggctgcctgggcagggcggtggcatggtgtggtagagggggtggctcgggggtgggccttccatccaatgcagctccttcttctcatcagcattctcctcgcggggggcccccagccccaaccaatacaggctccccctcccccgactcacctccctactctctctttgcctgcctccctcccttcctcctgcccgccctcctccct

SEQ ID NO: 23348 - DNA, 1105 bp, Homo sapiens
ccactgcacctggcctatttttaaaatttaatttaattttttttttttttgagatggagtctcactctgtcgcccaccgcccaggctggagtacagtggcacgatctcagctcactgcaacctccgcctcctgggttcaagtgattctcctgcctaagcctcctgagtagctgggactacaggcagacaccaccactctcggctaatttttgtatttttagtagagacaggtttttgcaatgttggccaggctggtctcgaactcttgacctcaggtgatccacccccccacccagcctctcaaagtgttgggattacaggcgtgagccactgcgcccagtccctaattttttttttttttttttttttttttttgagacagtctagctctgtcacccaggctggagtgcagtggtgtgatctcagctaactgcaacctctgcctcccaggctcaagcaattttcagcctcctgagtagctgggattacaggcatacaccgccatgccctgctaatttttcctagtttttggtagagatgggtttttgccacattggctgggctggtctcgaactcctggcctcaagttgatccatctaccttgacctcccaaagtgctgggattacaggcatgagccaccatgcccgggttttttttttttttttatagagatagggtctcactatgttgcccaggctggtctcagaactcctgggctcaagctatcctcctgtcttggcctcccaaaatggtgggattacatgtgtgagccactgtgtctggccagttgttatttttattagtatctccgggagcctaataataataactaacatctcttgagtgtattatgacgtgctaggtattatgctcaatgcttacatgcattactcagtttaatcctctcaacaaccctatgagagagaaactgtcatgctgactctacaaaacatcgaggccccagagaagtaactagtcgtagttcccatagttaggaagagtcaggattccaacccaggagttgaccttacagtctacattcttggcccccaggctcacctgcctgccaggcaggaagttcaagtggttgcatgttgaagggtt

SEQ ID NO: 23349 - DNA, 1034 bp, Homo sapiens
actccaaaagggttccattggtccggacggttctgccaggtaagggagattcaacaaatgcaggccagaggcaggagccgactaatggccgaggccgctgatggccgagatggctggtcagcgaggaggggaggctcgacaactgatgtgactcagagctggacaaatgatggcgcatttggctgaagctggctgggggcccatgaccagagaccaggcagccattctcgcctcagcggggaaagggccagatccggctctgttgcagcagggtgggtttcccagcctggatccaccatgcatcctgcctgccgtgtgtgtcttggggtctttgtatgtgtgcatgtttgtgtgcatgtgtgttcatacatttatctgcagttgtcagcatgtgcctaccttcgtagaactttgtatctttgggactcctggtgtgcatctatgtatgtgcctttgtgtatgtgtttgcttgtgcgtctatgtgtacatgcccacccacaaagtgttcagggacctttcttgttggactctgcatttttgggtccgtgtgtgtgtttgcgtctattgaatgtgtagaaagctttcttactgtgagacactatgcactcttgagcattttttttttttttttggcgttgggttgaaggttggggtggggaagaagcgatgggtctggctctgcactctgagccttccatgtatctggtggcccatgaggccgtctttgtgcatctgtttgagcctctgtctaggtgtcggcgggtgtgggcttgtgtgattgcctgtttcagagtttgaatatctgtgtgtccacagcagcatctccctcggagcatggatgtgggtggagtgggccagaccaggatgaggggggcatctccctgaatctcatcagacctctggaggggggtcacacaacccatgctgagcctggctgggacccagcagcacagcacagtgcagaccacccctcctcctccttttccccccatgacctttgagcacagcagccccaaatacatatttatcagagg

SEQ ID NO: 23350 - DNA, 1047 bp, Homo sapiens
gcagacagcctaagtcccctcaggcttctccactggtccccagtaattatcctgtcaactaagctcatcaaagaccccttcaccactccacggactcctcttagcccttctagacacccataggcctctctcagacgtttacaacccttcctagcatccctctatgaacattctcatcctctacaaacatcctgatagattgcagaccgtcaccttcaaactcccacggaccccaatcccctcgtggcggttgcccacacgcagcggcgcatgccccacgggttctggcggttaaataaccctcgctatcctgccccatgtcgccgcccttttgagccgtcttggtcccgcgttggaatccctaggccaaggggctcgactgaaatttttactttttgactcagagctgccatcagagggcagcaggtaccatttggctgggaaactgcaactcccagaaacgcccgcgcctagccgcgcgtggtgcggccacctgctttgtgaagggagcggaagtgttccgcactttgccttctgggtaatgtagtctcaacaggctttggcgctaccgacccccgcagttgtgtccgcggggaattgcagtcaggaacaaactgagtggacaggactttcttctggtttcagaaaggacaggacagttagtataagcacaagctcggattaacgtgaagtccagagactccatttcccaccattccaggatgcgggaggggctgagaacgctttcattctacttctaagtatttccgggggaggaagagacacatacagacacaggaactctgtttcccagcgccttttgggggctactctccttcgggtattaatcgataaataggacgactcactgagtacacaaaacctgaggcagctggcttccttatttttggctttccgggatcttgtaatttaggaagcggaggatgcaaaacacaagagtgggaggcccggtgccgtggctcaagcctgaaataccagcacgttggaggctgaggtagaatcgcttgagcccaggaattggagacc

SEQ ID NO: 23351 - DNA, 1138 bp, Homo sapiens
cagtaaagttcatcgcagtcccggcctcccacccggcaagtcagtccatccatccatccattcattgtcagtcaacccgcttcagccggctccactggggcctagccctgacccctaccctttccaggacaacgggccctggcttggcttcagacctccacacctgcctcagcaaaagggaaggcctcatttctctagggtgtcacattattttcaggtctcaaaaggcggaacaaaggctgacagaccaacagaaatgctgcaagcctcaggcaggggcaggtcctcagttacaagcatttatcaatcagcatggggacccgtgggaggttcccatgcaggaaggaaactaacaccacccctcagccccagggaccccaaactcattgcttcccctgccgtagaacacatcattagcccagaatagacctggagttggcttcagacacacgcaggctcagacaggctcagagggcagacggactggagcccaagggcactcgctgtcacagcaagacactgagcctcacaccagtatagcatacccagaggcagtacagactgtagttaagaaacgtgggcgtcggagatccggttcctcaggctgggagctgtgatgttctgggcaggagactccctctttccctgcctcagctttctgagctctaaaatgggtatgatgataggagtacctccttttgtgaggttagaatgaatgtagagcgtttggcacaggcacgcagcaaaccctcaggagaagtgaaggttattgttactgttagtccccaccggacggtgaacatcctaaaagcagggctgtatctgccttgtttaccctgtatttctagagcctggtatgccaggcaaataggcactcaaatatttattggattaataagtgaaggaatgtgtgaactgtaacagagatcataataatcacgcttcccttagggttgtcatgaggagtcagaatccagttgggcagggctccctgcaaaacgagccattcacaaaggctcattcctgcaaactccaagatttgcctgtcatttcctgaagccccgccctcgtgccaggctttagataaattaatcagacctcactcctgcctcaagggcatctgggctggctggagcaa

SEQ ID NO: 23352 - DNA, 1030 bp, Homo sapiens
tgggaggaccatttgaggccaggagctggagaccagcctaggcaacatagcaagacccctgtttctacaaaaaaaattctaacaattaaaaaaaaaaaaaaaagctctgcccctaggctggaaatcaaggctgctctgatgtcacaaagtgacatagatcctccagatgagagtgggatgtcctattctcactactgctacgattacaaagagcagactttctgacagctcatgacttgagactacagtttttcagccccaggtccttggtgtaaatgaacacaagctcttttcagaggttcacaccccaacagaagatgaataatccccaatctgattattcaagagataatgcaaaattatctttttttttttttttaagatttcttcctggaaagagagaaacattcctgataaaatgcttatgcaatttctggatgaactttaatgggatcaagtgttgttctggtaaccaggcacccactcaaaagtccctcaagatattaatgacctggaaccgaacgaatatcttttttttttgagacagagtctccctctgtcgcccaggctggagtgcagtggcgtcatctctactcactgcaacctctgcctcccggaaccgaacatctttttctaaccatgactatcctaccacctgctagaaaacggccccacgggacgcggtggctcacgtctgtaatcccagcactttgggaggacaaggtgggaggaacgcttgagctcaggagttcgagatcagcctgggcaacatagtgagaactccgtctctgcaaaaaacaaattttatatacatgtatgtgtgtgtgtgtgtgtatatatatatatgtatataaatatatatatagatataaatatatatatataaaatgtcgggtgtggtggcaacgtgccatagtcccagctactcgggaggctgaggttggaggatcgcttgaacccgggagtttaaggctgtagtaagctgagatcgagtcactgcactcaagcctgcgtgacagagcgagactct

SEQ ID NO: 23353 - DNA, 1367 bp, Homo sapiens
ctcctgacctcaggcgatcgacccgctccggcctcccaaagtgctaggattacaggcgtgagccaccgcccctggccaggaatcctgatacctttgggaaccatggtgaatgacatctagacccttctgtcctgaagggagttggtggcccagactctagcagggactatgtctttgtctcctagggagtagaaactggagttactggatgtttagtcctccagggaggctggtagaagtcctgtttcctaattggtggggaggtgtccatgactgggacctgaactccagtataggggagggagacctgagcgccccagggagctggaactcttgggcttcagagcctcagagggaaacagggtctacatttctctgggagaaaaagcctgcacacaggtccccaaggagcagtgggctttgaatcttgatggggtggcggaggcccctggggtctgagacttccggggttctaagatggctgtggaccttggttcctaaatattgggtaaggggaggtctgcatctggaggagggatcgggggcttgtgcgagaaagctggagacttcttgatctctcctggggagtggatgggtttctataattgccctccaaaagcatgtagggagggtggtcccacaaaaatgaggtgaggtgggtaagaggtctgggcatggtgggctctgggagtagccagggaccaggaatgaggtcttttgggtgtggaagggcagtaaagcatacctcagagacagctcctccaaaccttgtattgggatcccggcaactgcctctgtgagtgtgactgggaagggatatgactgccttcatcttctaggtgctgagcaattcaggtgatctctggggagtctgtttctctgtctcttttctttaggagtttctatctttttttggcctttttctcctggtatttaaccataaccctttatggccttggtgttttgtgcaccttccttttcagaagagcagctgtactgctgcactggtccaaacacttctgtatggacacctcgggtatccccaagaggctctgctttctgatgtacatagagggtgctgcattgagccaggggcccaccaaatgggtggtcaggcacttgagaccatgggaatatgccaggagtgaatgaagcaaaggcagaaaccacagtgcctggaatgttctaggctgctagccacatgtgggggaaaagttgcaggttacagaattcttcagtgtcaaaaacagaaaaggaggatctgagaatccaagcgatagaatcccttttgtcgtagacagaaagagcaaagtccagagagggcaggcttgaggcccaacagcacacagtaaggccctgtgggtctg

SEQ ID NO: 23354 - DNA, 1492 bp, Homo sapiens
attataggcgtgagccaccgcacctgccctcactccctttattaaagccacagggcctcatggctgttcttcctgcagcccaggacctctgcactccgcctccctcagtgggaaatacccttcccgcagatctcctcagactctcgccctcgtgccattcgagtcaacttcaggccttccctgaccatctaacatagcatcccctgttactctccctcacttctgtgttttccttcattgcatttacctctccttaataggatactgtagctttccttatgatctttctcccccattcgaatgtaagccctaggagggcaaggtccccagcacctcacacagtgcctggcacacagtaaatatttactacaaatttgctgaataaggagcatgaggagctggcttgtctgatccgtggagttttgctgttcatctccttcaggctcgtgtgccctcctgttggtactcagggaggcaggacctggcaggagtcctgcctgaagcagccacagattgcagaaatgcctccagaagagactggctcagaacctatggccacaagggctcttcctggcttcaggccccaggagaccgctgggaggtgttggggggaacagctttgggcacacggaccaggcagaaggaagggacaggagcttatagggaggggagaaatggaattaggaagcagatgccttcagagctaggtagtgcctttgaatcctagctcttactgggcatgtgtctgtttcctcctcagttcctcatcagcagcattatgttgtgtagattcagtgagttaaggaatttaaagcattcagcttagtccctgttacatagtaagcagttgatggagaaaacttaatgtttgtattagtaaccctggggacagggatgagctgagggtctggccaacagcaaaaaaggcttgctggggagttggttgttctgaccagatctaatgcagctgagctgtgacttcattctgaaacacctattcctaccaccatctgggattcattcacatctaggtgtgccaggcactgttctgggcactagggacacaggtgtgaacaaaacagataaaagagagaaaacagataaaactccttggggagtttacattctggtaggagtattggctcaggccggcacatggcagagccttgtttttaaggtcttgtctacaggtgggcttctcagagtaggggagccccttgagattgtagatgtgtttgtgtgtgtatgaggagaatgtccctgtattttagcaatcccattatcccttaccttagaaaacaggtttatgtactcttaacctattgtaaaaaattattttaaaataacataaactgaaaattccactaaaaaaccacacagatttttttttttttttttttttttttgagacagagtctcactctgttacccaggctggagtgcagtggcacaatctcggctcactgcaacctccgcctcctaggttcaagtg

SEQ ID NO: 23355 - DNA, 1030 bp, Homo sapiens
tatttgataattaacagctaaaagtatatatcattatatatcaggcaccattctaagggctttacacataccgacctcacagtaatacacagagttttgatcatgtggttatccccgttttatagatgaggaaactgatggaaaaaggttaaggagtgtgcctaaagccacacagccaggaagaggcagagctgggatctgaatcctggcagactggcggagtctctgcccttcaacacctcagtgtactggcttcattaattgaactaatggatctctttatggataggagtgaaattgtgtgcttcaaaacatgcactacccccgcctcccaccccctgacatgggccacagatgaaaagcttagggagcaggcagggcaccacggctcacatgctcagctcacagggtcacacttcggatgcatccaaggctgagaaccagagctctcacacacccctgcctgctcctctccacaggacttatgttttccgggcccagagcgctgaaatgaaggaacgagggggcaaccagaccagtggcatcgacttctttattacccaagaacggattgttttcctggacacacaggtgccagccccgcctgcctttgccccaccctgccacatcctgcattgagcctcttcctggaatgtgattaagccagaaccctgcgtggattccatgtgcttccagtcaagccatggacatactggctgccctggggcaaattgtgtcttttcttggcccttagtctcttgtcacttttgcccccatctcattcgccttctacacagtagcctaaaggatttctagtatagtgctgaaaagtgtgggccctggagaatgtgtgttctgatcctgtctgttagttcttaccagctgggtgactttcagttttaaactcccttaaaccacagctctttatctgtaaatagggatggtaactgtacttagcctcttaggagtttcaaggattcagtggaacaatccaggcaaagtgcttggccaggacctggcacaaggttag

SEQ ID NO: 23356 - DNA, 1031 bp, Homo sapiens
gcacctggccccatcttctttcagattttttttagtctcaatattcttcagaataagaacacatgctgattaagtttagtatttgctaagaaagagaatatttttaaagttagaagaatgacacaaaaccatataaactccagaccagttgagcacaaataaaagggaataaactgaacaaaaaaagacaagaaaggagaacaaaatatacacacagatagtaaaagcaaattatcccagactgcactaaaaaaaaaaaaattatacatatatattctaaaagacactacgaaaacataatgacaaaaaagtttgaaagaaaaagaacaaaaaaaagatatactgtactgagcaaatggcaaattacagcttcagtttcagaggtcatggtagaaaataaaaaaaaaactgacctcagctactcgggaggctgaggcaggagaatcgcttgaacccgggaggcagaggctgcagtgaaccgagatggcgccactgcactccggtctgggcgacaggcgagactccgtttcaaaaaaaaaaaaaaaactgacctgatgtctggcgtatgctttaagacaaccatctgcagcctttttggcaccagggaccagtttcacggaagataatttttccacggatgggggcgggggagatggtttggggatgataggttccacctcaaatcatgaggcattagttacattctcataaggagcgcacaacctagatccttcacatgtgcagtccctcctatgagaatctaatgcccctgctgatctggcaggaggcagagctcaggcggtacccctccaatcacctccttctgtgctgtcaggttcctaacaggccacagactagtaccaggtccgctgcccagaagttgggactcctgctttaagacactctaatttaaaaaaaaaaaaaaaagtggggtggaaggaggaggagatggtctgcagcaaatgttgaacctgagtgttggttacgtggaattcactgcaccactcttttgacagttgaatatgcttgaa

SEQ ID NO: 23357 - DNA, 1100 bp, Homo sapiens
gagaataggaaaaattataatgtttgggagactatgccattcaaaaatcatctctggcatcagtcatccaatactcccgttctctctgaaagacagaacccccaagttctagttggatgcatgtccacattccccagtaaatatatgaatgatactgggagacaaatttctgattcttgaagaatgaagatgcaacatagaatgggggtaaggctagaaaaaaaacactatgatattaatttaagaactagagataaaagcaggaactcatcattaattctttctacctttctacttctcttcctatctgtataactctttcccctccttcctagagggaaaaaaaaaaaggcacagctattacccagatcttgatgtttaactaccatcccccaatcagaagaatctgagttctcaaagaaacagcaaattccatggatggtgcaggaagggtacaagatgagcttggaacactgtattgtgtcagagtaaagatgtgctccaatttatttaaaaatacatgatgggcaaacaggacagaagggaaacttccttagagtagaacaacaatctaacaagtgttggaggaatgatgaaagttgaatatatcacactttcgcaccatcagagcaattactgatttagaccagacttacagaatgcttaaactagtggaggaaaatttactgaaaaacaagctatttagagtcagaaagtgtctccccaggagttgcctttgtaattattaattacaaagaaaaaaatagtaatttcgcagtggaaaaacccagcaccgccctccccaatcaagtgttccaagttaacatcacctataaaggtacaaacatacctcgtttcctcacgtgctgcacaccacttacagagtcctcatgggaaaaaaatgtgtaatttaaatccaattgtaaggaaacctcaggcaaatccaaattaagagacattctacaaaataatctcaaaaatatcaaggtcattaaaaacagaggtagcaactcagattaaaggagtctaaatgcaatgtgtaatctttggactctagagcagaaaaacaataaatatattattgggataattttaagatt

SEQ ID NO: 23358 - DNA, 1775 bp, Homo sapiens
aagcaatcctcctgcctcaccctcccaaagtgctgggataacagatgtgagctaccacagctggcctatttttccaaattttattatgaaaaaatttaaagatgcaaaagtgttgaatagtattaattcaaactatattgtaatacattaaagaagttaatatagcttgaattaatactaacctagcttccaaaatataaaaaatcctgctcccgtatctctgtcctcctccctttaggatttgaaaaattacatctttatacattgtgtgccccattaacatagatttgtaactattttactcatttttctttaaatcatataggagttatgagccaataatacaataatattggcttttgtgtttacctatgtaattactttaccagtgttctttattaatttatatggcttcaagatttagtgttttttcacttctgcctgaagtattttgtatttcttgtagggcaggccaactagcaatgaactccctcagtgtttgtttatctaggaatgtcttaatttctccttcatttttgaaggatggttttgccagatataggattcttggctaacaggttttttttatttcattactttaaatatgtcatcatactggcttctggagatcatggtttctgatgagaaatgggttattaatcttattatagaggctttgaacatgaggtgtcactttctcttgttgattttgagtctctgtctttttatggtttgattataatgtgtcttggtgtggatctctatgcatttattcttcttggagttagttccttgagcttcttctatgtgtagattcatgtcttataagtttgagaagtttttgaacattatttcttcaaatattccttatactcctttctctctcctcttattgtgactcccattgtgcatatgctgatatgcttgatggcatcccacaggtatctgagttctacttactttttcttctgctcctcagatggaataacttcaatttacttatcctttagttcactgatttttctgcttgcttaaatatactgttgaaatcctctagtgaattttcatttcagttattatactcttcaggtccaaaattcatggtttttaaataatttctacctatttgatatctttttttcagacatgattctcctggtttattatttttgttcatggtttcctctagttctttgagaatatttaagacagtttatttaaagtctttgtctggtaagtccagtgtctgtgtttccttggggacagtttctgttcatttattctgggaatggaccataattttttatttgcatgctgtgtactttttttttgtttgttttataatgtggtatctcttaaagtcagattcttcctcctgctcagtttgttcttatcttattgtggatcgtaatggtttgtttagtgactgttacaggtttaattttgtctcccaaaaagatatgttgaagtcctaacctgtgaacatgaccttactttgaaatagggtttttgaagatgcaatcaagatgagggcattagggtgtaccctcattcgatacgacagtgtccttattagaagagtaacataccatattaagactgaaacacatggggagaatgccatgtgaccacagagacagagcttgaagtgatacagctaaaagccaaggaatatcaaagatcaatggataccagcagaagctactaagtggtaatgaaagagagcatggcccttctgacactttgattttggaggtctaacctggagaaaactg

SEQ ID NO: 23359 - DNA, 1048 bp, Homo sapiens
agatgggaagtcacagaaggcttttgagccaaggagcgacatgatctgacttacatgatctggctatgtggagaatggactggagggaggtagaaggaggaaggtcatgtgcaagctgctgcagtaaaccagggcgatgaattctggggtcttgggccaggctggtggctgaggaggtggtgaggaggagaggactaggctgtaccccgcaaagactcagagctccatggttctcacctgaacacccatctccttggatttctgtctccatcatccgaagcttgtcttcttttcccaactgtaatatcacatctagtttgaagggttgatagcctgtgaaaaagaaatggcatatatataaagtgaatgcattatagtcaaaaattttaattccaacaccaccattttcatgcgctctaagtagtatttttcaaaattgtgatcatgagctattgtctgaataccttttaatttgtgatccggtacacaaatacataaatgtaaatcactgaaatcaagtgatcagataatttgatcctaaccattatctacttttatcacatcttctttcctgtttttacttacaattttcgttgcactgaatgcagttcctgacaaggagctataatatttctacttcatttcattaaacacaataataatgtaactcaccaactgatttcaaaacccaccaagatttcacaactgcaatttgagaaaaatagacaaggtatagacaagatgtccctgaggaattagaaaattcacatccccaagttcagggaagcattttaagcgtcccaaagtcttaaataattgaaagcaggacagtccagagggctgatattcagttacagaaggtgcctgtgctcacccactgacagcaggttcctgaagttctccagcatcacatcttggtacagctttctctgggcaaggtccagcaaccccagctcctccctggtgaagaccacagccacatccttgaatgtcaccatctcctacaacatcaagcagatgtaatctcaatcttatggccaataactgc

SEQ ID NO: 23360 - DNA, 1067 bp, Homo sapiens
ttcttcacatttgtatggtttctctcctgtgtggactctctgatgggcttgaagatgtgaactccaactgaagcctttcccacacacatcacatttgtagggattctctccagtatggacttgctgatggtcttggagatgcgaactctgactaaagcccttcccacatgtctcacatttgtatggcttctctcctttgtgaactctctgatgggcctgaagatgagagatctgactgaagtccttcccacatgtgtcacatttgtagggtttctctcctgtatggactctctgatgggcctgaaggtgggaattacggctgaagttcttatcacacacatcacatttgtagggtttctctccagtgtggattctctgatgggcttgaagatttgaggccttactgaagcccttatcacatacctcacatttatatggtttctctccagtgtgaactctctggtgaagaccagaattcctattaaatatcctgtcacttacttcccatttgtatgtcttgtctctagagtgacctctctgatgggcttgaagttgtgatgtctgactgaagcctttatcatatacatcacatttacaggctctctctccagcactgtctacacagtgaatgtcaaaatctaagctatgatggaagcccttcccacacctgccacatgtacacaacttctctcctgggtgagtaagctcatgagagggaagacaggagttctggttggagctccgggcatatacctgacatctgtagaggttctctcctgtgctgactctctgatgaggttgcagatgtgagccctgactgaagccctcaccactgtcaccattcctatagcatttctctcctatgtggaaacactgatgcctgggaagccctgagctgtaacctatgcccttcccgtactcaacatttacatgaggcttgtctcttaagtgtagttgctggtgaagttcaagattagagccaacacttaagccttttccattttcatcagaggtttgctctcctgattggattatgctatgctgggatgattccttcacacagtctt

SEQ ID NO: 23361 - DNA, 1041 bp, Homo sapiens
ccatgataaatattgaaggaaagagctctcagttccccaagcaccatgattccccctgtcaagtgggagcaggagaatctattcaagcttctgtggatgacaactgtctagtgaatcacataggggatcattccagtatcattgaaaatcaagaatttccaactgggaaagttccgaattcttggagtaaaatatatctgaatgagacacagaattatcagagaagttgtaagcagactcagatgaaaaacaaactatgtatatttgctccatatgttgacattttcagttgtatttcacaccaccatgatgataatatagtgcacaaaagagataaagttcatagcaatagtgattgtggtaaagataccctaaaggtatcacctcttacccagcgtagtattcacacaggacagaaaacctaccagggtaatgaatgtgaagaagccttcaatgatagctccagtcttgaacttcataaacaggtacacttgggaaagaagtctccagcgtgtagtacacatgagaaggacaccagttatagctcaggtattcctgttcaacaaagtgttcgtactgggaaaaaacgctattggtgtcatgaatgtggtaaaggtttcagtcagagctcaaatctgcaaactcatcagagagtccacacaggggagaaaccctatacatgccacgagtgtggtaagagctttaatcagagctcacatctttatgctcatttgcctattcacacaggagagaagccctatagatgtgacagttgtgggaagggcttcagtcgtagcacagatcttaacattcattgcagagttcacactggagagaaaccttataaatgtgaggtgtgtgggaagggcttcactcagagatcacatcttcaggcccatgaaagaattcacactggagagaaaccatataaatgtggggattgtggtaaacgctttagttgtagctcaaatcttcatacccatcagagagtccacactgaagaaaaaccatacaaatgtgatgagtgtggtaagtgcttta

SEQ ID NO: 23362 - DNA, 1032 bp, Homo sapiens
tgatataaaaatagctactcctgctcgtttctggtttccatttgcatggaatatctttttctaccgctttaccttcagtctgtgtctttatcggtaagatgagttatgttgccatttgacttatcttctttctttgtgtaattattttataaggcctgcaagttttatacttttgtgtcttttatcatggcaagtatcaaccttttgttttcatggttagaactcacttgagcattccctgtagacctggtctagtggtgacaaactccctaagtatttgtttatttggggaaggcttatttttccttcatttatagagcttattctagtaggatacaaatttttttgttttttgaagcaacttgaaaatagaatccaatctcttctggcttgtaaggtttctacaagttgaattgtgtgatggagcttcctttataggtgactaaacacttttctcttgctgattttaggattttatccttcatataaaccttagtctgatgactgtatgctgtggtgagttccatcttgcaatgtattttcgtggagttcattagatctcttttatctggatatctaaagctcttgctagattaaggaagttttcctcaattatttccttaactaggtttccaaactttttactttttcttctccctcaggaatacctatgattcataggtttggttgctttatgtagtttcatacttcttagaagctttgttttttcttccttattcttttttctttactttcgtctgactagattaattcaaaagacctgtcttgaagtaccgagatgctttcttctgcttgtctagtctattgtaaaagctttcaactgtattttgtaatttcttcaatgattttttcatttccagaagtttttatttgtttggctttttaaaaaaaagatacctatctctttctctttggtaaatttctcattcatatcctgaattgattttttgtattgcttttcaaatttcttttgtatctcattgagcttccttaaaatcagtatttcaaatt

SEQ ID NO: 23363 - DNA, 1077 bp, Homo sapiens
tctactgttttgtatatgttatctggcattttattttaaaaacacaagatcaaaagttgagaacaatcttctgccaatagatagcagaccaatcaataaaaccacacttatagataaccatattttggaactattagggaattttacataactgattgatgtgctgaagactccagtgaaaagggcagataatatgcatgagcagatagggatttcagtaaaatttaatagtcaaatgggaaatgctaggaaaagaaaatttatgctactgcttttacttttatcagaatgcttttgaaggacttatgagtaggctcaacatagttgagaaaagtgtcagaacttgaatataggtcaatagaaatcatgcaaactaaaacacaaaaagaaaaagtgtgaagaaaacaatacaaataggacaacattgtaggatctaatatttgcatacttggaaacccagggtcgggggagagaatgggaagaaaagatatttaaagagataatggctgagaattttccaaaaataataagacttcacccagattcaagaacgtcagaataccaaagcagtatttttttaaaaaaagaacaaaactagaggtattattgcccaatagctaaaaatggatggacagtgcaaagaaaatattaatggcagacagaggaaagggacacattacatataagaagcagagtgagaaaaacatcagacttatcatcacaaaccatgcaagcaaaagacaatggagttacatctttaacatttagaaacaacaataaaaaaaatgatcaatcaaaaatctaagcctggtggaaaaaatctttcagaaggtatgcaaaataaaggcattttcagatgaacagaagctgatagaattcactgttagcagacctgcactgtaagagatatttagcataccagaaatagacttggatctaccaaaagacataactatgaaaatagttatttcaatcattttaagtgtaaaataatttttatttttattactccaaaatataattcagtaaagcaaaattaggaatgaggttttatgaatttagaggacatacaaaaat

SEQ ID NO: 23364 - DNA, 1063 bp, Homo sapiens
ctatttaggaaagactaagcaaccaaatagcaaagatccctcaggataatgaggtttatgtttggaatagcatgagcagattactacttaggacacagattcctaggaacattcctcattgaaaataaaatggattcctggaaataggtaactagaaattttggccagaaatggtttcatatgaagaactgagaatgcgtgggaagtatagagggcaagtgggcttattttcatatatgcaaagcaatattaaggaactctattttcatgttttagttcttcccctcatgtagcattgtctctttcctctgggatatgttccctgatgtgagagtcctctgaatagaagggtgcttccctggctcagtgctgaccgtctaaattatacttgcaaaaatgctttcatgaggcaaagttttagttactctttgatatttaagatttgattaacatgtctttctgacctttcccttgaatcatgaatttgaatcctgtggatgaccatatattgaagcctctgatcccagaaaggtaataagctgaaagttgaactgagagaccagataatagaggttaatacccttgggataggaaagaaaacttaaagggtaactgatggggttatccttagcaaaattctatccctatgagatgaccctaagtggagccatctctatgaggattaatccagagattgttgcacacctggcagtgtcaggtctgggaaaacagttgctgatgttttcatggagtgtgaaatactgaaagctgcgggcatcccttggggaccactgacccacactttgaagaaccctcaatgagtctgaaagaggttcagtatctcttgggaaggatgtgttccaggctccaggcctagtcttacatggccagtggggttgaaagactgtgcccctgcaatggtcttttcctaagacagttgaacaaagttccaagtctgtctgtcctattttaaccatctttaagaagcacaaaggggatatgagaaaaacagatgctgaaatgaaaattttaactgatatcttacttatctcacaagtcgtgt

SEQ ID NO: 23365 - DNA, 1063 bp, Homo sapiens
aagtgtaagccaccacgcccagcctacagttcttttttagttttttaaattttttcattctttttttccgccaagactgagtcttgctctgtcacccaggctagagtacagtggcacgatctgggctcactgcaacctccgcttcctgggttcaagcaattctcctgtctcagcctctggaatagctgggattacaggcatatgctaccacacccggccaatttttgtatttttagtatagatgcggtttcaccatgctggtaaggctggtgtcgaactcctgacctcaagtgatccacccgcctcggcctcccagagtgctgggattacaggcatgagccattgtacctatccctttttctttctcttttttagaaatggggtttctctgtcacccaggctggaacacggtggcaagatcacagctcactgcatcctcaaactcctgggctcaagggatcctccccacctcagccaccctaactctaagcagaagctcaaatagtctacagttctaaattctgtgatttgtggagtgtggtggtgcacctgtagtcccagctactggggaggctgaggcaggaggattgcttgagcccaggagtttgagtctagcctgggctacatagcgagactccatctccctctctctctctctcacacacacacacacacacacacacacacacacacacacacacagtcatggttccaacacgggcttctaatattgtgcctcttaaaattcctgctttatcgatctttgccctctccctgctgacgcccccctgtccccgcaccctgagtccctttcttaccagactctggcaggctgtcctcaccagctccggacgggcacagagaggatttatagtggttgagacccacttccgctccacagccacaacccccatcctttgtctaggccaaagtcctggccaacagaactgcggagggggtgggtggggacagaaagggcaatgacgtcccccaaggtcacgtcacagggaaccttctctcaagtgacagggaaccctcactctgagaattcgcctccgacaga

SEQ ID NO: 23366 - DNA, 1034 bp, Homo sapiens
cagcccactcctgctgttgaactccccctcttccctcaggctcagcacagtcggggtgcttcctaggggtgggagtgcaccctcgcagcacacctgcctccctcttggcagtcgctgtgagcatagtgaagccggccattgcacctttgcccattccccgggtgaaacgccagctccagcagggcagggactgagtctgtggcccactgtggctggcattcaggcaacgtggcctgcgttgaccctcaggttggctgcacttgcctgcaggggaaaatgccccctctgcagcccactctgagggccccttcccttccccgcctctcacccctgccttggcacatgccctttgcttggaatacctgccacctccggccccctcctggagggcaggctctgcactgcactgcccgggccccttgcactcagtctcccagcccttcccagattgtcagttggcatcatttgggcacctgtcaaccctgccaggcaaggtaggtgagctcctggaggacactaggaaatgtctgtggcatgaatgagggagggacataaaggagcccttagcgagtggggacacagacgtgttccaccagagtgcagcctggccctgcctctgggagctttgctgtggacacagacgtgttccctcagagtgcagcctgggccctgcctccaggagcttcgctgtgggaggaggtgacacgggagccgcagctaccaggcagcgagctctcgcccgggctgttctaggtgctggctacaggagcccacagaacagacccccttccttcctggggttctcctccagccaagggcttcatccctcattggctggggccgtctccttgtttgacagatgtggaggctgtgaatgcaataagtaaggctcccggaactgccttgaagtactcaggttgcctttaccaacccttactccttgtgaggatcctggaggtagctgccattaatattcccctcctttgggctggacgcagtggctcacacctgtagtcccagctacttgggaggca

SEQ ID NO: 23367 - DNA, 1058 bp, Homo sapiens
gccagctgggaaactggagacaggcacaggggatggttggaggggaggtgaggggcaagtgttacatccaccctccagctccaggtccagcctggcagccaactatccaaccccctcgcctctaccccaagtaaaacccatctttgctcctgtcctgggtctcttctgacaccaacccaccacctgctgactccaccactggcccgaccgccctgcctttgcctcatctctgcacctacccacatggcctcctctatttttgacccagatgtccccctcacctgagtcccaggagcccttggagcatccacgttcagtgtgttgagtgacatggctctcttcattctgcaaagagggcagcagggaggaaatgagtgaatccaggagtggcccccctccacgagggacctttccagcacagggtttgatctgtgtgtatcacaggggagatgggagccatggaaggttcttgagcaagatgggggtgggggtggggtgggctgtggattctgctgatgtcagggctctttgccgacctgatcaacactcacccggctgctcctgccgccgcctcgcctcggagccgggagaccagcttctcacttcctcgcctgatagactcacggatcttggagagtgagctgctgcggcgaagggcctggggaggggccggggatgctgctcagtcccccaggcccatgcagtccccacgcccaccccaggagccgaagcacagcccatcctcacctgttctgcgtcaccagctgtgcctgtgttgggggcacctagggggaaagatgggggacactgagatggggacatagagaagccaccaggagggaagacagacaggggctaggggctcaccgagaggggcgggtaggtcctccttgtggaggatttctttgtacagctcttccgcttgttgatacttgttctgtttcaggtaggctgaggcctgcggagaagggagtgtctgggaacttttcggaccccagttcccaacactgcatccagtcccgcctttttttttttttttgtagagacaggggtcttgg

SEQ ID NO: 23368 - DNA, 1071 bp, Homo sapiens
ctcaagaggctgaggcaggagaatcaatcacttgaacccaggaggctgagcttgcagtgagccgagatcatgccactgcactctagcctgggcgacagcgcgaggctccatctcaaaaaacaaaaacaagaaaaggtcatgggagaaagcttgaggctctggctcctggctttggcgtgggtgctgggcagcccatgcggtgctgggagagtgagcagtgggcggggctgtgggctctctacttgggatccttcgtgaaagtttgcacaggtgtgggcccgaagcggacaggttggggtgtattttggactcagatgcctggtttggggcttaagcagtcatgtttggtcgcatttactcccaggcagtacggggtggagattggggtgaagcgagggagcaggagagggaatgactgagtgggtgcagctgtggctgtagtggggtaatctcacccctccttgcctgccctctgcaggcttcaccatcatcatcgagccctttgacgacagaaccccgaccattgccaaccccatcctgcacttcaggtgggaccctgcccggtgagggtgtgaatgctctgtgggtcgggggcccagccccccgggccctcactgccctcatctctctccagctgcatggacgcctcgctggccatcaaacccgtatttgagcgtttccagtctgtcatcatcacatctggggtaaggacccttccccgtcccctcctagtccctgacctccctccatgggcctcctggtccctgcccagtcctgctgagatccctcccactgtcccgccacagacactgtccccgctggacatctaccccaagatcctggacttccaccccgtcaccatggcaaccttcaccatgacgctggcacgggtctgcctctgccctatggtgagtgggagaggctagggctggggccgggaggggagatgggggcaaggggccgccctccttccttggcttcccccactgctcaggcaggagagctttacagcgaagaggctgggttcgggattcagacagacttaggcttgattctgcttctctgtgggct

SEQ ID NO: 23369 - DNA, 1158 bp, Homo sapiens
atgtgggtgttgactgcattcctctgtgagcccatggggttccgacaccgtgtgtgtccccataggtgcgtgagaggcagtgggagaggctctgggtgtgaatgcgtgaccatgtggccatgcgggattaatgccatgactggggggttctgggtgtgattgtgcgtctcttgttttgatcagaacccacttagggccaggtgcagtggctcacacctgtcatcccagcactttgggaggctgaggcaggtggatcacgaggtcagaagttcaagaccagcctggccaacatagtgaaagtccgtctctactaaaagtacaaaaattagctgagtgtggtggcaggcacctgtaatcccagctacttgggaggctgaggcaggagaatcatttgaacccaggaggcggagtcgagatggtaccagtgctctccagcctggatgacagggcaagactccatctgaacaaagaaaaaaaagaaaaagaaaaaaagaacccacttaggaggtcgtgctagcaggtgtgacaagtgaccacatgactctggagtgtctgattattgctctgtctgtgccattatgcggcaatggctatttgtgacatgcaggtgtacagcgtgggggtgcaagtttccaaaacaggcccagtgcccaccctcactgagtgctcattggctggggagacaggcacgtgaccgtcgtgatggcggaggcagggctgctggtcctgctcatgcttccgtctgccccccgaccccgtctctcctccccgccagattctgtgctgaacgcctccggtccctgctgcatactctggagatcaccgaccttgctgacttctccccgctcaccctccttgctaactttgccacccttgtcagcacctacgccaaaggtaagctcacctttttctgtccctgctgggcctcctagcagctggaatcagggtcccagcagggtctagagggttgttggcaggacacacagggctttgtggggtttggcttggaagtgtgggccctattttgaaggcagtggggagccatacatagttcttgagtaagccttgtgctcagatttacattttcacagacttcctcgggctgcagagtggagaaggatggcatgggcagtggtaagggaggaggccagagaaatt

SEQ ID NO: 23370 - DNA, 1034 bp, Homo sapiens
ggaggatcacctgagccctggaggtcgaggctgcagcgagccgtgatcgcgccactacactccagcctggatgacagagtgagaccctttctcagaaaaaaagtaccctgggactcctgccaaccccgcgggccatttggccttcctgctagctgagaggaacagtctaggaaccacccttttctactgggtttctcttccaggatctgccactgaagcgggagggggtgggtcccagtagcctgcagtctgtccttccgactgtagctctctcattagaggagctgcaaggtgatgaaggcatcctgaggctgtacctgaaccaccatgtggatctccacaatgggtacagagcttattaaaatcaggagggaaactgggagggttctgatggggagaggcccaagagtcaccctatgagctggggaaactaaggccaggggtaagcaaagggacttgccagagatgccacagccagtgaggggctgactgcccagggtggtgaagtagtaggggcagagtgagaggcttggattaccccagctgcagagtgaggagggagaggcgatggctgagcagaggctgggagggtgacgatctctacacagaggcccagaccatcccagaggtggcgttgatagtgggagaccctctctatcccctctcagagcagccccagatcacaccagagatcatagcattgtgtaaactgggtgaccattccacctgggcccgcttttgggaagctgcaggtgaaagtgggagggccgggctttccccgacttccatcctcacctcccttctctaaagaggtaaaactggcctggaccaagatctgcccagatagaaagccaagaaacaggttctgaaacttttcttttcttcttttctcttcttttttcttttcttttctttcggagacagtctagctccgtcaccctgacggagtgcagtggtgcaatctcggctcactgcaacttctacctcccaggctcaaccaatgatcctgcctcagcttccgaagtagctgggat

SEQ ID NO: 23371 - DNA, 1031 bp, Homo sapiens
tgtagtttatagtttaaacaaacatggtaacagccctttcccaaagcagacctccttcttgtctggcgactggattgcctttgtaggactaacattagccacaagattagaaattatggtttaggagtcatgcagctggagggtacaagattctgaccctccctaaactgctcctaagatcagtgcttgagatatttcacagaccctgcacttgatggatcagctggccttacccagatcaataaactggcccatctgatcttgtggccccccaacccaggaactgactgagcgcaagaagacagctccgactccctgtgatttcatctctgaccaatcagcactcctggctcactggcttcccctcacccatcaagttatccttaaaaactctgctccaccgagatcgcaccactacactccagcctgggcgacagaccgagactccgtctcaaaacaaaaacaaaaaacaaaaaaactctgctccagctgggcccattggctcgcatctgtaatcctagcactttggaaggctgaggggggtggagcacctgaggtcaggagtttgcaaccagcctggccagcatggtcaaaccccgtctctactaaaaatacaaaagttaggcgggcttggtggcgggcgcctataatcccagctactcgggaggctggagcatgagaatcgcttgaacccggggatggaggttgcagtgagccaagatcgcgtcacttcattccagcccaggcgaaagagtgaaaatccatctcaaaaaaaaaaaataaaataaaataaaaataaaatctccctgaatgctcagggagactgatttgagtaatggtaagactcctggctggggcgcggtggctcacgtctgtaattccagcactttgggaggccgaggtgggtggatcatgaggtcaggagttcgagaccagcctgaccaacatggtgaaaacccgtgtctactgaaaatacaaaaattagctgggtgtggtggcgcacatctgtaatctcatctactcaggaggct

SEQ ID NO: 23372 - DNA, 1050 bp, Homo sapiens
attgtgctaccgcactccagcctgggcaacagagcgagactcatattcaaaaaaaaaaaaaaaaaggccgggcgcagtggctcacgcctgtaatcccagcactttaggaggctgaggcgggtggatcacgaggtaaagagttcgagaccagccgggaaacatggtgaaatcctgtctctactaagaatacaaaaattagctgggtgtggtagcacctgcctgtaataccagctattcgggaggctgaggcaagagaatcgcttgaacccaggaggcggaggttgcagtgagcagagattgcaccactgcactccagtctgggtgacagggtgagactctgccctgaaaaaaaaaaaaaaaagaaaagttcaggtgtgcagcatacaacacaaacagccgtttagggcagtcctgtgaggggcgggtatagtagccttggggactttgaggtcctcattcagaatctcccccaccccccaaagtgctccaatgaggctgtattggtggccaccttccaccccacggaccccactgtgcttatcacctgcgggaaatctcacatctacttctggaccttggaggggggcagcttgagcaagcggcaaggcctctttgaggtgagtgccaggggtttgggggacaggctggccctgagagaggtagttagggacaggcagggaggtagcaagatcccccagagggtggcaggggtttgggattacagggacgctgagatgttgcctgctggggcctcagtttctttctccataccatggtgatgatccaccttaactctggagttaagagggtgaccgggcaccatgaggtggaaggatcacctgagctcatggctgcagtgagccgtgatcaaatgatcactccagcctgggtgatagaacgagaccctatctcagaaaaaaaaaaaaaaaaaaaaaaaaaaagttgtgaggattcaaagggatgaagagtacagcagttcctagcagatagtaaatggtcaataaatgggtactgtggcaaggtggctctcgcctgtaatcccagcatttt

SEQ ID NO: 23373 - DNA, 1072 bp, Homo sapiens
tttcccatatcaattgtggatttaacaaactttcccttgtcatttgtaagtttatggctgtcatgtgtagagatggtcgttttttgctttatctatttggaagccatagtatttggatcatgtatgttgagaacttttgtgtataatgggtcacttccacctccctcccccagccctagggactcatgtagagaagtaaataattggtcattttgtttcgtcatcatccattgcttttgtcagtttatttattttttatttatttaatttatttttaatttaatttaagacagtctcgtgctgtcacccagagtggagtgcagtggcctgatctgagctcactgcagcctctacctcctgggctcaagcaatcctcccacctcagcctcctgagtacttgggactacaggcacgtgccaccacaccctgctaatttgtgtattttttgtagtgatggggtttcaccatgttgcccaggctggtcgcagactcctgagctcaagggattgtgtcccccctctgcctcccaaagtgctgggattacaggtgtgagccaccgtgcctggccaagtttttttttttttttttttaaggggtaatgttactcctctacttgtctcttggttcgtgttttcccagccagttttttgccgtcttttgattttccatatttttggttcacaatgttttacaatgaatagattttcatggagtagttgctgaaggctgacctagtgtagggccttatgctgggctcagtgtgggggagttagaagatcctgtctcaggcctggagagagacccaccccagacgatgacccagagtaggcagggaagagggaacccagaggtcccctctgggcaggtgggtgatttccaggaagggagttggagaaggcctctctaataaaactgcatttgaacacagacctgaatgaagtaaggaattgagccttgcagagggggaatgtattgcagttggtgggaacagcaaatgcagagaccagggaaggcaagagcccggtaactttgaggaatagacagcaatgagcccaccgcatggacgccctgg

SEQ ID NO: 23374 - DNA, 1060 bp, Homo sapiens
tgaagagaaaatatttctaactaggtttttcttgttgttgttgttgttagtttgcttttgttcgtttaacttttgggtcattaaggcctcattgggcagtttgacaactttgtaaattcaccttgaaacagtttggtttattgtgagctttctgggcttaattcattggctgtgatagtaagcttatggttgaaaacactggcttcagagaggcgcagggtcaaaaccctgcttctgttgctgtgtgaccttggccaagctgcattcccactctgggcctcagttttcttttccctttttttttttttttgagacagagtctcactgttgtccaggctggaggccagtggtgtgatcttggctcactgcaatctccgcctcccgggttcaaatgatgtcttctgcctcagcctcctgcgtagctgagattacaggcttgtgtcaccacgcccagctaatttttgtatttttagtagagatgaggtttcaccatcttggccaggctggtctcgaactcctgacctcaggtgatgcaccctccttgacttccctaagtgttgggattacaggcgtgagccactgctccgacctctttttttttttctttttttttgttttgaaccagggtctcactttgttgccctggctggcatgcaggggcatcatcttggctcactgcaacttccacctcccaggatcaagggatcctcccacctcagcctcctgagtagctgggactacaagcgtgtgtcaccacacctgcctaatttttgtagagtcagcgtttcaccacgttgcccaggctgatcttgaactcctgacctcaagtgatccacccgcctaggcctcccaaagtgctggggttacaggcatgagccccagtgcccagccagcctcagtattctcatgtaaaaatgggaccacatttaaactctgagcttctcgtaaggagttgacgtggtaactgatgaggtggcatatataaaatgcctggggtgtattatgctctcaataagtgtgaggtctttctatgatttttattctttcaagaaaaggtact

SEQ ID NO: 23375 - DNA, 1045 bp, Homo sapiens
gggcagcaggtcacccctgttcaggctctgagggtgccccctcctggtcctgtcctcaccaccccttccccacctcctgggaaaaaaaaaaaaaaaaaaaaaaaaagctggtataaagcagagagcctgagggctaaatttaactgtccgagtcggaatccatctctgagtcacccaagaagctgccctggcctcccgtccccttcccaggcctcaacccctttctcccacccagccccaacccccagccctcaccccctagcccccagttctggagcttgtcgggagcaagggggtggttgctactgggtcactcagcctcaattggccctgtttcagcaatgggcaggttcttcttgaaattcatcacacctgtggcttcctctgtgctctacctttttattggggtgacagtgtgacagctgagattctccatgcattccccctactctagcactgaagggttctgaagggccctggaaggagggagcttggggggctggcttgtgaggggttaaggctgggaggcgggaggggggctggaccaaggggtggggagaaggggaggaggcctcggccggccgcagagagaagtggccagagaggcccaggggacagccagggacaggcagacatgcagccagggctccagggcctggacaggggctgccaggccctgtgacaggaggaccccgagcccccggcccggggaggggccatggtgctgcctgtccaacatgtcagccgaggtgcggctgaggcggctccagcagctggtgttggacccgggcttcctggggctggagcccctgctcgaccttctcctgggcgtccaccaggagctgggcgcctccgaactggcccaggacaagtacgtggccgacttcttgcagtggggtgagtgcctaccctcggggctcctgcagatggggtgggggtggggcaggagacaggtctgggcacagaggcctggctgttgggggggcaggatggcaggatgggcatggggagatcctcccatcctggggctcagagtgtggacctg

SEQ ID NO: 23376 - DNA, 1057 bp, Homo sapiens
gggcccccccaaccccatgcccccagcctcctagccataaccctccctgctgacctcacagatcaacgtattaacaagactaaccatgatggatggactgctccagtccccccacctgcacaaaatttgggggccccccagactggcccggacacgggcgatgtaatagcccttgtggcctcagccttgtcccccacccactgccaagtacaatgacctcttcctctgaaacatcagtgttaccctcatccctgtccccagcatgtgactggtcactcctggggagagactccccgcccctgccacaagagccccaggtctgcagtgtgcccctcagttgagtgggcagggccgggggtggtccagccctcgcccggcccccaccccagctgcccttgctattgtctgtgcttttgaagagtgttaaattatggaagcccctcaggttcctccctgtcccgcaggacctcttatttatactaaagttccctgttttctcagcgggtctgtccccttcggaggagatgatgtagaggacctgtgtgtgtactctgtggttctaggcagtccgctttccccagaggaggagtgcaggcctgctcccagcccagcgcctcccaccccttttcatagcaggaaaagccggagcccagggagggaacggacctgcgagtcacacaactggtgacccacaccagcggctggagcaggaccctcttggggagaagagcatcctgcccgcagccagggcccctcatcaaagtcctcggtgttttttaaattatcagaactgcccaggaccacgtttcccaggccctgcccagctgggactcctcggtccttgcctcctagtttctcaggcctggccctctcaaggcccaggcaccccaggccggttggaggccccgacttccactctggagaaccgtccaccctggaaagaagagctcagattcctcttggctctcggagccgcagggagtgtgtcttcccgcgccaccctccaccccccgaaatgtttctgtttctaatcccagcctgggcaggaatgtggctc

SEQ ID NO: 23377 - DNA, 1061 bp, Homo sapiens
ggcccagggggagctctggtaaaaggcggctgagttttcttccacccccttcccaagttgccctcgtggtccagccgcctggatcgggaagacaaaggcctctggagggaggtcggggctgcttgttgcccatccagaggaatcttggatggtgggatttgggcatggtcttggcaaggtctttctcccagtgtcaaggctcggggggatgcctgtgtgcctctcccgacggctccctccctccctggttcaggtgtggaagtaccccaaggtgtgggagggcttcatcaagtgctgccagcgcacaaagccccagagcttccaggtcatcctgcagctgccgccccagcagctgggagccgtctttgacaagtgcccagagctccgggagcccctgctggcccatgtccgctccttcaccccccaccaggtaccccttccccccaccaggtaccctttccccccacccagggtgtgcggtgggcggccccctgggtccctctggttggtggggactggatggaggcggacacaagaaggccctgcactgctgggagttctggagggttagggcccccggacctgaggtgtgcaaatggggtctctgtgccagagctgcccccagcgcccccttcctgctctccacccagcaagctcacatccctaactccatcatgaccatcttggaggccagcggcaagcaggagccagaggccaaggaggcgcctgcggggcccttggaggaggtgagggccctgcagcccacccatctggatccccagactcccaccccctaccccaagccagcaaggctcaccatggcctcctcctgaccccgagagactcaggccacccctgcctctgggccacccgtctcccaggggatgctcctgctgggagttgggggtctgggggacaactgccccttcctccccatgctcttggtgaagaactcaaagaccacctcagggtggttccttctctttccggccgtcctctgagccacccacctctgagcttctgtgtggccctccctatccccaggatgatctggagcccct

SEQ ID NO: 23378 - DNA, 1114 bp, Homo sapiens
tcaggtgttctgcctacctcagcctcccaaggtgctgggattacagatgtgagccactgcacctggcctgtttgtttctgagacagggtgttgctctgtccgcaggctggaatgcagtggtagggatcacagctcactgcatcctccacctcctgagctcaattgatcctcccaccttagcctcccaaaatcctgggattacaggcgtgagctggccaaattattattaattatcataattgttgttagcagtttatgcagtagccttcagatcttttcccatgtacataaaaataatagtatacttagccaatgtttactgtatatactaactcatttaatcctcaaaatagtcttgggaggtaagccctgttactatccctgtttcctagaagaggaaactgagagccagagaagttaaatgtcttgcctcaggtcattctgcgtatacataaacacatacttgacaaaaatggcttgaactgcatgtattgtcctctgatgcaacaggctgtcagggacctcttttcaggataatatactgagattcaccttttttttttgagatggagtctgtctttatgtcccagactggagtgcagtggcatgatctcggctcactgcaacctccgcctcctgggttcaagcgattcttctgcctcagcctcctgagtagctgggattataggctcagctaactgttgtatttttactagagatggggtttcaccatgttggccaggctggtctcaaactcctaacctcagacgatccacccgtttcggcctcccaaagtgttgggattacaggcgtgagccaccgcgcccggcttcaccaattttttttaccctgtttcctctgctggtttttggtttatcctttcagatttttttccttttttaacatatatattttttcccctttcttttttttgagtcaagttctcactctgctgcccaggctggagggcagtggcccgatcttggctcactacagcctctgccttcacctccctgagtagctgggactaccaggcacgccaccatgcccagctaatttttatattttctgtagagatagggttacaccatgttgcccaggctgctctccgact

SEQ ID NO: 23379 - DNA, 1133 bp, Homo sapiens
attttggttgatctgaatgtattatcatgaaaaaagtggaaatgtttattatggggttttattttattttattttattttttgaggcagagtctcattctgtcgcccaggctggagtgcagtggtgttgggattacaggtgtgagccaccatgcccggcctgttttttttatgttttgactggggacggcatgccatgccggttgtctggtggccaggatccttggcttacgtaaacagacctgggggtaaaaaacaattcctttcagataaacagtactgtagcatagtggtaaggaagatatgcagccatgctgctgactctgcctcttacaagctatatgcctttggtcaggtcactttacctccctggtcttcagtttcctcatctgtaaaatgaaaattaaaaatactaactcccagcctgggcaacatggcgaaacccttctctacagaaagtacaaaaattaaatggggattcgcctgtagtctcagctacttgggaaaatgaggtaggaggatcgcctgagcccgggaggcagagattgcggtgagctgagattgcggcactgcactccagcttgggcaacagagtgacaccctgtctcaaaaaaacaaaaaatgtaaacctaactcatgtatattaattctaatatatacatattaattcatttaaaccttggtgtctgaggtttaaatgagttaatatgtatatcttagaattgtgcttagcacatattaagtgttctctctctctctttctctttctctctctgtgtgtgtgggttttttttctttttttttttaatttgaaacgcagtttcactcttgttgcccacgctggagtgcaatgatgtgacctcggctcactgcaacctcctcctcccaaattcaagcgattctcctgcctcagcctcccgagtagctaggattacatgtgcctgccaccatgcctggctaatttttttgtatttttagtagagatgaggtttcaccatgttggccagactggtctcaaactgctaacctcgggtgatccacccgccttggcctcccaaagtgctggcattataggcttgagccaccgtgcccggccgtgttcaatatatattaactgattattttttctttttt

SEQ ID NO: 23380 - DNA, 1033 bp, Homo sapiens
tgcaaaatctgtttgtttgttcgtttgtttgtttttttgtttgtttggtggttttttttttttttttttgagatggagtctcactctgtcgcccaggctgcagtgcaatggtgcgatctgggctcactgcaacctctgcctgccgggttcaagcaattctcccacctcagtcaactgagtagctgggattacaggcacctgtcatcatgcctggctaatttttgtatttttgtagagatggagtttcaccatgttgcccaggctggtcttgaactcctgacctcaggtgatctgcccacctcagcctcccaaagtgctgggattacaggtgtgagccaccatgaccagccaaaaatctgtattttaaattacttgttgcctgattgttaagccaatgtcacatattttagggttttgttactgcagtgccactaccaggtgccaagttatgtgttagtcagggtacaggctaagctatgaataccaaaaaacctcaaaatacaatgacccatgattctggatatgatgaaattgtttatgaaagaccaatagtgctgctaggagtaatttgaaatgccaattaaaaatgtaaaaagcagcaatgattatttcaaagcattggtgagctgctaaggcaactaggagtcaagagaacaaaatctcaaatatgggggaacagtatagagagctgagctgagccaacattttgcagtttctgtctccagggcatttgatgcttctgggtatggggaaggagactgaagatctgggcaaaagagttgggcagaagaatccttctcagacacccaaagagcaggaaggacaaaattagacttgaaggactaggacctggggaaaggagaagttaaaaagagcctaatgattttctggttcctgtttgaggacattgcagaactctgaagctacatggggtagagtctaagaagccaggaagaaagcctctgaaaagcagaatagagtttcagcagacttgcaatgctgaagagacaagaagagttcaagagctgccagg

SEQ ID NO: 23381 - DNA, 1087 bp, Homo sapiens
agccgggcatggtggtgtgtgcctgtaatcccagctgctcaggaggctgaggcaggagaatcaggaggccttctcaaaaaaaaaaaaaaaaaaggaatcaaagcccgacatggtggtggtggcacatgcctgtagtcctagctatttgggagactgaggctggaggatcacttaaccccaggagtttgaggctgtagaatgatactgcacttcagcctgggtgacagagggagactccatctcttcaaaaaaaaaatgggtgaggtggggtggctcacgcctgttatccaagcactttgggaggctgaggtgggtggatcacttgagtgcaggagtttgagaccagcctgggcaacatggtgagacactgtctctacaaatacaaaaattagtcaggtgtgatggtgtgtgcctataatcccagttactagggaggttgaggtgggaggatggatttagcctgggaggtcgaggtgcagtgagctgtgatcccgcctctgtgctctggcctgagtgacagagcaagactctgtctcaaaaaaaaaaaaaaaaaaaaaatagaatcacatagttggatcttggaaatgcctgctctgtcagtagcattcaggagtttaccacatgctagaagatcttgggatcttcacagccccactcatctagcccagactttctagtttacatttaactcttatctctcagatgtaaatggttctatgattctgagattctttggtgctccagtgcctcctgtttccctggctggggtgtctgcaggggtgtgtaggaaggcatggatggggccaggcgcagtggctcactcacgcctgtaatcccagcattttgggaggccaaggtgggtggatcacttgagtccaggagtttgagaccagcctggtcaacatggtgaaaccctgtctctactaaaaataaaagaaaaaattatcagagcaagtctgggcccggtggctcacgcctgtaatcccagcactttgggaggccgaggtggggaaatcacgaggtcaggagtttgagaccagcctggccaacatggtgaaaccccatctctactaaaaatagaaaaaat

SEQ ID NO: 23382 - DNA, 1022 bp, Homo sapiens
ctgccctgcacggctgaagagctggtgaggagatgggggatgggacgggttggtggctaggggggtgacttggcccaggcatggggccaacgcactgatgtgtcccctccattcttgccaacgacagagccgtagcaccaccgaactcctgcctcgccgtcccccgtcatcctcttcctcctcttctgcctcatcgtatacgggccgccccattgagctggacaagatgctgctctccaaggtcaaggtgccgcacaccttcctcatccacagctatacacggcccaccgtttgccaggcttgcaagaaactcctcaagggcctcttccggcagggcctgcaatgcaaaggttagctgggcctgtcggggaggacagacagggtcagaacctccttcccgccccaacctggtcttgtggcaggacacaaggatctgagccttgggaccccagggcctcagaaggggagggccctgaatcctagtgttctgggacctttggaattctggaatcttagaacctcagttgtgtgtgtgtgtgtgtgtgtgtgtgtgtgtgtgttgttgttgttttttggagacagggtgtcactctatcacccaggctggagtgcagtggcgcaatcacggctcactgcagcttcaacctcctgggttcaagtgatcctcctgcctcagcctcccaagtagctaggactacaggtggtgccaccacacccagctaattttcttttcttttttttttttttgagacggagtctcactctgtcgcccaggctggagtgcagtggtgtgatctcggctcactgcaaactctgcctcctgggatcaggacattctcctgcctcagcctcctgagtagctgggactacaggcgcccgccaccatgcctggctaatttttttgtatttttagtagagacggggtttcaccatgttagctaggatggtctcgatctcctgaccttgtgatccacctgcctcgacctcccaaaatgccgggattacaggcgtgagccaccgcg

SEQ ID NO: 23383 - DNA, 1027 bp, Homo sapiens
cctccggagtagctgggattacaggcgtgtgccactacacccggctaagttttgtatttttagtagagatggggttttgccatgttggccagtgtggtctcaaactcctgacctcaagtgatccgccggccttggcctcccaaagtgctgggattacaggcgtgagccaccatgcgtggcccacactactaagatttaatcacactacttagggattgcctggattccaggtctacagaaaagagaaagtggggtacagggggtgagcagacctggagggatagtgaccttaggggtgggggtgaggagaggcattttcttttggaaagttggggttggggaaagagggggaaccaaaggggcctcagaaaaaggaaggtcagggttagaagggggaacaggtgtctctagggagatggacaggagttttggggaggactagaaggaggtgcttaccatagaggactggggctgggtcagagctttggcggggacttttgaggcatccattgttgcagtgggaaaaggtggggtgtgaggcgcgttcagggcctggggggcagatggggtgatgtcggggctacaagctggaactaggggtggagctttggagggaacctttgaggtatcccttgttggagtgggaaaattttgggtgtgaggcgtgttcagggtctgggggacagatggggtgatggcagggctacaagctgaaactggggacagagctttggggggagcctttgaggtgtcccttgttggagtgagaaaaggggtgtgggtgtgttcagggtctgggggacagatggggtgatggtggggctacaagctggaacttggggcagaactctaaggaggggtgggcctgaaggggctgatacacttacggatagtagtgccttttggaggagatcgtgctggcggggggtgatgggacaggaccaggtgagagattgggtggaaagggcacaacttctcaagaagagacctaggaggggcagacgccatgtctcttactctctggcgc

SEQ ID NO: 23384 - DNA, 1071 bp, Homo sapiens
ggagaccccatctcttaaaaaaaaaaaaaaaaaaaaaagttaaccgggcgaggtggcacacgtctgtagtctcagctacttgggaggctgaggtgggaggatttcttgagcttaggagtttgaggctgcagtgagccacgatcatgtcactgcactccagcctgggcaacagagagagaccctatctctaaaaaagaaaaaaagtagaaaaagaaaaaaaaaagttatgatgtccatggctcctgccacgaaaatgctaaattaaatcagaatctctgcaaagtgagatggaatctgcacatcagtatttttaaaagcccccaggtgattttctaagacacagccagaagccagttcatccactcactattccagtagtatagatgggcatgctctcagcaccttagagcagtctatggcccttggtccctcttgagggtgggggcagctgcctttttcatggctgccttccctgctgctccggcatactgcagtgcccagtgaaaccggctcaatgaatgaatgacagaagtctggatttacacctttagtgaccttgttcaggctttaagtactctttcatatcataagctggcctcacttgaatttttatcttcattgttgtctctcccctaaacctgagttttgttttgtttttgtcatttttattattttttgtttttttagacggagtctcgctctgtcacccaggctggagtgcagtggcgcaaactcagcttgctgcaacctctgcctcctgggttcaagcgattctcctgcctcagcctcccgagtagctgggattacaggcgcctgctaccacacgtggctaatttttgtatttttagtagagacgggatttcaccttgttggccaggctggtctcgaactgctgatcttaagtgatctgcccacctcagcctcccaaagtgctgcgattacaggtgtgagccaccgctcccggccctgttattttgttttgaggcagggtcttgttctgtcacccaggctggaatgcagtggcatgaccaccactcactgcagcctctacctcccagactgaagcaatca

SEQ ID NO: 23385 - DNA, 1049 bp, Homo sapiens
cagggttgcaccacgttgaccaggctggtcttgaactccggacctcaggtgatccacccaccttggcctcccaaagtgctgggattgcaggcatgagccactgcgcccggctctgcctccttgatcatgcacctggccctgtgctccaccttgtctgggcagagttcagaggtctttgtctcctctcaaggggaggacagactttagagaacaggctcacctgcacaaggtcaggatcggtcccagctacattagccaccacactttcggtgtcagcaggccagagctgctggtgtggactccagcaaccagggaagcagtgattggacctctgaatgaccagggggctttggagagaccaggcaaagcccatgcacttggccatgggctgaaaagactgctcgggccagggttgggaccaacccttgtccagcacaggctgcgtgccgctcctggggccacagaaccatgctgttccttcttccttaatggagcccgaaaaattctgtattgagctcccagtttctgggccctgcttggggagacagctgtgaatagagggaaatccctgccttctggagccctagaaccttccttggagagctagtgggcagtgtgagcagctgccgggctgtcctggcagtggacagttccgaggggcaccaggtgtgaagtgggtgcgtgggtgattggagcccagctgcctggggcttggcagagctggggctctgggctgtccagggaggagctggcagccctgacacagcccatttcctccctgcggtgggtgcagacccaagcgtgctgagccacgtcctggagggccacggggacgccgtgtggggcctggccttcagtcccacctcccagcgcctggcctcctgttctgctgatggcaccgtccgcatctgggaccccagcagcagcagcccggcctgcctctgcaccttccccacagccagcggtgagtgggggccccggtgcctcaccctggagctgtgcgggatctggaggctatcagagtggttcctgctgaggccccaggcctc

SEQ ID NO: 23386 - DNA, 1317 bp, Homo sapiens
taccttttttttttttttttgctccttgaggggatctccctatgttacccaggctggtctcgaactcctggggtcaaatgatcgttctgccttggcctcccaaagttctgggattacaggcgtgagccactgtgccccgtctgtggctacttttacctgcccctaatctgagcctctcaggggtggcaggaacaagccatgtcgttcccctgctctaaacacttccccggctccttgtttctctgaggctttttcttaggatgaaatgcgcattcctccggggctcaccacccagcacctgtctcatcccctgccactctccttgcctcctgcagcctgtaccactgacctctcaggcctgggctcgcccttgctgcctcagggcctctgcacgggccctttccctctccagggccctctccttatcttgtgaagtcctgctggctcgtgcttcctcaggaaagcctcagtggcccccagggaggagggcaggctgcctgatgtctctctgtgcatctttaattcattgccctgctcatggctgatgatcctgcacacttgtgggatggtccagttgtgtcccccattccccttcctctcaactgcaagaccccaaggggtcaggctcacctttgtctctccagaacccagcgcagtgtggggacttgttgggcgagcatggagactctgcccagcagaggaaggggagagttcccggctggagcccaggctctgagggcattcctgccagggtcatgtgggtggaagacaggggccctcaagccctgggtgtcggtgtctgcatgactgctgggatggatgcgaagacactgaggcagctccccccaaccccagctgtctgacagcaaagatgcttttaagaagacgtggaaccccaagttcaccctgcgctcgcactacgacggcattcgttccctggccttccaccacagccagtcggctctgctcaccgcctccgaggacggcacgctcaagctctggaacctgcagaaggcggtcacggccaagaagtgagggcagcaagctcagagccgggggcaggggcatctggggacgggggtgacagggtctcagtgacatcaggctcctctgtcatcccacaggaatgcggcgctagatgtggaacctatacatgctttccgggctcacaggtagggaggtgcccctgagcctgctagaaactcgtcctaaatgcagcctgactcctgacctgctcactgccatcgcgggaggcccacggcaggaggcaggacagcagggggctctgagtccccgcccccttcatgatatacacag

SEQ ID NO: 23387 - DNA, 1069 bp, Homo sapiens
tgccacattgacccaccagtttactctcccatcagcggcacctcttttacacacctttacttgaacacttagtgctaacagacggtgtgacttcccctgtgagatcccttaagagctaggcagtgtcagattttcctgatggactctgaataacttttctctgaagagcttaatacagctgctcctagcagaagacctgccgtgcgaccctgcttggtacctgtgtgttgaatggcagagaaggcagcccccagggaggtcctgccagtagtcaccataagtttggagcaggaaggtggcggagctgcagtctgataatgagcaggcatttgctaggtgggggattctgagaagtaagtaacgtggtttctgcccatccgaaacttccaggctggcagaggaagcttgtttgtgcaggggaccgcagagctgtagatgttcatgcacagttgattgtgtggctctgcccctgttctgtggcaactctgagaggggaagctttttgaggatgggagggaccttttaatgagggatctgaactggagatttgtataggagcagcgacagggacctgcagtgagtgcggtgccagcagagaatgtgcggagctgcccctgcccacttcagcttcctgggggcccattcctgccagcagctgctgaagcttgggaaggaggcccttaggagatgcagggctagatggcacgaaacggggactcttcccagctagctgggacaggaagcagcgaattcagagaggcatcagctcctgggaggactgaattgctgggactcctccgaagcctttagatgtcgccttgctgggaatagctggaggggcggagaggcagtagctgccaggtatcagaaggttttgggagcgcatgctctgcggctctggctagagggagtggcagtgggtggatatggtgagcggcacttccagatccccgaccgaccctcaggcctaccttggccctcgcagaccagacagcccgtgggggctgctggcgtttgcagcgagggagagactggccactgacgcttcccgtttttggtgggtttccac

SEQ ID NO: 23388 - DNA, 1036 bp, Homo sapiens
tgcacagtgcagggaagggttctttggagtggaagtgtggacagagcagggaatgtaccctaggagcctggatgggagagcttaagagtggaagttccactttgggggtgtgcaggagtgggcgcgatggcactgagatggcacgtgtgttgtaggatgtaggtagagagccctgaactggagtgtggggtgttgggcatgtccagtatggaggtgagggtcctgggatggtgccaatgaggacgagttaggggttaccctggggtgatgctttaggggggagaattttgtagagcccgaaggcaacatgaggaggcatctcggaacgggggtagactggggttggggggaaggggatatgtttgtggaagtcttgggaaaagaccccgtggtttttggggtagcttgggacagggatgttgaatggaagagtctgaggagttgggctagggtttgtgacctcgtggagcgtcaggtccattggcagtgactggaggaccatggagatgtccggatttgaagggatcaggaatggcccgctggaagtctgaagattcttggactgggttattattagcagaaattgtcattacctgcttgtagcagcccacctttccccttccgatttgccgtttgctatctagtaggaagctggtacccaaataaatagctgatgagaattgtgtcggtagggatggggtgcggtggctcacgcctgtaatcccaacacttggggaggttgaggtgggagaatcccttgagcccaggagttcgaggccagcctggccaacatagcaagacctcatctctacaaaaaagtacaaaaattagccgggtgtggtgacatgcgcctgtagtcccagctactcaggaggctgaggtgggaggattgcttaaaccccggaggttgaggctgcggtgagccatgattgcaccactgcactccagcctgggcaaaagagtgagatcctgtctcaaaaaaaagcattttgttcataggatgagtaaagaccctccagtaactctccccctgccc

SEQ ID NO: 23389 - DNA, 3022 bp, Homo sapiens
tggttggggtggggtaggcgaggcctcacctgggctggacctggagggtgggcggagccccggtcagcaggttaacctaactcagctcccccatcccttgcagttccgccacgctgccgctgatgatgaagtgcgtggaggagaataatggcgtggccaagcacatcagccgtttcatcctgcccatcggcgccaccgtcaacatggacggtgccgcgctcttccagtgcgtggccgcagtgttcattgcacagctcagccagcagtccttggacttcgtaaagatcatcaccatcctgtgagtgtcagggggctgcggatgggacccccggacccctgttgacccccatcttctcccacaagacaggcatctgcctaacctcccaccttctccctcagggtcacggccacagcgtccagcgtgggggcagcgggcatccctgctggaggtgtcctcactctggccatcatcctcgaagcagtcaacctcccggtcgaccatatctccttgatcctggctgtggactggctagtgtgagtgtgggtctggagactggggcagggccaggggtacccctgggaaagaggatgagtgagtgagagtccttagagcctctggacagaagaggaagagaagaaggaaggaattctggaggaaatggggggaaccttgagcattcctgagggcaaggaatggcatctttgtggctctaagagggatgtcagaaaagtagagcgtctgtgtggtgaatacagcagactcttcagccagactgctcaggttcacatcccagctccaacattcactgttgtgacctcgggaagtgcttaatcttcctgcgtctcagtttctccatctgtaaaacggggagaagaacagtctctccctaaggattagataacagacacacctcccttagagcagcccccagtaagcagtaattgctacataattatttgctatcacgattaagctattaagagtataaagattggaaagcagccaggcacggtggctcacacctgtaatcccaacattttgggaggcccaggcaggtggattatttgaggttaggagtttgagacaagcctgaccaacatggtgaaaccccatctccactaaaaatacaaaaaaattagccgggtatggtggtgtacgcctgtcctgtgatctcagctactcaggaggctgaggcaggagaatcgcttgaacttgggaggtggaggttgcagtgagccgagattgtgccactgcactccagcctgggcaacagagtgagatcctgtctcaaaaaaaaaaaaaaaaaaaaattctggaattaattattggcaatggttgcacaagtctgaatatactaaaaaataccaagatggacacttttaaaaggttaattttatggtaggtgaattataattttttttcgagacacagtctggctctgtcacccaggctggagtgtagtgatgtgatcatggttgtgatcactgcagcctccacctcccaggctccagcgatcctcctgccccagcctcctgagtagctgggactataggtgtgcactaccatgcctggctaattttttttttttttaaatatatataaagatgggatctcactatgttgcccaggctgactccaactcttaatttttactttttagattccagggggagagaggcaggaggcttaggccttggccctttccttccctctcaccctctcccctcccgcttactttgctgtcatttctacccctttagcgaccggtcctgtaccgtcctcaatgtagaaggtgacgctctgggggcaggactcctccaaaattacgtggaccgtacggagtcgagaagcacagagcctgagttgatacaagtgaagagtgagctgcccctggatccgctgccagtccccactgaggaaggaaaccccctcctcaaacactatcgggggcccgcaggggatgccacggtcgcctctgagaaggaatcagtcatgtaaaccccgggagggaccttccctgccctgctgggggtgctctttggacactggattatgaggaatggataaatggatgagctagggctctgggggtctgcctgcacactctggggagccaggggccccagcaccctccaggacaggagatctgggatgcctggctgctggagtacatgtgttcacaagggttactcctcaaaacccccagttctcactcatgtccccaactcaaggctagaaaacagcaagatggagaaataatgttctgctgcgtccccaccgtgacctgcctggcctcccctgtctcagggagcaggtcacaggtcaccatggggaattctagcccccactggggggatgttacaacaccatgctggttattttggcggctgtagttgtggggggatgtgtgtgtgcacgtgtgtgtgtgtgtgtgtgtgtgtgtgtgtgtgtgtgttctgtgacctcctgtccccatggtacgtcccaccctgtccccagatcccctattccctccacaataacagaaacactcccagggactctggggagaggctgaggacaaatacctgctgtcactccagaggacattttttttagcaataaaattgagtgtcaactatttaatcaggtgttcttgagaatttgacttaaagcactggccactgcaatgacagtatctgctcatcaagaaacaccactgggctgggcatgggggctcacacctgtaatcccagcactttgagatcactccaggccaggagttcaagacaagcctgggcaacatagtgagacatcgtctctacaaaaaaatacaaaaattaaggccgagcacggtggctcacacctgtaatcccagcactttgggaggccgaggcgggcgaatcacgaggtcaggagttcaagatcagcctggccaacatggtgaaaccctgtctctactaaaaatataaaaattagccagacatggtggtgggcgcctgtagtcccagctactcaggaggctgaggtaggagaattgct

SEQ ID NO: 23390 - DNA, 1720 bp, Homo sapiens
tactaaaaatacaaaaaattagctgggcgtggtagcacgcgcctatagtcccagctacttgggaggctgaggcaggagaatcgcttgaacctgggaggcggagggtgcagtgagccgagatcatgccactgcactccagcctgggcaacagagtgagactccatctcaaaaaaaaaaaaagagagacatgttgcccaggctggtcttgaactcctgggctcaagcgatctgtctgccttcacctccctgcatgctgggattacaggtatgagccaccgtgcctggcctatttttattttttgtagagactgggtctcgctgtgttgcccaagctggtctcgagaactcctggcctcaagtaatcctcctgctttcacctcctaaagtgctgggattataggcatgagccactgtgcccagcctctttatctttcatcatctgcagagagcgtattggctcaagtcatgctagctgccatagcaaaccaacccaggaagtgtgaatggcgcaccttgatggacatttctttctgtctcccatgtgaagtccaaatctggtgactgcttcacatggtgatggaagcactgagactttttttttttttttttttttgagatggagtttcactcttgttgcccaggctggagtgcaatggcatgatcttggctcacagcaacctctgcctccctgattcaagcaattctcctgcctgagcctcccaagtagctgggattgcaggcatgcgccaccacgcctggttaattttgtatttttagtagagacggggtttctccatgttggtcaggctggtcttgaactcccgacctcaggtgatccacccacctcagcctcccaaagtgctgggattacaggcatgagccaccgtgcccggcctgcacggagagttttatctccgggctgctctacctttgaggggaaagagagcatgagattggcatgggggcttcaggggccaggcctgggagtggtgcccatgctgaagcacacattgctggggcttctcctgacctcaggaaggcaggaagatgtgggtagggtgctgagcctcacgcctggccactgggcccgtggaagaggcaacaagctgtctcctgtgttactgatcaggtacgcccctgtgggcatcatgttcctggtggctggcaagatcgtggagatggaggatgtgggtttactctttgcccgccttggcaagtacattctgtgctgcctgctgggtcacgccatccatgggctcctggtactgcccctcatctacttcctcttcacccgcaaaaacccctaccgcttcctgtggggcatcgtgacgccgctggccactgcctttgggacctcttccaggtacggccttggggtgggctagggtgggatgtttaatccgctaagcggcatggagcggatgaaattttctctgcccgggacattgtatctgggtacaggggccatacttcaggagattctcataaggtcctggatttatccccacccttaaaaagataggaaatgattgccctagagatttatttccctctttcttacactgcctccccgtggccctggaggcactcttttttttcttttgttttaaacaatggcgtctcgctctgttgcccaggctggagtgtagtggtgtgatctcagctcactgcaacctctgcctcctgggttcaagtgattctctgcctcagcctcccgagt

SEQ ID NO: 23391 - DNA, 1044 bp, Homo sapiens
ctgccagaggcaggtgcggggcattctgtttgggatggggcaccctctattcactctttggagccagatgacctgcatttaaatccagcattgaccattccctgtctatgtgattttaggcaagtgattttccttctctgcttcagtttcctcatctataaaatgggaacggcactttgggaggaggtgggtggatcacttgagatcaggagttcaaaaccagcctggccaacatggtgaaaccccatctctactaaaaatacgaaaaaattagccaggcatggggacacgcacctgtaatcccagttactcgggaacctgaggtatgagaatcacttaagcctgggaggcggaagttgcagtaagcggagatcatgccactgcctgggcgacagagggaaactctgtctcaagaagaaaagaaaagaaagtgaatacggtacacggaaggtcttaggacagtgcctggcttattgcgtgcctacagtaaatcctagtagctaatatttattgggctttttgcttgtataacttctggatacttcccactggccagaacttgggtatctagcctcccttctctgcacaagtggctgggaaaatatgcctttcttctgtgacttacaagaagggactggggagataactagtcagtgatgatggatgggcgaccgatgatcgagtagtctagggaagtgatgttgggaggcttttattttattttatttttttgagatggagtttcgttcttgttgcccaggctggagtgcaatgacgtgatctcagctcactgcaaactccgcctcccgggttcaagagattctcctgcttcagtctcccgagtagctgggattacaggcatgcgccaccatgcccggctaattttgtatttttagtagagacggggtttctccatgttggtcaggctggtctcaaactcccgacctcaggtgatccgcccacctcggcctcccgaagtgctgggattacaggcgtgagccaccgcgcccggacttgggagtcctcttggcttggagccatccc

SEQ ID NO: 23392 - DNA, 1531 bp, Homo sapiens
actgtcacacaagagtaagggtagccttgtaaacacagatgcatattcatgagatatgaagccgtcccttttctccctccccgccaccgcctcccaacacacccagatcctcccccatactctcagagccgctggcaggccctccaggaggaagtggctgatgcaagctgtccagggtattaagtttgctgcatggggtggagctgaggcccggggcgacctgccctggcctgccgtgggaggccagcattcctcaccccgaacccacaatgcctcagggctagcacgccagcctcttggggctgaaggaggctgactccccaagtcctgcaaaggggtgcaagcctagttccaaccctgccgggctgaggcatgagtaggggctgtatttgcgtgcaggcgggcccccaaagcttccactcgctgccttaaaacgccaacccagcctctcagacaatgctgccctcccactatggtatctaataaccctctgtgtgtctgtctctgcagaaatatcttcccttccaacctggtgtcagcagcctttcgctcagtgagtcctcaggggtgtcctgaggggatgggggtggacagggagggatgccagccagggggagcccttgctacctgattttggttagttcctggaaaaatgcatgtcaatgagaatacgggctcagagcctcctgtgagttttaattctagctgtgtgactctgggtaaatgtgtttacctctctgagcctcggttttccacctctggaaaatgggggtattgatcatcctgccccatggggttgccagcagatgaaatgagatcacattgaaaggatgtggaagggcaggctttgagcattgttagcttggcatggggttgggaggccctggtaacgatggacactgactcttcccaaccccacctacagtactctaccacctatgaagagaggaatatcaccggaaccagggtgaaggtgagagcagtgggaggcagcgggggctctacctctttgcctattgctataattttttggttttatttctgccttagtctttgctgtggaatttgattgacactctgcagtccttccccaatttctgtcttttctgccttctggataggtctctactttgtcccctcttttcccaccccaggtgcccaggctcttcctttctccctcaccccccaaccccattccatgctgccctctccctgcccccttccatccaccctcaacctgctcaaactggcagccagccagaggtttttgttgttgtttttctgacacaggatctctctccatcattcaggctggagtacggtggcacgatcacagctcactgcagtctccacctcctgggctcaagtgatccttctcacctcagccttcccagtagctgtgactataacacacctggctaatttctgtatcttttatagagactgagttttgccatgttgcccaggctggtcttgcactctcgggctcaagtgatctgcccaccttggccgcctcgcaaagtgctgggat

SEQ ID NO: 23393 - DNA, 1206 bp, Homo sapiens
cagccccgcccctactcgtccagtctccgaacgctctgcagccaatcggcgcccgagggtcggtccccgccttctcaagccccgccccctacccttatccctggcagcttccgctaaacgggctcagagccacgcggcacgcccgggaggctttctctggctggtaaccgctactcccggacaccagaccaccgccttccgtacacaggggcccgcatcccaccctcccggacctaagagcctgggtcccctgtttccggaggtccgcttcccggcccccagattctggcatcccagccctcagtgtccaagacccaggcagcccgggtccccgcctcccggatccaggcgtccgggatctgcgccaccagaacctagcctcctgcagacctccgccatctgggggcactcaacctcctggagccaagggccccacgtcccacccagagaaactctcgtattcccagctcctagggccaaggaacccgggcgctccgaactcccagctttcggacatctggcacacggggcagagcagagaagcctcagcgcccagcctggggaatttaaacactccagcttccaagagccaaggaacttcagtgctgtgaactcacaactctaaggagccctccaaagttccagtctccaggtgctgttactcaactcagtcctaggaacgtcgggtcctgggaaggagcccaagcgctcccagccagcttccaggcgctaagaaaccccggtgcttcccatcatggtggccgatcctcctcgagactccaaggggctcgcagcggcggagcccaccgccaacgggggcctggcgctggcctccatcgaggaccaaggcgcggcagcaggcggctactgcggttcccgggaccaggtgcgccgctgccttcgagccaacctgcttgtgctgctgacagtggtggccgtggtggccggcgtggcgctgggactgggggtgtcgggggccgggggtgcgctggcgttgggcccggagcgcttgagcgccttcgtcttcccgggcgagctgctgctgcgtctgctgcggatgatcatcttgccgctggtggtgtgcagcttgatcggcggcgccgccagcctggaccccggcgcgctcggccgtctgggcgcctgggcgctgctctttttcctggtcaccacgctgctggcgtcggcgctcggagtgggcttggcgct

SEQ ID NO: 23394 - DNA, 1066 bp, Homo sapiens
acaggtgtgagccaccgcgcctgaccttttgccatctctttgcatcgatctttgcttttgtttctctctgtgtgtctccttgcctctctccctgtcactgtctctctctctcccctgcctcccccttggtctctttttttgctgtctctttctgatgaccttgttcccatctctgtgcgtgtgtggctctctccctgcccatctcttaccatctctgccttcctctcccaggtcttaaacgaatatttccacaatgtctgtgaactggacctggtgttcaacttctacaaggtaggctcctggtgaagaggaggctgaaggagccagaggagggggacgggggggacccgtggtgcactagccacccggagcctctgctgaggtctgtgtcccagctcgaggggcatcagagccccagcttccagggtccgggccagcatcctggggggcctcgtctcaccccagggtctcccctcacacaggtttacacggtcgtggacgagatgttcctggctggcgaaatccgagagaccagccagacgaaggtgctgaaacagctgctgatgctacagtccctggagtgagggcaggcgagccccaccccggccccggcccctcctggactcgcctgctcgcttccccttcccaggcccgtggccaacccagcagtccttccctcagctgcctaggaggaagggacccagctgggtctgggccacaagggaggagactgcaccccactgcctctgggccctggctgtgggcagaggccaccgtgtgtgtcccgagtaaccgtgccgttgtcgtgtgatgccataagcgtctgtgcgtggagtccccaataaacctgtggtcctgcctggccttgccgtctttgagcccttgcctgtctcccctgggaaccagatacctaggatgccttgccttcagtccatcagtcagtcagtcaacaaacgcccctcattgtgctgagcaaggtgagacacccaggtgctcttcagacctgctcctgctcaccaagggcccccaggctggaaggggtgatgggtttagattccaggcactt

SEQ ID NO: 23395 - DNA, 1065 bp, Homo sapiens
gggaggcctgctatcctgcctctgggccacttgaggggcctcaggaagtgtgtgcttgtggctgcatctgcccgtctccctggcccaccatgtggctgcaggccaagctcttcattgctgaccatgaagagacctagttacctgccaagggattccccttccctcctcctcagggtggggtgaacaaggctcctatcccaccccaccccaaaaagagaaaaatgaaaaactcatagtttggagccaggaggcagggtgtcctacagggctgcacagccctgaggggtcagtgctgggatctggttggttggtttgtctttttgtctttttttttttttttttttttacacaatcattaatgagatttgtcttcagccaccagtgttggccttgaagcagagggcacagcccttggtgtttgtaaaataagtatgaatacacagtgtggcagtgttgtggtttttgttgttgtttttcctctccttttgagaattttcttttgtaaaagaaaaatattttttaaaccgaaatctgtggatgaaatagaagctggagccctcctcttggaatattcagcctaagaacctcataggactatgaattcacccgaaattctcatttgccatcaggccgagcttttaaagaaaaattgttctctaaccaggattgtaacaaaagtgtaaatactgtttcagagttgagagttggtggtgcaaatatgtatataatgaactgtatttttacaatgatcgccgcatgactatttcacaccctttttatactccatatctgtcttccagaaacgtcacctgcctttctcctgtggtctcttaatccagtaattgtattactgccattaaaggatgcagttattttaaaaagcttgtgggtctggtctctccaggctgccccagaccatcccttgccctgggaattaacgagggtggaaggtggctggggggtgaaacaaggacctattctctcagcggtcggcctcagggtaacatgaggacactgagggacaatttgtgcctccaaacagtgtcagctgtcctcagtggatgg

SEQ ID NO: 23396 - DNA, 1034 bp, Homo sapiens
aaggacgtgaccctgagcaagcccagcttcgcccgcaccgtgctctggaatcccgaggacctgatccccctacccatccccaagcaggacgcagtgccccccgtgcccgcggccctgcaatccatgcccaccctggacccccggctgcaccgcgctgccacggcagggccccccaacgcccggcagcgcccgggcgcctccacggattccagcacacagggcgccaacctccccgactttgaacttctgtctcgcatcctcaagacagtcaatgccaccggctcctcggccgcccccggttccagcgacaaacccagtgacccccgggtgcggaaggcccccaccgaccctcggctgcagaaacccacagactctacggcctcctcccgggctgccaagcccggccctgctgaggcgccctctcccaccgccagcccgagtggggatgcctccccaccagccaccgctccctacgacccccgcgtgctggcggccggtggactgggccagggcggagggggcgggcagagcagtgtgctgagcggtatcagcctctacgacccgaggactcccaacgcggggggcaaagccacagagccggctgctgacacgggtgcccagcccaagggtgctgagggcaatggcaagagctcggcctccaaggctaaggagcccccgttcgtccgcaagtctgccctggaacagccagagacagggaaggccggtgctgatgggggcacccccacggacagatacaacagctacaaccggccccggcccaaggctgctgcagcccccgctgccaccaccgccaccccaccccccgagggtgccccaccccagcccggggtgcacaacctgcccgtgcccaccctcttcgggacggtgaagcagacacccaagacgggctcaggaagcccatttgctgggaacagtccggcccgcgagggtgagcaggatgcggcatccctgaaggatgtttttaaaggcttcgaccccacggcctcccccttttgccagtagtgtccagccag

SEQ ID NO: 23397 - DNA, 1050 bp, Homo sapiens
gcagcacttgacccgtttcattctcttttcctggcttttagtgttgaacatggtcgagttcactatgagatgcatggtgtttccttactgattgttagaaagaaaccgtgcaactcctatccatccaaaataatttaaaagtacaggaaagagtacagaaatccctggcctctccagaatctgtgttccagagggactgtttctgtgtgtcttttcaaagctttctccttgcgtcttacaaacgtacatccaatgttccatcctgtttccacctcataagcgtttgcccgcatcactcaaccctctctgtgaacctcattcttcatgtaggcggggctacccatgggccgctctgttcccctgagacctggggagggcaggcaggggcaggctgtgcgtccttctccatcgccatcggtgtgggtttgcagtgaggggcaggggggctggagttggcacctggaggcccttcccgacatgaaccctcggttcttccctgccacagaggactacgggcactacgaagagctgccaggggagcctggggagcacctcttccctgagcaccctctggagcccgacagcttctctgagggagggcccccaggccggccgaagccaggcgccggtgtccctgacttcctgccctcagcccagagggccctgtacctgaggatccagcagaagcagcaggaggaggaggagagagcgaggaggctggctgagagcagcaagcaggaccgggagaatgaggaaggcacgtgtccgccccaggggccggggcacaggccccaggccgctgtgcaggggagcggcggtggtggggtgttccaggttgggtttcctgtcaggaaggagcccatggctagggaggacccctgtccagggccatgaagccgggctggggctgctgcatgtccctgagaaaactggcagtcaggggtggctttctgtgttgggttcaggagagaccctgatcccatggagtaggatggagggctagttcctggaggagacagtggccaacaggattgaccgcctgtgccctgc

SEQ ID NO: 23398 - DNA, 1021 bp, Homo sapiens
ttctgtgggtgcgctaggtgtgtgtgctgctgggctgtgtgggattagagttagctgtagggtgtgtgtgtgtgtgtgttgctgacagttggtgatgatgtttgagggttgcgtgaggagggtgggttggtgtctggtggtgtgttgaggtctgatggcatgtgtctgtgtgtgcctgatctacgtgtgtcctgagagttggtgacatgtgggtgtgttttgggggtgttgatgtatgtgtgtccgtgggtgtctgttttgtgttgatatgtgagtccagaggtgtgcaggtcttatctctggagtgagtgtgtgtgtgtggagaggggcatgtttgggaactgaggcagtgcctagcttgtgtgtgtgtgtttgtgtttgcaaaggctgcattgtgtttgcatgtgcccctgggcatatcaacagtgggtcagtgtgtgagactttgacagtttggatgtgtggggatggattgtgccagccagtgtgcgcagtatgtagagtgcttgtgatggtctgtctggatgctcctgctttggtcgggggtgtgtgtgtattgtgtgtactgagtagtgatgtccgagactggggccatctcagtgtttgtgtgcaagtgggaggtggggtgggcggtcaggctggccagtcccgtgtgagtccttgtgtgtgtgctgtgggggcctcgctgtgcctcactgccctccctgtgtgcccgtcgctgtgttgggaaagttgtccccaccagcccatgctgtgagtcccaagtggagtgagtttgtgttgtgggactgtcacagccctcatacacacacctgctagacccctccatccgtcctgtgtgagccctgtccttgctgtgagagccgtcctgtgccccctgtccctcctgtgtgcccatcaccgtatgcacgggaggctctccaggccagccaggacccggtggtgtcatcccccggctgggcgtgtctctgtggggccgtcaccccctccgcatgcacacacacctccactcttctccatc

SEQ ID NO: 23399 - DNA, 1030 bp, Homo sapiens
gagggctcccgactgctgagctacgaggaagagggggcagtggagagcacactgagggctcagtgttgatgacatccagcctcctcgtgccagaggtccaggtcctcctggtgcaggagcagaagctgctcaggatcctgcagagatggtggcagagcccaggtagaacctggcaccctgttgcctccaagaccacctcagatgctggtttggccgcctcccatgcctccttcccctttgccagcagctcagtccttcaagagcagggccttggcaggtctgtcttaaaacaccgtgggagtctggccatcatcctggcctagcactgctgtgccctgtccctggggttgtgggaagctggtagcatcctggcagcccgaggagagaagggctcccccagaagcatgtgcccagcaagtcacagtctgcagagtcagccctctcaccagatttcctggggctcagggattccgtccccttcttcccagccccttgagagtgtgtggcagcgctggcagctctgagcgcctattgatctctctgctggcagccaggtgcgcctgcgtccgcctcctctcctcagcttctgctgaaacgacttcactttctcatgtctcctcccacctccctttctctccagaggccattaactgtttgatgcgagcaatcgagatctacacagacatggtaagggctgcttgcttgtcctgacacccccgggtcccactgcattgccccagccttgcgtcccctctttcagcacccccagcactgttcttattctgcggccaaaccacttggggagggggaagtgggagctggggggattaggtcacctgagctggcctgggctggctgggtcttcacccagctccccaccagcctgacggccccctcactccacaggcagtcatggttttcattcatagaacttaggttattgagctgggcagggtggctcatgcctgtaatcctggcatgttgggaggctgaggtgggaggatcttttgggcacaggagttcgagacca

SEQ ID NO: 23400 - DNA, 1029 bp, Homo sapiens
gatgaagcccatgctgctattctgaagtagggaagcgtgcctggaatcggtcctctgcggggcctgatgagagggatgctctcgtttactgaacgcccgtggtgtggccagctctctgctgggcacgccgtggggtgctgcctgcaagattgctcgtgcttcagcagccctgcaaggtgtggagtcttatgcctagttacacataaggaaacgcaggctggcacacgatgagctggcgctgaggccaggcctgtctgactactgtcagcatttattttattttattttattttatttattttattttattttattttattttattttattttattttattttattttattttatttttaccaccacaagaaactctctagaattcccattcctgggtggcaggcacccctttgagcgtatttctcttcctttgtgtaatagcaaccattgagcaccttttccattctgcgctctgtgccaagtattgactatgtgtcatttctaatcctcacaaagactcctcccaggccagattcattgtctccattttatttcatttttcattttttgagagacagggtcttgttctgttgcccaggctggagggcagtggcgcgatcatagctcattgcagtctcaacctcctgggctcaagtgatcctctcacctcagcttcccaagtagctgggactgtaggcatatgccaccatgcctggctaatttttagtagagttggggtctcactgtgttgcccaggctggtctcaaactcgagatcaagcaaccctcctgcttcggcctcccaaagccctgggattgtaggtgtgagccactgtggccagacatgctgccattttgtagataaagaatggaatctcagcactttgggagcagaggcaggaggattgcttgagcccaggagttcgagaccagtgtaggcaacacagggagaccccatctcttatttaaaaaaaaaaagcctcagggataactagccccaggtcgaacacttagcaaagtacctgaaacg

SEQ ID NO: 23401 - DNA, 1031 bp, Homo sapiens
agcacttactgtgcccgggtactgttccaagcactttgtcaacttgtttaatccttatgacaacccatcgttcggccccgtcatgtggatcaggaaacagtccagagtggaggagggaggagactgagcagggggtcgctggggctggaccgcaggagtctccatcccgcttccgcaggtggatagtgacaagggcatctcccttcgcttccctcggtttattcgagtccgtgaagacaagcagccggagcaggccaccaccagtgctcaggtgaggtcctgggaagcaggggtgggccgcccagctgcttggccctaccagctttttagcgtggtggcctctctggaaccttgtggaggtgggagcagccagggagcttctgaccaccccgtcccaccctctctccgcaggtggcctgtttgtaccggaagcaaagtcagattcagaaccaacaaggcgaggactcaggctctgaccctgaagatacctactaagccctcgccctcctagggcctgggtacagggcatgagttggacggaccccagggttattattgcctttgctttttagcaaatctgctgtggcaggctgtggattttgagagtcaggggaggggtgtgtgtgtgagggggtggcttactccggagtctgggattcatcccgtcatttctttcaataaataattattggatagctactttgtgacagggtctgtgctgggctctgggggcaaagctgtcatgggtgtcacctgcatagcatgtagccatgtagccatggcctaggaactgccagagccagtgccagccatggaactgcctgcagtggtgggcgtcttctctatctgctctgtgcagtgtgaccgccactggccacctgcaatgcccgagcccttgacaggtggccagcatgacagaggatgcgaatttgttttgttttgttttgttttgattttgttttgagacagagtctcgctctgttgcccaggctggagtgcgatgatgagatctcagctcactgcaacctcca

SEQ ID NO: 23402 - DNA, 2970 bp, Homo sapiens
gggcccagccgccagtgctgggtggaaaggctggtgatgcggatggcccgcctgccaagggcctggagtgctcggtgcttatcatgaggacactggggagccatggaaggattgtgagcaggcaaggggcagcatccagggggaagaggagctggaccccagctgtagagaagagagaagagggcaggagagatctggcagacagtggatgtcagggtgaggaggcaggaggaatgcctccaggatctccctgggtgactggatggatgacaaagccgtcggcagcttgggaccctggtgaggggcaggcacctgcagggggcattaatcaccccagcgtggggcaggcatgagcaacctctatctgtgggcccccagggccatccaggaagtttggaaacgggtctgaggctcaccaggtctggctcagagcccagggttcgggctggtcagtgtaggagggatgaccacccactggtgggttctcatccgcctggggagaggatgtgctgggagcactggagctggcttagggccatgggcaccaacatttagggaaggcaggggtttcaggctttcatgagaggacagagggactgagaaaggttgacttggatcaggaaagagttacgggcttatgggagccagaggagatgagactcaagattttctcactcattcactcaagatgtgtttcgggagcactgacgtcataccagacccagcacacacggggtcggttaagaatactctgagctgcaggtaacagaaaacccaactacattggcttggacaaagaaggatctgtttttctcacaaaagaagttgcagatgctggctttcctgcccaacaatccatggcagctggggcctcttccactgtctcatgcctccacccttgatgggtcgtgttcacactcacactgctctccgtgccgccttgtggcccccgtggctgtccaagtcccgggtttgttgtgagttgttggccactttggagaatcccgtcccctttgatgtgtgattcgataacatcccattggtgaggctcacactgtcggctctcccatttgtggcagtttcgcttcaggcgcgaggcccaccttcatgtgctctgtgccgcggctgagcatctgtggactgaaacgcgcacttgttcgttcattacggattgctttccctttcattcttttctgtgttagggttagggcgttatctcgataggtgtaggcaggttatgttatctccacattttatttcagaccagaaaagaggtgacacacagtatctggtgacaagggtgtgttggttctgataggttgagagctgcttgtcacagctgtcaccgtgacttgaggctccatctccccagctcttacacccaggcgcccatgggacccagctctggacagtaagtggggccagagcacatcccacgtgtgtaagctggtggctccaaaacaagccgaagggtctttggtcactgccagagatgttcatgacccgccagaggaaagggtcccttggccttctctgctctgtccacactcacttccctagtgaccttgtcccgcctgtggctttaaatcccatccgcgccctgatgacaccggcccagatgtctcccctgagtgtggtcatgctcgttcatccaccgctttcctggctccacgtgcatgtttgctgacttcctacagccagcgtggctgggggcacgttccccaagccatttctaccaagtgggtgagcgttagacacagggaggtgcagggactcgccacaagcacacacagctggagaaaattcatccaggccgcgagagaagggagacacgcagccacaactgtcaccctcgacacccccacccgcgctctcccctgaaggtcggcagctggagtccgtccgggctgaggcagccgagaaaggcgacgtggggctggtggccgagaacagccgcagcacccagaggctcatgctgccaccacctccgctcactgcctccggggtcttcagcaagttccgcgacatcgccaggctcactggcagtgctgtgagtggggcgggccgctcatcccggaccccagacatcttggggacctgaggccacgcgtgtgtcaggaaggcttctgggtagaccatcagctgggtcgcatcagtccttctcatggggtgcacagcttcctctcctccttcctgcacccaatcctaggggagtctcctcttcagagtctagcagacctaatgccatggctgccacatgacaggactcagtaaatacttcctggataaagggagagggaggcaaggaggagagctagctcgttcttactgccctaagagtgggcggccatgggagctgggacatggggatggggtgagggaaggagggcaggtattccaaaatgcagggcagcagcacggctggtggggtggaggtgtggtccctgccttcaccaggcactgacggctcttcccctgactctccagtccacagccaagaagatagacatcatcaaaggcctctttgtggcctgccgccactcagaagcccggttcatcgctaggtaagcgtgtgggcctgtgaggctacagagggggactgcaggctcggaggtgaaaggagggagggactggcagctggaatcatcacaaatgccctgaccatccttggatgagaaaagcatgagcaggaggcccagcccctaaagagtgggaagggacaccatttcctttcacaggccagcttctgtcccttggtagtgctgtctagagaaggcccctgggcccctgtgggtgaagcatgctgtgattgattggtgaggtctgcctcggcttgggcgcgggccctgcagcaggaagccagggtttgtttgccatgacagtgagagcaaatccattgagggctcacatcatggagcatttcttgggagccctgccctgtgccccgtgccttacctcatcagttcctac

SEQ ID NO: 23403 - DNA, 1152 bp, Homo sapiens
gaacacttggaggcagttaagatctgaggggagcagtggggagctcaggggacctgctggaatcggtactgtgccaagtacattacatcattgtttactcgtggggattatttctattctgcagtcgtgagagagcaaagcacagagaaattaagtaacctgcccaaggtcacacagccaggaagcaggagggattgaagggtgcggcctgcactggggcagtgactgtgtgcaggcagagaaggggagagggcccagagccttccagaggctacatcagtgggtgtgagctctccgggatgggagcacacgagccagcgaggtcagatacaccaagccctttgcctccccagctcggaagcagctcccgaaacggaccattcaggaagtcctggaagagcagagtgaggacgaggacagagaagccaagaggaagaaggaggaggaaggtgagcccccagaaggagagaagtgtgtgtgtgtgtgtgtgtgtgtgtgtgaagccaagaggaaggaggaggaggaaggtgagcccccagaaggagaggtgtgtgtgtgtgtgtgtgtgtgtgtgtgtgtgtgaagccaagaggaaggaggaggaggaaggtgagcccccagaaggagaggtgtgtgtgtgtgtgtgtgtgtgtgtgtgtgtgtgtgtgtgtgtgtgtgtgtgttttggatctgcaagggcaggggcctgagagctcaggatgtttggaccctgccgatttgatgcctgtgtccaggcatccaggaattccacctaccaatatgggaacttttgttctgaaaacattgtgggatatatttgtttggacatcttaatttagtaataattcaggcacagtttcccatttttatttgctatttttatatttatttaatggaaactatttttcctctaaatgatttccttttccttgtaaattttaccataaagttgcagttcccaaacattcttagttcacagcacccttgatgtcttagtaatttttttatgatgctcctaggccaataccttatcagttctattaagtagttatgtccaaacaactattagatactatacatacattggaaaaaaagtaatatttgtgctttttttttttttttttttttgagacagtctcactgtgtcgctca

SEQ ID NO: 23404 - DNA, 1024 bp, Homo sapiens
ggaaggtcctactcatcataccttcctcataggatcgtcatgagcatgaaaagagttaatataggtaaagcacctacacagtgtctggaatatggcaagcagtaagtgttcactaaaattctatacctaccacccttagttctgtcaaaagtgagtgaatgttttattgtatttaccttaactttttttagaaataaaaaatttcagatagtcctgtatctgcttctggtttagcaataacatcaaaagttgaggccttctgtgaacgctgccctaacagattatcttccttccctctgtccccagaggcagccactatcaaaattatctattagcattccatgtatatttttatgcacccataaacaatgggaggtatgtttctgtgtgttaaaagcattgtatacgtgaaaaaggactcaaactcattagtcatcaaagacataacaaattaaaaccctaaggaaatgccactacacatcagcagaatggtcaaacaaaagagactgataacatcaagtgttgatgaggacgtggagcaactggaactctcacccatcactgatgggaacgtgaaatggcacaagcactttggaaaacttcatggcagtatctactaaagcaaattttatgtctctcctgtgacccagtggtgccactcaagacaaatgggcatctaaagctgtgtacgagaatgttcatagcagcactatgtgtattcgccaaatacttgaaacctaaatatccaacaatagagtgagaaaataagttgtggtatattcctaaaataaaacactaatcagcaccaagaatgaacacaccattacaacctccaacaacacggatgaatctcacaaacctaccaagtgaaagaagccagacatgaaagagaaactgatataattcccatttatataaagttcaacagcaggcaaagttaacctctatcgttaggaggctagatagtggttacccttaagtggttaaccctgtgagggggcaccaggaggtttcttgggactgg

SEQ ID NO: 23405 - DNA, 1046 bp, Homo sapiens
ggccctctcctcctctcatcttcccactggggtcccctttggtctccgttctcaggggccaactccagggacttctccaaggggatccccctcaagtttctgacctccagccccctccccttctctacttctgactgtggccccttccattctgcagttctcagtccccctgccctttcatcgtgcagctgcgcccccctccaggggcttccttcaagactcctgaccctctcatagtcaaactgggtccccctcaggtcggtggtactcctgcgatcttccagctgggccaccctccaggtatacccttccaatcctcttagcgcctggtcctccaactgggaccccctccagacataaccttccagtccccaatctttctcaccctccaactggggccccctccagtctctaatctctggccctctcaggtgccctttctctaacttcgaccctctcaagacacccccttccagtcccctcggcttctgattctccaaccgaccccctctccaatctctgatctgcagtgccctccccttctcaccttcgaactgagccccgccccagtctctggtttccagtgcccttgcccactccttctccatctgggctcccctccaaatacttccttctttcggagcccctccccagtcgcctgtctccaggcccctcaccctctcgttctccccctgggctcccctccctggctcatcctccagccaaggccccccgccatcgggcccctcgggcaccgcctccccggccgcgtcggcccactgcatggccaccaggtcgcgaaggcactgcgccacgccacgcgaggggctgagacgacgcagcagtcgccggcggtggcctcgcaccagggcacacgcgtccaggtctctggccgcctcgaaggcgcggaagcggacccacatgtcgcggcggggctcccagttgcgctcgaagtagtccacgaaggcggctgggccgtgggcgtggagctcggccagcgcctcgtcgtaggctgcgggcgacgacgcgccagccaggcggcacag

SEQ ID NO: 23406 - DNA, 1039 bp, Homo sapiens
aaaggatatattttacttaagaagccccatggtagagcagactcgagagactcaactgagccaagcaaagatccagattttcttcatctcagctctgtcatcctcagtgtggacttcattatcacaccataccaaggtaatcatcagcaggtctaggcctgatcatgtctctaggccttcttaggagtgatagaatctttattagaagcctcctaggccgggcgcagtggcttacgcttgtgatcccagcactttaggaggctgaggcgagcaggtcacctgaggtcaggagtttgagaccagcctggccaacatggtgaaaccccgtctctactaaaaatacaaaaatttgccaggtgtgatggcgcacacctgtaatcccagctactcaggtgactgaggtatgaaaatcacttgaacctgggaggtggaggttgcagtgagccgggaacgtgccattgcattccagcctgggtaacagagcaagactcaaaaaaaaaaaaaaaaaagcttcctagttctgagcacagtggctcacacctgtaatcccagcactttgggaggctgtggcaggaggattgcttaagccgaggagtccaagaccagcctgagtaacatagcaagaccctgtttctacaaaaatataaaaataaaaaagcctcccacctcaacctgagcagactcgttgaccaggactgggtcacaggcccattctgtggccaggacatttggcatgagtcagtcatttgaaggtagaatcgactcatgtcaagaagttgccactgggacgcactggtccagatgatggaggaggaagcttgagttgctatggagatgaattcattgtggctcctctatccatctggccccaggaggccttgtcggtagaaagaatgaaggaacgctggaccatctcaactgttccctggatctgggactcccaaccaaccccagaagccaagaactcatcacggaaaccaaaataagattgttttattccaatcctgaagaacaatagtccaaacaattcccctcccct

SEQ ID NO: 23407 - DNA, 1083 bp, Homo sapiens
tgaaagggacccttacctcgtgtcctatcttagacagcagaatttgtaaaatgagtcagttaggtagtctggaagagagaatccagcgttctcattggaaatggataaacagaaatgtgatcattgatttcagtgttcaagacagaagaagactgggtaacatctatcacacaggctttcaggacagacttgtaacctggcatgtacctattgactgtatcctcatgcattttcctcaagaatgtctgaagaaggtagtaatattccttttaaattttttccaaccattgcttgatatatcactattttatccattgacatgattcttgaagacccaggataaaggacatccggataggtgtgtttatgaaggatggggcctggaaaggcaacttttcctgattaatgtgaaaaataattcctatggacactccgtttgaagtatcaccttctcataactaaaagcagaaaagctaacaaaagcttctcagctgaggacactcaaggcatacatgatgacagtcttttttttttttgtatgttaggactttaacactttatctatggctactgttattagaacaatgtaaatgtatttgctgaaagagagcacaaaaatgggagaaaatgcaaacatgagcagaaaatattttcccactggtgtgtagcctgctacaaggagttgttgggttaaatgttcatggtcaactccaaggaatactgagatgaaatgtggtaaatcaactccacagaaccaccaaaaagaaaatgagggtaattcagcttattctgagacagacattcctggcaatgtaccatacaaaaaataagccaactctgacatttggattctaccatagactctgtcattttgtagccatttcagctgtcttttgattaatgttttcgtggcacacatatttccatccttttatgtttaatctgtttaaaacaagttcctagtagacaccatctggttgagtcagttttttttatggtgtattttgaacccattctgatagtctcttttaactggaagatttcaattacttacgttaatgtaattattaatatgttaggatt

SEQ ID NO: 23408 - DNA, 1969 bp, Homo sapiens
cgccgatggcgggggcctgggaggaagggaggaggagggaagcaggcgtcagcacgtgactcggccctgaacctgtgtccttagctggccccggctggctggtgcttaaaggtacaggcgcctcctttcgaaccaatcttctggaaccttagagcagcttctcctcctctttccagcgagtagctcttagactctaacttgagagcttttcagtgcagtagattctttttctctggacagtctggggtctaagcttaggtcgtggattcggtaagtaggattcaggctagactgtgcatctgaagtcctgaggttttagaagcaatagccccatcgcttctcggccttttggctaagatcaagtgtagaagcaatagccctgattcgtgtgttacctagggcaagtcagttatgactgggactcagtttccttgtttgtaaaggtggatatggctccatgatctctaagcatctttatggcttaggggaaccttcatttttctcgttattttggagacggagtctcgctctgttgtccgggctggagtgcagtggtatgatctcagctcactgcaacctccacctccagggtccgggttcaagcaattctccagcctcagcctccctagtagctgggcttaccggcacccgccactacacctgggcaattttcgtacttttagtaaagatgaggtttctccatgttggccatgctggtcttgaactcctgactaaaggtgattcgccgcctcggcttcccaaactgctggggttacaggcgtgagccactgcgcctggccaagggaaccttcatattttatattagggagattaatccctggccgaatttatgctagatcccagaaggactttccatgtggctatgataccacagcaaaaagtagcttcaggaaaccccctccttaaaatacacactcagctgacacgtgctgtttccccaaggcctgacctctcgggacacacccagccctgtggacccagacaccgtggaggtgttgatgacctttgaacccgacccagctgatcttgccctatcaagcattcctggccacgagacctttgaccctcgaagacatcgcttctcagaagaggaacttaagccccagccaatcatgaagaaggcaagaaaaatccaggtgccggaggagcagaaggtgagcagagctggatgtgggagatagacttggctggagacatgccccacagccagggaggggccttttctcacagtcaagcctgggcttctccttgggattagtgctcagcctctcctggcctgcagccacagattagtcctccttggccacggggcacaagggggcaggggcctgaggtttataaagacagtgtcaactgggcgaggggcctcactcgtgtaatcccagcattttagggggctgaggcaggaggatctcttgagctcgggagttcaagaccagcctgggcaacatggcaaaaccccatttctacaagccacttgggaggctgaggtgggaggactgcttgtgcctgggagattgaggctgcagtgagccaagattacaccactgcactccagcctgggcaacagagggagaccttgtcttaaaacaaaagacagtgtcactgtggggtgctgactcagccagctctgctaggtctacttgtagagacttggagcttctcctattacttgggtccagagctccaccaggcacacttgcaaaggacagtcttcctttggcaatgggatatcagcctgtggcctgtctctccttactcagcaggcctttgatctctgatgtgggacttcctttggagtgattgcatttggctaggatgaagactgtgccagcccctttaggccttgtttcctgggcctggacttctcactggtgggagacttcaggcttctgttagcagccagtgccactttctgatttggggtgatttgagcagtcattgcatc

SEQ ID NO: 23409 - DNA, 1079 bp, Homo sapiens
tgcttcctaaccggggcatcgatgacatcctggaggatcaggtggagcctgatggtaggatccaaactgctagatttaggggaggtgggggctgaggttctggactcctgcgtccaagggaggcgtgagctggggagctggatcctggaaatggggtatggggggctggcgcccggacccctgactttccaagctcatgtaccattctttatcccgcagaccccctgccccctattcccctggacttccctggctccttcgacgtgctgtccccctccccggactctgaaggcctctcatctgttttctcctcttcactcccgtctcccacgaactcctcctccccttctcccagggaccccacggactccctggactggctggaggccctgagcgggggtcctcctctgggttctggtcccccaccccccagcatcttctccgctgacttatctgactccagcagcagccggctgtgggacctgctggaggatccatggtgatggattctaggatttacagagacagagaactgatgggggtggagagaagctccttgtgggaggagagggaactaccagcagagcccctcctaccgcagacacaggatcggagacaacctccaaccccacctgcctcctgaagtgctgctgacatgcaactgccttaactttgcctacctggcctccttatgatccccctccggcgtggtatggttggggggcttcttttgctgctggccacggcaaacaagctgcttgctgcttccttcagagacctcatggatgttcttacatgcccccgaccccggtagatggctccctgttgtttggggagcctggaaggtggttatgccttttggatgcaggagaggagcaagaaagagtggagagggagaatgggggagccggaccctgacctccctgggttctggttggagatgaaaaaattagaagcatcaggtctaagatcagcttctcttggaagcagagcctgagacaagatataaatgccagtcatttattaaagaagtgttctggctgggtgcggtggctcacgcctgcgatcccagcactttg

SEQ ID NO: 23410 - DNA, 1043 bp, Homo sapiens
gacaggccacactgagaaagtgttattgggcagagacgaggaaaggtgacgagggagcaagccctgtgggtatctgaggaacagcaaactcgaaggccccgaggcatgattgagacgcggtggggagtcccatggggctggagtgacatgtctcatagagaaggggtagaaagtgaggcaagatggagggcacctgtagtgccagctacaggaggcaggaggatcattttggccctggaggttgaggctgtagtgaggcatgattgcgccactgcactccagcctaggcaacagagtgagactctgtctcaaaaaaataaaaaagaagtcgggcgtggtggctcacacctgtaatcccggcactttgggaggccgaggcgggtggatcacctgaggtcgggagtttgagaccagcttgaccaacatggtgaaaccccgtctttcctaaaaataaaaaaaatcagcagggcgtggtgacacacatctgtagtcctagctactcgagaggctaagcaggagaatcgctcgaacccgggaggcagagattgcagtgagccaagatcgcgccaatgcactccagcatgggtgacagtgagactcggtctcaaaaaaaaaaaaaaaaaaaagaaagaaagaggctgggcgcggtggctcacacctgtaatcccagcactttgggaggctgaggagggcagatcacttgaggtcaggagttcgagatcagcctggtcaacgtggtgaaatcccatcggtactaaaaatataaaaattagccagatgtggtggcgcacgcttgtaattgcagctactcaggaggctgaggcaggagaatttcttgaacctagaaagtggccgagattgcgccatcctgggcgacagagcaagactctgtctcaaaaaaaaaaaaaaaaaaaaaaaaaaaaaaaaaaaaaaaaagaaaagaaaaaagaaaaagagacaaagaaagaaaaataaatgaggccagagctatgggaggattttaagtggaggagtgaccgtggggctgttgtgtgacactgcta

SEQ ID NO: 23411 - DNA, 1900 bp, Homo sapiens
caggaggactgccctccagccctcgtgttcccctcatccaagcttccaacccctactccaaactatgggctcccagtcccctcttccccctgagctagaggtctggggcctgagtgccccctacatccccggcccaccccaccccaggccccagaactatggacctcggccggggcctgccctcacacgcttgggcccacagtgggtggcatctacacggtgctgcagacgaaggcgaaggtgacaggggacgaatggggcgacaactacttcctggtggggccgtacacggagcagggcgtgaggacccaggtggaactgctggaggcccccaccccggccctgaagaggacactggattccatgaacagcaagggctgcaaggtgggacgtggcccagcccagggcagaagcgggtggacagcctgccatcggggtgggagccacagacggagagggtgcagggtggacagccccagccagagagcgaggcaggcttggacacaggaaggaggcgtgataggacacccagacagatgcagggcctggaagtgggtgggtggatcccagacatgggcgaatggacagacagatggcaagtatgagacagactgagacggagatccaagaggccaaggtcctcagacccagagagaaagagagcaagatcgaaagacagcctggtcaacatggcgaaaccccgtctctaccaaaaatacaaaaattagctgggtgtggtggcgggtgcctgtaatcccagctactcgggaggctgaggcaggagaatcgcttgaacccgggaggcggaggttgcagtgagctgcgattgggccactgcactccagcctgggcgacggagcgagactctgtctcagaaaagaatgccagccagccaggcagagctggggagaagtgggcctgaggtcaggaaggagcaggattctggagcttgaagttcaagttcaccctccacttgctgcctgtgtgtccttggctaatggacatgctaatagcgtctaccttctagcggtgctgggaggaggaaacagttaataaggacaaagtggttagtagagttcttggcatgaaggtagcacattgtgtgggcggtgattgtcattgttatgatcatcgtcattattgttactaacagccaagcttggagagtgagggggacaggcagaccaagggagaagggtggatggagccacaggcaagagtaatagactggggacagaagagaggccaccagatgtttcagaaagccagtcctagaaggagagagaagcatggaatatcggggaagagaggagaggtcagtggacagacccacaggacagagtctgagatgggcagatcagggattagagaggagggggagttccagggccccagggtgaagacggaaagagacacgctgttgtccaaggagaaagccatcaggcggcacgctgttgtccaaggagaaagccatcaggcggcagggctaagggacagacaggtccaggctggggatggagaggcactgtggttcctttactcattcacagcctctggtttggggtggggtctggaatccattcaggtccgactgtgtccctaagggaacccagaacagcccagtcgcttcctgagggcagctgcttcccacgtgctgggggcctaagaatagcccccccccccccccagcaaaagggcagacaacagctgggagggggagggacctcagagcgaggctccaggcagcaaaaagccaggtcggcgaggagcggggctgcttctccactgctgtggcagcaggcccagaaccaaagccatggtctcagggaggaaaacagccaactggagaaatgtggcagaggcagaagtgagacagcaagtcttagaaacacggcagtgg

SEQ ID NO: 23412 - DNA, 1032 bp, Homo sapiens
aggaagtgttctttctatacaacagagacttggacaggtgaatcagaccacagtccttgtttcattaagttttcaattttggagggggaaggaaaggagaatgagacagccaaaaacttgtgctaactggtaactgaagtgatgggtgaggacaggagacagagccattaattctgtctggactagtcagatggggccttccagaggaggcaaccctgagttgaatttctcccagtaatcttttttttttctttttcttttttttctttttctttttttttgcttcctcctcctcttcctctctctcccagcagattttttttttttaatttaaatttttgagaacagggtcccactatattgctcaggcaggtcttgaactcctgggctcaagccatcctcctgcctctgcctcccaaagagctgggattacaggcgtgagccaccgcgcccgacctctcctagtaaccctaaccctcacaaataaccaccattttcttctagaagatgcctgggaatatacatgtgtgcgtgtgcaagagttcttgacagcatatagttaggaaaggaattgctgagtagggtgtgctccccttcaattttatcatatattgtctggttttcaaagtggcgtaatgcattgccctcccatcagggatgtgtgagacttccatttgttctactttttgcacaacacttgattaaacttggttggacttttaaattgtttccagtctggtgggagtgtaatggtagtttttttgtgtattttcaaaaaaaccttttattatgagctattacctacatatggaaaaatgcataaaacaaggccgggagcagtggctcacgcctgtaatgccagctcttagggaggctgaggtgggaggattgcttgaacccaggagtttgaaatcagctgggcgagacccttcctctaacaaaaaaaaaaaaaaagtgtataaaacaatgcactgtgtaacgaaccgtgaagtaaacatcacctgtattaagaactagaataaccctagatgc

SEQ ID NO: 23413 - DNA, 1034 bp, Homo sapiens
gggtgtgttaggatcgtagagctgggggtcgggcccacgttggggtggagtctcctccaagcacagggctgaggcgggtcagtccgggagggaactggaggaggggggcttacctggaactgcacatagtcccagctctcctcggccgcggtctcctcggggttggtgccgtacttttggatggttttctctacgacgtcccgcaagcttcgctccagctgagaggccaccagtgaggctgggccttatcttccccgccccacccctccccctctcaggctgtgccagcctcaggcgggccctgtgcatctctgggccagtctcaaatccttactgaatggctagctctgtgtacttcaggtctgtctttctgtttcttccactatttctacggctcataagtctctgtctcttctttcagggcgtctatttctttctcttgttctctctttttcccgtgtgtttccctttggagctgtttatgcctgtctcccttggtccaggtcggtgtgtctttctattaatttattttttgagacagggtctcactctgtcacccaggctgagtgcatggctcactgtagcctcaaactccctggctcaagtgatcctcccacctcgacctcccaagtagctgggaccccaggtgcacaccatcacacccggattttttttttaaatatagatggggtctcactatgttgcccaggctggtctcaaactcctggactcccacctcagcctcccaaagtgctgggattatgggattacaggcgtgagccaccaggcccagcctcttatttctctttatctaggttagcccctgtctgcccttgtttcggtctctctccaccctctcccaccactcccttccctctcctccctgctgggggtgggtggtggccactgcaggaagctcacctgggcccgctgagtggagatgaggattcccagggtgatctgtgtggcaaacaggagcagcagcatcccaaaatactggggagcagagtggagagatcaggctgaccacccct

SEQ ID NO: 23414 - DNA, 1043 bp, Homo sapiens
tggcctgaatctgcttctccgttgatccttccaggtttctagtcacatccaggttttggcccgaaggaaatcaagggaaatccagtccaagttgaaggtagggaccaatgcagacatcctgagagggggacagagactgggggtgggggaccgagacccagaaagagagggacagagacccagggagagggggacagagacttagagcggggaggactgagacccagagagaaagggacagagacccagggagagggggacagagacttgggggaggggaccaagacccagagagagagggacagagacccagaaagagaggaggacagagacccagagagagagggacagagacccatagacagagggggacagagacccagagacagagggagacagagacccagagacagagggggacagagacctcaggtgagggacctctgtggtcagggcggggggtgcagtcatccagggtggggagtcagtggcccacaaagggagatgcatagggatggtggtgcggttgctgagaccctgggcagggagcgatggcatggaggaggctgaaggttttgctcaggacagcaggaaggatgggccgtcggtcccctcccttgaccactgttcctgtccccctcccttccctctgctcctgtccctcctttccctcttcctggcggtctcatatcttccccctcttgtgctgtgaaggcctcctcttcatctccgctggtttgttttcccatttcctgacctttgcatgacctgcctactctttgtgcccagaaatcttcatttcctggtggagattcctcattcatttccttctcctcatcctttggatttcctggttcctgttggccggagaccctcattttctcccccttctgggtgtgtgggggtttttctgtctctttttctggacttggggacggtcgcttctggttttttttttttttttttttttgtatccagcagctttccctttctttctctctaggtctgaaacccttcccttccggtctgttctcgaccttctg

SEQ ID NO: 23415 - DNA, 1027 bp, Homo sapiens
cagatcacgaggtcaggagttcgagaccatcgtgaccaacgtggtgaaagcccatctctgctaaaaatacaaaaattagccaggcgtggtggtgcaggcctgtagtcccagctactcaggaggctgaggcaggagaatcgcttgaacctgggaggcggaggttgcagtgagccgagattgcgccactgcactccagcctggtgacagagcaagactctgtctcaaaaaaaaaaacaaacaaacaaactattttttttttttttttagagatggggtctagctatattgcccaggctggtcttgaactcctggccttaagcaatcttcctgccttggtttcccaaagtgttgggattacaggcatgagccacggcacccagcctcttttactcatctttctattggagtggctgtaattttcttcttgatttgctggagtttcatgtaccatcagttctgctataatgcttattttgaaaatgtgaatttattccaatgcagttgatatatcagggaacaatttgagcataacaccaatttcacatttgcttatgtgcatccaaggtgaatccaggaaactgcactctgctataagtgtgtgtgtgggaatacacaaagcacacatacacggcacttcaaacaaataccaccaccgcagttccccgggtgttaggagccacacccatccacatctggtactaggactttccatcagatctcaaataaccctctttccaccacatcacagtaattcacaaggcgctccctccaccccacacccattgccacaacaaacttcaagtctttgtcaaggtcaactgccatatttttggagtatgttggtatgtcttaaccacctagcccgtgtgaaactgttctctccttttgtattctgttcttatctttttctttaagcatcaccgacaaagtttacgaggattgtgacacaatcctgttttctctgtaagccttgtggtttttgactgcaggattttgcatattgctgtgatttctatgaatgcatgcc

SEQ ID NO: 23416 - DNA, 1042 bp, Homo sapiens
ttttttaagagatggactagggttggggatgggtttccattaagttgcccgggctggtctcgaactcctgggctcaagcagtcctcccgcctcagcctcccatagtgctgggatgacaggtgtgagccatcacacccggccaccagaagaaccctactatatccagagctggctctgcccctttcctgctcacagccctccggcagcctccacctcccccaggacaaggtcccagctcctcagcctggtgtttgaaggcctgtggcacctggcaccccctaacctgttgctaaatccacagtctacttccacccagctacctcacagtcctgagatcccaacaagtttccaacctcagtgcatgttcttcctcctgcctctcagatctctagctacctctacttaaatactgctcttgtggacttgcctggtgtggcggcctcccaggcatgtgactctcagcaggtgacttggcttctctacgttgctaatggtgcctactcggcatgtaacaggcctggatgaacggtagctgctgcggttacattattagcttcagtttgcccgcccaggctagatgtttaatcagatttcacagacttcacagtgtgagttggggatgtgacttcgtatgaaagtgaaggaactcaggctcagagagggtgagacgtaggagcatggccactgcgcgagctcggggctggctgtgggtttctccccattccctgcccatctgggaagtcgctgccaccccctacgcttgtctgctgactcccagtcctcctgcctcccgtacccaggaagccctctccgggttcgctgaggccgcgggcacgaccttcgtcagtctggtggtgtccggccgggtggtggcagcaacagagggttggtggcggctggggacgcccgaggccgtgctgctcccctggctggtggggtccctgccgccgcagaccgctcgcgactacccggtgtacctgccgcacgggagccccacggtgagtgggtggcgggcaccgacggagggatgtgacctgggggc

SEQ ID NO: 23417 - DNA, 1022 bp, Homo sapiens
tttgccatatatttctagctccacacttggccagcatttgaccccatttagcttgagtgcggccatgtgattaattttggccagtaaggtgtgaggccatgtgattacatctggccaatgagatatgagcagaagtgacacatgtgaattcagcaagagcacataattgctaatggaagaccagacccctctgcctttactatgtccattggcaaccttcatgatctgtccgcacgggctccaagctgacactcaatacagcacgagtgacaaaatccaccttggctgtttcaagccactgcaatctgggggtaatctggcctttcctgatatacacaatttttttttcccaaataatcccagtttaaccaacatttgttaaaccaatcaactaccaagtctgagtttcctagaagaacaaactggcagtacatataggttggatgacataggctaggacacaatgacaacatggacaaagtgttttatactggccgggcacggtggctcatgcctgtaatcctagcactttgggaggctgaggcaggtggatcacctgttgtcaggagaccagcctggccaacctggtgaaaccccatctctactaaaaatacaaaaattagccagacgtggtggcaggcgcctgcaatcccagctactcaggaatacaaatacagtctcctgattgatcctccaattcaagcaggagaattgcttaaacccggggaggcggaggttgcagtgagctgcactccaatctgggcgacagagcgacattctgtctcaaaaaatgctaataggctgggtgcggtggctcacacctgtaatcccagcactttgggaggctgaggcgggcaaatcatgaggtcaggagttcaagaccagcctggccaacatggtgaaaccatgtctgtactaaaaatacaaaaaattagctgggcatggtagtgggtgcctgtaatcccagctacttgggaagctgaggcaggagaatcacttgaacccaggaggcggaggttgca

SEQ ID NO: 23418 - DNA, 1009 bp, Homo sapiens
ttcccgctgcccaccctcaggacccttccttcccagagcctgctgtcaccttgacactggcccagcagagtcctgaagccttcagccagccccacctccagcctttgccccagctgtgcgcctgatcgattcttgagacccaagttagaagccagctgtagggggctttccccgtgccccaggctgggcccagggcttccttgcagcctccacaggcacaagccggcttgcgctgtgtctgtcccacacaccagcttgccctgtctttcccaggctgaaactctcctaaagctccctgtcatcccaaagttcaattccttcctctggctcaggccagtgcccacctctctggccttataagtctgaccccggggggaggcaggaaggagatgacaagaaacacagaggggactaaaccatccaggagaaagacagcgaggaaaagggggaaacatttggaagacagctgggacaccacccccagaggggtctcacagaccaaaacatgtagaacaccaagagaaagttctagcaataaagccaagcaacgccacaaatgctactcacaggcactctccccactatttttattactattttttttttgagacagagtttcactcatttcccagactggagtgcagtggtgcgatctcagctcactgcaacctcgctcactgcaagccgcgccatcatgcccggctaattttttttttttttttttttttagtagagatggggtttcaccatgttggccagactggtctcgaactcctgacctcaagtgatccgcccgcctcggcctcccaaagtgctgggattacagacgagggccaccaagcctgacctcacttattgttttttaaaaccaaaaacatctcaaagcaaacaagggaaagctccgcaaacagcctggcagcaggaaacccacgagagtttccccgtaataggcgcctccaggcgggggaaaacaaattataagggtgatttatttttatcttattacaaa

SEQ ID NO: 23419 - DNA, 1054 bp, Homo sapiens
aagcggtggttctagaatcttccttaaaatctctctctggctgtttcctaacttttccatggttgtcttagctgattcgtttttcctgtggggaaaattgctgttggtcctgcgaccagagctcctttggtagcttctgggcctggggagtgggaaggagaaagtagctgctaattagccgtcaggtgacttcaggggaaagcaggagagaaggttgaaaatcagtgaatccacaaatcatttagctactgccttgaggccatcctgtgtagcaagtggcagaggcaggattttggtaccctgggcaagtcgccccctctgagggcctcggtttcctcatctacccgggtgaggagaataagcctgcttaaaacgatttctaagatacataaagaacagtagagaacagtgcatgtagcaggcggccttttgtgtgcaggtggggatagtgccaaccacgcttttgtttaaacgcacagcaagtctctgcaaagatgtgcaacagcagcctgtctccagggagcagggctgggaggctgtgggactcagggaagacaggccacactattcccttttgtaccttttgagctacaacaatgtgaacatactacctattcacaaaatgagttagtttgtttttttgagaccgagtttcactcttgttgcccaggctggagtgcagtggtgtgatctcggctcactgcaacctccgcctcccaggttcaagcaattctcctgcctcagcctcccgagtagctgggattacaggcatgcaccaccatacctggctaattttgtaatttttttttgtagagatggggtttctccatgttggtcaggctggtctcaaactcccgacctcaggtgatccgcccccccacaccccgcccccccccccccagcctcccaaagtgctgggattgcaggcgtgagccactgcgcccggcctagcttttatgtctttaaatgcccaccaatgtcactgggttgtggcagggtggtgcggcctcctgggtagtgagcacacgggaacatttaggcattgaaacatctg

SEQ ID NO: 23420 - DNA, 1054 bp, Homo sapiens; identical to SEQ ID NO: 23419

SEQ ID NO: 23421 - DNA, 1011 bp, Homo sapiens
tgatctgcctgcctcagcctcccaaagtgctgggattacaggtgtgagccaccgtacccaagggggttattttttaaataaaattttttattttggaataattgtagattgactcaacagaaaagttgcaaagataatacggagaatttctgtatgcccctcacttggttttttccattaacattttacattactttgccacatttgtcacaaccaaggcaacatcagtatgttaccattgaccaaatgccattcttgattctgaccacacttgatgctgattttggtagttgttacttaatgccctttctgctccttccggatgccttcaggatgccacgttatatttaggcatcatggctccgcagcctcctctggcctgtgactggttttagactttccttgtccttcatgaccttgacagtttggaaaaatgctggttgggtattttatggaatgtgcttccatttggttttgtctcagactgggattgcgggatattgagaggatggccaggtaggatgctatttttttttttttttggctttttttagtagagatgggggggagggtcttactatgttgcccaggctggtcttgaattcctgattcctgggctcaaacgatcctcctgcctcaccctcccaaagtgttaggattacaagcctgagccactgtgcccggcctgggttttttgttttgttttgttttttaatttttttggttttttgagacggagtttcactcttgttgcccaggctggagtgcaatggtgccatctcggctcaccgcaacctctgcctcctgggttcaagagattctcctgcctcagcctcccgagtagctaggattacaggcatgtgtcaccacacatggctaattttgtatttttagtagagacggggtttctccatgttggtcaggctggtctcgaactcccgaactcaggcgatccacccgcctcagcctcccaaagtgctggtattacaggcgtgaaccaccgcgcctggc

SEQ ID NO: 23422 - DNA, 1011 bp, Homo sapiens; identical to SEQ ID NO: 23421

SEQ ID NO: 23423 - DNA, 1069 bp, Homo sapiens
ggccccatcccctggcagggattcagacatcgaggccccagctgcgtccttttctccatcccttgcccttggcttcctttcaaaccgtccttcagcttccactggataggaactatctcccaaccctgccaaaaatggaagatctccgttttcgtttagtcacagggtagccatcttgccccttctcatgcactgggccctcctccaccagccgaggtggatgtccgtcttttctctgttgcagaaacccaccttgtcccatccacatcaggacatcccagctggagttcaaccttcatcccttctgtggcagttaggagactgaatcaaggtccagagaaggtggaggaatcctgatactgagcggtacacacaagcttctttctccttccttacctgttgcgggcaggaagtccttcttgggatctgaccaccttcccttagagcacttactgtccactctgccagtttttgagcacttgccctatattttcttgggcctataggggctgtgttatcactgaggcagtatacagagtagcagctaagagcatagactgagcttgtcccacccgtgggcctgcatgcggcctagaacagctttgaatgcagcctaacacaaatttgtaaaccttaccaaaacatgcgaattttttgcgatttttttttaagttcatcagctatcaatagtgtatgttatgtgtggcctaagacaattcttcaatgtggccccaggaagccaaattttatacatacctggcatagactctggagccagattatatgagttcaaaacttgactgcacccctcttactagctgtgtgaccctggccatttcccttccctgtgcctcagtttcccctgtggtacgaagtggcattaagaatacctacctctggaccaggcacggtggctcatgcctgtagtcccaccaccctgggaggctgaggtgggcagattgcttgatctcaggaattcgagaccagcctgggcaacatggtgaaaccctgtctctaccaaaaatacaaaaaaatagtcgggtgtggtggtttgcacctgtggtcccag

SEQ ID NO: 23424 - DNA, 1048 bp, Homo sapiens
gcatgccttagttttgtaagtgaaaaatgccatctttggtagaatgtttgttgtcacttgcacccacgatggaaatctctgacttctacgctcctaacctccaatctgtatggcttttccctgtgtccacaggtgactttggcaggctatggcttcgccttccgctattgcccaagtggcaaacacgtggcctacgtggaaggcagcaggagccctcacgagggggaccttgagttcattagcatggacctgcacaagggatgcggtacgaggccagggatgggtttgggaccgcagagagatgcttcttatacaagggcagctctaggagttcacagccagagacagcaggtggccagacaggagaggcactaagggcgccaggacagggattggaaccacagacagcgtcccgaccgcaagggaggtgggtggggtagcggttcagcactaagcatagtgggaggctgggcactggggagcctgagttccagaggttggggttcaggatctgttgtagacttggaagatgggagttgcctaggagtcatccaggaggggctgttgaggaggtggttggccaccacatctggagtgtgggagggagatctgggcagaggctctgcagtatctcagaagttatcagccgaagccctgggagaggatgggatcatccagggaaagtgtacagactaggaagagggcccagggcagatttcttgagcccctctttctcacatccctttatatcatggccgtccacatgcctgccacatcctcccatcagactgagctcccccagtacagggatggcacccctgcctccagcatcgggtggtggaaggccagcacggacaagtagtgcttgtcgagtgcttacacaaagcgttgtctaaattaagcgttgtcttatgctcaggaagcataagaaaaataaactgtcagagtctcccccgccctcccccactgaggctgggtttggtacccatccttctgggctcccgtgtgttctgtgtcctttgtcactcaggtagtcgcacgctatagc

SEQ ID NO: 23425 - DNA, 1034 bp, Homo sapiens
acagccttctgcccctcctgtcccccaccaggatgccaaggatgggcgcttgttcaatgagcagaacttcttccagcgggccgccaagcctctgcaaggtacctgacagggaactgggcaaggaggggagagtgaggggggcgccaacttggtcacagcacttgacttctacctgcaggcatgagaagggtgggcttagattaaaggcccaggtttgctcccatctgtgtccataacctgactcctgtgacccctcaggcctcagtgtgtgttgtgactggctcacaccagctcttggaagccaagtattaaattttcaggctgggcgtgggttgacgcctatactcccagcactttgggaggctgaggtgggcagatcacttgaggccaggagtttgagaccatcctgggcaatgtggcaaaaccttatctctactgaaaatacaaaaattagccgggtgtaatggcatgcacctgtgatcccagctactcaagaggctgagctgagagaattgcttgagcccgggagacagagattgcagtgagctgtgattgtgccactgcactccagcctgagcaacagagccagaccctgtctccaaaaaaaataaaaataaaaataaatttttaggaagatggcaagctggttgttacagacagccagtactagcaattaaattatataggccaggcgtggtggctcatgcctgtagtcttagcactttggcaggctgaggtgggtagatcacctgaggtcaggagttcaagagtagcctggccaacatggtgaaaccccatctctactaaaaatacaaaaattagccaggcgtggtggcgtgtgcctgtaatctcagctacatgggaggctgaggtgggagaatcactcgaacctggaaggtggaggttgcagtgagccgagatcatgccactgcactccagtctgggcgatagagtgagacttagtctcaaaaaatatataaaataagttacataattttacaaataaattatattcaaaacaaaggtaatgaacc

SEQ ID NO: 23426 - DNA, 1103 bp, Homo sapiens
ttggccttgtgtactgccactcagccgatactggtctctaggaagcttctcttgagtgccataggctcgcatccagacctcctcatcgtccgccagagcctctttccagcctctttggcgcccccccgtgcctgctgcagccttcattggagcgcatgtcagtctaggctccacatccctttcggcctcactttctgggctgggggccctttgcaggtagggacccagcacaattagtgtatataccctctgcccagccagtgcccaggacacgggaggcctgaggactatgttccttctcctgttcactgagcccctggatctgaagccacagccacagtggcagtgtgaggcgtcccctttgctcctcattatcctctgggcccagaggcctcttgccattacttgcctttaggggatggtgggtgggaggaacagagtaagcgatgtcttttcctgtgtccaagtctgtctcccaccacacccaccccattctcttgccaggctaggagcccttctagggcagggctttggtctaacaaattttttggcccttttctatctcaggactgagtcctttttcaggatgtttttgggtaaatgtctagaatgtcctttattccctggcaaacttctcctcatccaacaagatccaactctaacatcccttcctccaggaagcctaccctgacttctccaggcaggatctctttctcttttgggccctaatatctgtctgtactgccctgtctcagacccgcatctgactagctgtgtctagagcagacttgcccaccaaactgggcactcctgagggaaggatgcaggtccgactcctatctggtgccccaacatcatcacacaaaggcctgactcatagaaggtcccaggaaatgtttgttgaatgaacgaatttgtaaaggaacagtattttgcgtgctgtttcactccccatctaacttttctctcctggatggtgcttttactttattcttacatcctcctgcaggctccgggagcagacccccaacccccaaaagcagccctcagaagaccaggaagagccctcaggtgaccaggggtagccctcagaagaccagctg

SEQ ID NO: 23427 - DNA, 1071 bp, Homo sapiens
agaccagcctggccaacatcctgaaatctcatctctactaaaaatacaaaaattagctgggcatagtggcgcatgcctgtaatcccacctacttgggagtctgaggcaggagaattgcttgaacccaggaggcggaggtcgcagtgagccgagattgcaccattgcactgcagcttgggcaacagagtgagactcgatgtcaaaaaaaaaaaatctgaaatccacagtagtccagtgaaatttcccttgagcatcctgttgacactcaaagtttcagattttggagcattttgcatttcagatttccggatttgggatgctcagcctgtgttggatgtcctggtcacatcttagtctgaacatgccttcacctgagctcctggtgttcctgccgcctgccctagacttccccattgccatgaatagcactccattcatccagtttcccaggccggaccctggggatcatccttgagttctctttgtctcgcaccccgtgacacacccaccccttcagcaaatcttgttggctccctctttacaatcagtgcagtatcagcccacttccttctccgcacctcccacatccctggtcctcacctctcttatgcagaagccttcttgccctctgctcccctctcttgtccctgtagtcgtcttcacgcagccaccagagagatcctgtgaatacagtcagagcccatcattcctctgctcatacttccccaagtgaggtgaagggaccaggtccccatttcccctcagaccccacctcccgaccctcctgctattccagccacactggcctcctggctgcccctccacacctcagcacgcctgggcctcagcctgtgcgcttgccgctccctcctggacgcctcttcccttatgggcctgcatgccccactctttcactgccttcaggttttgtttttagttgtttttgtttttgagactgagtcttgctctttcgcccaggctggggtgcagtggcgcaatcttggctcactgcaacatctcggctcactgcaacctccgtctcccaggttcaagcaattctcctgcctcagc

SEQ ID NO: 23428 - DNA, 1045 bp, Homo sapiens
caacggggtggtcagggcagggtggggatgcctgggggggccggggcgctcttatgtctggctggctggaggcccttgtctccttcatgtgccccatctctgtgcagtcatgtgcagtgggaatgtgtgtgtcccatgcaccggtgtggggagggtgcagtcagggctgggtgggattggggtgaggagatgggtgcactgacacctttcccctccctggctgctggctgacttgcttcggaagcttaatggatgggattggcccagggaggtgagaggcgaggggcagggaggggatggggtcaggaggggaaggacggggtgcctggggggcgtgtgaacgtgtgtgcacgaccagagctgaggtttcttggtgtgtgaacgtgtgtctctgtaggtgtgcatgacacgcatctgtgtgcatgtgtggcctggatgtacctgtacctatgcccggggctggagggtctgccctgctctgtatatactggtgcctttgtggctatgatgactgtggggctggctctgcacatctgtgcttctctgaatccgtgggcaagcaccacagggcatgtcagtgagtctgctcacacacatggacaggtgggtctctgcacacatccgtccctctctgtgcatgtcactgtgcgtgtgtactcgcacattaacgtgtgtgcatgcatgtgcgtctgtctgattgatctgagattcaggacctgggatgttgggggagggaagggcagaggaggggaggattccagggcttgggcctccagaaggacagggctgtgggggagggagggtcataatttggtgtctaaaatatgacactctcctccactgctccccccaatccagggaagagtccccttgtgcgtagcatccttccattaaatgtgtccaaacctacgtgtctgtgttctggccagtggggatgggtcggggatgggggggacagagaaatggcaacatggggagagagggtggggctggggtgccaccctgcgccccgagtgtctgaggcgcttgaccgttgtgcgtgttt

SEQ ID NO: 23429 - DNA, 2142 bp, Homo sapiens
catcggtttcctgacttgagcggggcccatgcccctgccgaggaggctcagcctggaagcagctagcccatttcctatctcccccaccacgaccccagcaaggatctctacttgacttacctccttcaggcaaccacctagaaaatcgttgagtttgttcatgtcacaagtgaaagtattttttcatgcattcatcgttggcacgtcgtcctttggcaatattaaaatctaccaacaaatgggaaaagttaacatttgcaccatcttgccatattcaaaaaccttgtgcttaagtgttttgaaagtaagtttcatggccgaacgcggtggctcatgcctgttatcccagcactttgggaggccgaggtgggtgggtcgcttgaccctaggagttcaagaccagcctgagcaacatggcaaaaccccatttctacaaaaaaatagtaaagtgagccaagcgtggtggtgcgggcctgtagtcccagctacttatgaaggaagtgggagaatgcctttagccaagatcgcgccactgcactccagcctgggcaacagagcagactcttacttgaaagaaaggttcatatttcactcaaaatagtgtacttgtgtacctacagtaacatttttctacttaatgttattagcattgtcacccttaatactgcaatttaacaatctgctttgtgcctgttgttcctcagtcatcttcgaaatgtcttttacagctgatatgttcaaacctgactcagtcgagggtctctcctcattattatttacaagttggctttgtttcttcttccttctctcaataagttcttccaggggatttgtgtcttggcagctttctctgtttatgggttatgtgcagatgtaggcagtgctaaagaaacctgcaaacagtgggggatgaacaccggggacatcttcatgtagtgcatttggggtcctacccatcccatgaggacagtcccccgaggacctgtgacactggggaggttggggcatcttggtgtctccatgagcaaaactggtcattcctaccttctggatgagttttgcatttcctactctttttgagacaagtcttgctctgtcgcccaggttggagtgcagtggcacgacttggctcactgcaacctccgcctcctgggttcaagcaattctcctgcctcagcctcccgagtagctgagattacaggcattctccaccacgcctggctaattttgtattttcaatagagacagggtttcaccatattggccaggctggtctcgaactcctgacttcgtgatctgcccacctcggcttcccaaagtgctgaggttgcaggcgtgagccaccgtgcccggccgcgtttcctactctttaagctctgttagcttggcctctgtccctgaaggtaagtggcctcaggacctggttgcagaggggctggggctcccatgatgtccagcactgggctctgatcacccctgaggacacagtgcaccccaggacctttgacacctgggggtctgaggggccccagttttaatggcttgtggacttgcagactgtttcctcccccactctcactgtgtctttctgtgttacaggtgcagcttcaagcttaggaccacccaccatgcctatccaggtaagaacccttgctcctgctccttcactcacctgggtttaaaatatctcactgtctaggttgacttcataccgtacctctagaaactgattgatgtgccaatgattgtactcagtgtttacatacaaaaaccatctcaggctgggcgcagtggcttacacctgtaattccagcactttgggaggctgaggtaggtggattacctgaggtcaggagttcgagaccagcccagccaacatggtgaaaccccgtctctactaaaaatacaaaaaattaggccgggcacagtggctcacgcctgtaatcccagcactttgggaagccgaggcaggtggatcatgaggtcaggggttcaagaccagcctgaccaacatggtgaaaacccccatctctactaaaaatacaaaaaatagctgggcgtggtggcgggtgcctgtaatcccagctactcaggaggctgaggcaggagaattgcttgaacccgtgaggcagaggttgcagt

SEQ ID NO: 23430 - DNA, 1073 bp, Homo sapiens
ctgtgatttttcaggcaggctgctcctctgaggaccacccttaactgtctacctaactggtttttccttttcttctcctcatttgtatttatgtatcagtgtattatgtatttatatacacttggagatacagtaaaatgtacctctcactgtgggttaccataaatactgtaaatttgagaaacactctttcaggcctgagaggagcagtgacaacagtagggatgatcaagtcagatgtccctggtacccaggaatggctggatgagagaaggagacagggtgacctgcccctgcctacaaactctaacccagttctgtccctggagctgtgtgaccccggacaaggccctgcccctttccaggctgtcgttgtcctcatccagcctgggagagggttggcgctgaggcccccaccttcttgcctgtttcctcctgaccccaccccttcccctcctgctgggcagatccgagtgaagcctgacaggaccggtgtggtcacggatggtgtgaagcactccatgaaccccttctgtgagatcgcggtggaggaggctgtgcggctcaaggagaagaagctggtgaaggaggtcatcgccgtcagctgtgggcctgcacagtgccaggtgatgaaggtcttggggagggggctggactcctgggtctgacggaggaggggctgggacctggactcctgggtctgagggaggaggaggctggaagtctggacccctgggtctgagggaggatgggctgatagcctggattcctgggtctgaggaagaaggggatgggggcctggactcctgggtctgaggaaggaggggctgggggcctggactcttgggtctgaggaaggaggggatggggccctggactcctgggtctgaggaagaaggggatgggggcctggattcctgggtctgaggaaggaggggatggggccctggactcctgggtctgaggaaggaggggctgggacctggactcctgggtctgagggaggaggaggctggaagtctggacccctgggtctgagggaggatgggctgatagcctggattcctgggtct

SEQ ID NO: 23431 - DNA, 1072 bp, Homo sapiens
aatgtgcctttttctctctttatattgacttagattctcacaatcgacacatcatcacagcactgccttttatcctggggtaaggatatttggcctgatttttgtatttcctacagacctgagtgaatcatatgagaatgtatcaaagcaacctagaaggtgggagtgctcaccacagtggtgttcctgtatatatggtgttagaaatctttgggaaggcgcgggcatggtggctcacgtgtgtaatcccagcactttgggaggccgaggtgggtggatcacctgaggtcagaagttcaagaccagcctggccaacatggcgaaaccctgtctctactaaaaatacaaaaattagctgggcatggtggcgagtgccctgtaatcccagctactccagaggtgcggttggagaatcacttgaaccctagaggcgaaggttgcagtgagctgagattgcgccattgcactccagcctgggtgacaagagcgaaactccgtctcaagaaaaaaaaaatctttgggaaagttcattgactgttgcatgcagaattaaagaagaatgaatctgaaacagagtgacagcacttacatttatgtgaagagctgagaagacttcattttatcttgcttcccacagatgttggttcctaagacttaagttggcctcttttctgggtacttattgtttgagcgtgatggatggactttttccattctctgggcatctccttctcccaaagccttcagagttggagggcgtaagggtgcttcatcattggtaatttcttttctttgttcccagtgtgacctcttcgatttcatggacttaacaatgctatttatatgttgatgactcacagatttctctctacaggctagatatttccttatcctcctacatttgcctgggaattgcttggagatctaatagctaactcaaacttcaagtcatccttgcttcaccgtttcactcatcccacaaatccagtccatttagcaagtttagactttactttctccttatatctcgaggtcctctactcctttctctaacagttattttcactcaagc

SEQ ID NO: 23432 - DNA, 1002 bp, Homo sapiens
ctgttgtgcctacgtgtagacttcttgcttgaaaagttgttggatttcttgagtttgaattttggagtgtttaatcagttctgaaaaattttcagtgttagatctttggatattgtttctccattacttgattttctccttcttcttgagaaattatcaaactcaaggaggtcataggaaccctcagtttataattagtccatcagaaaaataggaggcctggatttgtgatatatggttggccctccatatccatggcttccacatccatggattcaaccaactgaggattgaaaatatatattttttaagcatctgaactgagcacatacagacttttttattgtcatgattccctaaacaatatagtataacaactgttaacataccatttacattgtattagatattataagtaatctaaagataatttaaagtatatggggctgggcacggtggctcactcctgtaactccagcactttgggaggctgaggtgggtggatcgtctaaggtcaggagtttgagaacagcctggccaacatagtgaaaccccatctctactaaaaatacaaaaaattagctggttgtggtggcgggcacctgtaatcctagctactcgggaggctgaggcaggagaatcgcttgaacctgggaggcggaggttgcagtgagccaagattgtaccattgcactccagcctgggaaagaggagcaaaactccgtctcaaaaaaaaaaaaaaaaaaattagccaggcgtagtgtcacatgcctgtagtcctagctacttgggaggctggggcagaagaattgcctgctcctgggaggcggaggttgcagtgagctgagattatgccactgcaccccagcctgggaaagagagtgagtctccatttcaaaaaaacagaaatgtatatgggaggatgtgcatgggttacatgcaaatctgcaagtactattccattttattttattttattagagacagtcttgctctgttgct

SEQ ID NO: 23433 - DNA, 1043 bp, Homo sapiens
ctctgcttacactggagtcatctttcttttgcttgaagaatatccgttaggatttgctgtaatatgtaattcctcaaggatatttttgctgagtatcctttatacatttatacttagaatactttgcaagtatcaagatgtggatggcggccgggtgcagtggctcatgcctgtagtcccagcactttgggaggctgagatgggtggatcagttgagctcaggagttcaagaccagcctggccaacatggtgaaaccccgtttctactaaaagtacaaaaattagcagcgcatgtggcgttcacctgtaatcccagcttctcaggcggctgaagcaggagaatcgcttgaacccaggagatggaggttgcagtgaacagagatcacgccactggagtcttactcactccagcctgggcaacagagtgagtgaaactcagtctcaaaaaaaaaagaaaaaaagtcaaagatgtggatggtaatgaataatttaaataagatagtgcttattatttgcttaggacagtgttctcagattgcagtatcctagaatgtaaaaagacctctgaaaaggtagatgggtacacatggttttaaagaaaaaatgtgtgcatcttaactgtctatgtgacctctttcctaaaactggtctgcctgaggattgcccagctgctgggcatcacgttgtgacgattcttttccccacattctctttcacttactagcagtagtcataccacgtcaactttatatagaagggtgctgtacctcccatatattcagaatgttatattttactagcccagatataaaagcttctggagcactaaataaaagaacagagagatatttgggggccttgatttaaggtgagcatataggaacagtgacaacatctgggcctaaaaagaatgtaccactcagagtaatttgctcttcagcccacaggtgctgagaacaagagaaatcaagtgaaggaaggaggcggagtttccaagacttgggtgtcatcatttctggggacatccttgattggagattgaa

SEQ ID NO: 23434 - DNA, 1067 bp, Homo sapiens
gcatgatttataatcctttgggtatatacccagtaatgggatggctgggtcaagtggtatttctagttctagatccttgaggaatcgccacactgtcttccacaatggttgaactagtttacagtcccacaaacagtgtaaaagtgttcatatttctccacatcctctccagcacctgttgtttcctgactttttaatgatcaccattttaactggtgtgagatggtatctcgttgttattgggggaacctgcccccaatatttcaatgtagtttctttctattttccataagtgtcagccggctgagaaataaagacaatacaaagagaggaattttacagctgggcctccaggggtgacatcacatatcggtaggactgtgatgcccgcctgagtctcagaccagtaagttttttttttaagggtttcaaaaggggagggggtgtaagaacagagagtaggtacaaagatcacatgcttcaaagagcaaaaagcagaaccactgataagggtctaacaaagattacatctttctgagggaaaagggcaaagggcaaaagtagaaccactgatatgggtccaacaaagatcacagggcaaagggcaaaagcagaaccactgttaacacaattatcacagtggtcctgaggtgacgtacatcctcagcttatgaagataacaggattaagatattacagtaaagacaggcataagaaattataaaagtattatttgagaactgataaatgtccatattaaagtgaaatcttcacaatttatgttcctttgccgcagctccatctggtctctctgtttggggtccctgccttcctgtaacacattgtggttttgatttgcatttctctgatggccagtgatgatgagcattttttcatgtgtctgttggctgcataaatgtcttcttttgagaagggtctgttcatatccttcacccactttttgatagggttgtttgattttttcttgtaaatttgtttaagttctttgtagattctagatattagccctttgtcagatgggtaggttgtaaaaattttctcccatt

SEQ ID NO: 23435 - DNA, 1058 bp, Homo sapiens
atactggagagaaaccctacaaatgtaatgaatgtggcaaggtcttcagtcaacattcacatcttgcagtgcatcagagagttcatactggagagaaaccttacaaatgtaatgaatgtggcaaagcctttaattggggctcattactaactgtacatcagagaattcataccggagagaaaccttacaaatgtaatgtgtgtggcaaggtctttaattacggtggatacctttcggttcatatgagatgtcatactggagagaaacctctccattgtaataaatgtggcatggtcttcacttactattcatgcctagcacgtcatcaaagaatgcataccggagagaaaccttacaaatgtaatgtgtgtggcaaggtcttcattgacagtggaaacctttcaattcataggcgaagtcataccggagagaaacctttccagtgtaacgaatgcggcaaggtcttcagttactactcatgcctagcacgtcatcggaaaattcataccggagagaaaccttataaatgtaatgattgtggcaaagcctatactcagcgttcaagcctcactaaacatctggtaattcatactggagagaacccttaccactgtaatgaatttggtgaggcttttatccaaagttcaaaacttgcaagatatcacagaaatcctactggggagaaaccacacaaatgtagtgaatgtggtagaacttttagtcataaaacaagtctggtgtaccatcagagaagacatactggagagatgccatacaaatgtattgaatgtgggaaagtctttaactccactacaaccctggcaaggcatcggagaattcatactggagagaaaccttacaaatgtaatgaatgtggcaaggtcttccgttatcgctcaggcctcgcacgtcattggagtattcatactggagagaaaccttacaaatgtaatgagtgtggcaaagcctttagagtacgttcaattctgcttaatcatcagatgatgcatactggagagaaaccttataaatgtaatgaatgtggtaaagcttttatc

SEQ ID NO: 23436 - DNA, 1034 bp, Homo sapiens
tgtgtcttctgtttctgagagctgagctcagcctgtgatccacagggaggtgagggggctgtgctctgtatggggtttgatcagggatgggtctgtgtcctgaagggaagcatagtccagcccagctccccactgttgcagggtgtgtgggggcttctctgggaggggaacaagttctgaagaaaagggtgaaaaacttacttggtctttgtgtaggagtttattatgcttgcatccccctggtgcactgggctgtctctccacatgctgaggccttccctgtgggcatggttgtggcacagaaaggaatgtgttgtttccaaggattaaacaacatatttttgactttcagatttgacttttaaagaattaattatattgactgagagagaggcccaggagagaaagaagaaagaaaaggagccagggatggctcttcctcaggtaaagtgataatcttggtggattgttctgtctcctccctttttgaaatgcagggcattggagctgcaaatcttctctgagtctgaagtatcctgcctgacacatttgctcgcactcacccatgccttccttcagtccctctcttctgcacttagattccagatctcacagtgactcagtgacatgagcttgggaagaggctccactgggcatggtcctgggaagggctcacacccagacatggatggagacagggtgtgagttctgtggtgtcagcttttgggcagcagagattgtttaggggcaacatctgaatgcactgtcagctctcagtagaccaggagtagagaagctgtatgtggaagtcacatgttaatatgcaaaaatacctcataaattcttgaaaagatgcctctaaggggagatcttttctgcctgattttataccacatttgaagctataatgaatcagtcactctttctaactccacaatcttaatgaccgggaatggaatggaaaactaggtacagacatcagtgatagaggttgttttattccatcattgattttaaaatatgaaatcaacctg

SEQ ID NO: 23437 - DNA, 1047 bp, Homo sapiens
agccacatattatttaaattccacatattggccgggtgtggtggctcacacctgtaatccaggcactttgggaggccaaggtgggtggatcacctgaggtcaggagttcaagaccagcctggccaacatggtgaaaccctgtctctactgaaaatacaaatattagccggacatgatggtgcacgtctttaatcttagctacctgggaggccgaggcaggagaatcccttgaacttgggaggtggaggttgcagtgagctgagatcgtgccactgcactcctgcctgggtgacagtgagactctgtcttctaaaaaaaaaaaaaattcccacatattttgtttgtgttttcatggctctgaattttttcagttgcaggcctttatgtcaccatgtcttccaaaaagaatcgagtttgtcagtctttgataatatctttattatgtctttcattaaagcttgtttgcttatgtaaagttcagtaatgttagatatattcacattatttgttggactcccagaatgcatatgttcttggtgcttgatggtttttcatgggcccattagactctcttcattttctttattttatttaattatttattatttattttttgagatggagtctcgctctgtcgcccaggctggagtgcagtggcatgatctcgactcactgcaacctctgcctcctgggttcgggcaattgtcctgcctcagtctccctgagtagctgggactacaggcacgtgccaccacacctggctaatttttgtatttttagtagagacggggtttcaccgtgttggccaggctggtcttaaactcctgacctcaggtgatctgcctaccttcgcattttctttatttttggagacagagtcacactctattgccgaggctggagtgcaggggtgggatctcagctcactgcaacctctgcctcctgttcaagcaattctcatgcctcagcctcagattacaggcatgtgccaccatgcctggctaatttttgtatttttagtagagatggggtttcataatgttggcc

SEQ ID NO: 23438 - DNA, 1075 bp, Homo sapiens
aggccaaagcttgtggatcacttcaggtcaggagttcgatactagcctcaccaacatggcgaaacgtcatctctactaaaaatacaaaaattggccaggcgcggtggctcacgcctgtaatcccagcactctgggaggctgatgagggcggatcacaaggtcaggagatcgagaccatcctggtgaacacagtgaaaccctgtctctactaaaaatacaaaaaaaaattagccgggtgtggtggtgggcacctgtagtcccagctacttgggaggctgaggcaggagaatggcatgaacccaggggacggagcttgcagtgagctgagatcgtgccactgcactctagcctgggagacagccaggctccatctcaaaaaaaaaaaaacacaaaaattatccaggcgtgatggcacatgtctgtaatcccaggtactagaaaggctaaggtaagattatcacctgaacctgggaggcaatggttgcagtgagccgagaatgcatgactgcactccagcccgggtaacagagcaagattctgtctcaaaaaacaaaaacaaaacaaaacctcatggcagactttaaagatatccagttccctatttgctactcctgtgcttttgattcagtagttctgggaagagagctcagtgtccacatattacagtgctctttaaagattcagaaggaggcagtcagtggaggaatttgtgagatattttcctaagtccatctgtaatgtcttctttcctacagaaacatagggctggggatctagaaaacttccaacatgtcatgtttcctactttttataagcaggagtctctttctaacctgttggagcaaggcaaagagccctggactgtgtagcatgaagtgaaaataagatgggtgggaattttttttttttttttttttttttttttgagacaatctcactctgttgcccaggctggagtgcagtgacacgatctcggttcactgtaacctccacctctggggttcaagcaattctcctgcctcagcctcccaagtagctgggactgcagtcacatgccaccatgcccagctaattt

SEQ ID NO: 23439 - DNA, 1096 bp, Homo sapiens
tcttagctgtttgcctcaatttcccatcacattctggtttaaggcttacttattaataatgtggtttttatttctttcactattatcatcgtgaagatgatttctcattggggggaagattttttttgttttccattatattttctcaaaatttaaagagtaaagaaatgaatattttttgggccaggaagtgtggcttatgactataatcccagcactttcagaggctgaggcagtcagatcacttgaagtcagaagttcgagaccagcctagccaatatagtgaaacctcgtttgtatcgaaaatacaaaaattagccgggcatggttgtgcgcgtctgtaatgtcaactactccggaggctgagacaggaaaatcggttcaacccaggaggcagaggctgcagtgagcccagatctcgccaccgcattccagcctggccaaaaaagaaaactctgcctcaaaaaaaaaaaaaaaaaaaaatagaaaaaactaaatatataaaagaaaataagccgggcgcggtggctcacacctgtaatcccagcactttgggaggccgaggcgggcggattacttgaggtcggaaatttgagaccaacctgaccaacatggagaaatcccatctctactaaaaatacaaaattagcagggcatggtggcacatccctgtgatcccagctacttgggagatagaggcatgagaatcgattgaacctgggagacagagatcgcgccattgcactccagcctggtcaactagagcaaaactccatctcaagaaacaaaaaaagaaactgatagatctcttacacaaatacgctgggacaactaactggatatccacgtggaaaagaataatgttggatccctatgtaacatcatcaaaaattttattataaaaaagaaaagagagagagagacgaggaagggagccctgcgggagggggtgttactttgtcgcccaggctggcctgaactcccaggctcggcgatcctcccgccgctgcttcctgaatagctgggacctcaggctcccactcccgcgcccatatcccagctgtgtttaagccgcaggtggtgacctcacccatcc

SEQ ID NO: 23440 - DNA, 1030 bp, Homo sapiens
gtggcagatatttcagacattgttcatagcttgcagttcatcagtgaactcatactggaaagaaacgttacaaatgtcatgattgcagcaaggtcttcagtcaagcttcatcttatgcaaaacacaggagaattcatatgggagagaacctcacaactgtgataattgtggcagtcatttttttttcttttttcagatgaagtcttactcttttgtccaggctggggtgcagtggcgtgatctcggctcacggcaacctccacctcccaggttcatacgattctccttcctagcctcctgagtagctgggactacaagcatgctccaccaagcctggctaatttttatgtttttagtagagacagggtttcaccatgttggcctggttgctctcaactcttgatcttgtgatccgcctgcctcggcctcccaaagtgctggtattacaggcatgagccaccacgcccagtgtggcaatgtctttactttacattcacaccgcattagacatcagggaatctatactggacagaaatcttacaaatggaataggtgtggcaatgtctttagtctgaggtcactccttgcagaacagtagaaaattcatttttgagataattgtcccaaatacaatgactatagaaaatgacaaactttaattgacattagagtcaattctgcattgactagagtttgagttgacttaacattgagttcaagcattaattgacataaaaagtgtttacgtcaagaagaatgggcagggtgcagttgctcacacctataatcccagcactttgggaggccaaggcaggcagatcacttgaggtcagcagtttgagaccagctgggccaacagacctgaaccagtttgcccagcctgttttttctttccttctttctttcttttcttttctttctttcttttttttttttttttttttgagacagagtctttctcttgtcgcccaagctggcgtgcaatggcacaatcttggttcactgcaacctccacctcctgcattcaagc

SEQ ID NO: 23441 - DNA, 1023 bp, Homo sapiens
tattgtagtaggcagacttccgtgagtctgaagcgtcctgcgtcacaagtttgctcgcactcacccaaggcttttctcagtccccgtcatcttaaattctatctccctttattgcccaggctggagttcactggagcaatctgggatcactgtaacctccacctcccagggtcaagagattctcatgcctcagcatcccaagcagctgtgattataggtgtccaccaccactctgggctaattttgtatttttaatagagacaggatttcaccatgttggccaggctggtctcaaatccctgacttcacttaatctccttgacagtttttcactgttgctaagaataacacactggctgcctgtgagcatggtgacttcactgcagatatctggaagtttcctgcaagttggggcattgaaaactgattgcttcttcttggatttgccatttcctcttttagatgtgggaagattccatccctacccccagctgcagaggtgccctctctgactaagactatgcaaaatttcccactcacttaagcaaagcttactactgtggtcttaccaccatgattcttaccaccatggtcttaccaccgcaattctcctgcctcagcctcctgagtagctgggattacagtcgcacaccaccacaccccgctaattttttgtatttttagtagagatgggtttcactatgttggccagactggtctcgaactcctgacctcatgatctgcccgcctcagcctcccaaggtcgtgggattacaggcgtgagttaccgcccacccagccgagaaatatcttgataatattacaggagctccctcttgggtgagagttagctcttcttttggctgttgttaggattctttctctatctctgaattttgacagttttattatgatgttgtttgttataggtctcttacttagatttatccatgttggatattcttaaggtgttgaatttgtttcttttgcatcctgaaattagaaatttttgccattatgcct

SEQ ID NO: 23442 - DNA, 1094 bp, Homo sapiens
aaaaattagctgggtgtggtggcacatgcctataatctcagctactcaaaaggctgagacaggagaatcacttgaacccggaaggtggaggttgcagtaatccgagatggtgccactgtactccagcctgggcaacagagagagactccatctagaaaaaaaaagagagacagagagagaaggtgtcgctctgtggcccaggtctggagtacaatggcaaaattctagtttacagcagccttgaactcctgggctcaagtgatccccattttagcctcccaaagagctagaaggataggcatgtgtcaccacacatagctacatcttttctttttctttttctttttctttttctttttctttttcttgttttttgagatggagtctcgctttgttgcctaggctggagagcagtggtgcaatctcagctcagtgcaacctctgactcctgggttcaagcaattctgcctcagcctcctgagtagctgggactacaggtatgcactgccatgcctgggtaatttttgtgtttttagtagagatggagtttcaccatgttggccaggctggtcttgaactcctgaccttgtgatctgcccacctcagcctcccaaagtgttgggatttcaggcatgagccaccacttccagaattattttttatattgtatttttattctgtccagggtgaagtgcagtggtgcaatcatagctcactatagccttgatctactgacctctagggatcctcccatcttgggagaatacatggatggataagtccatggttacgtagaaaacacatcatttgcaataagttttttttttataattttaataattttaagtatttttcattgttgtcaactatcacaataatgagttaatagtaaaaacaggccaggcacggtggctcatgcccgtaatcccagcactttgggaggctgaagagggtgaatcatgaggtcgggaattcaataccagcctggccaagatggtgaaacctcgtctctactaaaaatacaaaaattagctgggtgtggtggcaggtgcctgtaatcccagctacttgggaggctgaggcaggagaattgc

SEQ ID NO: 23443 - DNA, 1039 bp, Homo sapiens
gcagcgtgtgtgtgggcttctccaggaggagagtgggagttttcctgtaggaattttttgttcattgtgcagtgggcagcagaggggaccgtatttcccagggtgaggtctcctatgtttgtgtcattgtgttaagggagggggtgtgttgattctgagtgataaacaacatatttttaacattcaggattgacttctaaagactgttggtacgtgagaaagaaacccagaagaggaagaggaaagcaaaggagtcagggatggctcttcctcaggtgagatgatatcctcggtggattgttctgtctccttcctttcagataccctgggccttggagttgggaatgtctgggtctgaatgacctgcctgacatgtttgctcaccctcacttatgccttccttcagtccctctcatctcgcttaggttccgtctctcgtgacccagtgtcatgaacttgggaagaggctgcactgggcaggtcctgggaagggctcacaccccgacatggatggacacggggtgagggtcctgtggtgtcagtgctcttgggcagcagggattgttcaggggccacatctggatgcactgtcagctcactgtggaccaggattggagcagctgccaatgggagtcacgtattaatatgcacgaagtacgtggtaagttctagaaaaggagaccaataagggaaaatcttttctccctgattttataccacatttttaggtaatggagtgagttactgtgtttctgactccaaaaatcttactaattagaatggaaagttcatacatagacatgaataattcatgaatcattccttcattattattattttttgagatggagtttcgctctgttacccaggctggagtgcaatggcgcgatctcaactcaccgcaacctccgcctcctgggttcaagtgattctcctgcctcagcccacctagtagctggggttataggtgtgcaccaccacgcccagctaatttttttgtatttttagtagaaacagcgtttcagcatgctggccaggc

SEQ ID NO: 23444 - DNA, 1058 bp, Homo sapiens
gcagttgaaagggtgattgcttcctctaggatggggcatttcctgttttcttagatctgacaagattccccccagcccccagttgtcaatgtgtccttttccgccaaggtgagattcctcttcacttaaacaaaacttgctactttttatatatttaaaacctatatatatatatatatatatatatatgtatatgtatatgtatgtatataatacatatatatgtgtatgtatgtatataatatatatacacacatccccacacatatacacacacatatataggtacacacacacatgtacatacacatatatatgtacacacacatatatattttgaaaatcttttatattttgaaaatctgggacaaatgacaaccctttgtattaacatctagttttttgtgagtctgtgtaggttttattattttgtgaacatttaaaaaatggattttgtactttgagtaagtttgttttcatgtattttattttattttgagacggggtctcactttgttgcccaggctggagcaccctggcatgatcgtagctcactgcaacctctaccctcagggtcaagccatcctcccacctcagccttcaaagtaattggaaccacaggtgcctgccaccatgcccggctgattttttatttttaattttgagacctagtttccgttgcccaggctggagtgcagtgacgtgatctgggatcactgcaacctctgcctcctgggatcaagccattctcctgcctcagcctcccacatagctgggactacaggcatgtgtcactgcacctggctgatcttttactgtggacgttgtcatctgtgaagacatcactcatgctctgtctcttcgagatactgaatgtcacttggtgtgtccataaaagtttcaaacatttctatagcaggaaccctgcactgattttttatttatttcttatattttttacaaacataagaaattcatactgacagggtgtcttgacctcttcaaaaagtataataaagacgtcatgtgaggccgggtatggtggctcatgcctgtaa

SEQ ID NO: 23445 - DNA, 1058 bp, Homo sapiens; identical to SEQ ID NO: 23444

SEQ ID NO: 23446 - DNA, 1068 bp, Homo sapiens
ggaaagtttaaaataagaattgtttttttggttcatatttacacatttcagtattgtttatcatctgtacttaattagaaacctattggtgtttatattttgtagatatctcttccaaatgcatgatgaaggagttctcatccacagcgcaaggcaatacagaagtgatccacacagggacattgcaaagacatgaaagtcatcacattagagatttttgcttccaggaaattgagaaagatattcataactttgagtttcagtggcaagaagaggaaaggaatggtcacgaagcacccatgacagaaatcaaagagttgactggtagtacagaccgacatgatcaaaggcatgctggaaacaagcctattaaagatcagcttggatccagctttcattcgcatctgcctgaactccacatatttcagcctgaatggaaaattggtaatcaagttgagaagtctatcatcaatgcctccttaattttgacatcccaaagaatttcttgtagtcccaaaacccgtatttctaataactatgggaataattccctccattcttcattacccatacaaaaattgggaagtacacatgagagaaaaatctttccaatgtaatgagagtggcaaatcctttaattatagctaactcttaaggaaatatcagataatccatttaggatagaaacaatataaatgtgaggtatgtgacaaggtctttaatcagaattgattccttgtatgccataatagatgtcacactggtaagaaaccttacagttgttatgagtgtggcaagaccttcagtcagacgtcatcctttacatgctatcgtagacttcatactggagggaaaccttacaagtgtagtgagcataacaagacctttggttgaaattcagcccttgtaattcataaggcaattcatactggagagaatccttgcaagtgtaatgaatgtggcaaggtttttaatcagaaagcacaccttgcacgtcatcatagacttcatactagagagaagccttacaaatgtgaagaatgtgaaaaagttttcagtcgcaaatca

SEQ ID NO: 23447 - DNA, 1035 bp, Homo sapiens
gttcattagatatgattcgttgtgacatgctgacttctatgtatgtagtttaataacttaaaacttgtttaaattatacagatgagattgagaattttaaaattcctatctatgagacatgtacattctataaatcttggcatcagaggttagcttccagttggaatccctattcagccagagggttgtgtcttcattcacttgttagacactctcttcccttttcccaggatggaataggaagtggggcagtgaagtgggagaaaaaaatcactttctgttatcatataatagtataaatttaattaattaattaatattttgagacagggtctggctgtatcggccaggctggagtgcagtggcatgatctcctctaactgcagcctcgacctcctaggcttaagcgatcctcctaccttagccacccgagtagctgggaccacaggcatgagccatcaagcctggctagcttttgtatttttttttttttttgtagaaaaggggtttcactatgtttcccaggctggtctcaaaattctgggctcaaaggatccttctgctttgacctcccaaattactgggattacagttgggattacagagaggagccaccgcacctggcctacagagtcttttttttttttttttttttttttttttttttgaggtggaatcttgctctcgtctaggatggagtgcaatggcacagtctcggctcaccataatttccacttcccgagttcaaacgattctactgtctcagtctccctagtagctgggattacaggcatgagccaccacgttcagctaaatttgtttttagtagagatggggtttctccatgttgttcaggctgctctcgaactcccgacctcaggtgatcgctcacctcagtctcccaaatgctgggattacaggcgtgagccaccatgcccatcccatagtactttttaaaagggacatcagggtgcagtggctcacgcctgtaatcccagcactttgggaggctgaggcgggtggatcacaaagatc

SEQ ID NO: 23448 - DNA, 1080 bp, Homo sapiens
aaaaacatcactgtagaacacaccaactgaaagtaatttgaaaaaaaaaatccatgacactgactatgtagcagtcaccattaagtacttacatgttattaactcatttaatcttcataacaactgcattaggtaggtggtcttccccccatttttacagataagttaattgagacacagaggttcgagtgacttgcctagagtcgcccagctggactgggctgaaacccaggtaggttggttccagagtgtttgcaagcagcaggaatttcccagtattagaacttgagaagcccattcaaaaaaaatagtttcggcactgagcccctgccctgctgagtgctgggacctggaggtgaagtgggggccatcaaggtccctcggcagcagagcccacagcctggtgcagggacacatactgggaaaatcccacaccccaagcgagtgtgcccagcactgcaaaggggaggcactgggctgggtggctccaggaaggtttctttgaggaagggacatttgggctgagacctacaggaggcctaggagctggccaagtggaggatgagagggcggtgttccaggctgagcagacagccagagggaggagtacttggtcaggctgagggactgcgccagctgaaaggtggaggcaagggagcagaggccagcaggggctgcctggagcctggggactctaccccaaccctagcagcgggaagagagggggcggggccctcacctgctcaaactcgtcagtgatggtcttgggctcctcgtgcctctggaaccacatcatgtacttggtgtggaatcgccatgactgcttctttagggccttggctgccagatactgtgccttagtgccctgggggaggaacagtggagagggggatcagggggcccccaaactgggtggggagccaggggaatggggcaggacatcagggctgaaccccggcccccgccacagaccacagttgggctggacaatcctcttggagatggggctgggggcacagaacataccaatgctgatcaggagaaggaaaatgagacaggaggtgaaaattgctttcagag

SEQ ID NO: 23449 - DNA, 1060 bp, Homo sapiens
caaacgtccaggacaccaatctgtacccactcaggccccaggaaacaagccctaaacctcagagctgtgatcgtgccccccaattcctttctctactaagccatgccatcccgagatccagaagttgaagtctccaggccccctgagtcccagagcccaatggcccggccctggcactcaccacggccgtggctgcctccaggcccatggagccccagctcaggacgagaaccaggagactcatgactgtcatcctagagtgggggagggaggatcagcccggggttcttaatctcctagcctagcctctttccacaccccaaatcccatcacagccgccccccacctccacccacctctggagcctggaggatcagaattagggaaacacaagttcagtggttgggggtaggccagtggctgctgatgtccagcaggacatctggctcctgcccagatgagcagggtgtggggtatgagcagggccctgggctgggtggtcgcagcttggatcccagctccaggaccctgggacggtgactgctcacctctgggctcacttcccccgaaggctcccccaagtccacccacagcctgatcagcctctggctctgccctgtctcctctgagaatgggagacagtgccagggctgaaatctgaaagtctctggactttccgggtggggaggggtgcagggggcgtgtcagcattggtagggtgaccagtaagcaagaagggcacccaggggtccccaaactgaaggcctggcttccagtcccagacctgccctgtgttggctaggtttatgggtctgcaagccttacgcggggtctctcccactctctcaggggcaatggaggtacaggttcaactccgcctcaccccactagggccagagagaatgcagggactcctccaatgagaatggcctgtctggttcaaatcccagctctagcacttctagctgtgtggccctgagcaagtggtccaacctctctgatcttcagtctctccctctgttaaacagggagaagggccaggcatggtagctcatgcctg

SEQ ID NO: 23450 - DNA, 1005 bp, Homo sapiens
gtgacaaccaacagcaactcggcacccggccaggtgtccctgggggcagaactcctcacccagccaggtgtccctgggggcagaatcactggcctagagcacgtggaacagcacgtcgaaaaaccaaccagtggctcaagatgacaccgcgcacacaatacacactcaacatgccaacaaatgctggctctgatgactgtcgtcccaagaaatcagcagaaacggccttcaccgagtgctaagcacctgcacagcgtatgtattcagtgggggttgacagagcctgctctgccccaggcgctgcccccagtaccaggaaacttcggtaaacaggaccgagaaggtcatctcagaggctggtgtgcaacgaggtaggagggcgggggtcagtgcagggcaggggtaggtcgggtaaccccactagcagggatgggtcctccaggaaggagccaggcagagggctgtgcagaggaagctgggaggggctgaggccagaggcagacagatccaggactgaccacccaggcccttgtaggtcagggcgaggaacagggattttaatccatgtctgaggggaatcactgagcgttttaagcagaggaagaacttgatcggattgtgttttaaaaggatcacctggctggctggctgctgcatggaggacagacgggggtaggcgaggggggacagggaagaggcccctgtggtcatggtggctaggatgcggggaccagggcacagcaatggtggtaggaacagcggtgggagtccatataggtttcagaggaagggccaacagaacttgttctgagaatggttgtgggagctaagagcctgagtttctggcaggagcacctggttgaggtggggtgtctgttactaagccagtgagggttggggtacggacctgtcggggcaatggaggctctgttttgagagtattggtacatgcacactgtccttcatcctcacaacagccctgccaggcagacactgaccctctca

SEQ ID NO: 23451 - DNA, 1076 bp, Homo sapiens
cggctcactgcaagctccgcatcccgggttcaggtgattctcctgcctcagcctcctgagtagctgggattgcaggcgcccgccaccatgcccagctaatttttgtgtttagtagagatggggtttcaccgtgttggccaggctggtctcaaactcctgacctcaggtgatcgcctgccccagcctcccacagtgctgggattacaggcgtgagccagggtgcccggccaacttcttgttgagagatcacccccaggctcattggcatgggagatcaagcagctgagtctcaaggtactttgcagccgcccaacagccagcggatgcctgtgcttgggaaatgggctcaggggcactagagggcagtgtttgagaggaaagaagtcagcatagcagcagggccgggcctggggcagacagcccacatggttaggaaaaagtgagtgaacgcatgtggcccccagaacccctccctgaaattgcagttgatttttattcccaccgtcaggcccacatatctaaagcttcctctgaacgctccttgcagtacacaaaatagaaatgattgacaggcacagagcagcagcaggccccacgctgtacaccagcatctggcactgtgggtcaccaagcaccaactcgatcccctcggagccaggtgtgtgttgagattcaggatttttcagttgcaaaggcaatatgatctctactccacagggcacacggcaccctcagtgctcagcacagcagtgtgcagcagcctggttaacttttctgcagggaagtatgtgaacgttcacaccaagcgtgtcagtcatgtctgtaagtcatctcccaccaacacaggtcaggttttcctgcccaatgagcttggggatggcttgactttggagctctttggatctgtggattttggaattttggatttctgatacccgtttgatcaaagaggcaaccgaggtctaacgggtcaagtgactttcccatatccgtgaaggtcatgaaaagcagggccaggatggtggcctggggtgccttgaatgataagctgggcccttcactgtgcaggcccctct

SEQ ID NO: 23452 - DNA, 1099 bp, Homo sapiens
tgccagtgcactccagcctgggcgacagagtgagactcttgtctcaaaaaaaaaaattcacaaaacccagtcatgtaggttttctcctatgttatcttctaggagttttatagatttgcatttaacattcagctctatgatccattttgagttaatttttgtgaagagactaaggtctgtgtatagatttgatttatttatttttggcatgttgatgtccagttgttctagcaccatttgtggagagaagtttggaagtttgagcattttttatgataccttttttttttttttagacggagtctcactgtcatgcaggctggagtgcagtggcacagtctcgactcactgcagcctactcctcccaggttcaagcagttctactgcctcagcctcccaagtagctgggattacaggcgtgcaccaccacacccagctcctttttgcatttttagtagagacagggtttcactatattggctaggctggtctcaaactcctgacctcgggatctgcctgccttggcctcccaaagtgctgggattacaggtgtgagccaccacgcccagccttatgatactgttctatctctgctctgtgcccaccaccacacccagctaatttttgtattttttggtagagacggggtttcaccatgttggccaggctggtctcgaactcctgacctcaggtgatacgcctgcctcagcctcccaaaatgctgggattacaggtgtgagccactgcgcctggccttgtcttcacttttgtttttttggttttttttttgagagggagtcttgctctgtcgcccagtctggagtgcagtggcgcgatctcggctcactgcaagctccgcctcccgggttcacgccattctcctgcctcagccgcccgagtagctgggaatacaggcgtccaccaccacgcccggctaattttttgtatttttagtagagacggggtttcactgtgttagccaggatggtctcgatctcctgaccttgtgatccgcccgcctctgcctcccaaagtgctgggattacaggtgtgagccaccgtgcccggcccacttttgaaaaacagtttcagtgagtat

SEQ ID NO: 23453 - DNA, 1642 bp, Homo sapiens
ggactacaggcgtgcgccaccacgcccagctaatttttgtatttttagtagaaacggggtttcaccatgttggccaggatgatctcgatctcttgacctcgtgatccacctgccttggccttccaaagtgctgggattacaggtgtgagcccccgcgcccggccagtggtgtcttgttttaatggacggttccctaatgacatacggtgaacatcttttcctgtgtttatttgccatctgtattagggttctccagagggccagaactaacaggatatatgtatatattgaaagggagtatattagggagaactggctgacaggatcatcaggcaaagtcccactatagtccatctgcaagctgaggaaggaagaagccagtcacgtctcaaagtccaaaagcctcaaaagtagggaagccaacggcgcagccttcagtctgtggcggaaggcctaagagtccccgacaaaccactggtggaagttcaagagtccaaaggccaaagaacctggagtctaatctccaaagacaggaagtatccagcacaggagaaagatgaaagccagaagactcagcaagccagcccctcccaccttctgcgctgactggatggtgcccacccacactgagagtgggtctccctctccccgtccactcactcaagtgtcagcctccctggcaacaccctcacagacacacccagaaacaatccttttttttttttttttttttttttttttttttttttttgagaccgagtctcactctgtcacccaggttggagtgcagtggcaccatctcggctcactccaacctccgcctcccgggttcaagcaattcttctgcctcagcctcccgagtagctgggactacaggcacgtgccatcatgctggctaatttttgtatttttagtacagggtttcaccatattggccaggctggtctcaaattcctgcccgtcttggcctcccaaagtgctgggattacaggtgtaagccaccatgcctggccccttttcctattttttaatcagattgttttcctgttaactgagttttaagagccctttgtaaatcttggatagcagtccttcatgagataggtctcttgcaaatagtttctcccaggctgcagcttttctcattatattaaaaatgtttttcaaagagcagagggttttgttttgttttgttttttgagatggagtctcgctctgtcgcccagtctggagtgcagtggcgtgatctcggctcactgcaagctccgcctcccgggttcacgccattctcctgcctcagcctcctgagtagctgggactacaggcacctgccaccacacctggctaattttttgtatttttagtagagatggggcttcaccgtgttagccaggatggtctcgatctcctgacctcgtgatccgcccgcttcggcctcccaaagagctgggattacaggcgtgagccaccacgcctggcctagcagaggggtttttttattattattttaataaagtcaagcttgtaagtttctttcatggatcatgcctttgatgttgtatcaaaaaaattatcacggctgggcgtggtggctcacagctgtcatcccagtattttgggaagccgaggtgagtggatcact

SEQ ID NO: 23454 - DNA, 1020 bp, Homo sapiens
cgaagtctcactctgtcacccaggctggagtgcagtggcgcgatctcagctcactgcaacctccgccttccgggttcaagcgattctgctgcctcagcctctcgagtagctggaattacaggtgcctgccaccatgcccggccaatttttgtatttttagtagagacggggtttcactatgttggtcaggctggtcttgaactgacctcatgatctgcccgcctcggcctcccaaagtgctgggattacaggcgtgagccaccgcgtcggacttgactaccattcttaaagggggtttctttcaaaaaagagcagcatacctcataatgtggttatatacatgcaatggaatattatgcagccttaaaaaagaaggaaattctgacacatactacaacatggatataccttgaggacattatgctaagtcagtcacaaaaggacaactactgtatgattctagtcaaaggaggtatctaatgtcaacactgtagaaacacaaagtacaatggtggttgttaagggccagaaagaggagagagaaggaattagtgtttaatgggcacagaatttcagttttgcaagaaaaataagttctagaggtcaacatattgtaccacaatgtgaacatacccaacgccactgatcagtacatttaacaatgtcatattaaatcaaacaaaatacatcatttagtttttggtagaaaaatctgttttgcccccagggtcacagtgaggggtaggacacaggaatccagaagaaatagaactgaggttgaaaaaggtggacgggagctgcatgcatttccttgttaatagcccagaatgtgccaggtgtgctttacaaatgctgctgcttttttttttttttttttttttggggggagtctcactttgtcacccaggctggagtgcagtggagtgatctcagttcactgcaacctccacctcctgggtttaagcgattctcctgcctcagcctcctgagtagatgggattacaggcacctgccatcatg

SEQ ID NO: 23455 - DNA, 1050 bp, Homo sapiens
accgaaggaggcaccgaaaagctcagtaatcgagatagaaaacatgttttcatatttgagatactggggaggccagggatgctactcaatatcccacagtacacagaacagccacctagtctcgctctgttgcccaggctggagtgcaatggcatgatctcagctcactgcaacctgtgtctcccatgttcaagcgattctcatgcctcagcctcccgagtagctgggattacaggcgcccaccaccacacctggctaattaaagacggtatcaccatgttggccaggcttatcttgaactcctgacctcaggtgatccacccgtcttggcctcccaaagtgctgggattataggtgtgagccagtgcacccagccctttttgcttttttagagacgaggtcttactgtgttgccaaggctggagtgcagtgccgtcacagctcactacaacctcgacctgtgattctcctgcctcagcctcctgagtatctgggactacaggtgcatgccaccacacttggctaattatttgtagaggtggcaacataacatttgctatgttgcccaggctggtctcaaactcctgggctcaagtgacccttccgccatggcctcccaaattgttgggattacaggcatgagccaccgtacctggccttagttttctttccgatgccacaccaaatggctagagggtgtgtttgggatgacctgagtctggtaggcaacttccagtggaccccacggtgcgaccacctccctttgagtgtgggggagatgtagcgactggcttctagcagtaggatagggcagaagtgacagtaggttagtcttgtggttaggttacaaaactgacctctgtgatggtagcgtccctcgtcagccctcttgtcttgccctctcgctggctggtggtgatggagccggctgccatggtgagcggccctgtggagaagccagggaggaatggagacaatctggagaaacagaatcacaccaacaaccacgtgcgtgagcttgctgtgtgctcttgcttgggagcaagttac

SEQ ID NO: 23456 - DNA, 1037 bp, Homo sapiens
aagcccttaactgctagttcctacaacaccacagacttctcactgttccgggaacggataatcattattcccagtttccctgcaaaaaagaacttgaggctcggagaaagtgacttgaagctgtgaacagggaccagggttgcgatatcaggcagctgggggcaggggtgggatttcagctctgacccccaataagagggacctcagcctggatcaggcctacctgtgcaggggagagggggggtcttcagggccgcggcaccccctgtgtggggccggcagctcccagcacgctgtccctgctgagaccctctgctcgggccctcacccagacccccctttgtctcctccagcctcactgctttgttttcgtctcctcccacgttgcttccctccagtctgccctctatttgctcaaggaccctagagttctagtccatctacctccttccctcccccaggacccagagtctgagcccccactgcttggtagaaccatgacttggaatgttctttcctcccccagggacctaggagtccaggtctcaagcttcaatcttatccttttaaccctcaaaccttttaacccagtccgacacccagcagcgacttagacaattgcattagagcctctggaaaaccaagagtttaatcgtccagcctttacccctctcgggggcccagagatactaccacttcctaactttcccagaaacttgcccccaagcccttgaagtcccaagcctgctcctctgggtctccaggatcccaagcaccagacttgggctcttcttcaaaacccaaaggtccaattccccagcctctcccctccaatatccagggctctgtcctcctagggagcccaggcatggtgcttcccaggccctgggaaaacaaactggcttcttccagccttttggggatccagggatccaacctctcagactttacccactcccagcccccttcctcccttaggcccaggaatccgggtctccattcccaactcccttagccccagaagtctgggtcccgcc

SEQ ID NO: 23457 - DNA, 1091 bp, Homo sapiens
tgggttggaatcccggctctgccatggatctgccgtgagtctcagccagccactttcctttccgggcctcagtttccttatctgtcaaatgggaatggtatggtgcgcaactgtatgaggggtcatgcgtgacacgtggattgtgctgtcaggagctcgggggagtacgtgcccctggaaagcactagagccatgccagcgttcagtgagctctgtgaggtgacaggaagctcccaaggccaggcctagggcttctggtgcgtgggcaggggagcggagacagcttcctcttttgaaaggttggcaggagcgaagtggaggctgatggatgtaggagaagatctcacacaggctggggggcaagtgtgggtgccctgaggtgcccagggaggggagcgtaaggcagggcagacccgggagggccacgagtgccaggcgaggagcatggtggcttccatcctgagggtgatacggccatgaggggtttaataggtggggcagggtcagctcagggggcccagatatggggggagaccagcctgggagcatctggggacactttctggaagacgtgagtactacagcactaagagtttgctagaagggcaggaatgaagggccctcccagtacaaaggtgtgaagacggtggtgaactgcgcggggaaggggcgaagacggtggtgaactgcggggaaggggtgaagacggtggtgaactgcgcggggaaggggcgaagacggtggtgaactgcgcggggaaggggtgaagacggtggtgaactgcgtggggaaggggcgaagacggtggtgaactgcgaactgtgcggggtaggggtgaagacggtggtgaactgcgcggggaaggtgtgaagacggtggtgaactgcgcggagaaggggcgaagacggtggtgaactgcggggaaggggtgaagacggtggtgaactgcagggaaggggtgaagacggtgaactgcggggaaggggcgaagacggtggtgaactgcagggaaggggtgaagacggtggtgaactgcgtggggaaggggtgaagacggtggtgaactgcgaactgcgcggggtaggggtgaa

SEQ ID NO: 23458 - DNA, 1071 bp, Homo sapiens
gtatcgttttaccttatataccccagtacatgtaagtcggaaaagaatggtgtcatcaggtacagtgttctctgtaggttattaggtcaaccttgtaatcatgctgttttatttgtagtgcttctttatctttagtgatatttcacccactgcttattctgtcagttactatgagaggtgcatttaaattcttgctgtgattatggactttgtttcttcttatagttctgtcagttacaatttgtatatattttaagactagattatttggtgcatatatagtttatttttgtttgtttttgagacggagtctcgctctgtcacctaggctggagtgcagtggtgtgatcatagctcactgcaacctccacctcctgggttcaaggaattctcctgcctcagcctccccaggagctgtgactatgagagtgtgccaccacacttggctaactcgtatttctagcagagatggggtttctccatgttggccaggttgctcttgaactcctgacctcaggtaatctccctgcctcagtcttccaaaatgctggggttacaggcgtgagccactgcacccaaccaaggtgcatatatagtttaaattgttctagtacacattccctttctgtcatcctcacctcagtcttagattttgttcctatttggctgcctttcccctttctattaaagttgttggttccagttctcatcctcaggctcctcattcttttttcagttccctcttctctcttttgtgatcatatactttattatttagtataaaaatgaagttaacatgaattcctccctgtctctgctcatctctatgttgacagtttttagtcaggttttctcggtgaggtacataagatgcctctaaccgctccaggccgctgtcccttcggcttagcacctgtaacagctccaggccgctgtcccttcggcctagcacccgtaacagctccagaccgctgtcccttctgcttagcacctgctgaagcagagcccctggacctcagtgtctggccaagtcccagctctgttgctgactgggcccatccctgagctgat

SEQ ID NO: 23459 - DNA, 1066 bp, Homo sapiens
ctcaggctgttctcaaactagtgggctcaagtgatctcccatcttggcctcccaaagtactgggattacaggcatgagccatggtgcctggctgggagtgacttcttcttggatacagtatccatttgggatcatgaaaaagctcaggaagtagatagtggtgatggttgcataatattggaggtatcctaaatgccactgaattgtgcactttaaaacagggaagttggtaaattttatgttgtttattttaccaccaccaccacaacaaaagataaagaaaacacaacaggtggtcaacacccacaagctatagctttctgacccctgggcaagggctctgtctacagatacagacagatctcagcaacatgttgaacacaagaagcaaattgcagaaggatgtgcagcagacatgcagagggcgctgactgtggttgaataaaaagccagtcaccctcccttcccctccctgaattgagacccattcggctataataggattgaacagttggtgactcctttaaagaaatgacacagccaggtgtggtggctcatgccggctttgggaggccaaggcaggaggatcccttgagcctgggaatttgaggcttcagtgagccataattgcaccactgtactccagcctgggtgacagtgtgaggtcctgtctcaaaaaaaaaaaaagggtcagatgcggtggctcctgcctgtaatttcagcactttgggaggccgaggcgggtggatcatgaggtcaggagttcaagaccagcctggccaacatgatgaaaccccatctctattaaaaatacaaaagttagctgggtgtggtggcgtgtgcctgtaatcccagctactcaagaagctgaggcaggagaaccgcttgaacctgggaggcagaagttgcagtgagccaagatcatgccactgcactccagcctgggtgacagagcgagaccatatatatatatatatggcctaaagtttactgagcaaatccagtgctcaattacatctaacttttcctgtcactaccaatataattttttttttttttggagacg

SEQ ID NO: 23460 - DNA, 1026 bp, Homo sapiens
tcagcccagcctgggcaacattgtgagaccatctctgcttttttaattaaaaaaaaaaagaagaaaaccccaccctggcaggagaatgaagggactgactggtagatggcattggggtcaccagctgcccctttcgggatgaaactgttagcttttcctctaccaagaaaattccagaggggttaagaagttaagtgaacaaaactaaacccagaaagatttccggaatggaaagtggatgactggtttgatcatctcaaggctgaagatgctgccccgcatagctcctgtagcagaagccaggtcagctgaggctgccagtgccacggggacatgggctgccctgccctagacccactgtgtgcccagcgtggtctctgctccgctgcttctcagtgtctaggagggactaaggacacttgccttggaaggtggttgtgagaatgaagtgcgtgagtaatgtctgtcacatacttagtgtcctttaagaattaactgtcctttatccattgatctttgtggcagaatttttcatgaatttgagacaaatgatcccttgaactgtccgtaacacgtgggacagaatgtggaccctgatcattagaccctcgtggtgagggaggtggggccctggcaggcacagtttaagttttgacgtgattctttttcccataatttagaatttcagccgcggaccgtagacatcttgaggttaggggatgtgctttattgggctgtagtctcacattctgcttgtgcctggctggtgtgagtgtcagcctcctacagatgccccaaggatggggacaagggcatggatctgaatccctctctggcacctgtccttggaagagcctgaggagagtcgcttaacatttccgagccccattttctcacttctagagccaagggaaacagcctacctcaatgagtggttttaaggatttaaagtgatcatatgtgagatgttgatattcatgtatgcgttgccccttaggaccagtggttcgggttgtgtgtgaattt

SEQ ID NO: 23461 - DNA, 1049 bp, Homo sapiens
cagctgcttccaccagctcctgctggagcctcccaaggtcaggggtgtgggttctggtcctcggggaggcgggggaagcaggaagggcagcccttgggaatcaggcctccctgtgtctgcagctggagccgctacagatgacatggggcatgctggctccgcctctgggcaacacgcggctgcacgtggtcaagctcctggccagtgccctgagcgccaatgatgcagccctgacgcacgagctcctggcactggacgtgcccaacaccatgctggtgcggggactggaccgggctgggggttcaggggctggggcggggactggactgggctgagggttcgggggctggggtgggggctcggctgggggctcaggggttgggggctcggctggggcggggcctctctggtaccaatcctgtgtcctcccataggacctcttcttccattatgtcttcaacaacttcttgcatgcccaagtagagggatgcgtgagcaccatgctgagcttggggccacctcctgacagcagccctgagacgcccatccaaaaccctgttgtgaaacatgtgagctgggactccctggtccccctccttctgggcccatcccctgtgggcgcaccctctccagaggcctacccctcactccttcctcccacaagtgtttgttgggtagtgttaggtgccagcgcccagatggggtgtgggaggcatggccagggagaaacgcggatgaaacatgcaggtgcagggagcagtgggctcctgacttgagctgaagagctaggggtgggcgggagcagacctgcgagcagctgagtgtgcatgagtgcgcacacgtgcgtgtgtgagcatgtgtcagtgcaagcgtgtgtgagagcatgtatgtgtgtgagtgcacacgagtatgtgaacatgtatgtgtgagcatgtgtgtgtccgttagtgcatgcatgtgtgtgtgtgtgtgtgtgtgtgtgtgtgtgtgtgtgtgtgtatgcaccacatattcttttgtagaaagaccagagagacttgggtggatgc

SEQ ID NO: 23462 - DNA, 1098 bp, Homo sapiens
cctgtggccccctaggaacccagccattcttgctcttttttttttctctctctaaacggagtcttgctctgtcgcctaggctggagtgcaatagcacaatctctgctcactgcaacctctgcctcctgggttcaagcagttctcctgcctcagcctcccaagtagctgggattacagacgtgcaccaccatgcccagctaattttttgtatttttagtagagatggggtttcaccatgttggccaggctggtctcgaactcctgaccttgtgatccgcccgcctcagcctcccaaagtgctgggattacaggtgtgaggcaccgcgcttggctttttttttttttttttggaaacagagtttcgctcttgttgcccaggctggagtgcagtggcgcgatctccgcacactgcaacctccccatcccgggttcaagggattcttctgcctcagccttccgagtagctgggattacaggcatgcaccaccacgcctggctaatattgtatttttagtagagacggggtttctccatgttggtctggctggtcttgaactcctgacctcaggtgatccacccgccttagcctcccaaagtgctgggattacaggcgtgagccaccacacctggcctcttgctcttaagaattctacagcctgactgggcatggtggttcacgcctgtaatcccagcactttgggaggctgaggtgaacaaattgcttgagcctaggagtgcaagaccagcttgggcaacatagtgagaccctatctcttaaaataaaaaagtagccagacctggtggcatgcccgtaatcccagctacttggcaggctgagatgggatcacctgagcccaggaattgcaggcggcagtgaactgagattgtgccactgcactccagcctgggtgacacaagagaccttatttcaaaaaaagaaaaaaagaatcctccagtctgttggcagagttggcggggcacccacctgcatcacaatcagaccgtggagactggactttggggtgttgaggtgccttgggactcctgagtgccctgaccctgtacccctccctccactccagaggggaccccatatgc

SEQ ID NO: 23463 - DNA, 1103 bp, Homo sapiens
gcagaaaatcgaacggtttgcaaatacacagcttaaataaatatttataaagggagcaccctggtgtaaacaagtatccaaagaaaaaagtcaaacatgcgccacatcccaggatctcccgccgtcgtcgtttccatcactgtggtccaagggcagtcactgtcctggcttctgacgccatagatcagttttgccgggttttggctttatgccaaccctttattgtatatagtattgactagacaacttgttgcacattgtccagaattcagaagaaacagaataggacccagtgaaaaggctcctacagacttccccggtgcctggttcacccgcctgagtctcccgtttcttgcttgtttgccagagatagcagatatagatataggcaacacagacacattttcctctcccttttttctttggcacaaaaaggagcattccatacacactgttctgcttctttttcacttctctcaaacatgttttcgtattgttacttaaagagcttcctcgtaattttttctggctgcgaggaataacagagtatagttatggcatgacttacgtaaccagtaccctcattgtggacattgatacttaacttctgctcctttgctctggggaagagtcctgtaatgaataatcctgtgtcgtttcacatgaatgtctgtaggataaatgcttaggagcagcttttgaggtcagagggtttgtgtatccatcattttgagaaatgcagctgctcggctgtccctaggagttgttgtgacccacactcctaccaggccagaggggagttcctgggtgctccacatgcctgtcctaggcttttggacatgctggcccccagatctgcccctccatggctcctcactgccctcagcagagagactccagggcccttgtgacccacctgtcagctctccagctcctggttccctcagaaccatcccttggggcccgggtgtccaggtcccgcctcctgcacaggggaggaagagttagcacatgagtggccgtgagagggtcactccatggggaggaaaccgcaagggctgtttgagaggagggagtggctgggctgaggctggagggtcttc

SEQ ID NO: 23464 - DNA, 1048 bp, Homo sapiens
gatgctactggtcgcaggatcccactttgtggagcactcccttagcgtgtagggtgtgctgcctgtgggtgggggatttagcggtgggcggccgcagttagtggtagatggctgtttcttggacccagtctactaatgcgcttctgggcattgccactttgtagtcgtgtagctgtgggctgtgactcgactccctagtgcctcagtttctcccttgtaaaggctcagttttgtgctcccagcttatgaggacctgacgctgaagtgtgtagcgcaggggggcgtcatggcccttccttgcgtgtttgccagcgtggcatctgggagggtgtttgggctctgtgtgctgggcaccaccgtgccaggtgttgggatagagacttaggagcttacagtctagtaaggtcaggagtgagaacgttgtaattgtgattcatggctttgaaaaaaccctgtggggtgcacctggggtgtccacgggggtcagagatgcacttgctgaggccctcccacctgattctgttgctctggaccaggccccaagggagagcaaatgtagaagctgcacacggacccttctcaggagtgaatgagctggggaggaggcaagcccatccctcccgggagagcccccaggggcaggcctggtgcagaagtgtgaaaggcctcgttgactgctggaagggcgtcctcagtgtaaagatgtgcaggcaaagccctgtgtgcccgaattgtcctcactgagcagacaggagcccccacaccaggggctgaccatagcctctgtaatggaggtggcgttgagccaggttttactcccaggttcggaggtggggctttcatgctcatctccaatcccattacctgtctgcagccaggattgtcttcctggagcccgaatgtgacaccatcgctccctggcgggcacgtcttcagggtgccaaacccactccctggctcaggaccaggtgtccagggctgcattcaagccctgcggcccctctgcctagtggaacctttgcccgtgagccttcctcatcctctgccc

SEQ ID NO: 23465 - DNA, 1065 bp, Homo sapiens
gggaaggggccgcgcggttgggctggcctggccggataccgcggccccgagggcacggtctcagccctcggcccccccagcccttccttccccttttcgagtcagcccgggtcccgttgctgccccgggcgggctgcgcgtggcctttgatcaggcgggtaattacggggattctggccggcaggaggcccattcattcgtccttgctcggcaggcggggaggaagcgcgtccccagcgggggaagtgactgggccaaggtcagccaccgcgtggcccacggggcagggcgaaggcggggactggatcgggtggcgactcctgaggcctccctcccctgtgccgagtggatcagagtggagccccgccctcctgacaccccaccccgacccccagtccagggagctgaccccaattcatgtggatgagtgctctgggacctgcagagtcgcacagaaaagtgacccacagacacagaaggcaggagtgagtggaggcagaagtttttccagtgccaggccctgtgccgggcactagagacagggagcagggagatgaacaagggcttggagtctgggtggaaggcagagactgagacccgggcgacagagtcgccatccaaggtgaccagacccctgatggagaggtctgggggctgtgggagccagggaaggcattttgacccagcccagtccgggggatggtcagggctttagggaaggaatggcttggtctgctctttgcggtgtcctgctcccaggtcccatgttgcgcagtgcttagaacccatctggggatccgattgaccccagcgccgggaagcacagttgcgttgatcctggcttagctcctctgaagaccgtaagcctctttggctaaacgctgctgacattcacctgcctgcctctgcgcagtccctgtggtcctccggccacgcacggcctcagagaacatccagatcagattcctgcttgcttatctcatgtcttatccatccatccgggcacccggcctggcccctccctggtgcactgccagagtgtgtgcaggcactgggttgtattcc

SEQ ID NO: 23466 - DNA, 1050 bp, Homo sapiens
atccaaagggcccaatttaataaagtttggaatactactcagcagtaaaaagaaatcattgataacacccaagaacatggatgaatctcaaaatagttacgaaggtgaaaggggacagccagaaaaaaagtgcatctggtatgagtctatcaatataaaattctagaaaattctattactaggctgggcacagtggctgacacatgtaatctcagcactttgggaggcaaaagcaggtggattgcttgagcccaggagttcaagatcagcctaggcaatgtagtgagacccatctctacaaaaagtagaaaaaattagccggacatagtggtcccagccacctgggggggctgaggtaggaggttcacttaaggctgagaagttgaggctgcagtgagccgtgatcataccactgcactgcagcctgggcaacagagcaagacactgtctcaaaaaaaaagaaaagaaaaaaagaaagaaaaaagaaaattctgtccgtgatctgtaatgacacagagaacaccagtggttgtccagggatggagctgtgggagggacagatgatgaagagcctggggaagcgttggaggatggtggggatgttcagcttcttgatgacggcaatgacttcatgagtatgtacaaatgtcagaacttggactctggacatgcaggcacaggaaccagctagaggagctgctgcacagcagtgtaaatgcaccaaatgctgctaaactgtacagataaaacagttaattttatgtcacgtgaaattcatgtcaataaacacattaattaaggtataggatttgttgagagactgagtgtgtcatgtgagggaaatgcaggaatcaaggataaccccacaaatcttgtggattgcacatcaagggggctggagccacctttacgtgaggtggggaaagatgtggtaggtctgggatgtgtggtgattgacaggtctgttaggcatccaagacaagggaaactccacattcccatgagggaaggatggtggttggtcacgcattcttagagaaggcattattt

SEQ ID NO: 23467 - DNA, 1047 bp, Homo sapiens
aagttgagtttctggggaagccacagactgtggcggctctgactcagggctgttgcagggtcctccctgaccccatgaggagttgcaatttgcagccatatctggtggagaatatttcagtcagtctctgagaaagttcttccagtagctggtgtctaattgagacctatctagacaggcctcctttggttttcctcaataatagattcactgttcagaagtctgcaaaaaaaaacatgagcccgatcaaagtttctagtctatccacccatcccttccaaaaccctcatccaaatcctggacgccacttcttcagcagcatcgaattcagcacagtggaaatcaacccaccctgttactcttccgctgtctacacctgactatatgttctgatttaaaatcctaatgctcccctggattctgatctccaggaaatcattgtgcagaagtgaaatcagtttttttttcaattggaacaacatggttcccaactgtaaattaaataggatacttatgtgaagctcctaaaatctgatgcaacaataacttatttatgttttcctgtccagacaagatccaaggtaaagcccttcatcataattacgcacaaagatagagaaaaatagttacaacctacagttgtcccccaacaccttttcttgttaaccccaggacatttgtttgctccagggaagggagagcattaagtaatcatgagaattcaactcctacacagatattgctattttggtaaaatgcacattcataaatttcatcatttttaccatcttgaagtgcacaatttcatggcactaagacatgcatgcaccatgctgtgcaaccatcaccactgtctagctccagaattgtctcatcagcccaaaaggaaccccatccccatcaatgatcaccctctgcccacccaccccagcccctgccaatcactgatctaccttctgtctctaagggtttctctattcctaatctcatctcagaaaatggatttaaagtctagtgctctatgaaattttcaggaagtgaaataat

SEQ ID NO: 23468 - DNA, 1036 bp, Homo sapiens
ggcaagacacattgtttaaacacacagaaacacacatacatgcacacacacgctcctaaatatgacactcctttgctgaaaaccctttcacagcttccttttccctgaggataacatccaacatttttcctgtgactcacatgcccccgtctgttctgtttcctgcctcctgtctcttcttacttgtaacagtctcaccaccatgcccctccttctgcctaccacgttcctgacacaccggcctctctctgatggagggactcagtgccttctgccccaggacctttgcatattcaagtctctgcctggaatagtctctcctaactcttcagctggccagctcctattccttacctcaaatgtgacttttctagagaggccatctccgaatccccacactagaatgtgtgtgtttagcatgagaattccatgaagacagaactattttcatcactatattcccagcatcaagcccgtggaaagaaccaggaataaacatttgtggatcgaatgaggaaatgggaactcagagttatggcaagacccaagtcctcttcccaatatactctttggtgtctttacgtcgcaaaagtctggagtctcactagaattatctaactatggtaatgttgacttccaggcactgcacaacgtaagctcgtcaatgacatgcaacagtcccatgaactggggattcttgtgagccccgttggtcagatgaggacagcaaggtttgcagacgcagtgtctccccaaagtcacagaatcagtgatagaaaccaggatgcagacacaagtgtatctccaagggcaggggctagcaacctagactcattcaccccactgtgtccatcaagggaaatgtgaatgtctaaatgggaagcaagaagaagtctgttagacttcaggagcttctctctgaatccagcccacaagagcctcccaagttgtaagaaaatacatagaggacacaaggcatggctggaagcattaccttcacgaggagtacaggcttctgccaatcccaggaaaagca

SEQ ID NO: 23469 - DNA, 1065 bp, Homo sapiens
aaccgttcaacaccattcatttccttcagcatcctccccagtggaatctgaaggattgctgttggttcctgaaccaaagcattgcttaggtgaatcttgaggactgaggaggacttttctaggtagacagagatcaaggaatcaatgtgtgcaatggcataatggagcgggaaaaaaaatgtgatgttttggggggaatcagaaatgatttaatatgggggggcgtggtggctcatgcctgtaatcccagcactttgggaggccgaggtgggtgggtcacctgaggtcaggagttcgagaccagcctggacaacatggtgaaacttcatctctactaaaaatacaaaaattagccaggtgtggtggtgcatgcctgtaatcccagctacttgggagtctgaggcaggagaatcgtttgaacctgggaggcagaggttgcagtgagctgagattgggccactgttctccagcctgggtgacagagtgagcctccatctcaaaaaaaaaagactgggagccaccgctcacgcctgtaatcccagcactttgggaggccgaggcgggcggatcacaaggtcaagagatcgagaccatcctggccaacatggtgaaaccccgtctctactaaaagtacaaaacttagctgggcgtggtggcactcgcctgtagtcccagctacttgggaggctgaggcaggagaattgcttgaacccgggaggcggaggttgcagtgagccaagattgcgccactgcgctccagcctggcgacagagcgagaccctgtctcaaaaaaaaaggtttaatatggacaggggatggaatgtgggtggggggatcaagagaagtggagaaaagtttagagaagcaggaggagcttggagcctgagaacccttgggtaccatgccagagacctgaacttgatcaatggggcagaggcttcctgccaggttccctgaaaacttgggatcttttaggaattccacaaaggtttgctttgattttcatttcaaaaattaaactattttttaaaataggtgtgtacccaaaatatagcacatggactg

SEQ ID NO: 23470 - DNA, 1026 bp, Homo sapiens
cttcttttttccttaaaaaaaaagcaaacacttgtcactgtggtaattgaagtgtatattcaggacaacttgaatctatggtcccagatggctatcatcaacatgtgaacttgaataaactctctttaaactagattctgacttgcttggttatttaagattgatatagttccttactgtttaagtcaattacctgtttttacatccctaagttaatgagttgtaggatggggctgagcagtcaatcagttactggtccgttcagcaaacaggtcagcctgccatataatgcagtaaagggagcttgctggaggcccttaactgtggtggaggatgtgagaaagccctgcccagttttggacccagttgctgcatggccttatcttgttccctaaagagtggccctcagggccagctgagttagaagggtggagtgactacaattatctcatgcctcagtctctgtattccagggcaactccttatccatccaggcctctttttcaacagaaacagaccagactcttagcccatatctgctcccttctgcagggagtatcagagatgccctccctaccatggtctttcctccaaatctgagccctcccctacctcagcccatatgaaaaaacgatgtaggattcttccttctcaatctgatccacaggccaacttctcaagtgcacaacttctaactcatttaaagctccaggccagctaccttccctcacctttggaaattacgtccacctacccatgtgatgtcgcccaaaatccaacccaggatcttctgtctgaaacccgctccttaagctgatatctctaattccattctttcagatttttcaggccaaaacaaaacctatggaagacaccattcactaccgactttccctcacagctatgtttgatgcagcaggaaatcctgttgaccctatctctgagatccatccagagtctcatcacatctcccctctactgcaacccctctggcccagccctaccataactcaaggggtctcctca

SEQ ID NO: 23471 - DNA, 1031 bp, Homo sapiens
ctgactgggtggacatgaccctagctgttgccacagagactccaggtgggagtgaccctggtgagtaggagctggggaaaggtgtgatgtcagggctgggttcatatcattccatagcctctttgtgcctacagttgtattagtgctaaggccactggcctttcatactctggcctttggcctctggatgttccatacctctgccttcatgtctcacctgttcctctccatggcttgttctacagtgccttccagcattggcctgtacttagtgtttcatgagatgtgtagcccaaatagtccttaaacaccaactactgagtagcaatttgattttctttggtatggaccataaccttctgcacaactctcacctgtccccagcagccaagaaaatctgattgtgaatgactttgagacctgcctcttttttgtgctgtaccccacatctttgtcctctcccagttgaggccttctccattctatgacatttagatgccaactaccgtatagtacacatttgctgaacttgagtttggacccttgtcctaacaacagtcctatgaccttggtcttagttgtgttagacacatatttgtagtgaggcttcccctcttccacctgtgtcaatttgtacttcaccagcatttctctgctttcaggttgttggcatggaatggaggatgaagagataccttttgagcagagcttttctataggaatgtcacagatcaggattcccaagggaggtccttctactcagaaggcttacccctgtgggacatgtggcctggtcttaaaagacattttgcacttggctgagcaccaggaaacacacccagggcagaaaccatacatgtgtgtgctgtgtgggaaacagttctgcttcagtgcaaaccttcaccagcaccagaagcagcacagtggagagaaaccctttagaagtgataagagcaggccctttcttctgaacaactgtgctgtgcaatcaatggagatgtcttttgtgacaggggaggcttgtaaggact

SEQ ID NO: 23472 - DNA, 1026 bp, Homo sapiens
gggcgggaatcatcctgaaatggcttaaagatgattatgtagattgggagttaaaagagaatattcatttcacagtggtagtgcatttagtgagccaggaaagtgatggtggagagccagagttgtgagataactgtgatccaaagagtgatgtacatatggaaagaagtgtagactgatgacgtctgggcttaaaggagaaaggcaagcccatctttggttgtctggtaagcatgatgttagtgaccccagaggaatttgcttacagaagggtgaggccctgtatgctaagcacagagcttagagggtgacaacttcttcacctgcctgtggttgctatgggtagacacagtgatccattgggaccatgaggcgagagaagacaccaatgacatctggtcctgatatttcctgagttgaggagttaggtaggagggtgtacaggagggagatgtgtgggggcacggatgggggttcttgggagagatgctgctcatggacttggctctcctgattgtggcaggggcaggtgaactttgaggacgtgttcgtgtacttctcccaggaggagtgggtgctccttgatgaggctcagaggctcctgtaccgtgatgtgatgctggagaactttgcacttatggcctctctgggtaaggccgtcacatccaccccagtgacttggactgggtcctgcccttcccctttttttcagggcatctttgtccttcctacatcagagccgtggacactgtctcatttcttagtgcctggagtaggttctgtgagtgctgggcttgggctgtttgcactcctactttctccttttgagcattcccagcgcttgctgtctcagagccttgcaggcatggattcaggagttatgcattgtattgtcagcccagtgggtcatatccatcttgtcctttccctgtctgaattcctctgtctgtatccatgacacctctgtgcctgggattctgcgctcttcctttagctgacatttcctgtggcctgcctatgtcagga

SEQ ID NO: 23473 - DNA, 1023 bp, Homo sapiens
cacatggtagtgtctgttgtaacactgggcagattagaaagtacaagtaatctctagaaagcttcccaagtacttggaccttgtagtgaatctttcaactagtgatatgcagatgtatgagggtgaatttctgtctgttggatcccttgaaaaatcagctctctggtgtcctacagtgaataagacaattacacatcccaacaattgctagggctcttctgttatatgtaccttctggtgcctgacaagggaatatcttttgttgaaggctttcccacatttaccacattcatacggcttttctccggtgtggattcgctgatgctcaacaagtttgtttttatagataaaggccttctcacatgcagtgcagttataaggcctctctccactgtgaactttctggtgttgaatgaggctggtgcggtgtctaaagcatttcccacattcactgcactcacagggcttttcgccagtgtgaactttctggtgctcaagaagtcttttttggtggctgaagacttttccacattcattgcactcacaaagttgttctctagtatggattctttggtgctgaagaagtttaacctcaaggtagaagccttttccacattcactgcattcataaggcctttctctagtgtggattttgtgatgcttaagaagtgtttgtttggagatgaaggctttcccacagtcactgcattcataagccctttctccagtgtgaattctctggtgtcgcatgtagtcagacgagcggataaatgatttcccacatatgatgcacacataaggcttttctccagtatgaattctctggtgctcaagaagtctttttttgtgaatgaaggccttcccacattctttgcactcataaggcctttctcccgtgtggattctatggtgatcaagaagtgactgtttgtatatgaaggatttcccacattcactgcactgataagccccttctccagtgtgaactctctggtgtcgaatgcggtcataggaatgaataaa

SEQ ID NO: 23474 - DNA, 1020 bp, Homo sapiens
caaatccactcttgttcgacaccagagaactcacacaggagaaaagccatatgagtgtggtgaatgtgggaaattattcagacaaagcttcagccttgttgtacaccagagaattcacactacagcaaggccttatgagtgtggccagtgtgggaaatcatttagcctaaagtgtggcctcattcagcaccagttaattcacagtggagctaggccctttgagtgtgatgagtgcggaaaatcctttagccaaagaaccaccctcaataaacaccacaaagttcacactgcagaaaggccttatgtatgtggggaatgtgggaaagcttttatgttcaaatctaaacttgttaggcaccagagaactcacactggagaaaggccttttgagtgcagtgaatgtgggaaattttttagacaaagctataccctcgttgaacaccagaaaattcacactggattaaggccttacgactgtggacagtgcgggaaatcctttatccaaaagtctagcctcattcaacaccaagtggttcacacaggagaaaggccatatgagtgtggcaaatgtgggaagtcctttacacaacactctggcctcattctccaccgaaaatctcacactgtggagaggcctcgtgacagcagcaaatgtggaaaaccctacagcccaagatctaacattgtttaactcttgaaactccaaacctgagaaaagccttagacctgcagggaatgtgccatgtctttcttcagtgttatggctatagagagcctttgtgaaggagccgtctgcctaaagttaaacctcatacttctagacctcccgatgggtcagactcccattagttccaggcatatgtgtcttgcaggagctcctttgcatgttctaaactgctggaggcctttgccagagttaaatcattagtcacccttgcatactaaggcgaggcagatacacctgtgttctcccaacccttggaggaaattccttgagcagtctgagcctttaaggggaat

SEQ ID NO: 23475 - DNA, 1052 bp, Homo sapiens
tttggcacagagtttggtgttccaaaggtcatgaggggttttagaccctggacccaggacatgttccaagactcttttacattatgtcagaaaaacgagccctgcctcagctcttctgccaacatgtctcccttttttgtcctgcaaaaccgccacagctatcattgcttgttcttggcagcggctttctctccagaagcggcttccgcatctgtagattaaaaggagacagcacaagcacataattattagaacaaaatttacaagtgtagagtttccagtggtcttaatccatttaagagaattgattgcagacaacccattggctgcctcgctgaaaatatcagttccagggagcagggttaagtgagcctgagaggcttcaaaaacctgctcttttacttttacaatatcaagggtgagattttcctctctgcccactagatggcatttaatttcccattggtgttctgtttcattctaactatgaggagtaacgcaaaaatcggatgtattccagtcacattgcatttgaattctagtttctaaacttatgatgcaatcccccatccaaattactgtctgagggagatcattaatttgactaactatattttgatctgtttgggcctgagagctccataatttcatagaattctttttccatttatcaacaaatttgacagtttgcacagatgagtgtaaagccacactagctactgcagcagtggtggtaactgcagtgaggccaattatagcaaatataagagcaactataaatctttttgaacgggataagagttttgtaaggatctcagttataatgtgaatggacggtgatgcctcccatggtctatttagagacacagggatccaaactccttctctggctctaattaacaagatagtttgatttttatcaagatgtcgttaatgcaagtaaacaagtgacattcctggcaggtgataaaacgggtatttatgtaaagagtaatatttccggcctggcggggtggctcacacctgtaatcccagcactttgggaggctgcg

SEQ ID NO: 23476 - DNA, 1039 bp, Homo sapiens
agggttatgaaatctacgccaggaaggggagggtttcccagtctctcactagccctaactcccacccacaggttctctgggttgtggagtgccattcccccagcccttagttctgaagaccttgggtgaaccccaagcccagggtcctatgtccatgttagccggtatatagagttgttccaatttctggcagccatgtgaacgggtgtggaaagtttttccagaaaggtacaagatgtgcaaatgcttaggtgcagtacggagctgggtgcatttatgaagccacaagtctccttgctttctggtgggaagcaaagaacaggaggataggcgtcaggactgcagtggctgcctgagaagttgagtgtgttttcaggaggtaatagcaagtttgaatcagaaaaaagaggtaatttaccaaggtcttcacaggcttcatctgtgtgcacagtggggcacaaactggggggttgagggaggaggaaggaaaatcagggtagactagtccaagtgagggttactggcccaggatcgtgatttaggagatgtggttagattccggatgtgtggtttcaaaagggacaactaaattacataatgtaggtggtgagggagtgaaacagagggttcagagaagactccagggtttttggtattagcagctgtagggaaagaagtttcatcaactaagatgaacaaattggcaataggagtaatattcactagggatatcaggtttgtttatgccatgctaagagtcagatctttcagagcctactaaatggaggcgttaagtgggcagatgaacgtgccggtcttgaaatctagggagtggttcagggtgcagatattcaagatgtggctgttgtgcgcaccaaggttagtgagctgtgggtcacagttaggcggggcaagctccaggttttggttgtaaagctgttagtgggccaagactgggaggatgatgatagagtaagtggtcatgaaggcaaggtatgtaaaagacagtgtagtttggcagtggccacggctcccaaga

SEQ ID NO: 23477 - DNA, 1102 bp, Homo sapiens
gtggcatgatctcagctcactgcaacctccacctcctgggttcaagtgattctcatgcctcagcctcccaagtagcttgaactacaggtgtgcaccaccacgcccagcaaatttttgtatttttagtagagatgggctttcactgtgttggccaggctggtcttgaactcctggcctcaagcgatctgcccaccttgacctcctaaagtgttgggatcataggcgtgagccaccgtgcccattccttttttcctgaacattttccaagtgaggttgttggaaatcacggatggggaactatgcatgcggagggctgactgtaattgatttctttctgcctcctcactaatctgcacactgcaggcagggacctggtctcatcatgcctgcacctccaagcactgccctcttacactgtagtctccccattggtcagcatggttccatgaaggaactccattatcacagcaaggactgacctcacactggtggctccaagtcactgcccaaacattctgaagggagtagaacttcttgattcctcagataaatagaggacagatgctggactgtagctaagtatttcctttcatctacgggataaaatactgataatttgagagtgatggacaaggttcagagtggtttcctcattttgtttttgtttttaatggaatgccaacttcatttatgcttgccgtatgcagatggactccatcccactggaaacataacaggcttaccaggtagcttcaaccactggttttatgtgactcagggagaattgaaaagctgtttcaggggagataaaaagaaggtaattacatttcaccgcaaaaagttttcttttcaaggcagtaaacggtcacaaccacccagaaacatcaccaaagagcccaaagtgttctttcataaaacccagttgcctgggattcaaggggctgcctcgagatccacgggtgagtcattgaattcctcattcagtggagtgagaatcgtagcctggagtcctcttatctgccatgtgaatgtgtactgtgtgcttgctggtagaaaggtccataaaatagagtataattagataaacatttgcttggaaatt

SEQ ID NO: 23478 - DNA, 1035 bp, Homo sapiens
ggaaagtgaatcacagggagcaccgcggggtttcaggattttggctgtccgctgcccaagccttggcatcacgggcgtctttccctctcacgttggggtcccttcaaggtcggcgccaggtatcctcccagaaaacctgcacaccgcaacgcccagcacccccacagcctccctgctgccactggggggcgccatcgtcgcggctaacgcaacccgagggcggaagcggtggagcgccgcgccgcggggttttctgggagatgtaggcggtggaagcacactcatgcgcagcaacggcgccgcagtgggcgctcatgcgcaatggagggtccggcgtccgccttggcgggtgggagtgatgacctgcactccccaaaccactgcgggatagaacggggccgagtgctctcaggggtggccgctaccggggcggcccgagacacggctgcgggttccagccaacaggcccggagtcgcggcctcggctccgccgtgggtgcacgggctagggctgcggggactcctgtgggctccgcgtctgcggctgggaggaatggggatcgtccccagatcccgccttccgggcagggcctccgctgcctgcgatcctgcccacagtccaaggatcctcctcgcctctcgcggactgcggtgtcagccgcccgagccgttccccggacacctggccaggtgacggcccccgacctccgcctggggcgggggggggggtggtctgcgagtccccctcacccccagcagacgttcccgagctcagaaggaaaaaaaggacgaggaaggggctgcttatgagtgtgtcggtgttgatttagtagttgtggaatgtgagccctggggaaataagtggaagaggcatggaccgtgtggctccactggggcgttcgcgaatgcctcctggaggaggagaccaaccagaaagaagaggcagcgtccagcaactggacaaaggccagagggcctttctggcaagaggactggggtgagcagaagctgatccggctctttatccctgggcgc

SEQ ID NO: 23479 - DNA, 1050 bp, Homo sapiens
actttgaggctttttttcagtgagcaaatgatattcattggtaataaaaaaatggctaacaaggaaataactttagaggatggtgtctactatcttagttttcagaagtaatctagataaaatgttaaaatgaaagaattgagtaaatgaaattgggataaatgttttaggtaaactctttgtgtaacttaaaatcttaaaattgtttttgatgttcattggatatctgggtcatttccaattaagaaaggattatgggttgggtgcggtggctcacgcctataatcccagcactttgggaggccaaggtgggtggatcacaaggtcaggaaatcgagcccatcctggccaacatggtgaaaccctgtctctactaaaaatataaaagtgagctgggtgtggcggcacgtgcctgtaatcccagctactcgggaggttgaggctggagaattgcttgaaccagggagtcagaggttgcagtgagccgagattgtgccactgcactctagcctggtgacagagcaagactccgtctcaaaaacataatgataataagtaaataaaaaggaaggattatgatacggggaaatatgtttctaaaagttgtggaattcttctcatctataaaatgctcatatctaatagttcaggatttcttgctttttagggtttcactaaaatttaaggttactaaggataagaattctagttaacaaatgattctgtatacaaaaggtgccaaaaaagatgtgctattggtaagaaagaaatgattttgtgtagttcagaggttgtctaaaggttgattcaggttgttgacttaaaaaaaagggttatttatgaaacaaggtagtaagaaaccagtaagtacgggagagagaggtgaagaaagttatgtatatgaagatgtattcttggtagggaaggatgtagcaataataattttgtatgagacaggatcctgtatggtaaattcttgccctaaagttaaatgaatggttgtttaaagagggatgtttaggacaagtcagaaagtccaggcatgtcata

SEQ ID NO: 23480 - DNA, 1026 bp, Homo sapiens
tcagttgatccaggctgaggctgcagtgagccatgactgcgccactgcactccagcctgggtgacagagcaacagcctgtgtcaaaaaataaaaataaatgcggccgggtgtggcggctcatgcctgtaatcccagcactttgggaggccgaggtgggcggatcatgaggtcaggagatcaagaccatcctggctaacatggtgaaaccttgtctctactaaaagtacaaaaaattagacagacgtggtgacgggtgcctgtagtcccagctactcagcaggttgaggcaggagagtggcgtgaacccaggaggtggagcttgcagtgagcagagatcataccactgcactccagcctgggcaacagagtgagactgtcttaaataaataaataaataaataaataaataaatatgcagacatggcctcttctagtctccccactactgtcaatttacatttttttcttttaggaaacatgttgctgagtggaccaatttaaattatgtgcttgtaaccttctgtgaacatactacttgggctcctgttttcacatcccctgataagtattttccatattaacatgctgccagttctgattacaatcaaaccaactgagcaacaaagttaaagcacaaccgaatccctgaaatattcagagtccaatattttgttgtttttggagacacagtgttgctctggtgcctaggctggagtgcagtggtgtgatctcagctcactgcaggtgagaccatcccccccacccccaggctcaagtaatactcctgcctcagcctcctgagtagctgggactacaggtgtgcagctccatgcccagctaattctattttttgtagagatggggtctcaacatgttgcccagactggtctcaatctactgggctcaagtgatctgcctggccgctcggtctcccaaagtgctgggattacaggcatgagccattacagccagctcagggttttttgtttgtttgtttgtttttttgagacacagtcttgccctgt

SEQ ID NO: 23481 - DNA, 1049 bp, Homo sapiens
tgatgcaggagaatcacttgaacccatgagtcggaggttgcagtgagccgagatcacaccactgcattccagcctgggtgacagagtaagactccatctcaaaaaaaaaaaaaaaaaaaaaaagaaagttagctgagtgtggtggcatgtgcctgtggtcccagctactcaggaggctgaggtgagaggactgcttgtgcccaggaggtcaaggctgcagtgagccatgttcacactacacttcaccccgggtgacagagcgagactctgtctcaaaacaaacaaaaacaaaacaaagttttacattttcctgatatttaaaaataaatatcaggctgggtgtggtggctcagcctgtaatcccagcaatttgagaagtagagaagggaggattgcttgaggctaggagtttgacactaggctgagcaacatattgagaccctgtctctaccaaaaaaaaatttaataaatcattaaaaatatcctagtatttaatctggaatttaattttgagtgtgtgtaaagtggaaatctgttttcttttgtatgggggagttcagttttctccaatattcagtgaacatccaccctgtcttcactgattggttgagtcatttcatgtatatcaagttccaaaaggtctgttcctagattgacctagttgtccactcctgtgccaataccacaatattttatttttttgagatggagtctcactctgtcacccaggctggagtgcagtggcatgatctcagctcactgcaatctctgccttctgggttcaagtgattctcttgtctcagcctcccgagtagctgggattacaggcgtgtgccactatacccggctaatttttttttttttttgtatttttagtagagacgggctttcaccatgttggccaggctagtcttgaactccaacctcaggtgatccacccgcctcggcctcccaaagtgctgggattatacacatgagccaccgtgcccagccaccacactattttaatattatataacttaacagtgtttttatttacaatatgacaa

SEQ ID NO: 23482 - DNA, 1067 bp, Homo sapiens
ccgcttgaacccaggagatggaggtttgcagtgagcagagaacacgccattgcactccaacctgggcaacaagagcaaaactacgtctcaaaaaaaaaaaaaatacaaacaattagccaggcatggtggtgcacgcctataatcccagctactcaggaagatgaagcagcagaatcgcttgaacccgggaggcagaggttgcggtgagccgagatcacaccactgcactccagcctgggcgacacagcaagactcagtctcaaaaaaaaaaaaaaaaaaaaaaaaaaaaaaaaaaaacacacacatggatgcttattctccaccctgttccacatctggcattttttgtgcatcttccaacttaagtacacagcagcaagtgctctacatctttgggtagctacacagaaccccactgtggctcactgtggacacaccattgaaaaccttgtatgtaggtcacttagtacaaggaggaacacaactgttgaagaagtacctaaaaattgaattacttgaacaaagtgtgggacatttgctgttttgatggattttaccacactgtcttcccatttatgcttaccagcaatacataggaacacttgggtccctgcagtcagggtgtggaaatggcagatgagttcagccctaaggtgcatttttcttactaggaggagatggagtgtattttatgggatataagcattagctacatttcctgtcctgttcacatcctttgcccatgtgtctatgaggttattgatctttcttactgatttattgtagctctttacttaggaggttaattagccttttgcctgtggagagttttttggtttgccatttgtccttttttaattttttttgttttttggccatttgtcttttgactctgatgtggtttttgctgatttcctttgatgtattctagtttatctgacttttctttggcgacttatggactttctctcaccactaaaagccctcactgctctctcagtcttcttgatttaacctcctccaggcttccgccttctccaggccctgattctcagttggagttgctg

SEQ ID NO: 23483 - DNA, 1084 bp, Homo sapiens
tcaaattaggtcattctgtcttgattttgatatggatgtttcagaacaccctagcagatgtccctgtttaacttgaaaccatagatcagaaaactaagttcatatttcaattttacagagatttgaatagaaaaagtaatcaagttaaaacctgcaaagctaaaattgaactacttgggagctatgatccacaaaaacaacttattattgaagatccctattatgtaagtacagttcacgttttagggctaatatgaagacccaacacatttgtatcctgccatattaaataacagatgagattgtgttaaggatgtttttgttatgcaggttttgccattttcttctttttcctgtccatttaggggaatgactctgactttgagacggtgtaccagcagtgtgtcaggtgctgcagagcgttcttggagaaggcccactgaggcaggttcgtgccctgctgcggccagcctgactagaccccaccctgaggtcctgcatttctcagtcggtgtgtaatcacgttccagggcccaaagcccagctctttgttcagttgacttactgtttcttaccttaaaaagtaattgtagatggaaatcagttgtgtttggcaggagaatcaataaaaatctttgattcagacagcttatggggtattttaagcattcttagactagttgaacatctcactttgccccagttacaaaaatagtagaacaagcaacataaaacaatgaaggaaaacctcacttgaaggcccaggtcaacatctaagcctgttgagacttagataatcgagtctacctcttcagtaggtttgtgtggatggcctggagggcaggtgccctctgctccccagtgctacctctctcttccctagggccttttgtggattgacagtagtcccctccgtaggagctcacagtctagattagaagtgttttaatttctacacacccatagtgcacacttgtatattgaaaagatagggaagagagaaacatttatggaatcagtcgttggcaccttcaatacttcatgatttttgtcgagtttacttcatgaggaggtcagcccattg

SEQ ID NO: 23484 - DNA, 1017 bp, Homo sapiens
tgggtttctgaaagaagcagcgtggacaggactcccgtgggcagggcccctgtcactgtgcctgggcagctatctcttctcttgtgctcactcagcacctcgggttagtattgaccgtggccctcattcaacactgattgtggacttggtcactttgtaactgagcctcgcctagaatggaagtcccaaggtgcagagactgtgcctggaggaaactgtgagacactaaaaccccatcccaaggagggggaatctgtgcaacaaatggtcaggatgaagcagaggctctcttccatagaagctgcggaggtagtggtcaggatgaagcagaagctgcaggggtggtggtcaggatgaagaagctgcagaggtgatgtcaggatgaagaagctgcagaggtggtgtcaggatgaagaagttgcagaggtggaggttgggatgaagcagaggctctcttctgtagaagttgtggaagtggtggtcaggatgaagaagctgcggaggtggaggtcgtgatgaagcagaggctttttagcagaagctgcagaggtggtggtcaggatgcagaagctgcagaggtggaggttgggatgaagaagttgcagaggtggaggttgggatgaagcagaggctctcttccatagaagctgcggaggtggtggtcaggatgaagaagctgcagaggtggaagtcgggatgaagaagttgcagaggtggaggtcgggatgaagcagaggctctttagcagaagctgcagaggtggtggtcaggctgccccatctatcatcacgctctgatttaatcaggtgctgcctcccacccttcctgcccaacttggtgcctcctgcatgactttcaggggggctgcgaagcaggtgtcccagatctaaccctccgaaatagtcactctccgccctggggccagaatcgtgtttgcagcctccagcccacctgcccttctcctgttctgcactcagtggctcccgttgccccaggatgaactctgagctcctaagt

SEQ ID NO: 23485 - DNA, 1065 bp, Homo sapiens
cggtcctctcttgagagtcggcttttactgcttttgtggttctgtaaagtccgtagcttacggttggcaggaaacattgacgggcggctctttgagccagcgcttctgtcattcctgtgcacactcagtcctgtgacctcccagtgtgggacaaagctccactcacgtctgcattttggggtggaatttaagcaccgtctggactaagaaatcattgcagagacgttcgttcccagggatctgaatgaagtagaaaagtgcagatgctcagggatgattcgtcctgctcttgagtgacaccaggtctttctcatctttgactcaggaggtgcagcccacggtgtgtgcagcttagcacacctgggcagggcacaatctgagggcacacggaggcccattaacaccagccgtgtattcagtgatcagattttatgtgggaaacatttcttgaccaccatttaataccattcactacactggaaaaaagaaaaaaaaaaaccttgctgtggattatgtgattaaatgataactttcaaaaacatattaaaactttcaaaaatgcattaaagttggaatgtaaggcattctattgaccaataccaaattctactggtttataaccattgattttgattccatgggctttgagatagcctgttaggttattgtcaatttagaggaaacctacatggttatgtcattagaaaggtggatttggattttaaaatgaaggttgatccctggaagaggacctggaggactgttgaacacaatgtgtgtttctcaaaaacgggatgattgctcagaatgttctccatgtacatggcgcccattctgccagtcacccagcttcatagaggttaaatcggaagcataggcagcagtgggtggggccgtgccacgctccatccccagcaccaactgggaatacaggcggcatttccgttggaatcaccccatcagtatggaaagacacaggaaaccaaagctctgctaaatggaggtgcaaggcctcgaggccatgacagtgacctcctggacacggaagcctgtgatacaccaagg

SEQ ID NO: 23486 - DNA, 1033 bp, Homo sapiens
gcccctaccccatgctgccctgaggtccctgcaggccccaccaggcacaccctattcatgagaggggggcccctgccccacgctgccctgaggtccctgcaggccccaccaggcacccccgattcatgagaggggggacccctgccccacgctgccctgaggtccctgcaggccccacgaggcacccccgattcatgagaggaggcacccttacccccacgctgccccaggatccctgcaggccccctagtctagctggatccaggaaaagctgcccctggcccacactggcaccaccccctgttcctccccaggcctttggagaagaacaggctcttctgaaagaataaaagcgtagagctctgagatggggaaaattggaggatgggacacagggaacttttgaggattcttctaaagtctgtttttggtctgagagttggttggccaagagtatggaatacatgactgtttatcgaggtgttcactggtgagttgtgtgcgtgtgtgtgtgtcctgtagctcaatgtaaaatatgcctaaaaataatagtctctgacctcttcatgtggggagccagggaacttggctgtcgtccgcaataatctacttgacccagctgtttattaaccactagattaaggtcagccttgctttgtatatgtcgcaccagttaacatgaacaaatgagaaatgatggcaatgaacccatttttagttagcacttactttaataagaattaatggatacttggacaaaagtgtagatataagtctgtcaatatttaataagcacctaattcatgtggaatattacacaatctgcctaaaatagtctcccagcattttgaagtgtaaaaattaatttattatagcagacatccaggaccaaaggccccacgggaagcgatggatcctgagggacaggtgctccccaggaggaccaggaaaggtgatcagaaagggctgtgcgaaggtggaggcagagctgcctgccctccccatgcaggggacctgcttcctctggcttctt

SEQ ID NO: 23487 - DNA, 1084 bp, Homo sapiens
ctttaaacaaccccatctcgtgagaactctatcatgagaacagcactagggggatggtgctgaaccacgagaacccaccccatgatccaggcacctcccaccaggccccacctccagcactgggaatgacaattccatgtgagatttgggtggggacacagatccaaaccatgtcaggtaccatgtaggtaatatacaaacatgtggatagacacgtacatgcatgcagatacaacatatgacatacgtgtacctgtgtatgtatctaaatgtttaaaaattaaggaatttaataaaaaagaatagagctttacacctgagaagaagctgtccacccacaactctggggctccgtgaggaaaaagagttcctctccaaaaaagagttttgtggcaccaattctggtttcctcaagaggtcttagggctgttagaagatttttttaggtcctctcttgtggtattgaacgggacaggagaaagaaggaacagaaagaagtaaatgaaggacagatcttagaggagacagatggaggagctcttgttttccaaaaagctaataaagtttcacattatccttggcaaaaattctatcaactagtggagaaacacacaaaatgagtgcattggttagcaggggtttaagaaaagagggactctgtcaccaagatgctttcatagaaagaacagaagcctcaaaacgtgtgtatccacacacacacatacacacacatgcacgcacatatacacacatacacatacacacacagatgcatacacacacatacacatgcacacgcatacacacatgcatgcacacacacatgcacacatacacacgcacagattcacacatgcacatatacacatacgcacatacacagacacatttacacacccacacacttaatactagctttaattaaggttacttttgactacagactcttaaaaaatccttttataaggtattagctgggcaattagcaaacattcctggtttttttttcttttttctttttggaatttacagaaagagttttagaagtgggacatatttgtttattagagatctagggtaatca

SEQ ID NO: 23488 - DNA, 1031 bp, Homo sapiens
tgtgtgatatgtaatgaatgcactatatgtagtactaattacctgttataatgaaggcactgtatagtaccgattacctgttttaatttgatcctaaggaaggtcaatgtgcattttgaggcattataaaaatatagttgatattacctgataacctttgagttagcgaattttaatttcacatcagtaaggtactgttttagagcagtgcttctccatctcagcatgcacaggagtcacccagcctcttgtggagggcaggccctgatgcagcaggtctgggcagggcctgagactctgaagttctaacaagggcacaggtgataagactgcagctggtcagaatgtacctttaatcaagtattaatattactctttcagctacagctggccactatatttaatagtatttctgagaaaaaaaatacatattttaagtctcaatttgagatcccaagaacacagtccttcaccccaaagaaatggatctgattttatcttttttcatgtggcaatccccatatctgaaccatgctcattaaaaactccattttccatctaataccttggagacaccatctttattgtatactaaagaatatatgtattccctttttgtaatttacagaaaaatcgagtagagagttctatataccctcttttcttctgcacagtttttaataacatcttgcatttttattattaataagtataaaaattttgcattagcgtagaacttttattataattgataaaccaatagcggtacattgttgttaaagtacatagtttaccttagggctcactcttggtgttgtcccttctgtgggtttcaacaaattaatggcgttgcgtgttcattgtactgtcatgccgaatagtttcactgccctgtgtattaatccccccaccacccctggattaatacccccatcacccctggattaatctccccactacccctggattaataccccatcacccctgaattaatccccccatcaccccaggattaataccccatcacccca

SEQ ID NO: 23489 - DNA, 1033 bp, Homo sapiens
ctcctcccacgcgccctgcaggctgtctccctctggggtcgagagagcttcacagaccatttgggaaagagccaagcaaacacacttctgcaagccatttgcataagtagacataatccatacggaatgatgcactgttcggttgtagtttcattcgtcagtgacctgcatctgcccgcccagtcttgagttcagctccatccctccctgcagttccgcagcctccggcttccccacctcagcttggctgagagtttcacgttcatccaagtgcttctttacagactcactcccagctggaggaggcagagggtaaggtacattttcgtgcactccggaaaagaaacgtattcaacaatgtccatgtagcttttgcttctctattgataattgctaatgtggtagtgagagctttgtttgtaggaagagttaatatcttttctaaaagggttttttgacagatggacattcttcagttttgctgtcttatttgttaagcaaagttagaaacataagtgagaacaggcgtggctggcctctaacactgtcagggccaggactcagggcctggccacccgcacaccgacagtggccagttattgccatcaccgtgcctgacccagagggtttggttgcccttcttttctgctgcttccacagaaaacaaattgattgtggcttaatcagatgagatgggaatgactggcaggtggggagaagaaaggaaaggccgagtgaggatggccatccatcgaggccacttccctgctctttgccattgaagcccatgctcctggaaccccgtgtgtgttcagaatgtgcaagcagaagaagaagagggagcggaaagcactgggcatcagggctttccaggggaatgtcttgacctggctggcagtggaaattcacaccttcagaaacctctagagttcatcgtggccaatcctgggacatggacttaggaatgcccaaccccgccacccagccgtggcaacccgattcaaaaccaaatgcaccaaatgtgaactcgaag

SEQ ID NO: 23490 - DNA, 1033 bp, Homo sapiens
taggaatgatgagaaggaaatcattactttaattctgtgatatagcatgctagacacagttgacatgggcttggatttatctttgatttttatttttgctgtggattggaggtaaaaaaatgtaggtggattttggtgataacatcacaggttaaaatatcactgcagttgaagatgctgatggaaaatgatttatgaacttgattgacttacaggttatctggcataaactcaaatattggtagttgtcttcttgaactagatcttttggtattttgttagtctctgattagtatgttgttttacaaatgtgaactattaaatccctgtggactcttccctaaggatgagttgaagaaaaaaaaaatcctagtgttgcctgtgccctctaacatgtttaatttgtattgttactctcagtggatgaggaaactgatccaaggctgggataatttgctgattgcagctagtactagtagtgctaagaatgttttttttttaactcggtcttgttctgaaaaccactagaacacagtgttgggagtctggtaatgtgttattgtgtcgagctgtggtatgtggaaaggtaggtgccagcttttctagaacttgaattctatggcttagtactttgaaaaacttttaaaggcagagtggcataagaatttaggatttttttcccctaaatcatgacacttaaagagggttttggaaactcagttctgagaacctcagttaggaaatgagtataagaacagtcccagaggactgtccctcaaatccatagctttagtttccctcagtacaaacctctgttttccaaattttctcagacaatggcttcagtgtttctagtgggacctagtctgtacattgaaagccttcacactaagcctagctggtaggtcatagtgattctaccacttttccaatccggcttcctgctttcagatttattttccctattcagtagagctatctttatctaactcaggttaaatgctgaaattgatagtttttgggtatagcaggg

SEQ ID NO: 23491 - DNA, 1033 bp, Homo sapiens
ctgcctcagcctctggagtagctgggactacaggcatgcgccaccacaactggctaattttttatttttagtagcgatggggcttcaccatgttggccaggatggcctcgatctcttgacctcgtgatccgcccgcctcagcctcccagagtgctgggaccacgggcctgagccaccacacccagctggctgcaccatttcacattgccccctgtttcccctcatgccagcatttggtgttgggattttgttttagccaccttgatagacaagtcgtgatagttcactgtgggttttgtttgcatttctctaatggctaatggcgttgaacatcttttcatgtgcttatttgccgactgtatatcctctttagtgaaatgtctcttcatgtttttgcccatttgctacttgggcagtttgttattttcctgttaagttcggagagttctttctatattcccgacactctcctttgctggatttgtggctgacagatgcttcctcccatcctgtagcttgtctttgcattttcttcacggggtcttctgcagagcaaaaggttttaattttggtgaagttccattgatcagttattgctcttatagattgtactttgatgttagaatatcaaagaatgatttgcctagccttagatcctgaagatttttcttccattttttctaaaagttttgtaagtttacattttacattgaagcccatgatctattttgagatagtttttgtatgaggtgtggggcttatattggggttcatcttttttgcctatggacgtcctgttgctccacaccgttcatggcacatgctgtcttccctccactgaatcgcttttgtacttttgtgagaaagcagttgagtgtatcggtgtagatctagtttcgggttctctgttctgttccattgtataatgtcttagaattgggtagattgattcctcctattttattcttttttttttttctttttttttttttttcttttttttttttattttttattttttatttttattttt

SEQ ID NO: 23492 - DNA, 1080 bp, Homo sapiens
ggcctcccaaagtgccaggatcacaggcatgagccactgcacctggccaaccagtttttaaaaatcagattagagacaggcagatggatgcaggtggaggttggtcagaagctatcatgacaaacttgtccttactgctttatctttaggaggagaggagacgagggtgagtagtcatgctggttagtgagtctcgctctggggttttgaagcctgagcaaggtgtggtaaagacacactggcgtgccagcacatcccagcttggacatgtcacttgattctcgtagctgtgtcttcacctctagagtggacatagtgcccgccccatgtagggggagaggtgaaattattatgcaaataagtgaatgccgtgtacaaactccaggagctttcttaagcagtatgagaagagctggcagacctgcttagtgttaattctttacgagtactgatggagcacccgccttcttcctggtgctctgggggaccgagggttgggtgagatggagctgtgtcttctcagagttttcagccagtgggagaaagagcagactgctgtcatgtaggcggtgtgaaatgctttatgaaggaaacattcttccgccctcatctcagccacaatcactattggcctggaccgtggcatgggtggtcaggttatccccatgagctccaggcatgaagtccctgggctgcctactgcctcgggctcgtggctcgctctgcccaaccacctggcttcccgtcatcccctccagcccttcccccttgtctgtgcacctgctgaccctgtcctcagaacacttcttactctgtgcctggctacccctgctcagcagcttagcctgagaaccacccctcagaggggcttttcggatcttgccgtctaaattatggctcctttgttgaggttattgcctcattttattcttgcgtccggtgttgctaatgagaattcttatgtccatctgattctcattcacaggtatgcagtctttaaacctgtttttccctcctgggtagctgacagcattttctctttattcttggtgttctgtgatgttgctctgacatgtctga

SEQ ID NO: 23493 - DNA, 1035 bp, Homo sapiens
cccgctccccgtggtgccgcgcgccgcttccgagcatcccgggaacaggcgcatctgtgcacacacgcggattttttaaaaataacatatttctagacatgcctcctctccccccacccccatctttgcaaagcagcccggagggcggggtggaggggcggggcctccgagttaataaaggaagatgggcggagccggcccccagccattggctagctgggggagtgatgtcacccatatgacaccctgataactagttgagagagagacctcaactttttgcagaaggagcgcgcgcgcctgggagagctcggggtccggcgcttgcggtaggagccacgagccggagagaggggtcccgggctgcctcgaccgccgtcgccaccgcctctcctgtcgcgaccgcagctcccaccgcgccggcggccgtcgtcgccgaagccaccacagccgctgtgtgcagcctggaagggggggcgggggggagggggggagccgcgaaagcggggtgccgaggactttgcaacttgcccaggaaggtggaggggtgggagggggagggggacctccgcacgagacccagcggcccgggttggagcgtccagccctgcagcggatcatggtgcagcaggcggagagcttggaagcggagagcaacctgccccgggaggcgctggacacggaggagggcgaattcatggcttgcagcccggtggccctggacgagagcgacccagactggtgcaagacggcgtcgggccacatcaagcggccgatgaacgcgttcatggtatggtccaagatcgaacgcaggaagatcatggagcagtctccggacatgcacaacgccgagatctccaagaggctgggcaagcgctggaaaatgctgaaggacagcgagaagatcccgttcatccgggaggcggagcggctgcggctcaagcacatggccgactaccccgactacaagtaccggccccggaaaaagcccaaaatggacccctcggccaagcccagcgccagccagagcccaga

SEQ ID NO: 23494 - DNA, 1930 bp, Homo sapiens
aaacatttttcctgtcctttttttgtcccccctcccttcctttatcgtgtctcaaggtagttgcatacctagtctggagttgtgattattttcccaaaaaatgtgtttttgtaattactatttctttttcctgaaattcgtgattgcaacaaaggcagagggggcggggcgggggaggggaggtaggacccgctccggaaggcgctgtttgaagcttgtcggtctttgaagtctggaagacgtctgcagaggacccttttggcagcacaactgttactctagggagttggtggagatatttttttttcttaagagaacttaaagaactggtgatttttttttaacaaaaaaagggaccattgcaacttttgttaatttaattttttttttttttttttttttttttttttttggagggagaaaactgatgtcttctatgcatccgattcttaacaaaactgcagggagcttgaaaaaatgcagactgtacaaacgcttacaaaaaaaaaaactgtgaactgacttaagatcagagtttacttttcagatcaaattgtttatggttttacaaatgtgatttctacttgccaactttttttttgtaacttgttcccttatacctccttgattgaataccagacagcctagacctcagtacaaaaggtattgaaacatttttgatacataacagacctcagtcttttttaaaaattaatatattttcaggcgtatttttgtacagtgaaaagggaacattcttgctgtgttttttcagtaagactttcaggcacttcttcccttttgatttcttttttttcctctgttttttagcatgcaagtatgttggtacgttatgtcctggtttaaaaaggattaaaattttaaaataatccttgcatctaaaggccttgtggtttaaaaaaaaaaagcaaacttttttttgtacagctatagtagagatttgttcaatatttgtaggtaaagatttattgaaaatggtgatatagacctcagagctgttatcttagtttaaagattgtatatgtactgtactatagtaggactttatgtatctcatacgctgtgatgtggatggggccccagatggaaggtttgaaactggattctcgatttttagcaaaaaagaaaaaaaaaaggcacatagtttaaaaagtttctcattttgtgcaatataatctaaataaagtacagaccatctgcatattttgtagcaaatggtggcaaagcagactcaatgcactgtcgacatcattgcctgtttttttttttttttttttgtgctggaagtctgtatcttgacaattttaataaatcagctggaactgatagaaactcgcatcgccaatagtctctatggaagtcaaactggaggtcctgttgtcgcagagcattcggtggtgaggctgttgtgtgcgcggatgaggggaggtggcaggagagaattctacatttagggggttaggctgaaaagtgttcaattagcaggctgatttctttttcctcttccgctagttgtgaaagacaggggaagggtgttctttctctctgccctccctttccatctccagctccccatttcctttctcacctcctcctccactccctgcctcttctccccacccatcctggcgggcgggctgcgcggaggctcgggagctggccggggaggggcggatggaggggcctgggttgccagctcccttggtcggggtcctgctcgctggggcttgtgtgttctctgcggcgggccgcgtccccgctgagcctcgcggtgacagccgcctttggcagcgagcgctcggggcacttctatccccgcctctcaaagggtggggacagccgtttccagatttgaattttttctgttctttatttttaacgctgcatcttcgcgtgtgctcagaggtgg

SEQ ID NO: 23495 - DNA, 1031 bp, Homo sapiens
ggggctgatggcgttaaccaggttctcaatatagaactggatttctggagttgtttaccttaccccacaccccctcaacatgtagactaatgcagccattggtggtacatttattttagccacggataattgaaccagcggtttacaattgacacgtgctccgtgctggtgattttatgtggcagccctctgctgcagttccgaaacttgttggcaacgtaaacccattgataggctgatctatgtattttgaaagcctgaaaacttggcatgtcttttctgttttaatcatagatgaatcttggacattttctgtggtgaggtggaaactttaagtaaattagtaaagtaataatttggcttcagaatgggaagagatagtcaagattttttttttttaaagccatgtggcctaacttgatacaaaaataaaagtaattgtttggcaatctaaatttaaaacctgttagaactcaggacaggcgcttcaatgcgctttttaacaatatttaaggctgttttgatgagtgcgttgtgagaatcatcttaatgaattctttattgagtgtctaaaacatagtataatacacatggtattcttgccactggatagtcttcaataaaagtttaattgatttttttttgttggtctcttaagtaagtcttatttttaactaagcattgacagaatatcttaaaatggtaacctgggggtggcgggtgggtgctgtgtgcacggcagcctagccagtggggatcctgctgtttattataagtagttcacagactctgatggcattttggtaagctttccatctttaagaaattgaaccagcattctcttattaattctttaaactgtggaagtaatttccagttcttacactctgatacgcatcccttttatttaaaaaaaaaaaaaatgctaataaaaggcagtgtacttaaactgtgctttgcaaatattgtgtatgttatgaatgactacagacactgggcaaattatttgtagaatgattatcctttagcta

SEQ ID NO: 23496 - DNA, 1051 bp, Homo sapiens
tgcatttgttctgtgacacctttttttgaattgactgttttaaaacggaggcctattttttccggtttgggactcctagtggttatggcatcccataatgcttcgtgacggccaccaggacagaaccacctgatgttttagagcagttttcagcatgacactgttaacaagtgtgtattttccaaggccacatgaaacttactttcttagccactccaggtttgggagcagaaaagctgaaaaacccttttgtgtagaagtctgagtggtttgtgggggggaccttttttagagtttgcatgccagcgcacggcctattgctgtgaaacagagagaaggtaaagctacctgaggcagtgcgctggaggatgaagtgtttgatagcactaggggggaaagaaaatgcatggcaaagtttcgtcttctcgtagactatctagcatgcagagtgtagtgtgttgaaacggtgtatgacattgctgtatcaaagttgtaaaattaagcattatttattgaaaactatgtatttttttgtaaaaacctgatcacatagagaatatcagtggcttgtgcttgtgcttcgatctaaccagcttcttgacccacccccccttggtatgcagtgttaatgctcagggttgaaaatagtacactccaatgtctcttttgcaagagtttttcacagaggattacatttgttcaaaagactctaataaaattgtgtgatcaatcttcacttgtggtttttatgtgacttttttctagttttgcatttgataactgctgtttaattctgaaaatgttgtctcaaaccagatgtcagggacaggcttgaagattcctgatgtctcagcacccagcacggctgtcagcctcggcaggaggaagaccacggaaagtgagttttctgggcaggttggagagctgctgacagtgagaatgagcatggtgattacatctcaatatattaaactggctgatagagggaataaaaccacagacaaagtgtagaggggtagattaacatgttttgtcagaaatgtctgaagta

SEQ ID NO: 23497 - DNA, 1093 bp, Homo sapiens
gggacagaaagcaaagtggagtgattgaaggacacagtccagtaactcagcagcctgccgtgccagagacagaacagacacacggacaagggcaagccttccttgctttcctccccgacacccaggtgaccacccagtttgggaggaaaacagaatattgcattttaggtagagcagctgattaaagttctcgggccagatgtcttagtgattcatggtgctctcagcatagaccttgagcaataacccatgtggcccactttttcgttcttggtggagcgctggctccttctgggagttacaaatgttgggctgtgactagcaccttgagctaactcagtagcctctctcctatgtcacggtgggagtgtgtgggacgttgaggtacaaagctgaagaaggttcagtgttcatgattctgggggactgtccacgtgaccgtaatctatttcccagagggtcccaggctggctgccttcccaatcagacagttgcttctgtgcatcccgcaggaggaggcagaggaggacatgggcctggtgtctcacctgcaaggtggcagtggggtaggctgtgcagagatcaaggttgggagtgggccctgctgaaaggagcttggacactattccaaagcttctcttttacccaatggctccctaaaagcttctcttttacccagtgactccctaaatggtgcattagatcatcttgcaggtgcagcgtgggcgtccagttactgctctccggggcttgctcccctgatcactctcttactgccctcagagcacagaacacgtgatgctcctggcgaagcacctcattgactcattccaaataaactccctcagtgagaggacagggcctctgcatccctgtggccaagtcacagcactgggggtgaggctggtgatctgatacatcagaagcgccctggcttgtctgcaactccagggagttctgatctcagggtctcatgaagccttgtaactttcacaacttgttctctcagtgggacattggggtatggccaggagtcagagactttaaaaaggaagcagagggattgaaaggcgggatggaagtgaaagtggag

SEQ ID NO: 23498 - DNA, 1051 bp, Homo sapiens
tgatcgttgaagggagatgacaagatcattttgataattttaaaagatggatgaataaggggactgtcctcagcactgagaagcagaggtcaaggatgaagtcgtacttggactagaattaggctaagttataagtggtgatttgatgcatgagatccacctttctatgtttgagatattggaggacatcttttctgaatcgtgccttgttccacagagagagactgagacctgaacagacaggaacataggtaacatcaggagtcctcaggtaacatgaacactaaatacctgaaaatgtatgtttgatttttacccttacgggccaagcaaggagtctctgggttgaaatgtttgtgtccgtttggaggtaggtgaatctccaatgatttggggggcatgaaagttaatatgcaacacattctgatccgatttaccttctgtgttggctccatcctgttccttaatggactgatgaacctctctcagtatcatgtcactttctgagctcgtagacattccttgtcacacaattaaattcctcgtgacttggttttctaagttaaaccaccttttcttgcctccttcttcttctcagaatgaatctgtgtaattggatgtgtgaggtatgcttagttgccatttacctaagtctgtttccaaaaatgaccgaacaaaagactattacaagagaagaggcccaaacaaaccctgtagttttaacaaatttccttttctcctcccttcttatctctctcactctcttttccactttcttctctcctctgtctttagctagttaattacatatctagagttaaaactcagggtttccgagtcatgtgtccttggtgtgcagtcattgggtgaggagctggggacgtcaaaaatgaatttaacgtagtccctcctctcaggcagctgcaaactagaagcaggcgtgggacacactgtatgcccaggagtggctttgcatttgagagccatccttctggcagctgtgcagggaatgggtcgacctggccttgcattttcctcactcccctcctgg

SEQ ID NO: 23499 - DNA, 1049 bp, Homo sapiens
atattacgcattgcctctcaaaagtgttagttcattgtatgttaccattagccatgtttattgctttctctaagactataaccaagttattacaattttttaaatgttcagttgattttataggtggaaaataagccctgtcgttctccacatgagtaaagcaggatgcagagagcttaggagatgtgccaagatcccagggctggcaggaggcaggcccagggctggaagccaggcctccttgttcccaggaagggaaagttgcgtatgccttttgagttaatgacacgaaagcacagacaactggacatggttcttttgaacatcgtaacatcaattcattgggatcaaatcaacactgagcatcagtattcagtgtttaatgcacattttaatttcactgcagagaggatcgcacctcattactagcggttattgagtcactactcagtaaatatttactttctacgtgtagtacattataccaaatagttgatattatatgggcataaaatgatctctgttactgggaaacttctggtgcaggagaagcggtaaaccttttattgctgttacaggagctttctcccaggcagcgagctttagagtgtccattaaactttactgaccaattttttatggagcacttcctctatgcttgcactgttataaattcttgggatagaatagtgaacccagcaaataaaaactactgccctcattggggtgtctattctggagagacaaaaagaacataaaggagagaaataagttacacagtagacagtattaagcctattgttttaaggagaaaatgaaagcatagatggtagtgagtgtcggggggagctgttggggagtttgcctttaagatacatcaccctggagtcactggaagtttccatctgggagacgtcttgtgaaatagtgtccttggtgggtatgtggtcagcttggggaacccatagaactgcatcacagcctcactcctcatcctcaacaggggctagtagaccaggagaggagaggaggtgtgggcaccctcgtga

SEQ ID NO: 23500 - DNA, 1073 bp, Homo sapiens
tcatcaggcctagttctttctcattttgcttctaagtttgggtttagaactgcaggaataaaaacagagtttgggcagctctccctaaatgtcttctgaagaacacttatctcaagagatggactcagaaatgatttgtgtggttcagtgggtttgctaatgacggacaccgcatccttgtccacatcccccactaccaaggcatcccaggtgcccaagagcaggaggaatgtaccaagacatccacagccagagacatactgtcacttacctgtgttccttcaatgtatttcagtgtgaaagggactggcctagcaattgctaatatggcactcccctgaagcaggttctccggggctttccttgcttgcagggtgcctggtggattcttcgtgattctctggaggtcacaagagcctgtgcacatgttccaggtgctgtgctaggccttgggagcttggggatgatgagagctaccagatatcttaaattgttccatttggattagtgtgaagtctaactttagaaggtcaaatgtaaagctgaacatttgtgtgcaaaatagtgacatgtaagtctaaccaacaagttctgtgctggagcactggccagagagaaaggattgtggacacgtattttgaaatcaggctgccgttacccaccatgagggccaatcccgtgttcgttttgtcaatcagagatgcaacctgtgtgtagagtgacctgggaaattccttatgggctgaaatctaaaatgtagaagatgttttaacttaaaatgggacatattagagctatttaggtctgtcttatacttgtggcatttgacagttacactgagaatgttaatatggtgttactgctggcagagttgtttccattcagacagctgctagaagtagagatgatactcttatcccaaaggtgggaacatgtgaagctcaaagggaggtgctgtggtcccatcccaagacacaggtccctagttatctgggaaggtagaaatgtctacatttctattagttcttaaaaaaaacagtctaatgaaagttattttttaatgatgacaagat

SEQ ID NO: 23501 - DNA, 1102 bp, Homo sapiens
gtattttcttttgtttgtatacatatatctctaaatttagatatgtgttgatgttgctgtaattttttaaaaatttttcctaactcaaagtggctgattcacagtgttctggttaattttttttttctggagtttctgtttctttgttttttggtttttgttttgttttttcatttaataccaagaaaactcagtctgtgaagtggagccgatgcttccagcatagccagtgctcctgggtctcccgtgggatccgtttgtgcagagtcctcacggcgtttctcccacagtgctgctttcaaaatggaagaagatgacgcgcccatcaagcgctgccccaagtgcaaagtctacatcgagcgagacgaaggctgcgcgcagatgatgtgcaagaactgcaagcacgccttctgctggtactgcctggagtctctggacgtgagtacggccttcagcttcaccttgcggcatttagctttgaggtttagatttggaatgagaaaaatagaccagctgtttcctaaagagcttggtgcctactcctgtgtaacagtgaagcaacaccgtttggtgtttctcctgggtttgtgaaaacattaactcatgagcgccatggggacagaagcctttgtgactcgtatagtcctggggtctaaacacttcatgcaggttcaggatccagcctgggatttaaaggggttttagcatcttaggttttgtctaagcggggactgtcattgtcagtttgggctgctgtgacataatatcatagatgaggcaggttaaatgacagacatttattcctcatggttctgggggctggaaatccaaaatcagggtacaccagatttggctccggggttcctgatcaggactccttcctggtgttcaggatagtgaggacagacagaagtgggggctggggggctgttgggcttggggccagtcttaagacttcattgacactcacatcatctacagggcgggaaaacgtgcaagccctttgctctctggcagaatggaagttctggtctcatacggcagccttctcctaagtatgctctgcttcagtgtttctcaaacacaccctaccgtgtgtgcc

SEQ ID NO: 23502 - DNA, 1060 bp, Homo sapiens
aaaaaaaaaaaaagttcacaaaagtgcggtgagacttggagcgatagtgtttggggaaacagagcagccaggagtgtcaagctgtagcaagcgacagcgtgcagccgtttgagtggacgcccaccctccttaggagccccagctttgctcggactcatctctgtctgccttttggaaatgagtccgtgtaaagagctcgcttctgccacctcctgcctagttttcaggcttccggcatctcccctgccctgtccttcctccgggctgctacggcactgagcgtgctcccaagtgcagtgctgtgaaggacacctggtagcaccaggtgcctttgtggcacgtgcacctgccaggctgtgggaaactcataagatcgcaaggcagggtgagacattagaagccaagaattatttcttgataattcaacaagctggaatattcaagaaaaatagtatgaaatgagtggcacctgaatcagaccataaaagtcctaaatactggatgttgcagaaagtgctttgaaggaggagaggacagtgtgagcggaggcacagaatgggacactctggggccggctggggagccttcgggagtgcagctgatgggaagttaggggcagagtcgtgattggccttggagagggtgtggtgtcttgctgtagacttaagtctgtatggcactagggagccagagaaggttttagagcagcagaataaaatgctcagacggggcataacctgaagacttctgctgagcctcttggtcctccacatttggcctcccttgtcatcttcatctctgcaaagcagaatctgccagccttgtggcctcagaggagcccgctcaggatggcctgctgttctgccttctccactcctgtgtctctctcttgccctgttttgttccttctccctgtcaagctatatccctcccatccatttttaaggctttgctccagctcctgcttctcccgttacgtgtctctaaagagcccaggccacagcacgtgctgagcagcgtctttggaatcttacttgactgcagcccacagggagacatg

SEQ ID NO: 23503 - DNA, 1169 bp, Homo sapiens
atggctctcttggatggtataagaataatagatgaggaagctactattcacctttcatgcaggagagaggttccattcatcatgtggagattggagttaagatcttacaatgcctaacaatcctggaattatcaaattctagttgctgtgcatcaaattgaatacattttagatagccataccatcatcataattgcttggagtgaatagataaaaattgaaaaaaatcttggtatattttctcatagaaatctgcccagggatcaaatgttaagcagagatttattagtggacacaatgtagtcagcaaagaggcagtagtattttgagaagcttcctggaggaagaggaactggaactaggtgttgaagggatgttcaggtttaaacgatggagtagaagtgaagaagttaatgaatatagcacttctgacatgtgccaggtgcttaatgtcatttaatcctcacaacatgaaagaggcaaagataactatcttctttttaatgtaagtactgacagtgtgccaggcaacagataagtcaatatgatacctgagatagctgccagggtaacacagagctcactctgaggacctagggacagctccaagagctgagacatgaacaaaaagtaggaattagatcagaaatgaagaaagagaaggaaagtaatgatcgagaaaagggtgccccaagccacgagggtaacatgagctatggcagtcggttgtgaaaccacaggaagtgtatgggggaactgaaaaaaaaaaaaaaaaaagtaattatcagaatgtttttagcttcttattctggaaaaaaaattgtttaaacatagaaatatctagaatagtatagaaaacttctacaaattgaacatcataactatcatcaaattgtggccatcaactctccatctatatccattcattttctagtccttatattctaaggcaaatatcagatatctatgattaatttctaaatatttctctaggtgtttctaaaggataaaaactttttattaaacatagctctaataatatcccatctaaaagagttaacaattttttatatcacatgtctctggttagtgtctaaatctcctctattatgtcagagatttttatattggttggttttcatcagaatccaataaaggtgaatatattg

SEQ ID NO: 23504 - DNA, 1035 bp, Homo sapiens
attcccgacgtccaggcaaaagaggaacatggcactctgacaactcaccccaaactcatttgtgtaaatatttttactgcacagttttatgtctccgagttggtttctgacttccaatgtcagcacagagctctcatgggagcctagcattcccaccaggcttcagctgaatatttatgaatgttccatagtagatattttctattgttcctggaagacttttattatttagagagcaattaatcatattctgagggaaaatggaggagccaagtcacatggcaagggtgatgatgttttttttaattccaagatgagcaaaataatctcagctaaggctttctcaaagatttgcttatttcccgtgtctatctgcacacatttctacgggccatgtttccatcacaagcagccagcttaaaaatagggcttaggcaagtcttctgctgtcagaattgcacaccactctttagggcctatgatttaggctgaatgctgaggcctagaactacatcttacatttactttggtaacgatggcattgctttttaaattactcaacacaagaatgagaaatagtttttagaggataatataaggagggatgaatactttgttgagtgcttattatgttctttagatatattatatgatagacattacctataatatattgtatgtattgtaaataatatatgagagcatttttcccattttactctgatacacagaaaagaggtaagagatgatgtgtgagtttgttattgataagtaactcatcattccaaaatccagttgcttaaaacactgagcatttgttattgtccctgagttgagtggtgacctgggcagttctaatctcagcagagataactcagccacctgtgaccagctcggggtgggctgggaacctggttctgctgattgaggctgggcgctcactgtgtcttgagctttggctggaacaattggactaatttggctctgtttcatgcagtttctaattaggtttggcaggaattgtcttcagtgcag

SEQ ID NO: 23505 - DNA, 1043 bp, Homo sapiens
ttcatttgatgggataagctgccttgaaactcctttacatgtggtaatctgcccctacatcctaataaaaagttcactgtataatcgttttaaaaaggcaaacgtgtggggacaatttacctcccagaaggctgtcaccctgtgacttgccatatggacctaggctttatacatcaagatccactgctatttaatgagttactgcctgatcagtattccagaatgttcaatacagtaattccaagaaaaataaagcttatttttttcctgcatttctatttttaaaatctcattgtttttattcttctacccatccatgtttgtattttttctcatttcattattatttttttccttttctgatggaactcatgacatctatgtgccatatttacaatgccaaaaacattacctcctttatttatcaagtgatacctatcgcatgaccagcatctgttttggctctgtagagagtagacttgaatgtaaagcattttccctgtgtgagatgttctgaaggtggcagagcaagactgctgcccttgcccgctacttgcaatgctgaagaaccttaagcatacttaagcagcacgtgctcttcatttcaagttcagatgtgtcacctcccaactaacaatatgtaaaactacattacaaggtatgaaatactttattttccttagaagttctaatgtgataacaatagcaagcatttatcatgagcttaatttataacaggtactatgtgataagagctttttatcttatctgaactttttatagataggaaatcttatccccttttacagaacaggaaacaggaccacaaataatttgtgtgacttacccaaagtcatactactcatgaatgaaacaactaaaatttgaattccaaaactgcttcataagaattatgcttcaattgtggcaaaatgaaacaaaatgagaaactcaaatgaacaagccacatgtggggttgaagttcagttccatccttaggtcagtgaccctgaaccagtgtacatttctaagttgactgtcag

SEQ ID NO: 23506 - DNA, 1035 bp, Homo sapiens
ggctgaggcaggagaatggcgtgaacctgggaggcggagcttgcagtgagctgagattgtgccactgcactccagcctgggcgacagagcgagactccgtctcggaaaaaaaaaaaaaaagaaagaaaaaagaaagaaataataataataataataataataataataataaggcatttcccccaaattctctgccaaccaaataaaaaaatggttggagttcagggagaattcaataaatcaaatgctagttcccctgtggctctttcctctttctgtcaaagaataacaatacagatgttgcttttgatagctctgaaataaattttcttgtttgtggtaaataagctcatctcaagaataggtcaaactccttgtgttaggttaggcaggagcattggtccaaaaaaaaaaaggaaagaagctgaattactatttttataattttgtctacagtgagtcccttcctacaaaagtggaactaaaatgttaccatgtgacaacttctggaattctccccacaggcaacaaagctgtcttttgatctttccttcttttctgccaagtttttgcagagtcatggtttgcattacctttgtctcagccttagtcattcttggtgtaaatgttattatacaatcccagcagattattgtcctgccagggccctcattccagagcactggctcgtatgctgatggtgttcaagtgcacctggagcttttttgtgcaaggtgctgagctcctcggcctctgattcttcagtttcctccagctgtagatagcgggctggggagcagtgccgactagaacaagtatcccacaccctcccttgatgcgatctccatcacctgcctatggggatgcacattcctcccactccctggttaaaaactagcactttgctttgcacacaggtcactgtgggctgccccgagctttcagagaacacaccccgttctggcaagtgtggtgcatcaggaatgtgcgtaggggttgctgctgacttctgctgcctttcagcctgcttgaata

SEQ ID NO: 23507 - DNA, 1031 bp, Homo sapiens
cttaccttttccctggttctaaggcaccagagaaacaaaagttgaaggtgagcaaggagcataaagtagaatttttaaaaagtatattctagagcaaagaaatccagggagagaccccagttcttgattctactcttcatcctgaggccatagcctccatttgtggttttcttctgttaccctttccaggttccccttgcatttaggcaacactttagccatcattttctgggtagggatcccaatcctcctccctgtcccgaatatggcagctcttttcctcccatatttagttgtgtaggttgtgcactgcaaaaatcttgagggcacctccactgtctgtggagctgcagtaactgctcatgccccttctccactgagtagccctccattccccaaattgtctgcatgtttgctgagtttcctgttgttcaacagcaaccttctttcccccggattaggggatcaattagtgcagccaatagcatgaactctattcacatcagcctaacctccaggggcttaaagagccccagttggccttgtggctgtctcagggttcaatttgatgacacagttcttgtgtcccctgccagagaggttcctcccttggttgaaaactcttcaacatggaccagaatcctggagatgagaaacaaacatgtagagatgggtcattcgacataatgaggggtgctacaaccctgagccctgcatattgtgccaatgaggagaaatcccataaaattcagaggaaaaatccggttacttgtagaaaactggccacaatagccaatacacagagttataacacagagtgatcagggccatggaagaatctagagcgggggttctatgtaatcagacatgagattttacaaatagatctgtgggcatgagagactggcaggtccaatgggcagaggaagcgaggtcttgaaggtagagtgagaaggggtcaggcagggagcagctttctcagcagggaagagcctgtgctggggcatgaggaactacgtgtggccaccggg

SEQ ID NO: 23508 - DNA, 1032 bp, Homo sapiens
tatataccacattttctctatctactcattgactggacatttggtatggttctatattttcgtgattgcaaactgtgctgctatcaacttgcatgtgcaagtatctttttcttttatatatatatatttattatactttaagttctagggtacctttgcacaacatgcaggtttgttacatatgtatacatgtgccatgctggtgtgctgcacccattaactcatcatttacattaggtatatctcctaatgctatccctcccccctccccccaccccacaacaggccccggtgtgtgatgttccccttcctgtgtccaagcattctcattgttcaattcccacctatgagtgagaacatgcggtgtttggttttttgtccttgtgatagtttgctgagaatgatggtttccagcttcacccatgtcccttgcgtcttcctttggccctatgattctgtgtacagtagaatctttattacttactgaaaacaagtaaatttttgagctggctcatattctgtgaacttttgttatttttttcctcttaaaattagttcccttttaatctgtaatcttgttttgaagaatttttttttctagtattagtaggtactcttaacatttttaacacatgtacttgatgttttctaataaaatttagagccaacaaatctctttttcatttttatatacagtgttaatatctttgcatgttttaacttccctcccaattctatctcccatcctctataatattgttgcctagaattttagttatatcttatttaaataagaaataaacttatagtatttactataaactctttggcttcttggttttttttctctactttatggaaaacatacgttaatagttcttgtttttcataaagatttgcagattatgaatacttccagtatgtgtgtgtttaaaaatgctaccgttctaatctttacctgaaataagaggtaagctggatataaaatcctaagttgaaaattgtttcccttctgtactttaagtataatag

SEQ ID NO: 23509 - DNA, 1050 bp, Homo sapiens
tcattagcaatgccattaactgtcctttttttcccccagcagagaggaaaagaacacctttataaaacaaaacattcataactaatgaaatcacaactgaaggacatacaccattaattacttagtgatcccagatgaatgaaggaaagcatttgctcttcagttgtgtgtaaaattaaagggagaatataccaggtgcttggggatgtgcagataaccttaaataaatacatccttaataaatctcatgatcaacttcacaggcaccttcccaggatctgagccgagcctctctcagggcttttggagtgaaactagaacatgagctcctctaccaggtgtggcttcgtcagagattattattgatcattcatttttatctcttggcataaaatacacatgaagaatggggacttgaatgtatgagtgaatgctctgtaacaggatgtgtttattcatttctttttcaatttacatgcaacaaaattcactctctgtgctgttccactttataagttttgacaaatgaatgaatgaccacgatcaaaatacagaaacgttccatcatggccccaaattcctttgggctggctctttgtcattaactccttctcccattcccaaactgattttcaccactctgcatttgtgccttttgtagattcttacgtaagtggaataatatagtctatagcctctttacttttttcacttagcaaaatgcatttgacaatcagccctttttattgctgagtaataatctatgaatgtactatagctttttattcatttacccatagaaagatatttggttttctcccgattttttttttccaattagagataaggctgctgtcaacattcacttcccggtttttgtgtgaacataagatttcatttctcttgggtaaatgcctgggagtgggattgatgggctatatagcaagcctgtgtctatgttttaaaaaattgccaaacaatttttaaagtggctctacaattttgcatttaccccagcaggcacagtgtataaaaatttcagttttttca

SEQ ID NO: 23510 - DNA, 1061 bp, Homo sapiens
ggaggaagtcacttttcagcaaaatcctgaatgtaaatacaatttccatggctgaaagttgggtagaagaaaaataaaaataagacacttgatcttagctaaaagtctgagaataaatgaaaaataaaaataataaaaggaaacttttattgatgctttattatgtcccagactgtgcaaagcacttaacaagcattattttacttaattgtcctcatagtcgtaggaggtacatactattccaatggatgaaaaaagagagtcagaagacagtgagagattcctaattagaatcactcaacaacaaaatgagcagcttttagaaatagtgagtttccactttttgtaagtagtcagactgtggttaaataactcagaaccaaaatagattgaaacgctgagtaggggatcgcacttcatcggatgtttctaagggctcttccaaccctgaaatattctgatattgaaaatgtatcctagaagatttatatagcaggacatttattatgataatatacttggatgatgactaatattgttataatgtgctaagatctgattaatctgagtaataataacatgttttggcaacaaaataagaatgcagaatgtctaaacatttgttatatcaaccaataaatttctatctcctgaggacagaggattgtaatgattttgacccagggagcccatatggttataatgagctcctattcattatgtatatattcagaaaaaatatttattgatcgatagcacaatcatttggattttaatagtagcaataataatagcaataatgtcctatattcagttgtccaaacttgtcacagcagtaagattttcatgtttctttttctcttatcatatactcactaaacattaaactaaattcaagggtcaagtctaaattctccatattaaaaatccaagtgtattaatcagggttctctagagggacaagactaataggatagatgtatatatgaaggggagtttactaggagacttgactcacacaatcatgaggtttacacccacaataggccgtctgcaagctg

SEQ ID NO: 23511 - DNA, 1051 bp, Homo sapiens
gagtagtagattgatttcatcttgatattgcaggtcaatcaccccagccaacattgtaactcccttcttcgcctgttttcttagaggcaggaggagcccaaagtgtccaggtggcaatcttaacttccagtttaatagaattgttgtgtcccgggtggcagcattcctccgcctggaactaagacctctaggccagcaggacgtaatttcatgggaacaggaagcaaaaatcttgctagtggatcactaggggtgatggtgagtggtgacacttccacttccaccccttgattcctggacctgtgaatcctggctatgggagaaatagtaccatatattggacacagattcagagcatacacagccttctgaagaagtttgcctcagccctgcaaagtatcatcacctggttggcgttgtaattatgacttcaaaaggctattctgccattctatcaatccagctgcttcaggataatggggaacatggtaagaccagtgaattccataagcacgagcccactgctacacttctttagccataaagtgagtgccttggacagagacaatgctttgtggaataccatgatggtggataaagcattctgtcagtccacggatggtagtcttggcagaagcattgcgtgcaggataggcaaacccatatgcggagtaagtgtctattccagtgagaacaaacctctgcccgttccatgttggaagagatccaatataatcaaccctccaccaagtagctggctgatcaccccaagaaatgatgcagtatcgagggctgggtgttgaactctgctgctggcaaactggggactcggcagtggcatagccaggtcagccttggtgagtgggagtctgtgttgctgagaccatgaataactttcatcactgccacaatggccactttgttcatgggcccattgagcagtgacaggggtggcttgggaaggatcctgagtggtgtccatagaatgagtctttctgtccagttgattattaaaatcctcctctgctgaggccatgtgttggtgaggact

SEQ ID NO: 23512 - DNA, 1096 bp, Homo sapiens
tgtgggatcccagacttccctatctgttaactaaagggctgttttcaatcaaataattgttacgagaagcagactggcgcctgtagcactgctgttggagatccaaataggagattgggttgggaagtttttcccttgagtctctgctattttaatgtttaatttgcgctgtcgaggcgagtgtgtgtgttgcatctggacgccagggtttgcccaatctttgagtgtttggttaaatgttcaaactgtggcttcctcccggcgccagtcgcccgcctctgcccttaggttacattctcttaaacatgcctttctcccccactctttcgcaggtgttcatgatttcttttattctttgcacaacaacaacaacaacaaattcacggaatcttttaagtgctgaacttatttttcaaccatttcacaaggaggacaagttgaatggacctttttaaaaagaaaaaaaaaatggaaggaaaactaagaatgatcatcttcccagggtgttctcttacttggactgtgatattcgttatttatgaaaaagacttttaaatgccctttctgcagttggaaggttttctttatatactattcccaccatggggagcgaaaacgttaaaatcacaaggaattgcccaatctaagcagactttgccttttttcaaaggtggagcgtgaataccagaaggatccagtattcagtcacttaaatgaagtcttttggtcagaaattacctttttgacacaagcctactgaatgctgtgtatatatttatatataaatatatctatttgagtgaaaccttgtgaactctttaattagagttttcttgtatagtggcagagatgtctatttctgcattcaaaagtgtaatgatgtacttattcatgctaaactttttataaaagtttagttgtaaacttaacccttttatacaaaataaatcaagtgtgtttattgaatggtgattgcctgctttatttcagaggaccagtgctttgatttttattatgctatgttataactgaacccaaataaatacaagttcaaatttatgtagactgtataagattataataaaacatgtctgaa

SEQ ID NO: 23513 - DNA, 1041 bp, Homo sapiens
tcatattttttttttttttttttttctgagacagggtctggctctgttgcccaggcttgagtgcagtggtgtgatcttggctcaccacagccttgacctcctgggctcaagcgatcctcctgcctcagcctcctgtgtagctgggactacaggtgtgccccaccatgcctgtttaatttttttttttttttttttttttttgagacggtgtctcactctgtcacccaggctggactgcagtggtgccatctcagctcactgcaatctctgcctcccaggttcaagtgattcttgtgcctcagcctcctgagtagctgggattacaggtgccaaccaccacacccagctaatttttgtatttttagtagagacggggttttgccatgttgggcaggctggtctcgaactcctgacctcaagtgatccacccaccttggcctcccaaagtgctgggattgcaagtgtgagccaccatgcccggtccctgattaatttttgtatttttttgtagagaaggtttcaccatgtcatggctggtcttgaactcctggactcaagtgatcctcctgccttgccctcccaaagtgctggtattataggcgtgaaccaccgtgcccagcctcccccttgtcttttctaacatttatggggcacttattatgtgccagatatgctttaaattctttacatatatcaattattaactcatttagttattatcaaaatgctataggggccagcaaaattaggccacggtaccaagttcatggagcttggaggtgatgaagccaggattcattcaaatcaagcattttgacaccagagtctgctatttcttttagcagccaacagcctctgtagagcccgtgcccaccaaggcccttggtgttgcagcctctgtggccagcatgccctcccttgctgttagtgttagaaagttgcagctattgcattgctcgagtgggtgcttctggcaaatccttgttgcttctcgtttcctgtttgcctcatctgtcctccttgctgcagaaattgttcttc

SEQ ID NO: 23514 - DNA, 1035 bp, Homo sapiens
aggagtaaacccatttgggagctgatagttgatgtatttttgttatgcttggcagagtgagcggcccccatcttcctgagcagagttcatgtgtgatatacaaatgaatggtctctttccatctggccgtcacagaggcaagaaactgtggtgcctctggatcattgaatttctcagactctcaagggacagcagaatgcgtatgtgaactggcatacccaaatgcaaattatttctggtgatacctaatatatgtaaatgtatgctgctcagttggccaagaaattatgaacggcactcttcctaaataatgctatataactgaaattttagttttattgtcacaatagtgaagtgtgttgatagtcctatttcctgtcaaatttctgtgacatttccagcagcttcaagcacccctcacgggccaactccccagaggtggaagatccggtatctcaggagggagtgctgccgggctccattccgaaagccacacctgccttgttaccacgtagggatctggcagttgaaggctaggggcggaaagtggacaatcaggatagagacaggactcggcagagaagcggagttttagtacagatgtactaaacatctgtacagatgtggagccccccccgcatcatcacacttaacttcaggaacaaagaaacccaacagatttaaagatagtagggcatacctgcagggctggtggcggggcaggtggccggtgctgcttccatggtggacttcgcagttgccctggggatgctgacccctggactggactttgctcagtggtgcccgccacagtgagcctcagccccacctctgttgtcttcaccctttgacctcacttgagcctggactgagggatttcccctgtcgatgaaccaacctgagtactgtgcatccagcctctcactgagctgggaaccaggggcagctacaaaggagacaggagaaatagccgtcccccttgggcactgctggcctggcaggagaggcccagcatgtgtctagggaggagcggag

SEQ ID NO: 23515 - DNA, 1049 bp, Homo sapiens
aaactgacaggcaactacagcttagattgcagggagtgagacatgctgttgccggagctctggtgtcattggttcatagaaagcttgtttctctggccatggggacttgattcttagagggtaatggttcgaaagttgaattagtgagtgtaaatccttaaaaaagtaaaaatatgtttgtgcccttgtacagaggggctgccttgcccttctggaagaaggaattccacgttagacgtgttcccagctgcagttttgttctgtatctattgccagcaggaatccaaggatttcctttattatttccaaattgctgcctcttaggaatggagaatgctgccagtctgtgctctgtgttttttttgctcagtgggaccaaagtagttttgtggtagagagatacagagatacggctttgagacagtttgagtcatctaattactgtccaggagggctgggaggttaaccctggtggttgctttggtgatagtgatcgatgtctgtgtgacaattataatgaaggctggtattatgccgggactttgaagagtctatcagatagtgaaggaattgcgaagccgtactatgttgaggtctccagaataaacatcctcagaatggaaggtccagatgagaaggttaccttgatgagaggcctttatgctttttgtgctattttcctttatgggctctggtagttctttagtgttttataatctcttttcagagaaagctttttgtaaattcttcagattttactttttaagtaacacttacaaaagttgtatggtggcttgggaccaatacactttgcaggaaatgcagagatggataagaaatggttcattcccttcaggacctctcgttatagcttagcctatgtagtgattagagcatctgctttgaagccagctggacctggactcagatataggttttgctaattgatacctgtgtggccatgggcaaatatgctcatttactcatttgtgtttaacaaacacttatattgcacttactgtgtgccaggcagtaagtgcttaacacat

SEQ ID NO: 23516 - DNA, 1109 bp, Homo sapiens
tctctgtcccaattcagaagagccctgaggtgaggtaaagatgttagaggtgagtggcattctgtgtctgacctgtggctccagtgtgtggatccgtgggctggcgtgtctcacatgtgtggactggggtttccctcttccacagggaggtggtcagtgtgtgggaggagccatggctctggcctccgactgctggggtttgaatttagggtgagcacttactaacactgttagctgacccgctacctactgatcttcacacggatgagcttattgatggtgcacacagatgacaggtttagattgtatgctggttccttgtatttgttctgtttttaaaacctcagctcctctagtctttggtagacactcttatgttatatcttgggcaacttagttcctctttctggagcctcagtttccccatctgtaacaccagagagctggacttaggggaaccgcttgatatttgacaatactccaggcttttgtaaacaaattgtccacagctttgctgagctacagccacatccgcttgaaaaagcattgtcttaccagcctgtgcagaatccagatcactttcatccaccttcccatgggggctgctccatcccttgtcttactggaaatgtctttctcaagggtcttttctggtgtacaggtctccctggagatggaaaaccatagcactggtttaagtacagtgttttgtttgcatggggaggagaggctgaggcaacagcctgtgagttcaggagtaataaggtgtttgtttccctttttggccagtttttttttggtggcataatttacatacaatgaaatttaccctaagagtacactttgatgaatcttacaaatgtacagttgtgtaatccccaccattatgacctaaaacaccccgaaagcttccctcttgctaacctgactgacttggtggttctggtggcttttttgtagattgcctggcatttctacatagatgattttgtcttctgtgaacgctgtttgcctccttccttcctgatctgtttgcctgctcctgctttctcttgctgtactgtgttccctgggcctcccgcagcctggaggggtagagaaagagtggc

SEQ ID NO: 23517 - DNA, 1808 bp, Homo sapiens
tgcaaatgatgaccctgcccctactctatctgcttctccgccaccctggcccttcagaagattctgaaacaaggaattggttacccagggtggttaggggggttgtgcctgtgtccctggtgaactttagattcttgtgcccctggtgaacttcaaatgctagtgtgctgggagccgtatgacagccccttggggtggcaggagctggcttgtgtggaggagagccactggcagctttcttggtgaaggggtggacagcactcttggtgtggaagtagcagcccccttgcctgtagctgggctggggttagtggaacagggtttagagaaagcaggggtaatgccgggtggttattttccccaaatgttagagaaagccagcgcttctggctctggaagtgaggctgttgggaagtgggagggggagcacagctctggaagctgccttccgtcctccctccattggctggagctctcccagcatttcatcggttcaaagccaaacacatgattttggacaagtcacttaaactctttgagtcagtttcttctcctttaagctggggaaagaggtggtgatttcacaagtggttgtaaatattgcagtaaagataatggaagtaaaagtgctctgtggagtgtaaattgctgtatggtagttggagttgggccctaggtgtgattttagagtacacacctactgctgccttggtaacttaaaagtatttatctcaaatgctagtgagctgagctgagtggcacagtaggcctttctttccctgggagcactttgggagctttggaggttgcccagtgctgcccccaacctttaacagtgtggccgagtgtaggagggagggggcagagttccttctggctggactgccacatgcaggggagaggccccgctggtggtgtcccaggtgggagaggggcagacctggggttacctcagtcagggtaggtgaggaggggatgggtggacaccccggtggccactcctactcacccctgcacttaagacctggggtttcatgccctgctcctttaaccctcagtgttcaagagagaggccagttggaccagagcgcctcaccccaccatttgccatgtgcccctccccgtggggagtcagaaacacctgagcacaccaggaaaagttttgaaaaacaatgtttttagagacagggtgttgctacgttgcccaggctggactcaaactcctgggctcaagcgatcctcctgcctcagcctcctcagtagctgggaatgataggcgcgtgccatcatgcctgtatgaagttttgaaaaatttaaatgttgatggaaaaaaaaatgtattagtggaaatgaaaggctggtataagctgtaaagtctttttgttcttagagatttttttctcattctaaacattatcagacctgaaaagtatttgtcgtaatgactgagacggtcctggggtaacagcgtcttcttaacggccactttaattggcgtagtttacacctagcctctccgagaactggaggacactggtaatcactattagatattgagtgctgactgtatggcagacacataagcattggtgatctcctgtgaggcaggtattgttattcccaatttatagatgaagaaacagaagtcagtgaggtggagtccgtttttgaggtcacgcggctagtaattggagcctggtttagaaccaagtcagtctcattccagaatccagaaccagtgatttgtaactgatgcacttgtctccaaagggatccagcactgggttttctcatttttaatgcatcca

SEQ ID NO: 23518 - DNA, 1049 bp, Homo sapiens
ttggtttgagggacaccacgaggctgcatagagtcttcagcttctctcctgctgggctttgcattcattgcccagcaccgtgaaggaggacaccacggcccagctcccctcctttgtcatctcttgaaagacccatggctcagaaagcagcgagcgagggagtaagcaggaccatggaggttgcgttcctgtttctgtcatgcagtagacagtgtgtagtgacagatgcctgcctgtggccaccagcccccttcctgaacccaatgaaactaaactgcccatgtcttgaccgctaattttgagatagtttaaaaatagtatgtggtttgaaaggacctatccttcactgttaaccacactctagaattataaatagagtaaaacagaaggaattattgatccatctgtgaaactggattttaaaaatctaaaaattagatacttttgtttgacaaggtaaactttttaacgatgaaaacaaacatcgtgtagtagagtaggagagtggactttggaatcagaaaatttgggtttgaatcccagctctgccactttctgtgtttccttggatgaattatttgatctctttgagccctaattgcctaatagtgttatgagaaataatacatgtcttacgaagtttagaaaaaatatatgtgaagtttgtgctttgaataagtgacgcctgttgctgctgttacttttgttagtgttattggttatgcgccaagtgtggtaaactgagtctctttacctgattctttcattcttcctctgaccttgagagcatctcccagcaggtttttatcctttatgtagctgacgccgcaggcccagcgtcactgtgacttaccaaggtcatacagatatttacaggtggacataggactggaacctagatcttctgagggctcctgaggagctgcgtttgcgggtgtgtgtgtgtgcacatgtatgtttctgtcagaatttgtttgctgaatctggtctcagaaattcatttaatttatctagaactctcaggctctttactggaatgttaaaaaaga

SEQ ID NO: 23519 - DNA, 2042 bp, Homo sapiens
ggctcccagaaccggccttcagctggtgtcagtgtggttgttggtggctgactgacatgtccaagcttatcctttattctagtggagaagggggcagagggcccagttttctctccacttagagcctgaaagatcagagctgttgactgccagagaagcagcattaagagcagaaaccaggtcagcgattttcctccttgttctggtgtgaaagttgccaatgtgtttttggcagctggctggttttgatctttcagtttgtgttaaacacttaggatcagcatgggctcccccttctcctttttaattaaacagcgactgtgctgccagggacgggctgggcgcatctgttcaggagggccctgtgtgagagtgcatagacgggagtgtgtgcatacgtgtgcttgtctgtgtgcatgcatatgtgtacgtgtgcatgcatgtgtgtatgatagacctcaaggcaattctgtggcccaggggatctgttcactgacaccaaaaacaaaagtggcctagatgattgtattagtctgttcttgcactgctataaagacatatctgagactgggtaacatatatataacacatatataacacacacatatataacatatgtttaattggcttacggttccacaggctgtagaggaagcatggcagcatctgctctgctcggcttctggggaggcctcaggaaacttacaatcatggcagaaggtgaagggggagccagcacttcgcatggccgtgggcaggggcaagaatgaggcgggaggtgccacacacttttaaactcacttgctacacagtaccaaggggcatgatgccaaaccagtcgtgagaacttcacccccgtgattgagtcatctcccaccaggccccagctccaacactggggactgcaattggacatgaggtttgagcggggacacagacccaaaccacatcagtgattttcctgtttagagtttccttgtatgtacctgacgggctgctctgtgtaaaagggaacaggagggcttttcgatggagacagcatctaggatggcagcatgtgcccagcctcagcttagcttagcctggcctggcaggtgtaaaccatcttgccctgtgccagcaggagtttcagtccagccgtctttaatagtgagctgagaggaagagctctggcttcactgttctagccaactccgctgctaatagttgtgtgatttggaggcaacgtggatgactcaagcctctgttgccatacctgcaaaatgggggtcacggcacatacttctcagagtaattgcaagggttgaatgggattaaagggccctgtgtcatctggtggtttattcaggccattttagtcagtaccttgtgcttctcaaaaatactttctgcctggatacccgttctttcagataagcggcctttagaaagaacagagagctgtcctttgaacctgccagtcatactcctgccccaggacctttgtgttagagtcccgttggcccagagcgcacttcccccaggtcctcatgtggctctctgccccgcctcctttgcgctctgctccaagaccaccttataaaaaggcctttctgacactatttgaaagagtctccatcccacaaatgatcatggcatctttatttgtggtatccgtagtatcccccaaactggaaacaactcaaatgtccatcagcaggtgtctggctagacggcagtgtagccatatgatggaacagtgctggccaagaaaaagaagtgaactactggtacacgcaactacatgaatgaatcgcacagtcatgcgcagtcccaaaatcatgatgcaagaagccagatgaaaaggcgtacatgcgggatgattccagataccgtatataaaattccggaaagtgcagtgttctctggcaaagaagcagatcaggggttgccagagacttgggggtaaggagctggggttgcaaaaggggcacaagaaaacatcctcttggggtgagagggtactttcccagtctggattttggtgatagcttcataggaat

SEQ ID NO: 23520 - DNA, 1056 bp, Homo sapiens
gcgtggatgtgagggtatgagttctgtagaccaagggaagcaaatttatccagctatcactgtctttaatattaggaatgttagattagatgagactaggcacccttctaaataccttccagatctcaacacctgtggttctgtggtttgctttcgaattggtgtccactcgctgtttgtttgaactccgattgactgcctcagtgcagaaactgtcatacaactaagttctagttcatgcttttacagctctgaagtcaaggggcatatttgcttcattgagagttcccctagatccaggcctcagcttaagccagtgagtggctctttccatggcagctggaaaacaggtctggtaatcctttgctgacagcataaacttcacttcgagtcacttccatagcttgagcttcctctcaaaagatgtggaggcttagttgtctttaaatttggatgggttgccccagtttttggcagatagtacggttataaccggcattactgggatgctgagaactcagcttgtcacacagcgtgtgcatatttaataggtgctttgtgtttggaggggaaaaccctctccagggaatctccacttccagaggtctcctcctgcctttagcagccatcgccgcctacatcctgcaggggtggtaggtggggctgtcttgattcacttcctcgctgccatgcagaaaaataaagtagttttccagccctccgttcagtggctgagtgttccttttctcaccttttccctatttccctgcgtgctctggaagtcagaatccagaggacccctctgtatgactgcgtctacagagaggttgcatgtggggaagtgagttcacccataccaagaaagagaattgagagatgcccttttggtttggtttggttttgacttgatttcttgtgcagctcacctgtttggccagcagctcctgagtgtgctcgtttacagtcaggaaaaaagggcacatttccaaagacttgattaagtggaagtctaagagcagagcctggcacatagctgcgaagcaggtctttaagaaa

SEQ ID NO: 23521 - DNA, 1086 bp, Homo sapiens
gcttttctaggaggatggttctgtggcaaggccggcccttctgggagctcatctaatccattgcctgcagaccgaccccactcatagcaaattcaagtcctgagccattatccgcgaaccccataggcaccctgggagggatggaaggaacagtagaattgtgaggtgacccaagtgagtcccctgagtaggatggagccagagggagtcaatgaccttccaggtccacatggcaggttagcggccagtagagccagagccctggccacaagctgcccttcactggccaccagcacctgagtgctccgatcgccccctctgtctcctcctgctcttctccctcacggctgaagctctggaagccgtccgcttatttgtagcatctttaaagagagtgtagtggaggggattcttgcttgaagtttttcctcagaggtttgcctcctgcttgtgcagtttttacacgtcagaatgcagaaattggccaggtgcggtggcccacgcctgtcatctcagtactttgggaggctgaggtgggaagatcgcttgagcctgggagattgaggctgcagcgagctgtgcactgcacgtttgcaccactccactccaacctgggcagcagagtgagactccgtctcaaaaaaaaaaaaaaaagaaaaagaaaaagatgccatggtgttgtagaaagtggtcgggccagaagtccaggaaccaagttctgctgctggctatgcttgttttttgcagcttagcctctctaggcttcagccctcacccagtcacttaccaagagttgttctaagaaccaacgtgctttcaggagtaaacaccactacagagaggtggcgtgtccactcacttttaggagcacagatgttcgttgtgtttccctaagaagagaattggtacttgtcatcattctgccatctgcaaaagctggattcccctgcccctgcttttctttattaaatataattttattttttgctttggttttagactgcttttagacagagaatatccatatatccctcccctagctttcccttctgttaacatcttaatacagttatccagtagtccgtg

SEQ ID NO: 23522 - DNA, 1035 bp, Homo sapiens
cttcagtgtaaacttatactgagtcatgtttaaaagcctccacatctttggactatgatcatagcattctttttaggtcatgcactatttagaaataagttttggttttgtaaatttaagttagttacaaccaggataattttgcttaaactctttaaaatatagttgtgtgctttatttcttggttgtatgtgtatcatttcttgttctgtgtgtatcatttgttatttgaactgtttaccccatctaacaaagtgatgtttgtttcttgcaaaatctctctagatgagtactggcagaatcacccagaactacatgacattccaatatactatgcatcatctttggccaagaagtgtatggcagtgtaccagacatatgtaaatgccatgaatgacaaaatccgcaaacagatcaacatcaataatccctttgttttcaaacacattagtaacctcaaggtgagtgcttgtggaagaaagacaaggatggataaaaccaaatcagtcattagtagtaggaggtacgaggccgtgagtgatggctcacagctgtaatttagcactttgggagtctaaggcaggaggatcactagaactcaggagtttgagaccggcctgggcaagatagtgagaccctgtctctatcaaaataaaataaaaatcgtaggcagtgcttgtcagtgactctggctgaattcctcttgctggagtcttaccgcttctcaacaggtgtcgtttttctgcagaaaatcaaaacttcagcagctgacattctttttctgcttcaacagattttgccacttgccccaagtagccatgtgttctcagtatttataatactcatctcttttgccgtaggcataaaaagttctgaggagaaaaatattttgtattatgtatttaagtttctcttctcactcaaaccaaatcatctttttgattagtgctgcaaattctatatatgaaaatttttatatacttttctggaagcattcaataaaatctgattttatttaatttaaaaaatactgtt

SEQ ID NO: 23523 - DNA, 1051 bp, Homo sapiens
aaccttggaaccttgcactaggataatctgtcataacatagaaggttaataaaatatgtctgaactgtccttgattaagaggatgctagaaagaccagaaaagtctcttcaacaatagaattccgctgtagaatgttgacgcttacgaagacagaaggtagatgaaactagctggcaacaattgacaaattttatgttatatgttaagatgctagtggaaggctaaatctcttgtatacaaaagatagatgtttgagcatcacttaagtttgccactgataaaatgtttgatgtccagggtaaatgctatctagttgaatgtttgcaatacatgttcagacctttccgttgctgtactttgctgtttaaaaattgactatacaaatgagttactaactttttaattgtgtagctgctttattttagctgtctctataaacaaacgaatggtctctggaagattatcagaaaagtatatacatcttatagttatgtctttctttcaggtgatgtggaagaattagaaattcaagaaaaacctgctctgaaagtgttcaaaaatattactgtaatacaagaaccaggcatggtggtattagaagtaagaaaagatcatttacctaaacaatgaggggaaaaaagttttaaaaagagttcatgaacaattgtagagaaaattagtttcttcccaattagaaaaagaatattgttggaaagtatatgtgtgtgtgtgtgtgtgtgtgtgtgtgtgtgtgtgtgtgtgtggttttaaggatcagcattaagtataattaagtagctgagcattttctatgtagtcacaaaaaaacctaataataaattaagggttcttatttagtatgtgtgataaatatagtcctttcctataagtcttacctgattttgtggtactccaggatgtctttagttatatcagaaggttttacaattcttaaggtaaaaatttaattctgttaaattaaaacaaacttaggtaccactcgttaaaagagcagaattttgaagattcaaataaacaacaataaagtga

SEQ ID NO: 23524 - DNA, 1006 bp, Homo sapiens
gttgcagtgaacagagatcacaccactgcatttcagcctgggtgacagagcaatactccatctcaaaaaaaaaaattgtttttgtcttacttatcttaggtggtaaaaataaaggtgtgcagggtgggaaggaggatcttttttttttttttttttttttttaaatttatctagagatggagtctctgctctgtcgcccaggctggagtacagtggcaccatctcggctcactgcaacctctgcctcccgggttcaagcgattctcctgcctcagcctcctgagtagctgggattagaggcgtgtgccaccatgcccggctaatttttgtatttttagtagggacggggtttctccatgttggtcgggctggtctcaaactcctgacctcgtgatccgcctgtgttgacctcccaaggtgctgggattacaggcttcagccaccgtgccgggcctaggaggatcttttaaaagatcatgagtaagtagtggtacagaagttaggaacggtgacgtggggaagagggttaggtgcggagagcagaatcacgcccagggctttgggccacgcagctttcagctgtaaggcccccatccttctaagagcacagctggccttcacttcctatcttagtctgttcagttcaaatcaaatgccaccagggttgctttctcttcactatatttctgatagcccttttataaaatgaagtcttttttgtaatatagtcaactaattagaaattgatatacttttctgaaaaatgaagtttctatgcaaaaatggcacttttttaggccggttaggatgttgtgtgactacaaggtctttggtgatgtttagtgtctgagctctgccagcctgttttccatgtggcagaggagggatcacagagatgttgtcaggatgtcatctgctgttctgatgagggctctgcctagcggtgatgctgaaaaacaagaggtgctgtggtatgacagataatctccacatagctcgtgtgtgt

SEQ ID NO: 23525 - DNA, 1047 bp, Homo sapiens
acacagccgtgcgcactggttcatcatctctgatgcctctttcctgctacagcagcagaactgagtcattgcaacagcgaccctgtggtttacaaagcctagaatgccatctggccatttacagaaaaagttgccctcttctcaaggcacctctgtgaaacaatccgattcttccttgatggcatttttctcccttttcatttcttagcctcctgacacttcagtccagattctggaaacacaacttgtatttgtatctgtggtgtatgtgtgtgtgtgtgtgtgtgtgtctaaccaaccacaatttatgtgtccccattcttaaccaaaggggaaatcttatatattttcaaaatacattattttgtttttatattccataacattcttctattttacatggcacctgttttcagcatgtgtgtgtcctgttttgacacacagacctactaaggacaggtatacctgtctgattgtatagttctgtgtttaatatgatctcgtgtctgatgagtttgtctaaatattaatgcaggaatttgcaaatatatatatacatatatatacacacgtaaactttggaaagtttcttttgatagtttcatagcctagatatttattttgtaatatattttgtgagattgtttttacatgtcaattaagtgcttattttagtaattaatgaaactaatgattataattaaagtataaaattctgttatatagttttcttggctagcacctggttagttttttgtttttgtgtttttttaatatttttatttttattttactttattttattttttgagacagggtctcactgtgtcgcagacttgagtacagtggtgcaatctcagctcactgcagcctcgacctcctgggctcaagtggtcctcccacctcagcccccacaagtagctgggactatagacgcacatcaccacgcctggctaatttttctatttttatagagacagggtttcaccatgtggcctaggctagtctcaaatgcctgagctcaagagatctgcccaccttggcctc

SEQ ID NO: 23526 - DNA, 1047 bp, Homo sapiens
taatcaggaaaggaaacagtttggacatcccagtagcagttacaattttctttggggccaatgacagtgcactaaaaggtaaaagcatttttgatgttcttctagctcacttttaatcatttttatgttacagcaaacttgcatttaatatacttttttcaactgtttactttctcccaatagatacagttttgccaaacttatgttgtttatatgtattcctggctttaacactggtggattttattcttgactcagtttctacataccttggttgctggcagtcctaatcttgcaaacagttaaatattttctagagtctgttagtgctatgctaagtttgtaatgtgttctctttagttgatgcatttggcagcagaaagcttaaggataccttgtggcttgcatcacactgatggcagctggtggcgtgtcttagggagggatatgtcagggcagcagccaccctgacctcagttaggcttgaatcctgggcaatggtgaacgtgggtttggaaaaggagatggtctctccttgactgctgaagaattgctgctgtgactagaggaaagctagccatgtaagaggcctttcttccccttctactcttgaaaaaagccttctgcgtgctatcgacgagaaaaatcagcctttgttttgggaagttaggtagtcaccttccagagatttcttttgttaccctacttgtgtcacagaagtgctgtggtctgctattcacgggcacaccgtaggagacctctgagttgaggctggacatgaaggaacaccaactgcagtaagaggaattcttgctctctaggagaaagattacgtagatgacaggtatcggtggagactgcacactaaccattatatttgggaagaaattaatcttcactttctatcttgtaccaaaaaccataagaaaactcaaaacagaattttttaaaaagataaatttttatcaaatttagcataaggaaaaaacacttcctaagtataagagcagtggaggaagccacagaggaaaaacaggtttatgaaat

SEQ ID NO: 23527 - DNA, 1108 bp, Homo sapiens
tgaaggccactgagatctgtgtagagctgtggtgctcggcctgcgggggctgatgctgatgtgccttgacttggaagtccacacctggggctttttactggtccacagaagctgggggtaggaatgatcagataggagtcgccagcactccatatacttgggtttcacatccctcaagtgctgtgttttcaatccacctttgactgaaaaacctctgcacataagtggaccttcacggttcaaacctgtgttgttcaagggtcagctgtatgttaatgttgaaaatgtgcattatggaagttctcttttttttttttttttggagatagagtctggctctgtcagccaggctggagtgcagtggcacgatctcggctcactgcaacctttgcctcctgggctcaagcaattctgcctcagcctcctgagtagctgggattatgggtgtgcaccaccacgcccggctaatttttgcatttttagtagagacgggtttcaccatgttggccaggctggtctcgaactcctgacctcaggtaatctgcccgactcagcctcccaaagtgctgggattacaggcgtgagccaccgttcctggactggaagttttctaagctgcccagaactcaacattctaggacaaatgactggctttgcaacacagaacagctatttctcaaagtgtggtctgactctgagttaactgggatttttaggtagatttctggacccattttcagcactccagatgtttcttacacacaccacagcacacataccacaacttcatggaaggctgttattgtccctactttaccagtggagaaatggagtcttagagaggctaagtaaccggcccaagatcacacagccagcaacacaaccaggaatcaaatccagcaagtgtgacttcacagctcaagtccttactgttgtatgagtttactgttgagtggggttgtagctatgtcccttgctctcaaagggcctgtcatccttagagaaggatccaatgcgttctcaagtcacaaacagcatatgccaaggggtgccacacaccggaggcacagacaaacggggagaaaccccagcctgcgggacgtggtga

SEQ ID NO: 23528 - DNA, 1074 bp, Homo sapiens
gaaaacaggagtcatgggaaatgggtagtggagactcagccaaagccatgcccagtggtctggaaggacatcaccaccagcactgctaccgtgaaatacagccttctagacaccactggactgtccatatcaccaagagtatatcctcaaacattcctgccttttttatcccttccctcaggattctgagtcctgggtgggagcatccagtcagctgaacttagttcacaagcctgcattccaatggccaggtgatgggactctggctctgtctcctgctaagactcatacaacagcacgggggaacaaagttttcagatgttcagtaggcaaatatcagcagtgtccactagagttccttctaactttaagtcctacagccaattgatctgaaaacaggaaaaggatgagaaataacttgaatagcactacagggaccaagctgtaaagaatcagatcctatctctggtgaagccctccaatcatctcctaaagatctttaattttgcaaaaccatcactagtaagggagactaatatcaaagtgaacttcatgagaatccatttctcaggcatttctttttgaggcagggaaatgtaccaatctagcttttttttttttttttgagatggagtctcactctgttgcccaggctggagtgcagtggcacgatctcagctcactgtaacctccgcatcctgggttccaacaattctcctgcctcagcctcctgagtagctgggattacaggcacacgcctaatttttgtatttttagtagagacggggtttcaccatgttggtcaggctcatctcgaactcctgacctcgtgatccacccacctcggtctcccaatttattttaagatggagtcttgctctgttgcccaggctagagtgcagtggcacgatctcggctcattgtaacctccgtctcccggatttgaatcttgactcttcatagttgagtaactttggacaagtcccctaatctgtaaaataggcataatgcttcaaaggattgttataggactatatgagatcatttacgcattttgcatgcaacaaatatttg

SEQ ID NO: 23529 - DNA, 1030 bp, Homo sapiens
agatgttagctttacatatttttgtttaaagaacagtaagacttatagtggaactaaggagaaatcagtagtaacactagggctactggaagaataatttttctgatgtttttgctttaatccttttagtaggttagcagttctggaagtgtgttctacaggatgtaaataagcaatacatccaaaagaaaaatttaaaggttttagtcttcagatacttaggaaacaacaggttaaacaaagtaaaactcaaataactttgggggtttattagtaccttttgtgtgttaatgtgcttgtttaatttccagggaatgtcctgtgtgttattcacaatttgagaacaaaatcgtttggtgtatgtacataacgtccatcaggacttgagttccacagaatgcactttggacagcgatatgctaaaccagtcgttcacctgagtgcatcagaatcacctggagtgcttgaaaaaacaccaatcactggaccttaatccccgaatttctgagttagtatgtctggagtagagcccaagaatgtgcatttctaacaagttcttatgggacacccatgcttctggtctggggaccactctttgactttgctgccttcctggagcaacacagtatttctgcaattatttgaatttcatattccttcatctagtaaaagtcatttaaggaatgctttaaaaagccagttatttagcaacaagttgttcacttgcttcatatgcttcattggaaaccaagtgttgagaggtccagcctagttggggagagggatttatgcatatgtgaaatgaatagacatgaatttatatggtgatatgctaagtgatttttttttttaagagacggagtctcgctctgttgcccaggctggagtgcactggcatgatcttcgctcactgcaacctccacctcccgtgttcaagcaattctcctgtctcagcctcccgagtagctgggactacaggcacacactgctatacccagctaattttttctattttagtatagatggggtt

SEQ ID NO: 23530 - DNA, 1033 bp, Homo sapiens
tgccaagccctaaagcaagagctgtgtgatgaaggagcagaggagagttcgtgtgactggagtcagagaattctagggcggagtaggaggatgagagtgaacagatcatcagaggcagatatctgtctttgtaaaccaagttaggaatttggatttttaaaaattgaggtataatttatatataataaaatgcaccctttaaaaatatacaattcagtggttttcaatatgttttcaaagtttgcaaagctgtgcagtctctattttcaggacatatcactctggaaggaaacctcatacccaggggaactgcgggtttccagtgtgagagtaagcccctggaagattgcagcaggagagatacgatctgattgatgtttttaaaagatcattcaggcagctgtggaaaatgagttctgggaagggtggaagcacggagaccaggtggtcttttgctatcctccaggcaagagatggtggcttggattatggcagtggtaatggtgactgggttcaggatctgtttttacaggtagacacgacttaattctaatgcagtggtttttttcagtgatctgagacaaaggatgagtttactaaatttctaacccatcatagattgaaactttggaaaattacataattataagtagagacagtgtttccaggggacatggctaaactctgttggtcaggagaggcatatgagatgcttttagtctacaccagtttttctgtcaacttcctggattgatctagagaactagctgataatacctaggaagggaaatagattgttcagaactttgagtaagcagctttttttttttttttttttttttttggaaaaacaaatacttttctaaaaggagattcaaagaactatttataaatggtgaaaaactgttagaactccagatgccgaagacctgctctttgcggacatttctgcttcccctagtcaggtctctcatttcttcctctgctcctacagaactgactgtgcctctgttgtgctgcttgagacagtgtc

SEQ ID NO: 23531 - DNA, 1045 bp, Homo sapiens
taatagagacggggtttcaccatattggccaggctggtctcggactcctgacctcgtgatccgcttgccttggcctcccaaagtgctgggattacagttctgaaactccagggctcaagcagtcttactgctgctgcctcccaaatagctaggggtacaagcatgtgccactgtgtgcagtccttcttagacatatttatttagacaggaacttaagagaatcattcagtaattggctaaataggccaacatatgggtaaagagaataatagatatgattagatttattatccttaaaatcgtgggaaatagaatatgcttaactaattcttaccttgtctttgaattaagagatttttcttaaagcatttactctgctatatcagtatataactctcattaaacctttttctttttaaaaatacaggtttgttgaagaggaccatattccttacataaatgcttttcagcattttccagaacagatgaaattatatggacgtgacagaggaatctttggtatagaggtaagttattttcttttttactttctagtctctgataaggcacaagagtggtatgataatttctatttcttgcttgacttattatttggtgttttgtgttttatcccaatatggaacatcagtcataatttaacgaagagtagaattttattattttttattttccttatgtggattcctctaatcctttaggttatcctcaaaatatagctgtagtgtgatgtgtgtgcattgcagataggtatgttgttgagactaaacttgagaacttttatctagagacctttaggtaatttcaattttttaaaaataaaatatgtgttttgttgttgttatttgcacactatattgctatggaagaaagagaagaaagttattaccgtgtttctaaaggtactattttaagttcttcacttatgttagtttgtctttttctagatctgttttcagatgtctccaatggaagggtttctgtcctttgattatgagtttgtgtcactattggtggtactcaaagg

SEQ ID NO: 23532 - DNA, 1049 bp, Homo sapiens
caccacctgtggcccttgtgtggtggccatggacagtgtgaacatgttttcctttgtgcagttaaggagttaacaaattcttctaagtttccttccagctcagggtcctgttttaagcctaaccatatatatttgctaagttatttggggggatgttcaggggttagtgtgtgcatttcttggttaccatctaaagataaattcttttttctttttcccttctagctattgtacacatgtgacaacctatgaagaatcaaattattctctgagttatcagtttatactaaatctcttctccttcctgctcagaataaagacttcccttctccatgaagaagtgagcttagttgagaagaaactttttgagaaaaaatacagtgtaaaaagaaagaaatcaagatccaagaaagtgagacgacattgagaaaatgaaatagaaactttctggaaaaatattttaatagtgataataacatcagattttaatataacattccagagaattgtggaaaatactgcatatatatgtatagactctgacacatatttacatatatatcaagtgtgcttagaaaaatgtatattgtaaagcaggtgagcttcatttgattttatttttcagagtatgaacattctaagagaaagttaaaacaatagcaaattgtataattgtatccagaaatgtatactcatcgtattttaaagctaaatttattttttaaactagatcccttcattattctttatgccccagagtaaatcccagatggatcaaagatctaaacataatctttcatatgtaaaaatataaaagtattagtagaaaacaaatatgaatgctttgatgatcttggaatggcaaagtcaatttttgcagcatatggtggacaaagaaataatttctttaatgtatcaatagctcttgcaaagcaaaaggaaaaaagcaaactgagtaagggatatgaaaaattagttttctgaggccgggcgcggtggctcacacctgtaatcccagcactttgggaggccgaggtgggcggatcacg

SEQ ID NO: 23533 - DNA, 1028 bp, Homo sapiens
tctcctcctccaaagggatagttttagtaataacttcagtatttgcttatttgtttttgaggttttctttagaaggatgtgtggcagtggtctattaaaaaaattaagcaccagtgactcttgaacaactgcctgagtaaaattgaataaagcaagttaaattgtattcaaattcctgttgaaattatttgtgaaatattttagattaaaactttcagaaaatttaattaacgtttggctagccatgaaaaactttaaaaagacaccttttaaattgtcttgtgttttattatcaatcaaggaatgaaacatatttaaaggaagaatgatcatcacccagtatcccattatcgtgatgattgctttattcattgttttgatgtgtatgcaaattttatgtagcgtagttgtgttcacagataggatttggtagtgtactttcttctacttagtttgtttcataaacattttctctgtattttaatcttcataattatcctttggaagaggacttgtggcttttatcttttacttttcattatgggcattttcaaacataataaaaatagaaaaacagtataagcccacatgtatccatgaccagcctcaacagttatcaacacaattcctcttgtttgatttgttcttccctcttcttcaactttgagattaattcatgtttttattttatttatttttgctggaacattctgaagcaaactgtaaatatccttacaattgctgctatatctagttttcactattaagaagtcttaaggaacaactttctagactttttccgttttaggataaattcctgggagtgaatttatggttcagggttcaaacagttttattgatcttgaaatgtacagaattctcaatttgcctgtttcttgaagcttcagcctatatgatttctgggggctttgaaaattcattcattttacccactggaaatcatcttgtattgctcaaattatttatcaaaccaaaatttaattttataaaaagcagatgtgtctact

SEQ ID NO: 23534 - DNA, 1054 bp, Homo sapiens
gtgatgactctttgtggccaccacatctgccccctctttttttttttttttttgagacagagtctcactctggcccaggctggagtgcagtggtgtgatcttggctcactgcaacctccgcctcctgggttcaagcgattccccaacctcagcctcatgagtacctgggattacagacgtgcgccaccatgcctagctaatatctgtatttttagtagagacagggttttaccatgttggccaggctggtctcgaactgctgacctcaggtgatccacccaccttggcctcccaaagtgttgggattacaggcgtgagccaccacgcccggctctgctccctcctttttgtggctttgctgttttaataataatttggttgtatctcttattgcgaatggatctttcttgacataaattaattaggaaatcgagcgctcacaaatcctattttatatgtatctatttcctgatatgtaagttgagcatatgacataaaatatcaaagaattgtgacaaattggatgaaatatatatagaaataaaccttataatggtacaaagagtgcgatgctgccagtatccgttgacagttgctgctgttggttttttctcaagcttaactttgatgtgttttgccactaggtggagcgatttagccaagaagttcagattacagaagcccgctgtttctatggcttccaaattgccatggaaaacatacattctgaaatgtatagtcttcttattgacacttacataaaagatcccaaagaaaggtgagtattcaagtggtatgccaagatttttaggactcactaattgttgatttattacacatttttagttcacctagggataaaaatgactccagaatgactaagacagtcataggcattcccagcacccgtggtcatgtctgctcttagcaaggggcctaaatgcactttattattcacttagagttgtgaaggtactccttttaaagttggatgtctaccaatgtaaaaccttcttttgaaaaaattcctagatgttgggtaagacaaactaaa

SEQ ID NO: 23535 - DNA, 1030 bp, Homo sapiens
gcttcaggccttgagggccaggaaatgaatgtggaagactgaatcctcaggggaccccaactctgggccgggtctggggctctgttttgaggacggggagtgggaggaggtggcagcaggagccggcgtctgaggcatctcctcacactcttccaaggtcagagacgaggtctcagatacgcttgctaatgcacgatttatttctttttcaatttcctttggaacctgtgctgtgcagatgttcacatgatgtggtggggaagtgagttttataaaactcttggcagagtaccattcggcatccctgtggttctagagatttctggggcctcggggctgtagcaccagctgcagacagctgcctgccttcttacagtgctcagcttttgggtccagcagctttctcagtcccaaacacatgtgacctcacgattctggcccttccatgatccgcaacaaactgttctggtgtgtaggtggaattcctatttttaatagccaagttgttgagaaattgtagggcttctacttccttttgaacggaagggctccggagatatttatatctttgcttctatagaatctaggaggttgtctttacccagggagggtcagcatgtggagagggtcacctgggagaggccccggtgtcagcctgcacttgccgtcagtaaatggtacgacattgagcaccaaggagctcagccagcccctcgagggaagtcctagctgcccactgggggaagggcggggaggcatgaaaacaatgaccccactggctggtgggggtgaccgtgttatgcaaagtgtacaccatgtagcatgagcaccgggccgggagcccccaaggctgctggggaatcagggagacaccaaagaggaggtggcctttcccttgaagggtaagggatctgtaggagtctgtgggagagtggaagctgcgggagggaaaggagggagggaaggaggcctggagagaggagggaggctcttgcattccaggcaggtatgggagctcctggcagagttt

SEQ ID NO: 23536 - DNA, 1033 bp, Homo sapiens
tctgtccccacctgccacctgctggtccatccattcagccgttgcacggacaggttgccttctgggggctgctagcccccttgcactgggcaacgctgtgtcccctctgtccctccccccagcgcatgctcctcgctctgcccctgctgcaggtgggccatgcttggagggcgcaggagagctgagatggggtggggatggatcaggccttgagagggtgcctggtaagccccgggaagggtagggaggaggaggagggagaggagagggcagtgcaagggcagcgacccccagccttgcccccgttttgagcacggggaaagtgtacacaggtagtgaggaaatgcctgcgtttgggtgcgtgttcatttctaatccattttcactttttgtgtattctttctatctactttttaaaggtttgtttcttttctaacttcctgttttagatgtatactttagtttctttatttatttttatttatttttttgagatggagtctctgttgacaggctggagcgcagtggcgtgatcttggctcactgcaacctctgcctcccgggttcaagcgattctcctgcctcagcctcctgagtaactgggattacaggcgcgcactaccacgcccagctaatttttgcatttttagtagacatggggtttcaccttgttggccaggatggacttgatctctcgaccgcgtgatctgcccacctcggcctcccaaagtgctgggattacacgtgtgagccactgggcccggcttagtttctttatttaaagataagggtttttttttgttttgttttgtttttgagacagaatctcactctgttgcccaggcaggagtgcagtggcacagttgtagctcactgcaacctcaacctcctgggctcaagtgatcctcccacctcatctgagtatcagggactacaggcatgcactaccacacccagctaatttttgtattttttttgtagagacagggtttcgccctgttgcccaggcaacaagcaaatctgcccacctcag

SEQ ID NO: 23537 - DNA, 1047 bp, Homo sapiens
tgcccggctaattttggtatttttagtagagatggtgttttgccgtgttggctaggctggtctcgaactcctggcctcaggtgatctgcccgcctcagcctcccaaagtgctgggattgcaggtgtgagtcactgcgcccagccctgctttattaatttttgttgttgtttaattttcagcgaaaagtttgctggcaattttcatctgttctatgacaacatttttactagtgagttttcacttgccacttgtttttcctgttccttttctcgtttttattttttaattcttgcagtgtcttcctgtagatgctgcgctgtttgcttttttatttctcatctttgggcaaggtaagtttttcttcaaccatctatttgccagaggtttgtgtgggagaagaagcgaggactacacccagtgccatgtgcagttgtagggctgctcatgtgcagtctggtgattcctctttttgcctgcaagtgtggcttgtctgtgtgattgtctgtgtctgatctgctgcttctgcttcttggttccaagcttacctgtatctcacatgccactgtcatgagatcacaggccccactcctgctcatgcagataagggacgttggttggtgggcagtgtgatcccttctcactgcttcttcccaaacatctgtgtggtatttcctgcctgggcaaccctctgactcgtttctagtttgggtttcatctctcatctgtttccattggaaatggagtgtagctgggcgcagtggctcatgcctgtaatcccagcacttttggaggacgaggcgggtggattgcttgagcccaggagttcgagagcagtctggccaagaaggtgaaaccccatctctactaaaaacacaaaattagccgggcgtggtggtgcaagcctgtaatcccagcactttgggaggtcgaggcgggtggatcacgaggtcaggagatcgagaccatcctggctaacacggtgaaaccccatctctactaaaaatacaaaaaattagtcaggcacggtggcaggtgcttataatccc

SEQ ID NO: 23538 - DNA, 1036 bp, Homo sapiens
ggcttgtgtcacacataaaatacactaacactaacgatagctgatgagctaaaaacaattaaaaatcacaaactcataatgttttaagaaagtttataaatttgtgttgggccacattcaaagccgttctgggctacgggttggacaagcttgctataatggatcagagatatgtacagtcttaaagaagaaacagctcccaggcctgtaagacctatcagggcactcactgaatgctgtgagcaggggaaggggcagtcctgggcagtggggtcctctctgggggtccagctgtgtctccagtcgtctggggagctgggaacagcacaccagggttcttgcctcctgggaaagttctcacagaaagagagaacagaggtgcaaaagctaggccatgttcattattctttcattccctacttattgagctttgacaatgtgtgagggactgcttgattgattgactgattgattgggacagggtctctgtcacctaggctggagtgcagtggtgcaacctcagctccctgtaacttccgcctcctgggctcaagccatcctcctacctcagcctcctgagtagctgggattacaggcccacgccaccacacccggctactttttgtattttttggtagagacagggtttcgctatgctgccaggctggtcttgaacaaccaggctcgagtgatccttctgcctccccttgggctcccaaagtgatgggattataggcttcagccacagtgcccagccagaggaacgtttcagatgctggaatcaatggtagtgtgttggaggaagggagtttctgagctcagcccatttctttttttttttttttttttttttgagatggagtctcgctctgtcgcccaggccggactgcggactgcagtggcgcaatctcggctcactgcaagctccgcttcccaggttcacgccattctcctgcctcggcctcccgagtagctgggactacaggcgcccgccaccgcgcccggctaattttttgtatttttagtagagacgggg

SEQ ID NO: 23539 - DNA, 1136 bp, Homo sapiens
gtcacatggccctctcggcctcagtttccccgggtctgcaaaatgagtgctgtgcagaatgagcagatggagcccactcatcccgggcagtggcgggtgggaactatggggtccacagcagatggtgccagaaaggcctgaagagggaagtctgcagccaggcgcgagcctcggttccccggctgcccagtggccgcgctctgtccctgccctagtggctgttctctcccctctcctggttttctgcctggacaacaggaaaaggtttctaattttaatttgagcacctcattgggcttccaagtcagagtagtggaagtgcaaacctcagccttgcctcttggctgtgtgacgttggggatgccccttagcctctctgaatcagcttcccatgaaaaagatgacaggaatgcccgttgttcttcctatggcatcaggaaattagagtcctgtgagttcatttccctcgagctaaagcatgcatgtgaatgtgtgcgtgtgtgtgtgtgtgtgcatgagtgtgagtgtgaatatgtgtgtgtgcatgagtgaacgtgtgtgtgagtgtgcatatgagtgtgtgtgtgtggctgtgttggatagaagtgtttttaaatagtgtatgtatttttcaaccttttttgaatggagcccagggtgtatttcccaaattctttttacattattttaaagagaggcagcagagtgttatgacagagaaccagctatggagctggcctgagtctgcatctgggctccacctcaccagctgtgtgtgaaaccactttgttcctgttttcttatttgtaagtagagatcatatcatctatccacatctctgcctaggtgtgtggacggcttaatacacttggaagcctcagaacaaggactggcagtaagtgctcaatacattttatcatcattgttatttttgacgctgagggtcactgtaacgaccaatgaaccagccagtgaagtgggatgaatccattcaggagcacacagggctcgggtgcactcagtgctcacgggcgaagtgagcaggctggcatctgtttggattggtctctgcttgaaccctgttagttgttaaacagtttgaatgccatcccagggtagaagagacagaaacttaa

SEQ ID NO: 23540 - DNA, 1036 bp, Homo sapiens
ttatgatactcttttctgacattgagcaaatcattttcatgtctgtccctcccccaggatcagtttgagaccagcctggccgacatggtgaaacactgtctctactaaaaatacagagactggctgggtgtggtggtacatgtctgtaatcccagctacttgggaggctgaggcaggagaattgcttaaacccgggaggcggaggttgcagtgagctgagatagttccactgcactccagcctagcagcctggacgacagaggaagactctgtctcaaaacaaacaaacaaacaaacaaaaaaaaacccaaaaaaaatcccacaaaaaacaaaactatgaactaggtggtctagaaacaattatttctcacaggtcgttttaagccactgagtttgtggtaatttgtcacagcagccctaaaaaataaatatacacagttttaattgaagttgggctaagaagctggacgctagtcccagctactcaggaagtggaggtgaggggatcgcttcagcccaaggagttcgaggctagcctgagcaacatagcaaggcctcatctctaaaaaataaaaattaaaaattgggttaagaatttagcagctagtccttaataggatgagccatgaggaccggcagctacatatcagtggtttgaagcaaatggttgccaagtcgctcctctccctcccaggtcatcaccgtgacatccttttgtccagtgtccttccctccagggtagctcaggttaggggaaacagccaacacatccatgcaaggaaataaatggccactcaaacgcagactcttttaaaagtgggagagtggctgggtgtaatggttcatacctgtgatcccaacactttgagaggccgaggtgggaggactgcttgagcccaggagttggagaccagtctgagcaacattaggaagaccctgtctctacaaaaattacaaaaatgagccaggtatggtggcgcgtacccagctacttgggaggctaaggcgggaggatggcttgagccctggaattcga

SEQ ID NO: 23541 - DNA, 1078 bp, Homo sapiens
gccctttgaggcctggggcaggcgggacagaggcagcacccgcctggcatggggctgaggcctccttgcagctgcctcccggccccttgttctccttcatggctccatgcacagctgaggggagacatgaggtctctcggtctccatgggtttggggcaggcccagaatggccctgaatccagtaacaccaactgtccctggaagtgtcaccaccctggtctgggaggagctccatgaacatctcaaccatccacttcttgtgcagatggggaaactgagtcagaaagggaggagactgccttaagaaagattcttgcaacttgactttgatcctgtagagtgtttgtgggtttagaagagcacaggtctgaagatggaagacttgggtttcagacccgtctctgccctgtgcaccagcatgcccagagcagcactaacccaaagccaatctgacaaatgaacaagtcattctatttactggtttctttgatctatttataaaaatgaatatttatagcaaatcctgtaggatgcggtagatttggaagatttctgtgatgttttgtttgactaatgcttattttcccttttgtatcagtattttaacaaatgctttggatttcctccacgcagaggagaatcagtatgcagctgttaattttggctgctgactccaggacaagagacagagagagagcgtgaaagcgagacagagcgtgagagtgagagagagagagagaggcaggagaggctgagcgtgggagggagacagacggcatcgattcattaatatattcaaaactatattcaaaaactattcatttaaaaattctggaatatattgactacatactttaaaagacttttttataatgggaaactttgaacataggcaaaaatagaataatagaaaagcccagcgtgcgacatcagtgtcaacagaggtccatatgtggccagtcttgtctcagccttttccccacccattcactcctctcccaaatccggatggttttaaggtgattttagccatcgaattccatatgactctgttctcaagtgtactggatacattct

SEQ ID NO: 23542 - DNA, 2025 bp, Homo sapiens
cctgcacagggactgcgcgcacaaaatatgaggcccacagggaccgcgcgcgcaaaatatgaggcccacagggaccgcgcgcgcaaaatatgaggcccacaggcaccgcgcacacaaaatatgaggcccacagggactgcgcgcacaaattatgagtcccacagggaccgcgcgcgcaaaatatgaggcccacagggaccgcgcgcgcaaaatatgaggcccacagggaccgcgcgcgcaaaatatgaggcccacaggcaccgcgcacacaaaatatgaggcccacagggactgcgcgcacaaattatgagtcccacggggaccgcgcacacaaaatatgaggcccgccatctaagggctctactggcttcacaagtcaagtttgattccttaaaggagagcacaccattccagtcaaagccttgctaaaacaaccagttcttccaattgtgtcctgccataaaagaaaacagacttttggtcgggtgccatggctcacacctgtaatcccagcactttgggagcccgaggcgggcagatcacctgatgtcaggagttcaagaccagcctagccaatgtggcgaaaccctgtctgtactaaaaaacacaaaagttagctgggcatggtggtgcatgcctgtaatcccagctactcgggaggctgaggcagggagaattgcttgaacctgggaggtggaggttgcagtgagccgagattgcaccactgctctccagcctggggaacagagcaagattccatctcaaaaaaaaaaaaaagaaagaaagaaagaaagaaaacagacttgtattgcacctttgcaaataaccatactgccataatttaaggatactcacaggtagtttccagactcgggagaaaaccaggcagagagaaataagcatgcctcaaattttgttcatgggagcacaccaaactgtcaaaagctgttgatagctcaaaagaaaagcctctttgactctgaaaagcaaacaaaggaccaacaatattccgagcaaaacatcaaaaagatcactccagtctgttagttcagttcacgcagtcagttcctgtcctgcctgatatcaatgaacattccagctcttcaagagtcctgaacgtccttcctctattctgatgtcacaatctgcaaagttatcagaaacctgcattcaagagcacctgtcagaactttatagctgatcataaaaccaccttctaaagaggaccaaaacaagacaacaattgttcatggatgacaaaaagttttagggtggccgcagttaaagacacaattgatgaggaaatctgttacctacgtggcacacaacaattttaacataacaattataattattactgataatgtacactaaaacatatcaggattgtaggagtctcccacaaccttggaacacataccaaaaacatatctacacaaatatagcccaaagaaagccaagcaccatttcgtatttgacaatattttctgtataatttttataccaaataagccaaatttcacctttacattagtgtactatgaatgttaaaccgaattaataaatccttatagacatatttactcaattttaatatttgaccacaaggtaagatttttatagactttttatagccctttacaatttttgttaaagagcaggttagtgctctaagagaaacccactgtgcttttattttaataaaatttaatttacagaaaaactggaggataccccttttagccaatatgtttacacacagaactgcctctaaaatcagcctttcacaactagcccaaaccttcatttttattttatccaactgaaaaaaaaatcctttaacctttcaaacttggcaaaaatccacattctcatgcctccctgcaatctttctaccaaaactatattttacttttcctacataccttgcatgtaaggacagtggcttggaatgttggaacctttccttggaatgttctgggtttcagcaccaaatgtaagacttgaagaaggaagaaagaaaca

SEQ ID NO: 23543 - DNA, 1051 bp, Homo sapiens
ggaaggtctgtgtgcagagggaatggctgtctcagaggcgactcaaactcagtatgtccagaaaggactcacaatctgctctcccagcccagcgcctcctgggactttggcctctgtggatgatgaccacagtcacttgggccagaaacatagacatcatcttgataccccttctccctcacctcccccatatccagtcacctccagtcctgtcatctttgcctcctaatctctttcatctctgcccttttctctccatctccatggccacccagctgccactgcattttgctcaccacctgcaattggccttccagcccctgaacccctctgatctgctcagcccgctctccacaccgaacccgaggctctctctttgaatggcaatctgatagtctcccccctgtttaaaacatgaaatggtatcctactaccctggggataaaaacaagacaaaaacgtttaagaggttagagaggtcttcatgattcagtccccacccacctctcagactcacctcccgccccagcctctctggactcttttggcccctcatgggtgccatcattttgcccacataggctcttgtctgtgctgttttcactatagagtgggtccttcccttctttctttgtctaattcatgacactcatcgtttagtgcatttggcacttcctccaggaagcctgccttgacctccctgactatatcagctctcccccattaaatgttcccctcgtgccatggtcccctcatctgtgacattgatcacatgagcaatttcacatttattcatgtagttagttatagtctggatcctcctttggattttaagttcctataggtaaaagccttcctctcctttggccaccgagatatctccaggactaccatggacatgcagtaaacattcaccagttgttgaatttatgagtgggtgagtggtgcctgccaccctagaatttcccttatttgaaattctagaataagcagattcacttctttttcacatccatgtgaatttttgttcttgtataaatgaatagtaagt

SEQ ID NO: 23544 - DNA, 1001 bp, Homo sapiens
cagccatggcccctcctgatgtgagcctatctcaggttctggtaccacaatccacccagtgccaagccagacactcacgtatcaccctggatgccctccgcagcccctcacccatccaacagatgccccgtccctgtgcctgctaactccctcccacctctccagctcaaggcctccctcccacgtgctggatcctgcctgttcagacctgtcctgtctcctggtggccaaactggcctccccagtcagtccctgctgcagaaagtggtttctttctttctttctttctttctttcttttttttttttttttgagatgaagtcttattccatcgaccagggcctggagtgcaatggtgcaatcttggctcactgcaacctctgcctcctgggttcaagcaattcttttgcctcattcccctgagtagctgggattatagacatgcaccaccacgcatggctaatttttgtatttttagtaggggtggggtttcaccatgttggccaggctggtcttgaactcctgacctcaagtgatccactgatcttggcctcccaaagtgctgggattacccctgtgagccaccgcacccagcctggaaagtagtttctatagtacaaagccgggggtgctgctcccctgccccacacacctcagcacctccatgttgcttcctgtggagtagacactattgttttgtctgcccagtctcttcttttcttgtgggaatatgcttctggaatatttgtctggaaaaccctctccttttgataactgtctttgcctccctgggactgcagctgacgtgcttgcatgtgtgtgtgtgtgtgcgcgcgcgtgtgtgtgcgtgcatgcgtgtgtgtgtgtgtgtgtgtgttgggatcggcttccaaatcttcctactgggggaatgcccattatccattagatgccactcagtgggaagtggtgccccacccgtccgtggagacctaaggggcttaatagatcctccctgcata

SEQ ID NO: 23545 - DNA, 1086 bp, Homo sapiens
ggtgcccttatggttctcccatgtgaggacacagagggcagccatctacaagccaagaagagaggcctcaccagacaccaaacctgccggcaccttgctgtgagatttccagcccccagagctgtgagaaataaatttctgttgtttaaggcactcaatattttgttacagtagcccaagctgactgagcagatattcatatggaaagtgaattttgatctctacttcatgccgtacataaaagccaattccagattgactgtagatacagattggcaaagcaaaacagtacagtttctagaaagaaacaggaaaatatctgcatgaggtggtcaaatatttcctagagaggacacaaaaagcactaactacaaaataaacaatgataaattggactgcattaaaattaagaacatctgtttaacaaaagaccccacgaagagcgtgagaagccagagtgcagagtgggaggagaaatctgacctgagatgggaaattagaatatgaagaactccttcaagtcagcaagaagacaggcaagccgagaggaggacgggcaaacgacctcaacagacactttacagaagagatatccaggccaggtgcagtggctcatgcctgtaatcccagcactttgggaggctgaggccggtggatcacctgggatcaggagtccaagatcagcctggccaacatgtcgaagtgccatctctactaaaaatacaaaaatttgctgggcttggtggtgtgcacttgtaatcccagctacatgggaagcggaggtgggagaatttcttgaacccgggaggcagactttgcagtgagctgagatcgtgccactgcactccagcctgcgggacagagtgagactccatatcaaaaaaaaaaaaaaagatatacacataagagaatattcaactttattaatcattggggaaatacaaattaaagccaaagggagacaacactccttacccctaggaatggctaaagttaaaaagatgggaatacccatgtcaggaaggatttgaaacaactgcaactctcatatgctgcaggtgggaagtaggaggcaggcctccactc

SEQ ID NO: 23546 - DNA, 1993 bp, Homo sapiens
tacctcgagggtggggcctgccaaaaggagggattaggatgaggaggcaatgcctcccttaaggaattctgactgtgactcggtcgttgtagggagggggctgtgcatttccatgcaggcaagtcaggccctgggcacatcctggctcctgtcttggaagctggtgaacacccctagccagtgtggccgaaggcagcattctggaccagtccaggccttctgcacgggtatagcacagccctttgcctctcactatatgggctgtgccaggacatagtaccttgaccttcaagttcttttttttttttttttaaattgagacagggttttgctctgtcgtccaggctggagtgcagtggcacgatctcagctcactgaaacctccgcctcctgggctcaacggatcctcctgcctcagcctcctgagtagctgggactacaggcacctgccaccatgcctggccagttttaaaaaatattttgtagagagttgcccaggctggtctcaaattcctgggcccaggcagtcctcccacctttgcctcccaaagtgctgggattacagttgtgagctgccacacagccccccaggttgttatcactcatcacagaatgttctcagcttgttcttctgcgtgtggccaacctggaggcgcagggctgggttcccatgcggcctccttgccacagggtccaggaaggctgtttccaaaccctcttggcaggaagatacacttctggtgggattcaggtggaaagagactccctcactactggagagcaggctggggtctgtgtgcttggatagttatcccacagagagggacttcacaagcccgagagagaacagtcccaccaggaacagaggaggagtgaacaggacagagacacagacaggcaggacttttctgaacagtcatttgaaccagagaacaatttttcaatggacaataaatgttgcatataattgaaatctcggttacattccctgaaaagtgctttctgtgcaacctgagataagagactctcctggagctgcggtttcctcatctgttacacagtggttataacgccttgccgtttctatccgggatgactgggaaattcctctggaaaacaactacaaatgcaaaggtgaagtatttgatgatgtgtatatgagcacttcccagtgggttttgtggtctgtgggcatctccataggtcaataggtcttaatagtttaaaaaaagattccttggttaattaatttgatgaaacactgggttaaacacagtcaagcagatttccttactgcaggacttctcaaggcctttagtatgttaatacgcattgaaaatcgccaggagaggggtgttctatgtggcatatctcagacatatttacctagagaagggggtgtggtatgtgtgcgtgtgtgtgtgtgtgtgtgagagagagagagagagagaaagaagaaggaaggaaggaaagaaggaaggaaggaaaaggaaggaaggaagaggaaaggaaggaaggagggagggagagagggagggaaggaaggaaaaggaaagggaaggaaggaaggaaggaaggaaggaaaaaaattcacggggttagtgcagggaaattctgtggtaaattttaacagcaagtgaagaatgctgttccacatggatgcaggtattttttccaccatgccaattttacagtgcaaactgaatctaacaggttggattaatttggggatatgcattgctccactcagacagtctctgcatagattgccagggcgatgggaactaattcagaaaagcggaggaagactgtggcttgcaaagcccgcagatacatggctgctttgaggattttcttttgctcaaaggatttagggtgggggtggggagtggggaggacgggaggtgcttcttttgcttagaataaaattgcaaccttgaggccaaatgacagaggcttctcagcgtatggctggagaagtgcaaatgagaaa

SEQ ID NO: 23547 - DNA, 1057 bp, Homo sapiens
aatgagaattagcccacatccattcattccacaaatatttatggagtgcctactgtatgccagggattcttccaggcactggggagacatttaaaaaacaataacaacaacaacaaaaatctgcgtcttgtcggaacttccatatacacttccactggctacttcatggaaacatctggaacatctgatttttctagtcttcccattactaaatgtggcacaagaacgtagtctaaaggatgtacttcaccatgcaaaagctcttgtcatttcagaaaaggaaggagaattaagtaaaatgtacttcaagaaagtcagttaagaatttttccagttaatgaaaatttaaaatgattggctttcatcttgctgttttccagggtcccactattaagaactcactcatcctgttgttattaagggtgaaacccagacatttccttatgtaaaagccaattaaaataaattaaatgcaaatactgtttcattgtcatgtcagttttgagaaccggatcaatcagaggttgtggaaatgccaaagttgttaaggctgtggttaccatgacaacagctctattgtgtaagtggtctgttatttgggaattcttccttaggtcaggctaacagtgatgtcatttctcagggaaggggacggagttctctggagtcaggtctggggccaggagacctggtgagcaaaaactggggttcagccagaactaccagttttgtgaccatgggagacagtcccttccccttttgcctcagtttcctcgctttggggatagccattgcacagctgtgagtatattgtggccattcagcacttctcaaaagttgctgctctgctaaaaaattttggggattcctgatttgccggctggttttcagcctatgttttggggaaatgcaaatgataggaaaccacccctggtcctgccttaccggttctagcagacctttggtgaaactgggagttcttgggtcctcttggctagtggctagtgaatacctgctgggggagggggtgtttgctttgctttgtgttgggggtggg

SEQ ID NO: 23548 - DNA, 1034 bp, Homo sapiens
tctgacccgtggatcccagccctgcccaggcccagatcctgggctccaggtgggcctgggttggggctcccagctgcaggaatgcaaagttcatggttctacaaagtgctttgaggtgacgttggtcacatcagctcggcctcagatttgctgctttttttctaaagaagagacagctccaggccctgcctgactgacctagttggggatgcaggccgaggccatatcgagcagggtaagtttccaagaatctggctttaggattagtcgggccacacggaaggagttcctggtctcgtgacacctgcacaaatggtcttcaaccctcaaaacacttcctgttatttaaatcttggtcctttgattttttttttttttccttttagagactatgcacaatttatgtggcaagctagagatgctttctttttcagagcggcctttatgctgtgttcggggctgtctgtcggcgccacagggaatgggggctggtgagtcgtgctcagaaggtcccagtctagatgcttctgacatggacaaaaggagaattcctgactttttggtggatgtttgcaattcccagaatgcttattcttatttagtcctcataggagagtggcgaagggcagcagctttggagcaagggccaccctgcccctccccaccaagccctgagtcgtctaaccttcccggtgtattagtcagctctggctgctggaaacggggtcatagtctgggtgccttaaacaacaggaattcttttttttttacagtattggaggctgatgtctgagacagggtggcggcagggttggtgtcacccgaggcctctctcctcggctccgtgtagccctttctccctctgttctcacacggccatccctccgagtgtgtctgagtcccagtctccttgtgaggacaccagccctagatcaggagccacgcagtgacctcattttaccttcatgacctcttcaaagtccctgtgtccaaatacagtcacatctggaggtagtaaggattggggcttccac

SEQ ID NO: 23549 - DNA, 1050 bp, Homo sapiens
tgggggtaatgaaaagcgttctggaattagatagtggtggtggctgtaggacctggtgaataataaactgaaaatcactgaatcgtaccccttaaaaacacacaaagcaaattgacaaattattgggaggcaacataagagaatggggtgtgaactttggatcagtgcggcctggatatcagctgtgtggtgttcaaatagattgcataacctcgttgagtctcagtcttcccatctgtgaagtagggatcattcctacttcgtagggttggcatgagactccgtgagatgaagttggtgggtcacttggctggggcaggtgtcacggagcgggacctgtgattgttcagccacctactctgtgcccagtgctgtgttggtgaccaggtatgtatgaagtcagtaagccacagtcctgagttatggtgcagaccccacatgcacccagagtcagcttggcaagaccccttgacaccacgtgcgtggagggtgcaggtcggagagctcacctccatggattccgtagagctttgaggcgtatccacaaagtgtccaggagaggtggcgtcgcctccacttgatagaggaaaaagcagagatggaggcagccagaagcatggtgcagtggtggggtttggtcattaatttgataatcacatggaatacaagctaatgtttattgagtacttactgcctgcctgctactgtaactaagtgctttactcctgttatctcatttaattctcaaagcagccctgtggcactgaggtggctggagatggagggatgtgtggctgccatgtgtttgccaggaagcagcaggatgggagtgagggcacagacagacacacatgccaggacttgtttgcacgaagctgaggaatgggtgcccatcattcattatactcatctctctgttttatgtatatttgaaaaaaaaattttttttgagatagggtctcgctgtgtcacccagactggagggcagtggcatgatctcggctcactgcaacctccacctcccgggttcaagtgattctcctgcctcag

SEQ ID NO: 23550 - DNA, 1025 bp, Homo sapiens
tatatgttttgtccattttttcttttgagctgttccaaggccattttttttttttttttgagacggagtctcgctctgtcgcccaggctggagtgcagtggcgggatctcggctcactgcaagctccgcctcccgggttcacgccattctcctgcctcagcctcccaagtagctgggactacaggcgcccgccactacgcccggctaattttttgtatttttagtagagacggggtttcaccgttttagccgggatggtctcgatctcctgacctcgtgatccgcccgcctcggcctcccaaagtgctgggattacaggcgtgagccaccgcgcccggcctccaaggccattttaaactgaccttaatcttctagaggtggctggtgttggcaaaaattgtggggttaggaaagctgtggcaggggttttgaattttggcagttccaagaaagcagcgtttcttggcaatttgtgaagcctggagatggattctgccaattttggaataaatgtggaattttctaatttaatcgtgaggcaagaaaccatgtgacctctgtcacctcatcctgacagtgtccgcagtgctgtcctttctggaactgtatgaaattgcggtcgtgaatgctttggagcgtctgctgtgtgctggagttctacagatgagcttaattatgggaacgccctcctgtccctgggcaaggagggggatgagcagggtgggggtgtgctggaggaggagacgcctgccactttgccaccctggaagctcactgcaagagctgcaaaatttcccacctgcctaacacaggcagggctttggtggcgggaccccagggctggctgtttttgctctttcatcacttttgtcaggaagtattgaaagacctttaaaaggcctctgacttgcagggcctctgacctgcaggccttttaaagcatctccagcttttctagtgagtttttgtattttggacgggaatgtctcacgaaccctggcatgccaagaaagtccccaatttcc

SEQ ID NO: 23551 - DNA, 1042 bp, Homo sapiens
ttggatgaaaatcctcatttgtcttgtaaacctccaaggtggatgtgatctcggcgaacaccagtaacagcgtgatgtttgtgactttatccagtgctgggcggaccacagatagagtccccaggtgctgagacactgactgtagtgtgctcagaggagggcggctagggcagtgagcaggaagccccaaaatcgtccctgtcaagcccagctggggagccgacagtgccttccctagaggaagggtgccaggggtggtcatttagttgtcctgacatgatccgttggccccacgagcagcagccaggtctgtatctgagagctgtaatttcctgctgataacaggaacacagataaggggcaccccatcccagagtgatattaggttggcttttgaatcaccaggctccttggatgtgccttaagcccacaggtgccctttaagcacctgccgtgagggcagatgtgacagatcgtgtttgctctctgggcagtgagtgggttttgggtagcttctctccaggaaatgatgaatcactcggagctgagcaagtgccagagaagtcttcaatcacagactgaacccaggagggtgtttcggcctttctaagtccttaagggttgtagggaaggttttgaacaatggcttttgactttaccttctgagaggctctgtcagggagtggtgatgctgcgggtgagagcagttttgaaggtgtcacatccagggccaaccctgagccttgcttctgtagccacctcctatgggaggtcatgacaataataagattttgcatgtgttgtccaggagcaaagacctttccaaactagtcgttgtgttgaccactgaggatgacagcctggtgggctcagtcagagccattgtgttaataccctgctcccacacacatagctggtaaatgccagaagttaacactcacagccaggccttccgacccccaattttgtgtcatttctgcttttcagtcttacccttaggtgtcacagctgtttatttaaactgtttgcagtgaattttgtt

SEQ ID NO: 23552 - DNA, 1017 bp, Homo sapiens
atttgtcctaatgctctccctccccttcccccccaaccccctgactggccctggtgtgtgatgttcccctccctgtgtccatgtgttctcattgttcaactcccacttatgagtgagaacatgcagtgtttggttttctgttcctctgttagttttctgagaatgatggcttccagcttcatccatgtccctgcaaaggacatgagctcattcttttttatggctgcatagtattccgtggtgtatatgtgccacattttccttatgcagtcttatcattgacgggcacacaaatgaccttccttagcacaactctttaactgggtgcagttctgattttactgctaggttttgaattaggatgaaggaggggaaggtagtgggtggatatgcgtgtggtgcagttggcaaaaacaagccctcagcacaggatggtgatcacttagcctttgtcaggagtgctgcgaatgtcttttcccagttcatagcttttaatgaaaataaacttagttttatgtcattgaatgtattgtttcctctgtagttgtgctttttgtgtattaccaaagtcttctctgacctgtgggcatgaagacagtcctcctggattttatctgaaggtgttgctttcacatttaggtctatagtccactaagaatggatttatttaggtagaatgaagtaggggtgcagtttaattttttttttcctatatggatattcatttgtccccacaccatgtgctaaaaagactgccctggctgggcgcagtggctcacgcctgtaatcccagcactttgggaggccaaggcaggtggatcacgaggtcaggagatggagaccatctggctaacacggtgaaaccctgtctgtactaaaaatacaaaaaattagccgggcatggtggcaggcacctgtagtgtagtcccagctacgcgggaggctgaggcaggagaattacatgaacccaggaggcggagcttgcagtgagccgagatagcgccactgcactccagc

SEQ ID NO: 23553 - DNA, 1030 bp, Homo sapiens
taaaagtaaaagtattgttggaaaaaaaaatgatagtttaggacaatagtccaaacctaggaacttgaggacctcatttaaaaatataaaatgtattggttccctcccctggatatactgaatcagaatttccagagaataggaattagaatctttttttatttgtttgttttttaagaaaagcagctcctccaggtgattctttttggttttggttttatttttgagatgaggtctcactctgtcacctaggctggagtacagtggtgcctcatagctcactgcagtctcaaactctagggctcaagcaatcctcccacctaagcctccagagtagctgggactgcaagcaagtgccacagtgcttggctaattttattttttgtggagacatggtcttgctatgttgtgcaggctggtctcgaactcctggcctcaagcaatccttgtgtctccgcctccgaaagtgctggattataggtgtgagctactgcatctggcctttactctcctgatactgtcctttggaagtcttaattttgatgaaatccaatttatctgtttttctcttttgtcatggtgttttgatgttgtagttaagatagactatgcctaacccaaggtcatgaaaattttatttgtgttgtcttctgagttttatgtttaggttctacatttaggtctgtgatacatttagagttaatttctgtgtatggcatgagaaagggttttaacttcagtcttttgcatgtgcatatccatgtgtcccagtgccagttggccagtcattgaaatgagaaacattcaaacacaaaagggtactgtgaaaagtgagtcttctttcactcctttccccaatttctagttatcctttctggaggcaacgttttaaattgatttttgtatattccttcagggcattttatatacatacaagtatatatgtctgaaaacatagattgaaaccaggttttaaagaaccttgaattatcctaatgtagaagaatatgtagatgagaataattttttc

SEQ ID NO: 23554 - DNA, 1033 bp, Homo sapiens
ctctagaccacttgctttggagatgtcctggaactactataaccaatctcaaagctatgtgatgacagctctgtgcagtcttcacgcacattaatcactcgtttagaaacgaacttttaattgatgtgacagcaaagacaagactgaatttcagacatgtaaatattagaatggaggggatctttctaatcaccttgttcatgcccttgttttatgagagagaaagctgagtttagaggaatgcacattcacatggcctggtggttagaactggaaatagaactcgggtttcttcagtttcagcttttactctttgggctggctacctttggaggatgactctcaggtccaaattgcaaggccagagaggaatcctggatagagctcagcaatggtggagatgtttttttcctctttaattacttactgaccaactggaattacccagggaacaagagttttcaaaggaagaagccacatgtaaccagactagccgaggagttgtttggagacctgacttgctcttttttcctgctcatatcaccattaattctttcctttattctcagtcttgcttccagatgctgattccttcaggccatcgtattaatgccaagaatgcaagtaactgttaaaagtcgggttaagatgtggtcactgggcctgagggatgctaattgcctgcctccttcgggattgcctttcccaggttctggtcaacggggtacgagtcaaagtgatgtgtacaacttccgggccttgtcctgcccaccctgtccctcttctctcaggctagaacttggatgtggtattagtgagcctattgccaccattagaaaagtgtaatacttggggagtggcagaacaaggcagaggaacctggtggccttgggaaagagagctgcccaccctctccgaactgcctgttataataacttgatgttatctgagctgctcatgtttagggctctttgttacagaactttagcctctaccccaactaatatataaaacactagaggcccttcaaagt

SEQ ID NO: 23555 - DNA, 1029 bp, Homo sapiens
gtctgcttgctcagtaggtccgtgccatgcacacagcttccccaggaccatctcctgccttcagggtggctttcacagcagcagtctcctatggcatgcaaagcttttgcagtgcatggaggccagcagcacccagggctagcaccccatggtactcccagcctcagatgtgtttatagcaaattgtctctcatgaaacacttttccttgagcagcttccccttgcacccaagagggcaggcttccagcaagttttgctggtgtggcaacacaatggcttctcttccgtcttgtgagcactggcctctccaataaggtctggacctcagtcctgaggaacctcttgcttgggtgctctaccttagtctcaggtgtagtgactcctctttgtgtttgctcttcctatattctctgatgctccctttacttctaactagacagtccctcactgtagttgataagttcttattttagatattccctgtttaaattgctgtgtgattttcctctactgattggaccctgactgatacacccagctactgcactgggtactgaggaatgactagaatttggataagcaaagaggaaggagaatgggagatttcagctagaacaagagcattgagattcatgtttttcatatttatattactttcttaaggatgaaagatgatcgttaaatattctgaatctgattataaattccttgaggcaaaaactatgtctgattcttccacaaggtgtataatattggaatgcttgatgaaagatcaaaatcttgtggtcactggctggtcaatcaatttaaccataactgagactggaggagaaaaacgtcattgcagcacttcggagagaataataaattaataataaaataatgataataatgttagaaaaaatattgagtgaatattatgtgccaggctttatattactgagcgcatatgtaaggacttgcaaaacatctataaggtaaatataattattatacctgaagcactgaaaggttgggcagcttgacta

SEQ ID NO: 23556 - DNA, 1028 bp, Homo sapiens
taaaatgtacatttcacataattttcctctttcagaactaaccatggttaatcattctttaaaccaggtttgtttccgacaaaagaaatgaaataataaaaactaaattctaactgtagtaatcatgtgatattaaagatattatttatggggttaaaagccctctttatcttgcttaggggtttccaataatcgaatcagtgctggactttttttttttttttttaggcatggctgccccctgttaataatatatttaattaacagctttacacaatgatcttaatatacttgaaatacttagaggactgcagtttataaaatcaagagtctaccttattgctgttttatttttttttttaccataaccctcagaaggaatacagttaacatcacagtcctatatataaatgtgtgtttatgtgtgccatcataaacatcactgcactaggtggcaatcttcactactattcatttgtgtatgtgtagtcaacctacgaaaggaatcattagaaacagggtaggaatgttgaaccttagaaccggaagttgccagagaaaatatgtgccctggccaactccacaggactagttctaggcaatctgaaggaaaccagaaaatgtgaatttctcttccctcaaaaagctatactgaagtagtatttaatattcaagtacttgtaaatttgcagaacagtactttttaatttgacccatgaattctatttaaatttgtcacttaatatttagccaagaagcaaaccatctaaaaagatttctggtttatttctccaactcctaataaatagggtcacatattttttaacttttttctaatttgaaaagtaatacaggcatatggtattttaaaaatgaaacaacacaaagggatatgttttgaaaagtggttcttgccatccctgaactgtaatcatccctaacatattcatacctgttttcattttaaaagttgggtcagtttttttattagtacatgtatttctatcctactgatttatttgctatat

SEQ ID NO: 23557 - DNA, 1050 bp, Homo sapiens
gacacttaatattataagcaagaatagaataatgtagtaccacagcttgaatctcagtaaactgttactctagattaagagattcacatttatgtttgactatctttttaaataaatataggagttattcttttcttgtattatgccattgtttctttcactcttttttctgttttttagttttcagtattctttgtgcacatgctcaatgctattactgttgctaagtcacgtgatcattgggataagccattcatatttccatgcctctcagcgttgtgctgggttttgttcatggaaatatttgtatcttaagatgcacaatctagtgctctgtaacaaataggtataacaggtgagtgatgagttaagtattatgagaataatcccatttttttaaatgtagtgtttaaaaatagaaaatgactggtattgtaggtcttactatgtagttcccttattatgttcctactgattatttctgtatccttacaatccgtcattttacctctattcccaagagaagtataaagaagaatgacatgtaattttttttccatctgagctcaggagaaaggaaaatatagcagggtaataaaattattaagcctaatttgtaatttatatcatcaaagaactttttttaaactgtgaggaaaagaaagcaggaggaaagaaacttttaaataccacaaaccattattttgtaattctccttctaaagtaaaagacgatttcctaaataaaattatatcataattaaaatctataaacagcccaatgtttaatttaagaaaaaatttgctgacttgaactcacagaaaccaactttagctacagtggtatttaaattatgcattagccatagctatattgaccttttgtgttttttaaaaccaaaactgctatgtatttacattgttctacttaaagacttttaagactatgtactaacttgatttgccttcaaaaacttaaagctaatgctaatacaagaagaatgatattcaagatatctaataacgtgtatgccaaagacataggcaatag

SEQ ID NO: 23558 - DNA, 1034 bp, Homo sapiens
atttaaaaaattggggaagttttttataaaaataaaatttgttggtgttcttgacaaactaggtgatctggccacgtgatacccacagataagggacaacagttggccagtgccctccttcagcaagaccggtgttccctagtagttacagtggccaggtgtcctcctcctctcattttgggtccctgccttgctcctgcagacattttattaatattttgtgaccccagatttaagatttgggaagaggacacagagtttcacagaaaactaaacatgagtagtcagacaagtgggagagaacacagcaaatggtgttagtgaattgcagaagcagaggaggtcagtaggacaaatgctatggacagatgcagatatgcagattgggaagtgtcctttcggtttggtcacctggagatgcccttagcaaaaacgcttaaaaatggggtattaggtcaagaattgtagaataaaaggaagggtgaatgtagaaaataatttcaagaagctgtgttacagagaggaatttgaggttgggagactgtgtgtgtgtgtgtgtgtgtgtgtgtgtgtgtgtgtgtgttttaatgtgagtgacttgagtatgtctatataaagatgtatttgacataaaatagtactttatttgtccttgacttacatttgataagaattacaaaaggtctagtcttagctttgattgacagattattctaaaactggtggtttttatgaaaacaaagccctccagcttataggatgggataaagtgctttttatacatctatgcgaagacagccctgcccctttagatctttactagtgttaaatgcattttttactagtttaatatgtaagcagccatgccttaagatgggtaattttacattttaacaactgtaggttaagtcaagcagtgttaatgtggtgatttgccacgtacacttactcatgagtgtgtgcattgtccatttccttttagtattagccaggtggaatctgtatgatgatcttatcagccagcatcacttcta

SEQ ID NO: 23559 - DNA, 1044 bp, Homo sapiens
ctgaagccatggcccaagctgtaccatggccccttatagccatgactggagctgaaatgtctgggatgctgggtgccatgttgcaaggctgcacagagcagcggggccctaggcctagcccataaaaacttttttcctccaggcttctaggcctgtggtgaaaggggctgctgccaagacctctgatatgccctggagaaattttccccattgtcttggcagttaacattcagctcctggttacttatgcaaatttctgcagccagcttgaatttctcctcagaaaatgggtttttcttttctatcacatcatcgggctccaaatttcccaaacctttatgctctgcttcccttttaaacaaaaattccaatttcaaacgatcttttgtgaatgcataaaacagaatgcttttaagagcacctaggtcacatcttggacactttgttgcttagaaatttcttccaccagataccctaaatcatctctctcaagttcaaagttctacagatctctacagcagggggaaaatgccaccagtctctttgctaaagcatagcaagaatgagtgtttgttccaggtcccaatcagtttttcatctccatctgagaccacttcagcctgggctcattgtccatatcactaccagcattttggccaaaaccactcaacaagtctctgggaagttccaaacttttccacatcttcctgtcttctttggaatcctccaaactgttccagcctctgcctgttacccagttccaaagttgcttccacattttggggtatctttatagcagtaccccactctctgtggtgccaatttatagtattagtcaatttccatactgctataaagacatacacaagactgtgtaatttataaagaaaatatgtttaattgactcacagttctgcagagctgaggaagcctcaggaaacttacaatcctgatagaaggggaacaggcatgtcttacatggtggcagatgagagatgagcaaagggggaagagcccctaataaaaccatcaaatcttgtgaga

SEQ ID NO: 23560 - DNA, 1034 bp, Homo sapiens
gccctttcctgtcctccagtttagctcttggctactttgctcatgctgtaaccttctccccatgcctaaaaggccctttctcttcctcttctctcaacatgttctcaacaagaaaacatgccagctttcttgttgatgactcataagttggataatctctcctagcaccattttactacctgctttccacatactagtgactcctcataatctttggggaggacatttaatttgtgaacattcactgccctttaattttgacttctggttgcattttagtattcttttccaatggactgcctcataacctgtgcaacatcagcatccaatcactgtaaagtgtgcaaatgtccccatgttttttctggtctatatctatgctggccctgatgttggtataattcccagagggtcttttacaacctcttttaggaaggcttcattgacagcctcaggctaggtttatgctatttctttatgttcacctaacactgcatattttactctgtcaaaggactttgtgattctctagtgaatttttcaatttactcatctaattttccaattatattgcaaatattgaaagcaggagctataaccaactcagctggttacccacagtgcttagcataggaacagctaataataggaatgtagaaaatgctgaaaaataatgtgacttgagccaggcatggtggctcatgcctgtaatcccagcacttggggaggccgaggtgggcggatcacgagatcaggagatcaagaccatcctgactaactcagtgaaaccccttctctactgaaaatacaaaataattagccaggtgtggtggtgggtgcctgtagtcccagctcctcgggaggctgaggcaggagaatggcgtgaacccgggaggtggagattgcagtgagccgagatcgcacaactgcactccagcctgggcgacagagcaagactctgtctcaaaaaaaaaaaaaaaaaaaaggtgacttgaatgtactaatttctttaacaaaatgtagagagacctatg

SEQ ID NO: 23561 - DNA, 1037 bp, Homo sapiens
ttatggaactgtgagtcaattaaacctattttctttataaattactaagtctcaggtatttcttcataaaagcgtgagaatgaactaatacagtaacctttgcttactttgctgcaaatctcctttctcacctgaagagttaaccagtaagcatatagaaactttcctggaacccatccttactccttattgttgtcatgtgtgattgcagcttgcccattcagataccttctgtttctcctatgagagaatcctatgtgtgtatctatatatgtgtgcatggacataggaaattgtaagtagttaagatttcctctagcatgtagaaattttccattatccttactcaaatgtcttccaaaatttgtacattaaaagacatgcctaatttttaactttgcaaagtagagtgtcctgtaaatgacctgtatgttattgcttccctagtgcctagaggaatgtgtgacaaattgaacggggtaagagatgtgtgataaactcaatttaatgtgatgttctctgtggtcctttcgaagcctaacattcattgatttattgattcagtgatttaatatgtatttgagtactactacatgaatcatactgttgtagacaatgggatgtaacagtgaacaacgaatgttctccctcattaaatttgcgtactgataaggaaagatggataataaatatacaaatgaataaataggtaatagaagtagtgagccagggggtgtgataaatgttgtgaaagaaagtacagtacagtgcaaggcacagagttggggtcctttttttagataggatggtcacatgaaactttcctgataagatgccatttgagtagacaacctggagggagtgaaatgttaagtgaggcatatattcacaaggtaagcattgcaggcagagtagaggcaaaagtgagagagtgatttgggttttaagaaacagcaagcccacagtgttccagggcagagcaaaggaggtaggtgaggaagttgggaagtggagagatgtaattggagtctagctca

SEQ ID NO: 23562 - DNA, 1060 bp, Homo sapiens
aaatgtttgtataataactagtttcccttgtgagcttcggtatttaatttcaaatatataatgtctacctgagaactccacctggcactggcagcccaacattgagatttacctatatctcaaattctgcatgactccaattgaattttttcttaagaattttttctgacttttcttaagacctccttcttctatcttattttacagtgccaatattctcaaatgcttccagcttggaaacaagaaacaacttgtgactctttttctctatttagccattcagccactattcgtgtacatttttgctccatatttcttacatctgtatgctgtttctttttcctcattagcaactttcccagagttgcagaactactcagatacagagccaggattgtagtccattctgcctgactcactaagttgtatcacctttctggcttatgcttgggtaacagggaacctttgataatatggaaatcaattccaaataatataacttgtaattttctggaacactttggaaaggaaaatactccatggactcttgttttgccttgtgtctgaaacataaaccagctattttttatgaggcattgacagagaaatagatggatggactggtttatttccctcaatagtatgcaatctcacaactgtctaaagatataaaggtttatacatgtagtaaagtatttttatctaaaatatttctattaaaaatcatcaaatgcattaagtaggataacttctaacttctactcccaaagttctattctactcagttttgatgtcttctcctaagattaatttgcttcccagagcctcatcctacctataaggtaaagtttataattttgagttttaatatccttttgtcttaaccataggtgatatccagtgaatgcttcgtaacagaattaataaataattggatgtacatgtatcttaggaagtaatatgtaaatatatattcacagtagtaccaattaactgattagtatttttccactttcttgccatttgtctgtcaagtagagagggagtaaccttaccaaat

SEQ ID NO: 23563 - DNA, 1050 bp, Homo sapiens
gttttcttctatttttcttatagtttgggccatgcatttaaatttttaattcactttgagttggtttccgtaaatggtgagcaatagaggtctactttaattctttgcaaatggatattcagttttcacagcaatatttattgaagagagtgccttctctcctttcttttcaatatagcattggaatttatagccagagcatttaggcaagataaagttataaagatcatgtaagttggaaagaaggaagtcaaatttccctcttagtagatgatgtagtcttgtatgtagaaagccctacagactccactaaaaagtgtaactgtcaactagtaaatgaattcagtaaactttcaggaaagaaaatcaacatataataaccagtaacatttctgtatgtcaactatctaaaaaagaaataaagaaagtaattctatttacaatagctacaaaaatttaaatacctaggaataaacttaaccaagaagttaaatttatctcctgtagagaaacagctgaaattgtggaaaaacagacacacgctcttatcatgtgagtggctgacctgcaacgaaaggtgcatgcacagcctcacctactgttgaggtgtctactgttaaaatgagagcattgattggaaaagaatgggacccttcaacttggaatggggttgtgtcataggatgctggtgaatctggtgacactgagtttgtaaactctgatgaaccttttttgccagaagaaacagcttcctattcccagtagtggcaacatcccctccctgacccatgctgccatcagcctttccacctttatctgaggagataaaccctgtgctgcctgaggccacagtgatggcctctcctgaggcagtttccaggcaaaatattgttgattcttttcaggagccacccccaacatccccgtttgcttctagacctataattagatgaaagtcccagcgggccgctagaggtgaggttgagagtgtgacccatgagaaggtgcaccacacttgaaaagaactgcttgagttctctaatttgtatg

SEQ ID NO: 23564 - DNA, 1047 bp, Homo sapiens
cttcagtctttgggggttgatcctgtttattactgatgaaacatgatttcccaaccccatgaaaaaatgcctaagtgccttgtaaagtagcacagggggtaacccaaactattttgatgagttagaattcaacaagcttgaaacatcagtttcttctcctttgatacagcataggagcttaagaacagtgggcaagggaggtagctcagtcttggagtgggagctccatatgtgaatatgtgcatgtatgcatgtgtgtctgcacctttgcgtttgtgcacctctgtgcacatatgcggtgttgggtatgcggtagggagcttctacttgtctgtaagacaaataggtcctgaattcagccttttgctcttctccaaactttggagcagttatttctcttagttctgctgaagctcataagaaaagtgagttttgttatagattttcctagaactgactaggccatatgtctggttatatcagctcctttggaatctctcagatctagagaaaatgatgaagtaattccagtaacctgccttaactctcctttattgtagtaaatagcttctatatattgagcacttactgtgtaccaaatgttgtttagatattttataaccatggccacatgtaattctcagggtaactcctcaagatgcatattattatctctatttaattgataaagatatcaaggctaagagaaataaatggcttatagccccagagttggtaagttgttgagcagggattaaaaccccaagatgcctcctgcaaactcagtctgatttcctctttaccccattattgaaaagtctctcttactgtaatcctctgggtcatatcagaatctttcctggtcccagatgagaaaaactcaaattcctcttcactctaaaaacactgcttggtacagtgtctctgctaagcctgctcagcatgcaaacaccccctgaagctccatggttggctttacccacagccttcaggagctcagcacatgtcaagcccttcagaggattttgggctgcttaagggaatctt

SEQ ID NO: 23565 - DNA, 1036 bp, Homo sapiens
cagcgggagcttgatatcccttgtctgtaacatagaccccgggtactgcgggaggggagggctgctggggaggatggggggatgttatataaatatagatataattttattttcggagctaagatggtgttatttaagggtggtgatgggtgagcgctctggcccaggctgggccagactcccgcccaagcatgaacaggacttgaccatctttccaacccctggggaagacatttgcaactgacttggggaggacacagcttcagcacagcctctcctgcgggccagcccgctgcgaaccctccaccagctaccggagggaggagggaggatgcgctgtggggttgtttttgccataagcgaactttgtgcctgtcctagaagtgaaaattgttcagtccaagaaactgatgttatttgatttatttaaaggctaaaatttgtttttttattctttgcacaattgtttcattgtttgacacttaatgcactcgtcatttgcatacgacagtagcattctgaccacacttgtacgctgtaacctcatctacttctgatgtttttaaaaaatgacttttaacaaggagagggaaaagaaacccactaaattttgctttgtttccttgaagaatgtggcaacactgttttgtgattttatttgtgcaggtcatgcacacagttttgataaagggcagtaacaagtattggggcctattttttttttttccacaaggcattctctaaagctatgtgaaattttctctgcacctctgtacagagaatacacctgcccctgtatatccttttttcccctcccctccctcccagtggtacttctactaaattgttgtcttgttttttattttttaaataaactgacaaatgacaaaatggtgagcttatgatgtttacataaaagttctataagctgtgtatacagttttttatgtaaaatattaaaagactatgatgatgacatttataaaatggctcttgtggtttaatagtgtgtaaaaatacccttgtgaatttggaa

SEQ ID NO: 23566 - DNA, 1050 bp, Homo sapiens
aaacagataaccatggcgcccactgcccccatttagggagaggaaggtgtttgtgctgatgttgcagttagaggcacgaaaatcaggtagcaacaacgggttaggaaattcgaagttccagaatgggagaaccaaaggggtactcgagcatgctttatctcacccccttttgtttctggcccgatgtggggcatcgcttccctggggggctgagcgccgcgtggtgcactccgtgacccactgcaaggctgtaatgcccttcccgagggtttgtgttgcatggggccgtttaccctggaactgctgcaaaaagcatctttctttttttaacttttaaaatttaacgtgcccctgcttcatttttgaaagggaagttttgtctgaaagtagctgttgtggagcttcccagatttctgcaaaggtcggtaccgccacccccccccccccccccgccttttttttttttttttttaatcaattccaataggaaatgttatggaaagtggaaaggatatttttcttttaaacggctgagtctgatctaacaggatattggggtgggataggatctgccaggttcggaagctccccagttggtcagggggaggtgggagccatgcctcgggtggctcaggaggaagttagtgcaatggcccggaatggggaaggtggggctgggggaggggagctactgcttttcctagagacctgccaggaggttttcctaagaagccagggaagaggctctcagggcttgaaaggcaaggaggtgtcctggggcccactccagccgaggactccggcttgccggccaggtaggcggaagctcccggggccgactcgggcttgtgctagttatcaagtaagtcggcctccgctttttacctgctttcgctgtgttgttgctgtagttgttggcagtgtgatagtaacgggaagtgaagccactcaaaaatgcttttgtcagacttcaactcacaacccagacctttagagcagggggaaggtctgccccttcccctcatcggctccctggcttggctgctgtgc

SEQ ID NO: 23567 - DNA, 1125 bp, Homo sapiens
agaaagctcaggataaaatatgttttctggaggggaaatactcaagtgttctaagccaggaacagagactctcaagagaggaattctctggcattctctgccttggataaatcatggattaaacatgagcatccttagaataattttatttttgtatttcactttacactgtaatgcaaacagcttttatgttttctttgacgaagaatcataattgagtcactttaggtcttttagctggaagcatttcaccctaaatgaaaagttaatgcattttttacaaggattaacatgctaactacaacttgccctttcagcagatgacaataagggattctgaaaagtttggactgtctttttctttttgtatacaaataaagcagcagatcctttctctgtgaaggttgttgcagagctcccgtaccagcttataaaatgcggctgtttaagcaggacttgggtgggcagcagaattctgcacatgacgagtggctgcagcttagaaagcaaatttcatctgattccagtactgtgattttaaggaaacggtaaaactcaaagtgccagtaatgccatcaaggctcagtaacatgccatttcctcagcagctaaagacaaaaagaattattttggtgaggggatagaaatcctttcgctttgcagtgacacccactttttcttagcttggcttgggagtaaggagattggagtgtggggggacattagaaactcatttaaggcaaactgaaatctccttcatcagcagtcttcctgctggtgtagccacagcagaactccgaggcttgcaggctgggctgtctccttgctgcctggcttgggtgtttatttgggcaatgcaagctgacattgtgaggtgttgccgatgcccaggccagctagcagggagccctcccagggctggtagaaacctatgtgtatatatattctcaaatttaaatagattgtacatagtgaaatgtaaatgacatgtaaaacagcaatctctatttttcttaactattatatagcagtatatatttgttgaacatgcttgtatactcttcattaaccattttaatattttgtacagataagttgattaaatattttattcataaaaccgct

SEQ ID NO: 23568 - DNA, 1033 bp, Homo sapiens
ggaggcaggggcagaaggattaacctcctggttaagggtgcaatgagccaagattgcaccactgcgctccagcctgagtgctatagcaagatcttgtctctaagtggtatgggagggggaaagctacacctttgttgcaaatagatctgggctcaaacactagctggctacctggacatgatgcaatcataggcaagttaatctcttggagcgtagctacctcatatgatagcatcaagaatacctttgttgtcccatgtctgccttcataggcctgttggaggtgggagggtaattcctgccttccagtaacatggacaaatttatccgtgtgaaagccagtttcacctgaggtcagtttcctctgctgccccgtttctgggcagtacctcatgtcatgacatagataatgcaagttgagagtgtgtgggtgacaacttcaactgttgctctacagtagagacctgtggagacaggacagactgatcagggtgggctgtggtcactggggaacctcatgaagcagacagaatttgggggccctccaagagaaaaagtatttatgccggtttccctctctccattcagaaaccgtactctatacacccccggtccccaccctaagtccaccaggtcactgacagctaacaattgaccttcacctgggagaggtaagcttgcaaggcccagcttggacatgcacctgtgatttctaaaggacttcttctgaattcatctctgaatgaggttggcggcactgctatggtgtctgagcctatacaggagccgagggctatgtagtcatcagagcctcagtttagaggctcacatgacagagacatggagtgtggagcccatctcagcaagtcagggcctgacgcgttatgcccgctcacatgtaggcacaggagacctgggacagaggaagcgatctgctcctgcctgaagtagtgggaggggcaggaaggtgcattgctgagcagagggactatctgctggtccaaggagcctctgtccggctggactgaggcta

SEQ ID NO: 23569 - DNA, 1100 bp, Homo sapiens
gttgagcttgggtttaaattcattcacagccagacaaacgtgagtatgaagaaccagtcagacatcactttccccattggtgatccctgaaggactttccattcgcagcacaaagataaccccttgaagagagcaaagaagaagagaaaggctgaccagaaatatgaccgtaatatctaggcacttcactctccgcagctgtactgagctcacattatattgtcatcttctccagattaaggccttctatcagttatgggaaaggcaaggatttctcctaccctgattcttcctagcatatggctggaggtgggggcggaatctccccacatccccacacagacggcttgtgaatgttctgatggtgtgcgtttcctccgttggacgaacaactcatcttttactctttgctttttatgccagtttgggaaggttgtttttctcccacttgaaaatcttcctcggaaggaatatgttgccatcagcaattcctctgtgttgtaactatctcctatgaagccagactgtaaggcagtgcgtcttccctcaatagaacccaagcccattcttcatggttcagcaaatctctgagtgccttctgcgtgccaggcactgtgcttggtgttggaactcgacagggagcaaaaccatgcctggttctttccctcaaggagtttacagtctagtgggggagacagatgtttatcagatagtgcaaaaggcaataaacactatgaaggaagatggtcagtgccattacagggagctccgcctcttcttggattcagggagtagggggaactgatctgagatttaaagaaatgataagcttagcatttaaagggagggtgagctggggaaggagcagggatgatgcattccaggcagaggagatacatgtgcaggagagagtatggtgccttcaaggagatgcgaaaaggtcagagaaactggcattaagaaaccagaggggagcatggcacaggcggagagtggagaattaggagggagaggccatgcagggtttgtctagccgcataagtatgctgtgtctttattgcaagagcactgactggctgactgtttttaagcaagggaat

SEQ ID NO: 23570 - DNA, 1293 bp, Homo sapiens
ggcaggggaagcaggtgtggagtgggttcaggctggctgggtcctgcagactgggtggaaagcatgtcagctgaagtacagaggtcacacagggagagcaggaggggcccatggggctggagagctcaatttgagcctctttcccccaaaggtatggggacccactggagatccttcagccagggagtgacccatgatggggcttctcattctggtgtgttatcccttgacaatgggggaagccacatagcatagccccaaatgcccgtctacagatccttgccggtctcagactggtctgcagcaaacagaggaaaatactgacaccatgcagtgagtttttcatagaactaaatgcattgcatttaaagtgctgtccttattctgagactgtgttctatcatccaagattctttgtagcaagcaacagaaaccaatcctgggtaattgaaacagaaaaggaatttattaaaaggatattagtcagcccagagtctccagggtagttggagaaccaggctcagaggccacatggccaggaatgacaacagtcatacccagatcaggccccacaaggccccacagctgccctgctggtcagacctccagttggtccagaacagcaccaccaagcttccaaaagtgggtgctgcaaatgctgcagttctgcgctctccccactcctatgggtcaccagtttctgatataaagtgtgtgtcggtgcgtcctgttggtggagcaagggaggtaagtgaatttgccattttcagcttctataatgcaagacgggcttagcttccacagcaaggcaggggcttagctgtgtcttagcttcctagacacaaggcaggggctcaggtgctgagaacctgcccaggaaggaaaggtgtttcttctctgtctctttgagtgtctgtgcatgtgtgaattttaaaaacgttctttcttttgtgaagcgaaggtgattaggttgtttgatgtttaaagcattattgttacttggcagaatatgaagttggaaagctattatttgttcccacaagttttggaggtttagtagtccatgaaatccaaaagactaggactttagtgccagacaggctgggcctcaatcccagagctgccccttactaatcaagtagctttgcatgaaggtttctgaggtcctgttttgttgttgttgttttttaaatccccttagtctgtttatgtatccttagatctaaaggtagtctttttatttttttttttgacatagactctcactctgttgcccaggctaaaatgcagtgg

SEQ ID NO: 23571 - DNA, 1028 bp, Homo sapiens
cagaaaggcagggtgactcgctcagtagtgtagacaaggctccagcccaccctgtaattccactcaatgtttcttccacctgttccaggtcctttgagcccctgcagtcctcctggtctgtcacatgctagacaatggttggcacctgtcttgtggtgtctcccggcatggcctggattgtagtgatctgtggtctgtccattgctgaaggggtgtctgctcctgaagatcacatggtcagggcagagccggaggctgggctgggggcccagtagggcctccctacagagcacagggaagtggaggccgtctctgcctctcctctcctctcctcctcttttggggtggctgctcctggaggggagaagtgaaggatttctggtacaaagtcattctgcttgtcctgaatgtcaggaaggaaggtttagacaagattgtgtgtgtgtgtgtgtgtgtgtgtgtgtgtgtgtgtgtgtctgtagctgtgtgtgtctgtgtgtctgtgtcggcatgtctgctttgtgtgtctgagtgtgtgttcatgtgcctgtgtgtcttggtgtgtgaacctgtgtgtgtgtgttatatgttgtgtgtgtgactgtgtatgtgtgactgtgtctgttagtgtgtctctgtgttgtgtgtatgtgtgtgtgttcatgtgtgtgtgtgtgtctgtgtgcatatgtgttcatacatctgtgtgtgtgtccatttgtctgtgtgtatgtacatctctggctccaaagaccaggtctgtgtgtgaatgtgtatttctgtatgtatgtgtgtatctgtgtgtctgtgtttgtgtcagtttatctgcctctgtgtctgagtcagtgtgtctgcctttgtgtgtctgtgtgtgtcatatgttgtgtgtgtgttcatgtgtttgtctctgtcagtgtatctgtgtgtcatatgtcttatgtctgtgtgtgttcatgtgtttgtgtgtctctgtgtgtgtcagtgtgtctccctttgctgtctgtatgtttgtgtgagtgtgtcagtat

SEQ ID NO: 23572 - DNA, 1068 bp, Homo sapiens
caggatggaggctcagcttccaggagtgattctcaacaggacactgcatggctggaccctcaagattgctgcttccacagtcaggaaagttgagaatcaggactctattgcaggaactgtcaaccccaggaacacccactcaaccaccttctggggaccaggagaggtgaccatgactgtttgcttcagagttggcatgccttttgctgcacctgcaatctgcttttcagcacacctgcaaaactggtgactggtctccttgcctgtgcttgccagagaacggcagaatctaccaccgtatggcctccacctcatttccttagcttctcaaagcatatgcaaacacgtctgcttggtagaatcttaaacacatctagaacctggaggtgcaaaggaataggtcgttgtcattttgccaactttggcatacagcaaggcacatggggaggaaggtccaatggatgttgattgagccagtctgcagacccacacattaaataacttcccagagcttacacaggaagtggtggatccaggatttgaagccaggctgtgtgttcccagcatctaagctctgtgaagtgtactgcctcacaggaatcccgtgagctcatgcttggggctggctggactccatgacaaacatgtcttctccatattctgtttcttcagcaggttcacagctctagtccatgtgtctgtatggtacaaggaggactcttgagctggctctgaatcctttgaggactgattttgatggtgtctatctaatggctattgactggttgtatccattaccctttgatctaacaatgctgcctaacaagtcaccctaaaattcactgacttaaaacagtagacatgtaatattgttcgcctagtctataggttggctggttcttctcagctgggttcactcatgcatcagtggtcagctgcaggtcacttaggtggctctgcttatcttggctgggacctgtcacatgcttggggttagctggctgatctctcactaagtaggctggtttctcatcctccaatagtccagccagtgtgttcttatagcaa

SEQ ID NO: 23573 - DNA, 1050 bp, Homo sapiens
ctggagggtgactgccaggttcactcatgccatcagccccgcctttgtgtcctcagtaatttttactctgagcataatcacagccctcgttgagaggagccactgtccctgttggtcttctttctagaagtatctcttatatactgatatacagcagtgcatttacattgttaactgtaaaaatgacaccaacacatttagaaaggccaccagataaaataaagaaaaatgtatccctcaacgctgacatacttactggcttgcttttggaacgttcttctttctgtcttcaggtgctagaactttaggagagtaagtgggctctgttgagggactctgaagactggtcacccccccgcccacacacacacacacatcccccagcacttgagctgcgcttccacataaccacttcctttatgctgggactgtggtttctttgtgtgtttttatgtcttttccatgtctgggtctgggtttgcctcccctgagagaccgtaaacttctaaagaacaagaactgtgttgtctccttttataggagtgtatgtttcattaaaaaaaaaaaaagtaaaagtaaattttaaaaaacgtttcttgtctatgcctacgatgttcttattgacttgagggtttagacagtgtctctgaaaattctctggcaaacactccctggccccaccataaacagctggttgatgtaaccacaccgtagctcagtcaccacgtcacaggagctgtgtcttcttctgcccgggaactacctgtcctgtgtgacagaaaaatgcagcggttgccagccaagggcccacaggcaggattcccctgaagctgtgggactttgctaacaatgcatctcccacattgaggcttttcagaaatgcgattgaaaatagaagtgtgggtgcagcattttccttcctgccacatgggaattctggggaaagagctcaccttgaaggaacaaccttgctgggagtgcagtggggggacctttcccctggagccggagcccctgctgggttctggcagccccaggatgcccactgag

SEQ ID NO: 23574 - DNA, 1098 bp, Homo sapiens
gttttaaaacgaattttatttttatgcttagtaggatggattttatttaaacccccaggcagactccatttaaatctgtctataaattgtatagtcttgatgtttttgtataactttgatatacattctttacaaaatcccggttttatttttacaagatgaagattatacattttaaagcagttatttcgtcagctttttctgtctccttgtataatcatatcagaggactgaataatgatttcgttatttcatttgcacagtctctcgtgactgctaagcactctgcttgtagttcctgttttttgctattcctctgttcttgcgtttttttctgcaatctctccccgccttgcccagatctcttcctcaatgatttttttttaaattttgtacaacaaatattcctcggtgcctcctgcccaccagacactatgccaggtgccaagtgtagaatgcagattaaacagccaggttgtctaccccttggcacttggcatggaattccgtggcgcctttccattaaagagggctaagggctgtcagctgaatttgacaactcgtagaaacaggaacagtgggttggggggggggcatttatttctctcgcatctgcagcctctgtgcaatcagtttgtcatctctgaagacaaatttattgtgaattaaataagatcaccctttgatgtctcttgaatgtggcctcttctcaggcctggctccttctggtagagctgttgtctttagttgctgacattatcaataacaaaatcttggcccacccataaaattgtcccacttccataatccttgacctcttgtgactgattagtaaagctctgtaaaaaggttacctgaaaatatattttataaataccgtgtattatgattcagagttacacctcgtgcctaaaatatgttcttcaactttaacctattttaagttgaaatagttttgctagatttggttggtttatcattactgttgttatcaacattggtttggtctgttgttagtgaaggtctttgttaaaaagcaaataaataagtggaaatccagttaatgtaagatattttggtttgtgaattttatttgcc

SEQ ID NO: 23575 - DNA, 1029 bp, Homo sapiens
ctgagggcaggagtacctttctcttttgttcactcatgtattcccagtgccttgaacatactgcctgacacatagagggaatcaatatttattaaatgaatgaatgaatgaatgagattctcaagcacctaaaaatggtttgacccctatctcctagacctctctgttcaccagcacttatctgccaaggatctttcccagaatacatcgatcaccagtattgccaataccttgtggtcaaagtgatcagtttctccttgtgcttcaccttggagaggaaatgtactcgccactttggttctgtgtcaaaattaaatggcgaccttggctgattttgcttccccgcagaggttatttcttagtcgtaaagagaacattctatccttgagaaaaataatatttttgccaccttcagcttgaaaatggctatttgatatggatcacgtgcatctctatcagcggccgctggaaaagcttaggttgagaggatctgagaaagactcgttgcgttgtcagagggaagctgaccataaggcagaatgagtttacaataacttatttacctgtccaaatccttcatatcacattaaagctttcccctgctacccgggactctggagtgctaagaggaaaaaggaaaatcaattgataatgatatatttggtttaaaaaaatatattgattcccaggtaatgacagtcgtgcgttttgcagtgggggatgccatttcccgttgtgaagatggctttctcatagattacatttaaaagaaggaaccaggagtagctctgcctccccgtaatagatagcctctttctcctaggtattaaatctataatttaaaaaaaaaaaaaaattctccccagggaacctattctttgcctcctcaaggtcttcttgcccattgtgtgaaaaaagtaatgatttgtttttgtaattctagagtttgtgtccttttcagtattagattaaagacttaaatgttttctttttccccattgctggagtttcttagtttggattagatgg

SEQ ID NO: 23576 - DNA, 1113 bp, Homo sapiens
ccctggcccactctggggacctctgcagccccttcttcaaataggtatgtgggcgctcacacccctgaaaaggccgtgtgaccacacccactagctggggcccagatccctcaacagaacctcagccgaaccctcagccctacacaggcatcatttgggattctggtccgttccctgcctggtgccctgcagctgctccgcacctttccatcaacagggctgcagacccccagcctgcgctgtccacctcggtgtcagcaagtggcctctcctcctgcttcctgtccatcttgctcgtgtgagctgccgtcctccagctccaccgcctcctcctgccaggaagggaagctgttggtgccgcaggctttccttggctccctgtatccccagccctccctccactccctctgcttcagctgttcccagacttgactcccagatggcacctctgtcctaaggtccggaccatttctccagtggctcatgcgtagcagatccctgctgtctgattcacatatcagactctacctgtccaaaacaaagctgcttccttgctctccaaggaagccttgtactcgtactgtctcagtcctcctccctccctcccttagccatgcatctccttctcctttgccttaggctgctcaccttccttcctggaccctgagctcactgaggacagggatcatcctcttttctctacaagcccggcacagggccctgttcatgcatatctcttgggattagattattttattcagttcagagattacagaaccaccgacagtgtgtcctcataagcagcgtggtggcagggaacctgggattggaggcaagctctggattctagtcccaaatctacctctaactctgggaaagccctataaaaccttctgagcctcagtcttctgagctgtaaaacgggaataaccacggccttcccatttctcaggaccttgaaaggtgacaagggaggaacggtgccaccagggccagcagttcttagcccttggtgcacattgaccggagtgctttaagaattacagatggcccggccgtggtggctcacgcctgtaatcccagcactttgggaggccgaggtgggcggatcac

SEQ ID NO: 23577 - DNA, 1045 bp, Homo sapiens
gcaatgatgctgagtggtcctgacaacactcggacagcacacagtgaatacaagagaagaatttttatatttcctaggctagtggaattaaaaccttcctactctgcaggataaatggagagaaacagaatctctttttcctaagcagttatctaagtgtgatacttagatgtgagcaaggtaattaggctttgtttttttccgctgcttggtcaaaagcccccttctcaaactacttggctccaataccatgggggaaaaaacccacctacattgattggatttaaataatggaattgccattaatatctttcataaaagatgattgatttctgactttggatttatggaaagttggggcttgtaaaagtgttcagagtggcagtcattcagtattaatgctggttcatacccttccctcctcagggctggttacatggatggctcccaacctaaacccccccatgccagctgctaggtcacagggatctctggagggtgtaacgggcagccctgggcccatccagttgccagctgtggtggtccaggaggctgggctgaaccctagccctctttccttctttacatcagatttttttttacctaatatgatttttttttattttactttaagttctgggatgcatgtgcagaacatgcaggtttgttacacaggtatacatgtgccatggtggtttgctgcacctatcaacccatcatctaggttttaagccctgcatgcgttaggtatatgtcctaatgctctccctcccctttcccccaactctatatcagattctagtatgaaactcagtgctccagcccctagggacaccagcagcttccacctgtgctctgtggaagctcactgcccctcataggatggaggaccactgatgacccagagaggccctctgcaggtgggtgggtatgtgaatgacacagcctctgagctctgctctcctaccctgggagctcagatggactggcctttagtacagggacctgcgcgaatgtggtctggtggttcagtatgagttcctgt

SEQ ID NO: 23578 - DNA, 1033 bp, Homo sapiens
agcaagataacagtgaatgaaaacatctctgctctaaagtagatattctccccagcccttcccagcatggtctggaagggaacagcaggatattcagacagtgccttagcaaggaaggacacagtggtgcgttcgtgtcaaacactggtgtgcagaaggtagggagtccaggagggcttcatggaagagggagacttgactgcgccttgagatgtctggaaggagtacagagggctcttcaggagtcagaacaaacagataagtgatcggaagccgtggagaaagtttaattgttagaatttccatttattttggtgtgtatgtgctatgtttaaaccttaggaatttgcataccacttggtatcattttattagatcctagttttgtaggtctagaagtcaagaccaatgttaggaaaactgcccttgatatgtagagacacccacctggccatctcctgtcttccccagcagaaggatggagaaacagacaagctcctgatagcagtgacatgatgcatatgtgatgggcaaccaactgtgactctgaagccactttaaacactgtttctctgatttaaaaacctgtttggagctttggaagttgatttttaggtttataaaaaaactggactattttgagtttggaaacataatttactatttccaagaaaagagttttaaaaaccgattactttccctaactcctcatccccttgcgacaatttataaaagagaaatcaggatttcaaatcctgcacgtggagtgagtagcttttttgagttcagttcacgaggttgcactttgacatgctttttaagatttgaatatttttataaatcatgattatgctactgtttaatgagaacaaaagtggaaatcgcatctgtttgtctgcggcggagcatctcccggcctgtgtgtgctgtctgggaaagtggtggcccagtctggagagctgacgagcagcttgattagctgaaattacttcctgcagtagtttgagggtgtcagtcctgggatgaactgggt

SEQ ID NO: 23579 - DNA, 1260 bp, Homo sapiens
ggaggcagtgacagctcaggccagtaatgggtattcttgagagcaatcccaggtcatcaagggaagagaaggttatgcttcgtatactgtgttcaggggccagataagttttaatacgttccagaagtgtgctcaagcaaaaaaaattattagaatttttaaaaattaatatttgtgcttaaagagacaaatgtcagagatctagaacgttaatttatttggaaaaagttcaagcagagggtgagagctctgatcgcccaccagccttagcattccggagttttcagggtcggagtgggggccacttctaggcactaagaagagctacaggcagggatgtctacagggtgccccactgcccatggggtcagaggcctggagctttaggcaaggcctcacctctgggcagcaaaggcggctgtctggagccccggggcctccctagggtttccatggttaagtcccagtgtttccagttagggaggctggagggagggggcacagggggcagggaaagaggcccagccttccctgaaagggagtcatggctcctgtttgcagctggaactggaagggggtaggcactaactgggccagaaaaagaagctggagcaaggttctagtgccggggctgggcttggattggactcagtaattctgggcctctggggctggctgtcctcgagccagcatgtgccgggcacaagccaggagccgtggcagctcccctcagtctgctcaggggccttgtgtgcccagcctgtgggccgccattctggccgttgaatgtgcccaggcctctcctcctcaaaccaccaagctcagctgatggccctggtgacccagctcctcccaggcagccaaccgaagcctccacggggcaggcactgagcagctttgatctgcccacctgctgccatgagggggacagtcatttcagagcatccttttgcctctcaccttcccgctgggaacaaaacccttaaatcctctcctcccctctaccagaatgctctgtcttctctcatgtttggctttttatacactatatttgacagtgtctctcccttcgaggttaagtgtcgttcaccatggtccctcactttctgctgctaggggcctttgcaggtggagaaactgaggcccaggcactgagaggagatctgagagccctgtgatgcagggtgtcagaggagacaggccttgtcctggcaagctgtcccctggaccctagcagctgcctccccgacctccgtggag

SEQ ID NO: 23580 - DNA, 1079 bp, Homo sapiens
atggggaaatgttaaatttggggagggtggaaaaagggtcagagagacagaacttgctgactcctattttgggactagttctgcaatccaatttcttttttcttaaacaatcttatagaaatctgccagagacaatgaataaaggcagaactccctggtcgaagcagagatgcctctttctggagtccctgaattacccatatgggatctgaggcttcctctgagccagtttgaaaatgcctgccctcggaaatcctccttgccttctgagccacgccctctgtcagggtgggcagggtccaggagagaagggaccgccgcttctgctagaaccaggcaggtttcgttttggatgatcattaccaaactcttggctcaaatgcattgtttaaacttgacttttctacattctcccaggacctgagtactaactaaggcctgagcaggtaagctgaaccgcttgacgtgataatccaaactgacaggattgtcagctggttacgagtctcctcctccttcccacgtcactcagaggacaggagggcagagggagagatcggaagtgctgggcattaggatcgaggatgcgctgggtgcaggacccaccgaggaggtgtggactctggcaagagggcctaaaaaccccaaaaggctccatctatagactttccacgtcagcctacagccaccccaaattttctatgattattattttaacaacacataggccttatttttaaaatctgctgcacttgagcaatttcatctgacgtcagctggctgccggcaactctgcttgaaaacaagaataaccaaatcttctaaggagtaatgctgaacctgcttcaaacgcaataaatcacaaaaaccattgtttacaataagtggtatctgattgctgttagaacctgtgtttattgcttttgtgcattatggtctcttgtaatttggacagccagaaattgtattcctttatgcagtgcgtaggcagggtttgtaaggggggaggcatctgtaattatgctgccagggagtgaggttgaggagcctccaaggagcaagaaaatgcagttgcctgt

SEQ ID NO: 23581 - DNA, 1024 bp, Homo sapiens
acccaggcaactggcaggggtggccaatgcagtgtgttttcagagcttagtatgtcatcagatacaggggaccctgcagaatgagggctagaaaagattggggccaagggatgaggcagcagagtgacctggaatcatcaggaagacttcatggaggaggcaagagctgagctggaggaggagtgaatcatttatatcaagatgtgaaataaagctattcctgttgttttggggcctcaggtgaggccccaggctgtgcatgaaaggtatccggcacccccacattagaaagaggagctagacagccccagggcccgtctctactcccatgagaaaagctttgggctgactatagggagcagcgatcctagaagagagctggcctaggagggaaactgaggcttctccccctctcccggggaggagctccccactctaccagcccctcaaccagtactctgtgggagctgctgctaccccaagactggggtaccccaagcacttagaaggatgtgacctgtgttccttggaatttgggggacaccaaggctgtgcctgaatcttaccaggaagtgtccagatgcaaaaggctcccggggatatctggaacatgcagtggagagcgagggttgtgctggtggcagtaggaccagagttggtcatcaagggagagttatggttgtgagtccagagtggacactgcacagggagacagacttgagccatctgggaagaccctgcccaggaggacagcctgccagggtgtgaaccatcagagccgcctgagggagcatttccagcagagcacacaccctcgtggagctcccgcagagaacccaccacagtgccacagcggaaggagggccggcaccgggtctctgcacacggaggctgtctctgcccgtttacatcactctgctcacaccttgcccttgtgctcccagccccgctccctggccactctggggaggctgaagcagcagttagtgagaaggaggcaaaaccagagaagggcgatgctgcc

SEQ ID NO: 23582 - DNA, 1014 bp, Homo sapiens
agccctgcttcccattaataactgtgagtgttgccggccacagagcctggcagaggctgagacaatggagctattggaggctggctcggagcgcactgacatcttgctgcagtgccttattgattttattttcctgttatgaaaacaccaccccactgaggcggggagggaaagaatgttggacaggggagaggagatggaggattatttgggcacgctgcccccaggccagccaaacacattcctcccctgggcgccagcccgagcgctggtctgactcagtgacctctgcccagtagggccagccgctggacctgctggccacatctggcaggcgctctgcagggccagctgttggccatatggagaatggcagccgctggaaccgactgctcggggctccaggtgggagagagaggctgggcccggaggccgtcttgaaagtgtctgtccttttaaggatacatgcctttgtagggatggtgttgggctgctctgggggatgaagtggaggggctcggtgctggggctcccccacagggctgtgctgcctgcagagctcccgctttgctccagagtggcttgatattcaccatccttgactggcctgatcccaaaccacagccacatgagaggaagggaacccagtctcagacagaaaacaacagctggggcaaggactgggcagggtggccaggagggggagagggggcgaaagttcattcctgtgaggacagcccgctccttggcatgtcacaacagaggaactgaattctgcctccagcccggcctgtttcctgcaggggcttgtttgattccccggattaagccctggtcccttggtgcccaggagcactgggtggggggaagggaggacagcagtgctggcttcccgagcacccctggcagatttgggccacagtgccttcccgccgttctagcctggctcctgcccacccagaggcctgtcccctagcctatgtgtctgaccccgtgccaagaccacatcaactg

SEQ ID NO: 23583 - DNA, 1024 bp, Homo sapiens
tgaacttgctacaatttcccagttccactccccatcccatccaggtagggatttaagctatatttcagggtggtaaggtgggccacttccaaaggaacccatctcttcttgaaaacattcaaactgatgagaaagcagaattttactttcagggcactccccatgtagtaggttaaatagtaccccaccccccagccaaatatatgtccacccagaatatctaaacgtgaccttgtttggaaatagggtctttgcagaggtaactaaagtaaggctcaagatgagaccatctagattggggtgggccctaaatccaatgacgagtgtttttacaagagaacagagaaggagatttgacaacacagagaaggccacgtgaagacggagcagagatgaatgatgccaccataaagcaaggaatgcctggagccaccagaactggaagaggcaaaggaccctcccctggagcatccagagggggtgtggccctgctgacagcttcacttcagacttcggacctcccaaactgtgagaagggacctttctgtcctgtaagccacccactgtgtggtcgtttgttgccgcagccccagaaaaatgataccccatggacaccccatggaagggtctcttcctagcatctccttcaagaaggtccatccgcgtgggactggatttttgcaaaacatgctcttgatgctgtgagtttaatccaggagcagcaggctgacctgctgacctcgtctctgctgagttgaaatgaaacaccatcacaccttcttccttggtgtcgaaaaatgtttctacaagcttcctaatgatcacctgcctgcttcctataacatatggactccaatttggaaaagtttcaaagggcgattaaagcgagaagctctagtactcccatgtccctctcagaagggaaggagctgggtgcgtcatttacgtgcagtggtgtctccaaggaggggcagacttgtgagtaggatcagacactcgatgtggcctccatttaaagggagcc

SEQ ID NO: 23584 - DNA, 1051 bp, Homo sapiens
gagctcaaatttcagttggggccctattagtctgcctttccaaaaagggcgttgggactttaatttaaaacttaaccagttgaaaaataaaggtggcgtggaaatgctttttgatttgcagtaggtcaagcgattgtctctcatctgtgactagagaagccagcttgtgtgccattcactttaatgagtgttatttaaatgcattgagcacatatagattttcttaagaaacttacaagacaaatctttctttctctaagaacaatttgggggtgggagcaagctgtaggattttttttttagatgatgtattgaaagctaattaaaaatagatttcatgtgtgcaaagtgataagggaggaaaaaagaattcgttccatttgaatcctgttatgaagtacctaagacatttgtctcgttgttggattggaaccaccgagctaacacatggggagaggtgtggccaagctcaggcctcggtgagacctggagtcagtgttactaccccaggatcccgtgaacccagctgtgcgtgcctgatgacagagcacaggctatgaatgcagctatttctacccctgccttctttggcaaacagtttttggtggctcagaggatgtatggggaccttttaaagccccaagctccaggcctagtggtgagctgcagaaaggctattgtgtcttcacctgcgtggctgggagtgaagagtcaggctgcacctgctcccacctgcttctagaccagaaagcaaagcccgtgtcaacctgagcagggaaaggtatctcttcggacttcatattttgcaggggcctagggtgaggggtcatgaggatccatctacaggcttgtcctcccttctgggaggccgtactgggagagagggatggttcagccccttcctttggttctccagctcctcccttcctattctggcactggacttccacctcatggcacaccattcatcctcgctgctgcattcatccctgtcttcacaagtaacagtgatgagatcttgtgaaaatactttgaggcacagggaatagct

SEQ ID NO: 23585 - DNA, 1050 bp, Homo sapiens
tccatgcacattccagaaatctttggtctgtgaacctctagtcttagggcttactttgtttcagatcaaaacctgcttctgtcctagggtggaaatgggggtttggggagtagaggccagaagtggggtcctctgaggacaccccttactcccttttcctgcttgtctctgacaaggcacccctgccagctcttcctgggccgaatgaatttgagagcttcctgaggaaggtttgcaaattttcagtggcatccttaaatgtacggaattcccccaacccgggcacatgcatttagattctgaggacgaaggcagttcgtgatgtagcgtattcaaggctctcagaatcctaaaaggtcacagtccttttattcttgcctcttttcacttctttactgttcttattgatttatttgggcacataagaaaacacagtaggcaaagcccactacttctattgaaataaagtattctgcagtcaaaccacacaccataaagaaataattgcagtctgtatatattgctaatggacatctctcagcaattccctgtctcataagctttaaacacagacattagtataaatatgcagaaatccccattcgggcaaattactctgcatttctgaatggaaggaagattaaccatgtgctgatatcaagctttgaaggagcccagcagagcagaaagaattcactggccctctctgggagggaggttgggactccctgagagagttttggctggcatctcctcaccccctgggcccagtgctcccccagagcactgagagctgtgcctcgggagtgggggaccggcctcgcctaagaaggctggttggtcaccgggatgtatttgctgagccttccgggctcctgaggctctggcaggagcaggagcaggaaggctgaaggtggatgctttggcctggcctctcagctgcctgacagaagcccttaggggtggtccaggcctctgaggccaatgggctttgcggagccacggggcagttcgtggagccagctggctgtgcgtctcagcccctcaagc

SEQ ID NO: 23586 - DNA, 1672 bp, Homo sapiens
tgtgctagaggaaacagaggcccagaaagctggggtgctggcccagggtcacacaccaattagtggcagtgctggaacaagaaccaggatccaggtcttcagaatcccagcccagaattctgtcccctcccctaccgcttcactcaaaaaggggatgtcatctacctggctcgtggtttgggcattaattcggctggtgactctttctggagatacgtgtgagcatggcagctgagccttatccagcctggccctgcaactggccctgtgctgtctcccctccgcctgggctgtgcgcaggcgccgctgggctctctaccttgtctctagcccaggcctctatccaccgcctcctaccccatcccccaggtgtcccacaggccccaccccacaactgatcttcttgttccctcccttcctgatgtcccaccaccatcccctccaaaaacctgttagtggtctccatgcctccccctccccacttccttcctgcactgagccccacggggtccacacgctcctgtttctctgtcctgctgttgctgtgtaattccggccttctcacctctccctcggaaagaccgtcaccatcagcagcactgcacactcccacccgctgagcgctccctgtgtgcccgccacatgctgtctcatggaaccttcaacaagtgtggaccctgaggctctgaggatgtgggtcccctttcccaaggtcacagagctgataggaggcccagtgcaggttcaccctcaggtctggcttcgaggctcaactctctgcacggcgctatcttgcctcccattggcctcccaagccactccccatcctgcctctgtgtggatttgtctgaaacccaagtctaaccttgccacttcctgtccagaatcccctgtggctccctggtgccccaggatgaagctggagctcccaggcaagactgttgcgatctggccccgcccaccgcctcattgtgttccctgttgcccatggcccttttgtccacctgcacctgccccctcgtgctcctgcaccctcccacaccctcccgcaccctcccgcgccctcccactggtgctctgagcctgttggtctctgtctgtagctcccaccccccttgctccgggtctgagctcaccccacgtagatccttcctgaagtcccagccagagcccccttccgcacccctggagatgctctgctgtgactccagactcagtgtgacttggggttggcggggtcagtgattcggccttgccatggctcccagagggcagggcccccaaccccgatccctgaacatgcatgtggcgtgttctccaggagcccctcccaccgtcttccttggtcttcagcagagcccagtgtgtcctcaccaaaaagggcctgcctggcaatcagggagcagaagcaggatcctcaatccccattttacagatgcagaagcagaggctcagagagacaaagggtcttggccaagtgtcagaagcagggctggggccaggaaggagtcctggcgggcagccggccctggcccatgtggacagcaacaaccaatgaggctggagcaggggcgatggccggtggggctggagagcagggctcagctctgcaggccaccctctcccacacacctgccaagggaaatcgcctggcctgaagacagtctaggtc

SEQ ID NO: 23587 - DNA, 1048 bp, Homo sapiens
tctgtgccagccccaggtccaagacaccgggcacaggtaggtgtgcagcagagtgggagcctccgaggccacttcctgggatctgccgggctgtaaagcaggctctgccccatgtcaaagccccaggagagggtgggtgtcctgagagactcaactgggacatgggaggaggcgcagagggtccctgtcccttgcttgcttgctttcccgaaaagtccccacaagtgtgaaacagaaggaggtgcttgccaggcctcccatggccccctcctttctcggggtctcctcccacgccatggctgtgagtgtctaacataagggacgctgtttttgcaggttttgtggttgtgattcctttgaaccatatccagcccatcttacatcacagtgccatgcttgacttggtctccaatacatcggcacccattggcatttggagaacttgctccgtagttatttgacagtttttagttgtctgtgataatgtattctctatgtttccaatcgtcagtatgggaatctctcccccaacctttcaatttctgggtttgattttttgtatcatatttggtttttttgctttttaaagttgtgattcctttggttattagcccctcccagtggctgcttgtttatgcattatgtttgtgacttcttttgactgtcagtgttgagccagtcttgccaagaaacaatatcaagtatttcctatttctctacttcttgaaaaaagaaaaaaaactttttttaattaaaaaaaaaaaaactcttaatgggaacctggccctgtctgtcttctctgttctgcagaaatgttgaaggaattgaaccagcaacgcagagcgaaagcgtttacagacctgaaaattgttgttgaaggcagagagtttgaagtccaccaaaatgttctagcttcctgcagcttgtatttcaaggacctgattcaaaggtttgccttccttccagctgtggtcgggtctgttcctttgtaggacgcttttgtgtcgcttttctcttcccctctcttgcaggttcctgaagcgtgact

SEQ ID NO: 23588 - DNA, 1024 bp, Homo sapiens
tcactcagccatggactgtccgtctgcccagcacccctccccaccgggggacttcacggctcttagggtcagtgcatatgtgtgcgtgtgcatgtgctcgcacatcctgaagtccccctgggctcagcccttcactggctttgagctcctctgcctgaggactcctgggtggacaagtgggctggccagaggtgaaggcagcagtgactgggggcctcgggagaaggctgtggcccagtgtgacctccacagggcagaaagggcatgcagaggagaggctggacagcggcttgtaggaatgaagtcccaggcagcaaagacaggagtacgaggttgaccagatggctctggggccgggggtgttgaggatttctgtgattttaagtgatcacgtagtgaattatttttacgcttaacaaagccaccgaggtatggaaatccatcctgacagcagaagactaggtgtgtgaattcactttagaagtcactctgtgttggggggtttggaggggcctctgtggagtccacaccttgccccctctgccttctgggctggccccgggcttggaggcagaggccccttggggtcctggtgggatgagccgttgtgtggggagggcctactgtggccacgctgggagagaggctggacgccagctccgcagcaggattgcacctccccctctcctcctggccatgcctgtgctgaggccctgggagggcggtgcctgacctcagagaatgtcgctctaatggtggaatttcaggtactgccacgtagggaagagtctcgtgggaagggcattttccagcctctgtcacaaaatctccaagggaattcagacctcatctagttccatcctcttattttgcagaagaggaggctgagggcccgggagaccaaggctgcccacctgtgggtggcagagcccaggcacccagtgcccccagctccctgccccctgctctttccgcccacccacacacccagcagctggcctctctgcggccagcctgctcgctt

SEQ ID NO: 23589 - DNA, 1099 bp, Homo sapiens
tacatggatatattgtacagtagtaaagtcagagcttttaatgtatccatcactggaataatttctcatcatccccccacccccacccccacccccaccccaaggatcgctactctttgctttgcacttgctgcacactgtgaaggatacaggaaatgtgtaagtcatggtacttatcctcagcgatgtcagatctggtaaagagagtgaaaagaaacagtaataagcaatatcacacaatatgatttaaatgccaaaaatctaaatgcttaggaggagactattactaagggtctaatatttcatctttatggtggaaatggatcttgagctgggacttaaaggatagttaggatttgaatgcctaggacgatgattacaatgtgaacaaagtagtagaatgaacatgttatgcttttgagataatgaagaccagatctaaactatggaaatattttattttatttttattttattattattattactgtttttgagacggattctcgctctgttgtccacgctggagtgcagtggcatgatcttggctcactgcgacctccgactcctgggttccagcaattctcccacctcagcctcttggtagctgggattacaggcgccctccaccatgcctggctaattttttgtatttttagtagagatggggtttcaccatgttggctgggttggtctcgaactcctgacctcaagtgatccgcccacctcggtcttccagtgtgctcggattacaggcatgagcctctgcgcctggcctattttattttattttttgagatgaagttttgctcttacgcccaggctggagtgaagtggcacgatcttggctcactgcaacctccacccgccgggttcaagcgattctcctgcctcagactcccgagtagttgggattacaggtatgcgccaccacacccatgcgtggttcgccgtgttggccaggctggtctcgaactcctgacctcaggtgatccacccacattggcctcccaaagtgctaggattacaggcatgagccaccatgcctggcctattcattattttttagttgacaataattttatatatttatgggata

SEQ ID NO: 23590 - DNA, 1047 bp, Homo sapiens
atagaaccagaccttgtctcaaaaaatatctatataaggattgttctaattttctcctttccatatttgtaactaacttctacagtgcaaggcctggctccagttataattaacacatttatttaatcagttttcctatatgtgaccaatgtcctttttccactgctgcctcctaccccacatgtaagccttcctcacactgcttgggctttgactctccttgttgaattccaatatggattccctcctcttcctgctaggctctctgacacatcatcaccccagggcaccccttcactggaatgccctctcacactgcttgacttgaggactctatgccagtgacctcctctgcttggtagactgacattctgggctgcctctaagatgctctcctcaccactgtctggttctgacacactgcagtcaactgctcttccatatgaatgcttttttactctgcttgggacaacctgctctgttgtgatttttactgggcaatagctgactgattcagccatgtaaacttggactgttacccataaaggtagactgaataattatttttataatggaagacagtaatcaaaaaatatttgcagctgggcgtggtggctcaggcctgaaatcccagcactttgggaggccgggggggcgggggggcggatcacttgaggtcggaagttcaagaccaacctggccaacatggtgaaaccccatctccacaaaaaatacaaaaattagctgagtgtggtggcccactcctgtaatcccagctacttgggaggctgaagcaggagaatggcttgaacccaggaggtggaggttgcagtgagctgaaatcacaccactgcactccagcctgggtgacagagtgagactccatctcaaaaaaaaaaaaaaagtatttgctatggctgcacacataaacatggatgagtcccaaaaacataatgtagagataaagctatagaacacatacactatgattccattcatgtcaggtttaaaaaagtaaaactgtccttaaaagctactaagccatga

SEQ ID NO: 23591 - DNA, 1032 bp, Homo sapiens
gaggcgggcggatcacgaggtcaggagatcgagaccatcctggctaacatggtgaaaccccggatctactaaaaatacaaaaaaaattagccaggcgtggtagcgggcgtctgtagtcccagctactcgggaggctgaggcaggagaatggtgtgaacccagggggcggagcttgcagtgagccaagatcacgccactgcactccagcctgggcgacagagcaagactctgtctcaaaaaaaaaaaagaaaagaaaaaaaaaagaaaatgcatttaataccctgatgaacccattgtaaagttgaaaaatagttacgtcaaagcattttaagtctgtatattgtccagcttttatagcaatatttttaggagcactacttcaataaaagccatttcatcaatgatcaaaacaaaatcctcttattgtctttttattttttatttatttgtttttttgagatgaattcttgttctgtcacccaatttggagtgcagtggctcaatctcggctcactgcaacctgcaccacctcccaggttcgagcaattctcctgcctcagccttccaagtagctgggattacaggtgtgcgtcaccacgcctggctaatttttttttttttttttttgagtcagagtcttgctctgtcgccaaggctggagtgcagtggcatgatctcggctcactgcaacctctgtttcctgggttcaagtgattctcctgcctcagcctcccgagtagctgggactacaggcgcgtgccaccatgcttggctaattttttatatttttagtagaaacagtgttcaccatattggccaggctggtcttgaactcctgaactcaggtgatctgtctgcctcagcctcctaaagtgctgagagtacaggcatgagtcaccatgcccagccctcttaatgtctttttacactctgctgaatctttagttatgctgcatttgcattcctattgttgttcaattatgccttctctttttctgttttcttttttctttttctttttctttttttttt

SEQ ID NO: 23592 - DNA, 1046 bp, Homo sapiens
aactatccagtgaattactgaatggttggtatccctcattttcattaccggcatagttaaaacagatggtgggggaggcaaggatgttagctagggtcaatttctgagcacgacctaccatgtagcatttcaatgagagaaaggccaaaagtctgctgaactgtactgagccttagtttaccatcacagagaagcaccgctcttttttcaacaacaggacctagataataaggtttctgcaaataaaaaataaaagttgttaaactgattgcagaagtaatcgagttaacatttcttaagaaaggaatgtgtaaatagttttttaaaaaattcttatctattaccactaatcaactggacttcagttttaaggagctctttgctgcattatttaacacaactaaaaaatccgaacaaaacagccttatttttccttttgttctactctttcctcagggttcttcatcactaggaactggctctcctagaatacaactaataacactaaaaggatgatggacagcagcctgagagacacaatctgacggtaagaacaccttcttggctgtttcagatatagctaagacacctcatggtttattaggaaaaaaaatgccgagagagtgtcctaagtggtagagtagcagaggatttgcataaaataaacaaaccatggtcaaaattcacatagcttagaaaaagcacaaataaaaataaatgatttgtaaattttaaagtcattaaaaattggctgggcacagtggctcaccccttagtaccaaaagtttgggaggctaagatggacagatcacttgagcccaggagttcaagaccagcctgggcaatatggcaaaaccctgtctttacaaaaaataaaaaagttagccaggcatggtggtacacacttgtagtcccagctactcgggaggctgaggtaggagaatcacttgaacccaggaggcaaaggttgcagtgagctgagaaggtgccactgtactccaggctgagtgacagagacagactccatctctaaataaataaataaa

SEQ ID NO: 23593 - DNA, 1047 bp, Homo sapiens
gactcgaggccggaagatggaaaggcgagagtccaagacacttccgggctctgtaccgtaaagggcggggcgtagcctccaaaaggcgagatgttccggtcggggaggccctgagcagaggaacccgggtggagagggcggggcctgaggagggcggagagctggggcgggtctcaggtgagtaactggggagcggaggaggcggggcttgagcagggttatgacaggtagggcgggacccaggtgagtagcgggagggggcggggcctgaggagggtgcggagagctggggtggggcccaagtgagtatccgggagggagccgggcctgagcaaggcggtgagctggggcgggacccaagtgagtaatggaaggggcggggcctgaggagggtggtggcggtggggcggggcccagatgtgtagcgggaggtggtggggcctgaggagggtggcgagaggtggggtggggcccaggtgagtagcgggcgaaggcggggcctgaggaggactgagctggggcgggacccaggtgagtagcggaagggatcggggcctgaggagggtggtggaggtgcggcggggcccagaagtgtagcaggaggtggttggggctgaggaaagtggtggaggtggggcggggctcagatgtgtagcgggaggtggtggggcctgaggagggcggcgagaggtggggtggggcccaggtgagtagcgggcagggctggggcctgctgtggtgcccactggttgcggggcgcgcgggcaggtgccggaggtggtgggcctgggcctctagctgtgcgcaaggcggaatatgtggggttctggcggcttgtgtcacggctgacgctgtaactatacccagaatctccgtccctggaggggccctcaggttgagcgtcagctgatcgggcctcagtaatccccgctgcgacgcccgtccggactcccacctcaaccccgccgcggcggccccagtccgcgtgccacccttccagttcactctttatttcctcatatcagctttaaacggctctggaggaag

SEQ ID NO: 23594 - DNA, 1047 bp, Homo sapiens
tcatactggccttgtctctgcagagaaagaagtgcactaagtggtgagcatgatcagaaatctgtatgtcactacccctggccccccttccaagatcccctcttttttttttcaaaaataaatttcagaatgaagtcaggtttttgtaagtaaggagaagaaaaaggagaggccattagttttatgcaaataaactggaggtcacatgatcagtggatgttataactggtagagtccttagctatttacctcatctgaaccccttgctttacagatggagaaactgagtcccagacgggaaataatagtagtgggattaggaaccttgacgatggttcccatgcatcaagcgctaggctctgtgctcactcaccccagtcctcagaagctgtagagcagagggacttaaccaggagtgtgtggcagaaccacctgaggagtatttcaaagtacacgtgcctgggcccccatcacgtttcttttgtgccccgggggattctgatgcacatttctgaatgaccccaaccaatgcagctggcccaggtcagtaaatcagcatcagacagaagaaaattcttaagagtactgcccgctgtcagctccgggactctcagagtggaaagagttaagaggtctttggagccacaaagacctcagcttgaatcccagctcttctgattgctagtgtcacggccttgggcgtactgcttaacctcactgaacttcagtttccttatctgtagaattaagatggcgaacagggtagcctggggagtaagtgtgcccacaccccacaacaatgttagttccgccctcatctggaggcctgagtggctatggattagctcggggtggattctgctttacaagtactcccccttgttttgcatgaacaaagagggcgccctgggtttaggtctgggaagccccagcgcagctgcctgctgggtgtggagcggtgcacgccttcacgtctggtcaatgtccactgagtgctgttgagagggaggctctggagtcccgcccgccccggcgcggctgagccct

SEQ ID NO: 23595 - DNA, 1032 bp, Homo sapiens
acagactgcctccttaagtgggtccctcacccccatgtagcctaactaggagatacctcccaggaggggccgacagacacctcatataggcacctgcctctctgggacgaagcttccagaggaaggatcaggaagtagtatttgctgttctgcaatatttgctgttctgcagcctccgctggtgatacccaggaaaacagggtctggggtggacctccagcaaactccaaccgacctgcagctgagggacctgacagttagaaggaaaactgaaaaacagaaaggaatagcatcaacatcaccaaaaaggtcatctacaccaaaaccccatctgtaggtcaccaacatcaaagaccaaaggtagataaaaccacaaagatggggagaaaccagagcagaaaagctgaaaattctaaaaatcagagtgcctcttctcctccaaaggatcgcaactcctcgccagcaaagagacaaagctggatggagaatgactttgacaagtcgacagaagtaggcttcagaaggttggtaaaaacaaacttctccgagctaaaggaggacgtttgaacccatcgcaaggaagtaaaacccttgaaaaaagattagacgaatggctaactggaataaacagtgtagagaataccttaaatgacctgatggagctgaaaaccacggcacaagaacttcgtgacacatgcacaaccttcaatagccgattcgatcaagtggaagaaagggtatcagtgattgaagatcaaattaatgaaataaagcaaataagacaaggttacaggaaaaagagtaaaaagacatgaacaaagcctccaagacaaatgggactatgtgaaaagaccaaatctatgtttgattggtgtacctggaagtgatggggagaatggaaccaacttggaaaacactcttcaggatattatccaggagaacttccccaacctagcaaggcaggccaacattcaaattcagaaaatacagagaacaccacaaagatactccttgagaagagcaaccccaaga

SEQ ID NO: 23596 - DNA, 1512 bp, Homo sapiens
tggcctcccaaagtgctgggattacaggcgtgagccaccgcgcctggccagtagtttcttaacattaaattatccgcaaaatggaagaaatactagaggtctgtgaagatgtttcttctctttcagtctgttgtggtggtttgtagtttacaggggcttgggtaactggatttttaggtttattattttaaatagtagactcaacactattttgtattgcagtagagatcacttatgcagatctttttaataccatttcatagagattaagtggtcaccttgaggcagaggagttaagaatgatctaacttaaagatgacttactcagtattttttcacaaaaagacaaatgtcccaagtttgttggtcctttttgtgaaacgtggctataagtgctatgttacctagcaaataaacacacttaatctgcccctttgagataatagggtaagttcttaacagtgattcaaaaagtaactacctttcagaacaacaacaaaaaatttaatgctgtagggaaaggatattgaaaatggatatttagaatttttcctgttatggaatttaattgttgaaaattatatgtgttaactttaagagctttttttatatgtatacttgaacttggaaacagaattttctaacctgtataaaaatcttttaaaagagctgtttagtgattttgagcccatctgctgaaaacacaaaaaggcaataccatctgattagtttataagaacaactgattgccatcagaaggtatggaaatgcactagctgaattttagcaaaaacctttgcataaatggtgaatgggattggaaattgaatatcatgttttattcagtgcacccagtaatggagttcttttggttttattcatatttgtgaggtaacattttttcagctatgataaccattaaaaccaaataaaatagttatatctcataaaaatgaaccgaatatagaactagaccttcaagttgttatattacaaagtatgaaagcaagatataaaaataacaaaccatgttcatttacattgctgtcaccaaaagtagtgagtggtattaatataataacaatattaggaaaagcacaaagtttttgtgtcatcaataagaaaagtaaatgtttaaaaatttgtttacttgctataatattctttttaatttccttttttgtatatgccatatctacataatttattgatttggtgtgcaatatatacaaattataaataagtataatggcttcctattcataaacttttaaaccatgagatatgtgataaaaatggctatcatgattctataccagaagttcctaacctggggttcatagaataagagcccctagataggctttaggggatctgtaagcactctgaaattgtatgtaaaattttgtgagtctatatatttatctggggagagggtctagagctttcaccaaatttctgaaagggtccatgacctcccccaatggtttaggatctctgtttttgtggact

SEQ ID NO: 23597 - DNA, 1032 bp, Homo sapiens
aaaacctagaaacagcattttttgagaattgcttaaataaaacactttcaatccattgctttagaaagaatcagtttttacttggaccaggccagaataccagagagtatgttgattgcattgttttagactgggatagaattgcttttacagaattgttctttggtgtaatgcaataaacatttattaagagctattaaaacaaacagctttatgaaatttagcacttctcttgtagaattcttgtgagggtattatctcctttatctcagtgtccttgttgatgttgttactactattacagtagtactgttactattagcggctcatctggaggacgaagactgaacataaaatgagctaatatatgatgggcaaatactgtctttagctggaagcaaatgcttatatccaaagggagacagctttatggatgaggggctgtgttaggagtatgggctctggagccagatttcctaagcttgaattctggctctctctgctactgcctagttgttgtgttacttaacctcttggtgcctcagccttttcatcgttaaatagggatgatagtacctgtctccacaaggtggttgtgagaattttgtgagtttacacatacaaaatgctgaggtcatgccaggtccagaacatatacagtgaaggtgagctgctgggttttttttttttttttttttaatgtttaaaataaatagtacatacttatggggtgcctatgatattttgatacatgcatacaatgtataattatcaaatcaggatatttaggatatccattacctcaaacatttatcatttctttgtgttggaaacatttcagatctattgttttttatcatcttcatcatcatcattagaatctatggtagtaattttttctccacgtctcggtaccaggaaaagctgtttcctttgaccagctggttcacttgtattacgtggtcatcatgacttgtaactgattgttatttctctcttaggaagggaactcaaagtcaaatgtgtgttcct

SEQ ID NO: 23598 - DNA, 1026 bp, Homo sapiens
ctggaacgctcacattatggtgggaatgtaaaaccatacactactttggaaaatagcttgacaatttttttttaaagttaaacatatacttaacatgtgacccagccattctactcttaagcaatttacttaagataaatgaaagcatatgtccatatacattttgaacatgagtttttattatagcaatgttatttttaatactcccaaattagaaacaatccaaacgtccttaataggtaaatggatagatgtggtatatccattaaatggaatagtactcatcaataaaaatgaaataaccatatgcccaacaacttgaatgaatatcaaaataattattttgagttaaagctgccaaccaaaaaagagtgcattctgtatgattccatttgttaaaatccaggaacatgcatcttaatcaatagtgaaagagtgcagttcagtgcttgtctgcagattgtgttgagcacagggaagtgtgggaatgagggatcataagatgcacaaggaaacttatgagagtgatggatattgcattatctggattgtggtgatggttttattggtgtatacatgtgtcaaaatttataaaactaaattttaaacacatgcagctgattatgtgttcattatgcctcaaagctgttataagtataacaaaataaaatgaaaaagtcttgtgaatgggaaaaggtcaaagtctgtgtagtgtcctacaaagctctatatgatctggcccttgttgtctttctgaccttctctcctattgttctttttccttgctcattctttgctgttccttgactattccaggccgcttcctgccttaggagaatttgctttagctttttttttttgacctccctgcttttgatgttcttttccccagatacttgcttcataacgctctcaactccttcaggtctttgctcacatcttaccttgagtatcaaggaagtctacctgtttattttttctctctctccagctttattagagtataattgatgaataaaaatgtta

SEQ ID NO: 23599 - DNA, 1030 bp, Homo sapiens
gaaaaaatttagtaatacaacaagatataatacagattaaaaaaatacagtgtaacaactatttacatagtgtttacatttattaggtataagtagtcttgaggttatttcaagtatataggacaatatgcataggttatatgcaaaccattttacataaggaagttgagcattctcataatttggtatcctggggtggggtctgggaactaatcccccacagatatgaggaatgactatatagtaaaatagttactatagtaagacaaatcaacatatccatcatctcactgttaaccactgtttccccatggtaagagcagctatcatctatctactctttgagcaaaaatcctgagtaaaatatactattattatagtcctgatgttgtacattagatctttagacttttatatcctacatatctgctactttgtatcttttgaccaacatcatccagtttcctacaccaacccttgcctctgatgactgttttattctctctctctgtacatttgacttttaaaacattccatatgtgaggtcatataatcttcttatttttgtgtctggcttattttacttagcataatgtcttccaggttcatccgtgttgtggcaaatggcaggatctccttttttaaggcttacataatattccactgtgtatatatatgtacaccacagttttttattcatttgttcatgattaatggacgactagtttgtttctgtatcttacctattgtgaataatgctgcaatgaacatgagagtgcagatatctttacaaggtggtaatttaatctcctttgtgtatataaccagaagcagaattgcctgagtcatgtggtaattccatttttaatttctttaggaacctccataacattttccataatggctgcactaatccacatttcctaccaacaatgtacaaaggttcccttttctccataccgttgccaacacttgttatctctttcctttttaataacagctatcctaattggtttaaggtgatatctca

SEQ ID NO: 23600 - DNA, 1032 bp, Homo sapiens
taattattaaaataaaactatatagagatatttatagaaagaatgcatatgcagatattcactttaattctagatagtacagctatgggtgattttaattttatttttatttacctgtattttccaaagttgtgtagtaaaaatgaattacttttgtaattcacacatgcagacaatttggcctccctttttcactcccaacacttgttgaattagtttaataatgtcttcttcactccaactattgctgcttagttcaactactcattatatctggataagacacggcagcctcttgactttgctgctcagctgccaagctcccttcctgaaaatccttactgatgcagttcttcacttgcttcactgttccatttaagtggctatatattaaatctcaaaaaccatcaagaacagaggaaattgtgaatgttattccttgtaactagtttaccatctggtctgaagaccttcagccaatggaattcagccaactcaagatttaatttaatatattcacctaaccttaaccaagtgacttttaaccagagcatggatagttatgcagatttggggtgaggagaggtgaaggaaggaagggtgggagagaaaatatgatttgaactcaggccttcacaaatctgtgctcattccttctgttctacctctacaaactgccataccttgcccttgctgggtgtatgttcccccctcctgtattcaataaacagttcattggttttttttttgagcatttagccagtaagaacaaataggcaaataatgaaaatccatccattttagtgccagttattctatcagcagatcctattagaagtatttattgaggcatgtcatgctaatagtcccaaagtgtaattatacttgcagatttttcttgctttcagagagtttgtaatatgttccagatggttaaataggaaagaggagacaatttatactgtcttttcacttatgattaaaaatttgatgttacttactacttatgttaccattattgctttgttggat

SEQ ID NO: 23601 - DNA, 1034 bp, Homo sapiens
actgcctccagcccctcctatagattcatattgaatgatgggacaatgcttagcgcccacaccaagtgtaaactttgctaccctcaaagtccagacatgcaacctttcatcatgggaattcatatcatcgacaggtactacttatttggagagcttcatatgaaataagccagttcacatatctcttattagagaaattttttatactcttgatggctagaaagcagaaattctaaattaggcgtaaaactagtgtgatgagtatatataatcaatatatccatattgggttttatagttttatcatgtaatagctttgttgttcataaagggaggtaggaaagctgaggctgaaaatctgctttttagagggtaaaaccaaaaagatggctaaaaatttacaacattccatatgtgaatcttataagagatttgtgagtttgttaacattgttatttttatttttatttttgaaagtgctctattttcattagggcatacttggtggctcctgagttcaagttgacaatttctcacagaaattacaaatcattaaactatcaacttgatttttgagtgccattgtctctaatttgttcccctaagtatgttttacactgatatatggtaaattcatgaaactattatcctatgaattattagaaatcctacatttacagtggtgaaaatgtagcattaaaaacaaagacatttcccctcacttcatctttttctcatctaatgtatttgcttattggaacatggtaatgccagtcacaaatctgttgtcataattatgaatttgagtaaaggactcactgaaaacctgaattcagtattgtggtttttttctacttttagtttaaattatgcttgtgagtggaattagcacagttctttttttttcatattgtgatttctctttcaaaacatctgctatgtctgcatatcactctttttaatttttacatcagtgacacagtattttccttacccagtcttcctctttggagttgaaatacttaaaagctgta

SEQ ID NO: 23602 - DNA, 1190 bp, Homo sapiens
ttactaaactccgaaaatagtgataggagttcagtgacagtggggcagctagaacttgctgaacaaagtacccgagaagagaaggatatgtagaaaatagcaacaaaaatctgaatcagggttcttttctatccttggctgaatactacactgtgcatgtattcaacgatactccatcaggtggggcaaagaacagtttgtgaaggaagaacaactatcaggaaggagtgagctgaacaactaccagaactcacacaagattggaagataatcaagtcctgaccaatcagagtcggtagaccttcttgaacatctgggacatttagtggaaaatggcctcactttaagagtggatttaccctagacctgctttgacatcttaaaaacaaacctcaaaaggatcaagcttatgtacaagtaaattaactgtctgaaagaacactattcaatagtttttaaagaagacaccaaaattcagacattcagcagcattatattcataatttccaacatataataaaaaaaattaagacacatgatgtagcaagaaactgtgacccatacccaaacaaagtcagttaatagatccagaaatgacagagatgatagaagtaatagaaaaagatttgaaaatagctattctaaatatgttgaagaacttaagggacaacatgaacataatgagggaagagatataaactacaaaaaaaaagagccaaatagagctggtagagctgaaaaatacagtatttaaaatgaaaaatttgttggaggagcctaccagcagattagacactgcaggaaaaaaagagcaataaacatgacatagtattagaaactactcaaattagaggagaaaaagaataccacaaaagtattgaaagacctcagtcacctgtggaacaatacaaagcagtctagtatacacataatatataaataatacataattatggaagaagggggagcaggtgaaatttttgaaaaaacagccaaaatatttacaaatttgtggaaatttgtaaacctacaaatccaagagtttaatgaatcccaagcaaaataaacacaaagaaaactactataagccatgtcataatcaaattgctgaaacaaaaatcttaaaaccaatcaaagaaaaatgacacattatgtcagataaacaagaaaaaactttctatacttagtat

SEQ ID NO: 23603 - DNA, 1050 bp, Homo sapiens
ttgttatgtgtgaatttgatcctgtcattatgatgttagctggttattttgcccattaattcatgcagtttcttcatagcattgctggtctttacaatttggcatgtttttgcagtggctggtaccggttgttcctttccacgtttagtgcttccttcaggagctcttttagggcaggcctggtggtgacaaaatctctcagcatttgcttgtctgtaaaggattttatttctccttcacttatgaagcttagtttggctggatatgaaattctgggatgagaattcttttctttaagaatgttgaacattggcccccactctcttctgacttgtagagtttgtgccgagagatcagctgttagtctgatgggcttccctttgtgggtagcccgacctttctctctggctgcccttacattttttccttcatttcaactttggtgaatctgacaattatgtgtcttggggttgctcttctcaaggagtatctttgtggcgttctctgtagttcctgaatatgaatattggcctgccttgctagtttggggaagttctcctggataatatcctgcagagtgttttccaacttggttccattctccccatcactttcaggtacacctatcagacgtagatttggtcttttcacatagtcccatatttcttggaggctttgttcgtttctttttattcttttttctctaaacttctcttcttgcttcatttcattcatttcatcttccatcactgatgccctttcttccagttgatcgaatcggctactgaggcttgtgcattcgtcacgtgggtctcacgccatggttttcagctccatcaggtcctttaaggacttctctgcattggttattctagttagccattcgtgtaatttttttcaaggtttttaacttctttgccatgggttcgaacttcctcctgtagctcggagtagtttgatcgtctgaagctgtcttctctcaactcgtcaaagtcattctccgtccagctttgttccattgctggtgaggagctgcgttcctttggagga

SEQ ID NO: 23604 - DNA, 1034 bp, Homo sapiens
aatcttggcccgtagaaagtctgctttgataccattaatgtccagtgtttgttccggatgagactgctgcggagtctagtttatgcctttctatgtggcccagtgtgccttgcatatgaataaggaaatgctctgaggccagaggctgcagggaagccagctcagagcatttgtcagtactctccaatcctggctatttggatccttctggaatgccttcaaaccatttgctctctttgcttgcttgtttctttttggtattttatccagcttgcatagttgttctcagagggcgggtcagcctggtaccttctgctgggccatagctagcagcgtaagccttggagccctggcacttgaaaccccacactgtccaagcacaacttacccagccttgcctcttcacagccacctgttgtgtccaccctgtgcttagcctagactttccacacaaccttttcttgctgctctctcagtcctgtccattcccatcaaaaatcgaattgttcttcagacctgtacagtctccacttctgattcctggcattgtgacccatgagattcttcctctgcagtgaattcatagcaataactgaccggccactgtagcatttcttgatgtattatatcatgtgccttgtatttagctttcatccagttgggggagggcggggatgttgtagtgtacctctttgtaccaagattgatttgctgcatatcttgcaggtgaaagcatgtattgccaatgtagaacccaaccaaacagtggagatcaatgagcaagaagcattggaagagaaattggaaaatgtgaaagccattctgcaggcatatcattttacaggttttgtttgtttttttaacctaatttagtctgggtctgcctctagtgagttagtttgctagatgtgttatcagtcctggaattatttcataatttatagtattttacaccctctgccctcatcactcacacacacacacacacacagacacacacacagctgacgtgctatttgtaggcctatcttcac

SEQ ID NO: 23605 - DNA, 1042 bp, Homo sapiens
aactgcagatactggtacaactgctcaggactttttcacagattaaatgaatcaacatacataaggtacctagcacaggcctgggcacatggaactgtgctctcggactctgggagaggagcttcaaggaaacaagtccatcccagaggctccctggatgacagggacaagactccttccactaggtggggatgatgtgtttgggaacctaagagccactccaaagctacatgacggtggagggatggactgagaaactgcttgtgtgacccaaacagaagcccttctccactgagaacaggggcgtcccttcaacaaggacagcaggagctcaccatgtccacgacatttgccatcaccaggatgaagatggcgagcatggcccaggtgttcctggcccagcgggtccggtcaatccaagttgagaaggccacaagcttcttaggaaaggcctagaaggaacagaatttcaagggccatgagcctttgccagtcctttctcctgcgacgtgactgacagcaactcaggctggtcccgtattccagtcccaggagcctcaaaacggactctgcctgggagtcacctgacagctgaccaaggggcagagctgagaagagggcgtgggagttctgacgctgtgttggacctcctcgatgtgcctgttcaacagcacagcctccaggtcgcagccctttccacagcagacgtggtgacgaggtgaggccagggcaggaacagttttcagggctgctcgtctctggccagctactcctgcctatcctggctccaagtgacctggcgagccacctgtcagatttatgttcctaaacactgctttacctttgtcattctgattaaaaaaaaaaaaaactctgcttggtacctcagtgccttacaggagaaagttttaatccctttagtctggcttctaagggccttcaccatcggggccaacccaccttccagccggccctccacttcctctctacccaggttcttgtttacccagactctgccgtactcatacgtgctgcagcgcca

SEQ ID NO: 23606 - DNA, 1032 bp, Homo sapiens
gatatctgtggaatagcttgcattctaaattttcaaggcaaacaaaatgaaatctaaatgactgtacaaaactactagcttgaagttgtttacagtttcaacaatagatggcgccaaattccttggctatgtcatgtcttggggcatctaggctttccagttggttgtgatgaaaagtgagtacactgggccgggcgcagtggctcacgcctgtaatcccagcactctgggaggccgaggcgggcggatcacgaggtcaggagatcgagaccattctggctaacacagtgaaacctcgtcactactaaaaaatacaaaaaattagctggatgtggtggtaggcgcctgtaatcccagctactcgggaggctgaggcaggaggataccttgaacctggaaggcggaggttgcagtgagccgagatagcaccactgcactccagcctgggtgacagagcgagactccctctcaaaacaaaacaaaacaaaacaaaaccctgagatgctgaaagcactgtgaacaaagaaaatttgggaaacttttatctaattcacagttaacactcaaatttcaccatttgtcccaataatattctttatagctgtgtttgacttggtcaactggtctaggatctaatctaggatcatttagttacatatctttagtctttaagctggaatggttcctcagcttttctttttctttcaaaatgacggttatttttagaatattcctcaatttgtgtttgtttgtgtattcttgaaattagagtcagttatgttatatttggctggaataccacagaaaagatgttatgggccaggtgcggtggctcatacctgtaatcccagcactttgggaggccaaggtgagcagattacctgaggtcaggagttcgagagcagcctggccgacatggtgaagccgtgtctctaccaaaagtacaaaaaaattagctgagcatggttgcacgtgtctgtagtcccagctactcgggaggctgaggcacaagaattgcttgaacctgggagg

SEQ ID NO: 23607 - DNA, 1652 bp, Homo sapiens
tggtgctgaatcctgtagggtcataaaaagtctaagcctcttagaataagaaccttactaataatatgccttgagttcacacagttcctgttactccaggagctcagggagcttttctgaatcttctctactttattcatgttcctaggaggtgatagatacattttaaagaaaaggaaacaggccaggtgcggtggctcatgcctgtaatcccagcactttgggaggccaaggcaggcagattgcttgagaccaggagtttgagaccagcctggtcaacatggcaaaaccccgtctctactaaaaatacaaaaattatccaggtgtggtggcgggcacctgtaatcctagctttttgggaggctgaggcatgagaattgcttgaacccaggaggcagaggttgcagcaaaccaagatggcgccactgcactccagcttgggcagcagggcgagactgtctcaaaaaaaaaattttttttttttttgaagattcgaaactaatatgtcagggaagaggagtacagaagaacacacatccagggactcatggagccgcagaaggagagagcaagggagttttccagtgaggttagcagctgtggctgacccgcttgggacagattcaggagaaactgctgacctggtctggaatgaggccttctgtggttttaggaaagggattaccacttatgttttctacctcgcaccacctcaggggtagctgcagaactctcatttttaaaaatttgattttaatgtcaattctgaccttacagccagggataatgattgaaatatttaacagcatagacagcagggataatgaggacagacgctggccgtgagcagctgcactggctgtgtgacttgactggcctcagtcctatggcgccacggctcgctgaggaagaggaaagtcaaagttgaacgtggaggggtcttggtgtccccgttccaccaggatcaggaatgggttccaaggggcatgggtgtagggaggcgagaggaagagagtaggcgggactgcccgtcagcccctgcctgcggctcccaggcgtggcttcccaggtgtgggcctcagactggcccactgagattccccagcctcttccaggacagactcagcatgtctgggaggggtgggggacagaaaccagtgtggtcagcagcgccctgtgactctgctgtctggaagtgtttgaaaagccaagtcctcccacctccagccccaccctacctgtcccccaccctctttttttttttttttgaaacagagttttttgctcttattacccaggctggagtgcaatggtgcaatctcggctcactgcaacctccacttcccaggttcaagcgattctcttgcctcagccttcccaagtagctgggattataggcatgcgccaccaagcccggctaattttgtatttttagtggagatggggtttctccgtgtgggcaggctggtctcgaactcctgacctcaggtgatctgcccaccttggcctcccaaagtgctgggattacaggcatgagccaccgtgcccggctcctcttaataaaataatactaaggtgcctattgcccactttctcatccacctcttgttctctaacaatatcatcccctgctccccagcagcaatgctcct

SEQ ID NO: 23608 - DNA, 1054 bp, Homo sapiens
ttcacctctgcctgccttcctaaggctgtggctgccctgtacctccagcgtatactctggacaccctgagccagctggcagaggttctggaccccccacccctgccagctcacttccgtgtgtttgtgtctaggcatcgctgctccagagcaaactcaatcagatctttgaaatcaccatccggtaagtgacaaccctgggcaggggaccctgacctccgtggcccagtattggggttcctcatcctgagtcctctcacccctgtcttctcttctctcctccccacctccttctaccactgtaatctctatcccctgggctggagtcagccaccaactctaaccctccctagacaaggaaatagagaccagagagggaaagagcctgcctcaatgaaacctggaaagacgcaagagtcctagtgttccgggctggcactttctaaagcagcagtgtcactgcggagcctgcagggaagcttgactccaagctgtagattctagtagaacgtggaatcctgggaacctgtggaatgaaggggtctctggtgcctgtgcaaaaagaaacccaagtcacctactctgtttggttgcacaagggtgggatcctaaaattctcttttcatgcctttctccccatgtgttcctgccccctaggcccccaccaagcccatcaggaaccatcactgcagcctacggtcagccgcagaaccactccatccccgtctatgaaatgaagtttcccgatctgtgtgtatactgaattccaagagcctgagctcctcaaggagatggggtctgaggaggggctcacctcacgcccaccccgaccacatggagatctggctgtgatctctgagaaaacatcaccttagatggcagcgcctcccaggctaagccaaggtggagactctctggtccttcttggccctcctacctcctcctcgtcttccctgagggaggtctcaccaatcagcatctcacctgtgccctctttgtcttctcttgtgtcagccaggggcagagaatcatggggtgtctctcaggagaagccg

SEQ ID NO: 23609 - DNA, 1065 bp, Homo sapiens
tggcgggtgcctgtagtcccagctacttgggaggctgaggcaggagaatggcgtgaacccggtaggcagagcttgcagtgagccgagatcaagccactgcactccagcctgggcaacagagtgagactctgtctcaaaaaaaaaaaaaaaaaaataaagaactcattcaaggccgggcacagtgcctcatgcctggaatccctgtactttaggagactgaggtgggtggatcatttgaggtgaggagtttgagaccagcctggccaacatggtgaagccccatctctactaaaaactaaaaacattagctaggtgtggcgtcaggcgcctgtaaacccagctactcaggaggctgaggcaggagaatcgcttgaacctgggaggcagaggttgcagtgagccaagatcgtgccattgcactctagcctaggaaacagagcgagactccatctcaaaaaaaaaaaaaaaaaaaaaaaaaagaaagaaagaaacgaactcattcagcatatagccttttggaactggctcttttcaccaagcataaccctctggagattcatctagattgttgcatgtgtctctagttcacccctctgtattgctgggtaacagttcatggtatggttatgccagcatgtaaacactcacctgttgaaggacatccgcaggatttctagtttccaactacagcttagaaaactgaggccagagagtgaagcaactgcacaggcataatacggcacagctggcatttcagctccagtccatttgccagagtcacacgggatgacaggtgagaaacagaccaggcagcttcaatgggatagatggagacttgacgtcattgataatctgatgccttgaaagtcgtgtgtaagaagctgactctgaattggagggaggccaggagatttgcacccagctctggcaatgggtttggggaagctataaaccacctttcaaagggaacacctggtcgggtgcagtggctcatgcctgtaatcccagtactttgggaggccaaggtgggtggatcacctgaagtcaggagttcgacaccagcct

SEQ ID NO: 23610 - DNA, 1025 bp, Homo sapiens
ggtctcggtagctgcataccgtttattttactccagacatcttgcttcccgtaatatacgcctttgtttcagtgattccgattccaaacgacacatccaagttactgtttgaatcggcatcgagcttactggggcggggtcttcccatgatttccatccggtcttttgctttcgagtctcccactatgctcagtgccttctgttacaaaatatgcatcatttaaccatgttccagaaccttatttcttcaggcgactggactggctttttccacatttgcgtggaattagtagatgtgtgatatttttaaggtatttatttcagtggttgcgattgaagcagtactagctatttgggaaaggcctgaatttatactttggggcaaagaaaagattccatatggtgataacttagagtaaacttgagggtttctgagaagaataattaaggtaaattagaagggaagagtgagttgccctcattcactaatccattgatgtgtcaaacaatcggaggctcttcgcgcttggggtgggactctggcatatttgcctcagtgcttttcgagacatcaacagaagcagtaatctgagggagatgatcagtttctgtcctcaaacccaacggagtgaagtcaagctctctcttctattttatttgactctagtatttacaggaaagtattttgccagtcatagccctatggacttataatgcactttcaccatgtttcagaattacttagtgtggaagtaagagctaaagagtgacctttttaatcgaatttcccgtttaggaaaggaaaagggaaggctctaggaaagtcccttttgaatctggttagaaaatttaagtggcattgacgctaattgtgctatattaattgtgaaacccatccgctccgcaataaatttcttaaaagacacatggctctcagcattgtggcggtgcagttgaacccatttttaaatgtacttttatattgagaggcttttaaaaagcaacggcagtcgtctttgaactct

SEQ ID NO: 23611 - DNA, 1024 bp, Homo sapiens
gagcacctaatgctgggcactgtttttaggcactgggaataaatgatgaacacaacagaccccttgaggagcattccggtgagataatcataatagtgtggaagatgctacaatagtaagcacagggaggaagagtggctagtctaaatcgtgaggagtttgagtaggcttacgtggagatgatacctaaaatgaagtctgggccgggcgcggtggctcatgcctgtaatcccagcactttgggaggccttggcgggcggatcacaaggtcgggaggtcaagaccagtttggccaatatggtgaaaccccgtttttactaaaaatacaaaaattagctgggcgtagtggcaggcacctgtagtcccagctactcaggaggctgaggcaggagaatcacttgaacctgggaggcggaggttgcagtgagctgagattgtgccactgcactccagcctgggcaacaaagccagactccgtctcaaaataataataaataaatgaagtctgaaggactaataggaatagagtcagaggggtaggatagggcctttctggaaaagggagcatagaacaaatgtatagtaaggttgaggatttaattcatgtggtcaactttatttatttattttgagactgagcctcactctgtggcccaggctggagtgcagtggcgtgatctcggcccactgcaacctccgcctcaggggttcaagcaattctgcctcagcttcctgagtagcagagactacaggtgcccaccaccacacctggctaatttctgtatttttagtagagatggtttcaccatgttggtcaggctggtcttgacctcaagcaatccaccgccccagcctcccaaagtgctgggattacaggcgtgagccaccacgcctggctgtgtggtcaactttaacctatccttaggaacagtgtggagtaggaagcaaaacattaactctgtctactccaatctttttgtaaagggtgcatgcccccaactaaaactcaatcctgtaagataat

SEQ ID NO: 23612 - DNA, 1077 bp, Homo sapiens
atttttaatagagacggggtttcaccatgttggccaggctggtctcgaacttctgacctcaggtgatctgcccgcctcagcgtctcaaagtgctgggattacaggcggaagccaccacactgccctcctttgtttgtttgttttttttttttttgagatggattttcgcttttgttgctcaggctggagtgtagtggcacaatctctgttcactgcaacctctgcctcccaggttcaagcgattctcctgcctcagcctcctgagtagctgggattacaggtgcgcaccaccacgcctggccaatttagtatttttagtagaggtggtgtttcatcatgttggtcaggctgctcttgaactcctgacctcaggtgatccacctgcctcagcctcccaaactgctgggattacaggcatgagccactgcgcccagcctagactctgacattttcatactttcaggtaaaaatgttttcacatataagatgttgaatagtgtaagttgagaaaataaatgattctgagtacagcttgaacacatacatgtattagctctgtgcacaggtttaaaataccattgggcggggcgcgatggctcacgcctataatcccagcgctttgggaggctgaggtgggtggatcacgaggtcaggagatcgagaccatcctgccaaacatggtgaaacttcgtctctactaaaaatacaaaaaattagctgtccgtggtggtgggcgcttgtagtcccagctgctcgggaggctgaggcaggggaatggcatgaacccagaaggtggcggagcttgcagtgagccgaggtcgcactactgcacttcagcctgggcaacagagcgagactctgtctcaaaaaaaaaaaaaaaaaaatctaccattgcgtttaaccagtgccgttcaaaagaaataatgtgagccacatatattacttttaatagccacttttttttttttttttttttaagatatagagtcttgttctgttgcctagactggagtgcagtggtgcagtcttggctcactgcaacctccgcctcctaggttcaagcaattctactgcctc

SEQ ID NO: 23613 - DNA, 1200 bp, Homo sapiens
ataattactatttaaaaaaaaaaaacctctgtaggtatttctccaaagaagctaagcagatgcccaataaacatatggaaagatgttcagcatcactaataattagggaaatgcaaatcaaaaccacagtgagatgttactttgcgaccatttaggatagttataacaacaacaacaaacgacaaaagcaagtgatgaggttgtagagaaattggaaccttggtgcattgctggtgggaatgtgaaatggtgcagccacagtgagaaacaatagggtggtttctcaaaaaattaaaaatgaaattaccatatgatctagtgatctcacttcgagttatatccaggataatttaaatcaaagattcaaacagggccaggcaaggtggcttatgcccgtaaatcccagcactttaggaggccagattacttgggctcaggagttcaagaccagcctgggcaacatggtgagatcctgtctctaccaagaaaccccccaaaattagctgtacatgttggcgcatgcctgtagtaccagctgcttgggaggctgaggtgagaggatcacttgaacccgggaagcggaggttgcagtgagctgatgatcatgccactgtactccagcctggatgacagagcaagaccctgtctcaaaacaaacaacaacaaaaaagactcaaacagctatttgtacaccagcattcatagtagcattatgcacgatagctgaaaggtggaaacaactcacatgttcatcagtggataaatggataaacaaaatgtggtatacacatagaatggaatattattcagccttaaaagggagggaaattctaacatgctaccacatggatacgccttgaaaatagtttactaagtaaaatgagttggacacaaaaggacaaataatgtgtgaggtacctatagtagacaaaattagtggaatagtggttactggggcctgggggacagagtaatggggagttattgcttaatgatcacagagttttagtttggaaggatgaaaaagttccagagaggaatagtgttgatggttgtataacagtgtgaattaatttaatgccaatgaattgtacacttaaaaatgtttgaaatgcatgaaaagacaaatactatgtgatttcatttatatgaatatgaggctatctaaagtcaaattcatagaaacagaaataatggtga

SEQ ID NO: 23614 - DNA, 1028 bp, Homo sapiens
tttttttgtatttttagtggagacgaggtttcaccatgttgaccagactggtcttgaactcctgacctcaggtgatctgccggcctcggccttggcctcccaaagtgttgggattacaggcgtgagccaccgtgccgggcccattagtttttttttttttttttttaaattgttgagtagtatacttcatggtatgtaccagtttgtttaatctttacccattgaccgacatctgggctgattctagtttttagctaatatgaataaagctgctaggaatattttgtgtacaggttgtgtgatcataaatttttgtttctttggaataaacacccaaaactgcaattgttgggtcacatagtaattgcatgtttcgttttataagaaactgccagactgtttccagaatggctataccattttacacccccatcctcagcagtgtatgagtgcactttctctgcatcctcaccagcatttgataatgttatcatactattttgtactgtagtcattctgataagtgtgtagtgataatctcattgtggtttttaatttgcattttcctgattgccaaaggtgttgaaaagtccttttatgtgcttatttgccatctttggaaaaatgtctgttcatgtggttgccaattttctaattggattgttttttaactgttgagtttagagaattctttgtacatttaaaattctagtcttgaccaggtgcagtggctcacacctgtaatcccagcactttgggaggcctaggtgggtgagttgtttgagactagcttgggcaacatggcgaaaccctatctctacaaaaaagaaaaaaattagctggatgtggtggtgtgcacctgtagtttcagctatctgagagactgagatgggaggatcagctgaggccagggaggttgaggctgcagtgagctgtgatcactccagcctgggcgacagtgagactctatctcaatacaataaaataaaattctagtcctttgttggatatgtggtttacagatattt

SEQ ID NO: 23615 - DNA, 1050 bp, Homo sapiens
tcagggctctctgcagcctcaacctcccgggctcaagagatcttcctgggttcaagtgatcttcccacctcggcctcctaagtagctaggactacaggcatgtgccactgcatctggttaatttttaaattttttgtagagactgggcctcactatgttgtccaggctgatcttaactcctgggctcaattgatcctcctaccttggcctcccagagtgctgggattttaagtgtgagccaccatgcctggcataaatttgttttttaaaattcttgttttttgaatatactattttctcttcttggaggatagcttatttgatgttttcttctatttcttactttctcttcccttccttcaagtcctccctttttgccccccccccccccccccgttttattgtaaattttttttggaagccttcctcaaatgattgttgatttcagactgcacattcataattaagaatgagtcattaaaggccaggcgcagtggctcacgcctgtaatccccacactttgggaggccaaggtgggtggatcacgaacgaggtcaagagatcgagaccatcctgaccaacatggtgaaacaccgtttccactaaaaatacaaaaaaaaaaaagccggacgtggtggtgagtgcctgtagtcccagctactcgggaggctgaggcaggagaatcacttgaacccaggaggcagaggttgcagtgaaccaagattgcgccactgcactctagcctgggtgacaaagcgagactccgtctccaaaaaaaaaaagagtcattaaggccaggtgaggtggttcacgcctgtaatcccagcactttgggaggctgaggcaggcggatcaggaggtcaggagttccaagaccagcctgaccaacatggtgaaaccccgtctctactaaaaatacaaaaattagctgggcatggtggcacgcacctgtaatcccagctactcaggaggctgagtcaggagaatcacttgaacccgggaggcggaggttgcagtgagctgagatcccgccactgcactccagcctgg

SEQ ID NO: 23616 - DNA, 1061 bp, Homo sapiens
tacacccctcactttctgccttggtgtctgatatctcttactgctaaaccctcccaaatgaattgacttgttcctctttgatgtcttcagtgggccttgaagttgtaagcttgttttcatctactgtggttacagttgcaatgtctattcattgaaatggaggaaaagtttatatttcttgttttctctatgttggtgtgactttggagagaaggggttagaaagatctctctgctgtctcaactggaggttgaggtaatttttgacttcaaatgatttttgactccacttttttaaaacttgtaacattagtagagttggggtgaatgatattttgctattgtttttgtaaatatccagtcctccttcaaaataatgagatttttgttctttaggatagtggaatgtagtattgagtccaagtagttccaccactatccagatcagtgacatttaaaggagacagctttaatttagatgtgtaatttttagctgatttacttggggggaaatggagtatttttgctttttgaacaaagtagaactgtagtcttaaatttcaatcttatgctcttgatggatactattttatagaatactgaacagcaagtgattcggcaaattcataatctattagaggatttcagtgggtcctatatatcatagcatttggcattgaataataagttatcattcttgattttttgctggtttgaaacctggtaaatattcgtgcttacaaagtgggagtattgttcatctacctctttatatattcttagtgttacataaatgcttttgctttccttaaattagatattaatggacaagtgtatatttcttttttttttattttttgagatggagtctcactcttgtcactcatgctggagtgcaatggcacagtctcggctcactgcaacttctgccttccgggttcaagcgattctcctgcctcagcctcctgagtagctgggattacaggcgtgtgccaccacgcccagctaatttttgtatttttagtagagacagggtttcatcatgttggccaggctggtcta

SEQ ID NO: 23617 - DNA, 1101 bp, Homo sapiens
tgaggtcaggaattcaagaccattctggtgacatgataaaaccctgcctctactacaaatacaaaaattagctgagtatggtggtgcccacctgtagtcccagctactctggaggctgaggcatgagaattgcttgaacctaggaggcggaggttgtggcgagctgagattgtgccattacactccaggctgggcaacagagcaagactccatctcaaaaaatttttttgtgaactacatactgtaaggctaaagataaaaagaaccacatacatgtattttattctagttagcaaatctggttcctcacggagtgggggtaggagctagcaagtttgaaacacacacacacaaacacacacacacacacacacacacacacactatatacacatactaggattaaacatttaagtaaaaatttgtagataatgacagctgggtttctcgttgttgaagaaagaagttgaaaggaagaaggctagaatgaactgtggtattggattggaattggaggtatcagtatgaactcatggttcaatatagatacgtaaatgtaaatatttcctctctctgctgggaagtcatagaagaaatgatgctgaggtagcagtaaagacacttaatgcccagatcttggactataaatacaattctttcctccatccctcctcccttttctccctcccttttctcttctttcttttccttttttgacagagtctcactctgtcacccaggctggagtgcagtggtgggatcacaactcactgaagcctcaacttcatgggctcaagtgatcctcttgccttagcctccctagtagctgggactacaggcatgtgccaccatgcctggctaaattttgcattttttgtagagacgaggtctcattatgttgcccaggctgaactcctgggctcaagccatccacctgcctcagcctcccaaagtgctgggattatagatgtgagccactgctcccggcttaaatacaatttcttaataaaaggaactagggcccctgaagaacttgtttatttcagagctggggtaggagaaatacagaatgatcctggaacatcttgtgattctagaaaa

SEQ ID NO: 23618 - DNA, 1063 bp, Homo sapiens
ccataatacaggtttctaagcctgctttcaaaactactctcttatcctctgccattaaaaaattattccctgacagtctacttagtaagatcaagtttctgaaattacaagacaatgagaatagaattgtccttacttaaagtaataaatagacagccaataattgctgtgaaatcctacttttcccactgacattataaaaaagaagtgatacgtttctaggaattaaaaaggtatatttccttaattgttagtaccacacttggggttggggaagctgtgtactctggctgttattgtgacagttatttttggtctgggcactgacaaaaccagtacaggccagaggcatatcaatctgctctgcaaggcagagaccccagatttcataaccctgtgttttttggtaacataatgaagttattccttaccttataaattaggatgtcaaatttctcatgttgcattttattttaagaagacctggatgtcttcagagataaacaatttgtctatacccaaaataccatgaacttaaattatgtttgtcttcattcaaggatttttttttttttttcccaaaagtagacagcctgacacctgccctgtcagagctcacacccatagggacaggagcaaacaagtaaataaatatatcacaaattgtgataaatgctagcaaggtgaatagggtaaagtgttggagaatggggtaaggatgagggaggaagtgatctagatagaatgatcagggaggtcctctctatagaggtgatgtttaagatgagaagtgaaatacgaacagtaagcaaccaaagtcatttagtcaataaatgtttgttgagtatgtatttgccaggtgttggtggtaggaatataagcataaatcggacagataggagccctgcctgcaaaagcttacattttagtggggtaagtctagatcttactatgctttttaccatgttgcccaggctggaccctctcccttttcagagtcctagttaattcactatatttttcttgtataaaagcactacatagcagccacagctggagcctg

SEQ ID NO: 23619 - DNA, 1035 bp, Homo sapiens
tttatcctcccaattccctggccagggaaaccactgatcaactttgtctgtataaaatttctttatgtggacttttcaaatagatggaatcatataatatatggtcttttgtgactagtttctttcacttagcatgaggttatcagggtctgtctgtgttgtacatgaatcagtacttcattctttttttttaatggctgaataatactccattgtatggatataccacattttatttatccgttcattagtaatggacctttcagttgttctgctttttggctattatgaataatgttgctgtgaacattcacgtctacgtttttgtgtggacgtacaagttttcatttcttttggttatatgcctagaattgttggatcatatggtacctccatgttgaacattttgaggaactacctgactgttttctaacatggctgcatcattttacattgtcaccaacagggtataagggtcccaatttctctacatcctcactaacgtatattgtcgtttgggtcatagccatcctgtggtggtggggagctaggttggtatctcattatggtttttatttgcatttcactaatgactaaggatgttgagcatcttaagtgtttattggctatttgtgtatcttctttggataaatgcctgtttagatcttttgctgatttttaagtttggtcatttgtccttttattgttgagttgtaagttatttgtatattctgcatacccaagtcccatatcagatacacaagtttgcaaatagtttcttccattctgtgggttgtcttttcaccttgtattgttcgctgaaatacaagtttttaattttcacgtcccatttacctgttttttcttttgttgtttgtgctttggtgacatgtgtaagaaacagttgtcaaatccaagatttgaagatgacccctatgttttcttctaagagtttttatagttcagctgttggatttaggtcttgatctgttttgaggtaattttttttttttttttttgagatggagtcttgct

SEQ ID NO: 23620 - DNA, 1032 bp, Homo sapiens
agcctgggcgacagagcaagactctgtctcaaaaaaaagtcaacaaactaggaatagcaaagaacttccttaatcctgtaagtgacatctataaaaataccacagctattattgtacctgtcccctaagatcaagagcatggcaagaatatctactctggccacttctgttcaacattatgctgagttccagccagagctaaaaaaaaaaaaaaaaagaaagaaagaaaaaaagccatccagagtgaaacaactatttataaatggtagaatattttatatagaaaatccttaagaacccacaaacatatacccagaaaactcttagaactaataaacaagttcagcaaggttacaagaaatgagatcaacatataaaaatcagctttatttctgtacactagcaataacctaaaaattacattgagaataaatttccatttgtaataatatcaaaaggcaaaaaatacttaggagtaaatttaaccaaaagagtgtaagacttgaacacagaaaaccacaaaatattgttgaaagaaattaaagatctaaataattagatagccattatttgtgaattggaagacaatattaagatggcattactacccaaagtgatctacagatttagtgcaatccctatcaaaatcccaattgcttttttaaaaattcccccccgtagaaattgacaaattgaccctaaaactaatatagaaaggcaagggacccagagtagccaaaataatcttgaaaaggaagtacacagttgtaagatttatactttctggttttaaaacttaaccgcaaagccacaataatcaaaacactgtgatactgacataaggatagtcataaagattgattgaatagtattgagagtctaaaaataaactcttacatatatggtcagttgacttttaacaagatggctagacaattcaatgggcaaaagaatagtctttccaacaaatggtgctgggaaaactggctatccttgtgtggaagaatgaaagttagacacctacttcatacc

SEQ ID NO: 23621 - DNA, 1050 bp, Homo sapiens
gtggggtgggggtggggaattaacaggttctcatgtacctagtcaaatatcagaacaactatgaggcttatatttgtgaaatatatattggtttctgaatggtttcattattattaaacttcaacatccttttaaagtatttgttgtttctatttaatgatagacagtgatctctaaatctgtgattctcagtcaaggacagttttacatttgtcaatatgtggagatatttttggttatcacagcttgggtacaagaagaatgctaacccagaatgctgacccaaaatgtctgtatggccgaagttgagaaaccttggtctaaatgcacctctctgtattagtaccttgggaaaattaaccatattttaagctagttacagtctgcatgtgtgattcatagagatatgtgtcctcctgcataaacatgtctctttatggatatgtctgtgtggtgcaactaccaatctttctttgggtgtttttgccgtaagtggttgtaaacacaatgcgtatccgactgaaaaaagattaatgtgcatgttggcataagaaaatgtatgagagaagttctgtgtattctgagtgctgttttattggtcccctggctcagcagtgaagtctttaacctcatcatgcttgctgcttattgttagtaagatcatccaagtaaggatgtatagggctgtgcacggtggctcacacctgtaatcccagcactttgggaatccaaggtgggaggattgcttgagtttaggagttcgagaccagcttgagcaacatagcaagacctcatctctactaaaaaagtttattttttaaagtcggatatggcggtgagtacctgtagtcccagctatttggtaggctgaggtgggaggatcacctgagcccaggagatcaaggctgtagtgagctgattatagcagtgcattccagcctgggtgacacagcgagaccctgtctcaaaaaaaaaataaattttaaaaagagttgtataatactattttgacctttgtcttagtttttgtgttttgttattcaaagaagt

SEQ ID NO: 23622 - DNA, 1054 bp, Homo sapiens
cccccttttaaactgtcattgacccttgaactgcaggttcacttacacatggatatttttgtttaaagagatggggactcgcagtgttgcccaggctggtctcaaactccaggggtcaagtgattcttccttctcagcctcccaagaagctgggattacaggtgtgtgccaccacacccagctctataaacaggtttttaaaaacaaatcttttggaaaaaatgttagagacttgcaacaacttgaaaaactcacagacaagccacataacctagaaatattgggcgggggggaaattaagaaaaagttaagtatattatgaatgtctaaagtatatgtagatactagtctattttattactaccataaaacatacacagatctattattaaaagtttaaatttattaacactcaaacacacagagcccatacaaggcaccttttgcatcaagagaaatgtaacagagatgcagtattaaatcataattgcataaaaataactaatacatactgtactactgtgataattttgtagccacctcctgttgctattttggtgagctcgtatgtttccaagtgtctgcttaaaacaccatgtgatgtggatcatctccccgtgaacagtttgtgtctccagtaaatcccatattgcaatcaaaagaggtcttttgtggttcttgcgtgttttcatcgtgtctagtgcaataccataaaccttgaataacaccatcagacctatacaaagtgccactagtgatgccagaagcaatcctgagaaacagaaaagtcatgacattacaagaaaaaattgaattgcttaatatgtactgtagaatgaggtctgcagctgtggttgcccgttatttcaagataaattaatccagcataaggaccattttaaataaaagaaaatttgtgaagccatcactgcagccacagcaggaggtgtgaaaccttgcactttttacagaatacctttttatctcatgttgaaaatgcagctcttatgtgggtacaggattgctataagaaaggcatacttgtaggctgggc

SEQ ID NO: 23623 - DNA, 1018 bp, Homo sapiens
tggttctaaaatgtgacaatcaggagcctatggtgagcagaaattagaccctgaggagtcaggttgagcttctcataagtttgcccccagtgtgaagtatctgacttagaatatctgaaataaacttttggggtaaggagattacttttcttttgtttgttttatgaaagagcttgacttgctgaaatattctgtgttatatattctagttgggaccactgccttcagaataagattaatatttaagctgttaaagtcagcagttggcaacccatgcttgataattttatgatgatattttgtttctgttttagattgcaagggagcatggtattaggttttttgagactagtgcaaaagcaaatataaacatcgaaaaggcgttcctcacgttagctgaagatatccttcgaaaggtaagttcctgtttttatatcctgccaggtacctgagtatctctgttgaatattttgtctattctgaagtactggatttacatacagaatttgagtttgggtggtattgtttctgtagggcagcagtccccagcctttttggcaccaaggactggtttcatggaagataatttttccatggaccgtactggggggtagtttcacccagaaactaccccacctcagatcatcaggcgttagatcctcctaaggagcacgcaacctagatcccttgcatgtgcagttcacagtggggtttgcactcctatgagaatctaatgctatcactgatctgatgggaggcggagctcaggtaataatgctcactcacttgctgctcacctcctgctgggtggccccgttcttaacaggccacggaccggtaagagtccacagccccggggttggggacttgtgctataaggaactggggaaacagaaagccatctagaaatctgaaggatctagtcagtggtaaccattaatattctgagctccacagtcactgtctagtccctagttcaattattttttccagctttttgtcttttctagccttttta

SEQ ID NO: 23624 - DNA, 1035 bp, Homo sapiens
tcgaagtaagagttatcagatatggtcgctaaggcgtggaggggcaactcatttaaggtggcacagctgctagtggtctctccaggatgaacgtggatctcctggcctaccatctagtccgagccccgggagggcggaagaggaaggctgttttccctttccagtctctgggagctggccgtgtggctttccctgggacctggctaaggccctgccctgtctctgggatccccaggtggtgtcgggcgagttcagcgaggacagcgaggtgtacaacttcacgctgcatgcgggcgacgagctcactcttatgggccaggcggagatcctgtgcgccaagaccaccaaggagcgctcgcgcttcaccaccctcctgcgaaagctgggccgggccggggcgctggccggggtgggcggcggcggcccagcgagcgcgggggccgcgggaggcactggcggcgggggcgccaggccggtcaaaggcaagatgccctgcctcatctgcatgaaccaccgcaccaacgaaagcctgagcctgccctttcagtgccagggccgcttcagcactcgcagcccgctggagctgcagatgcaagagggcgagcacacggtgcgcgccatcatcgagcgcgtgaggctgccggtgaacgtgctggtgcccagccggccgccgcgcaacccctacgacctgcacccggtgcgggagggtcattgctacaagctggttagcatcatctccaagacggtggtgctggggctggcgctgcgccgcgagggcccggcgccgctgcacttcctgctgctcacggacacgccgcgcttcgcgctgccgcagggcctgctggccggggacccgcgcgtcgagcgcctggtgcgcgacagcgcctcctactgccgcgagcgcttcgaccccgacgagtactccacggccgtgcgcgaggcgccagcggagctcgccgaagactgcgccagcccgcgccgcgcgcgcctctgcctgcccgcgccgcgcgcccccgggctcgcccgcgcccccgg

SEQ ID NO: 23625 - DNA, 1068 bp, Homo sapiens
tcgccagtgataagggctctgtgtttagaaaactttcttccacgagggcttctgtaactctttggtctcaggaactgcttagaactttgtaactaatggtgctagttatgtttccttgaggctactcacctaggaagcccttggacaccatctgtgtcagcagttctgggtttccacctccaaaccgctccccaaagactttgcccagatcttccgccacatgtttcgctacatccacaccaacttcatccaccagtgtggcggcacccacaggaaagccaaagcttgtggtcagggaatccagcttcttcgggtcaactccttcctgaacaggaagcgatgcagggacctcaggggaagggcagcccaaatccccccaaagggctccctgtactggctccaaacactgccttgtgtaaaacccacttctgagtgtcacctgaccaggcccaggactggtgctatttcattcagggaagcacaaagaagtttggggccacaagtggaaagtctgagccttctctaatctacagcactttaaggacgtttagagatgactaaattcttcattttcttcttgtttgcatttctgaatctcaataataaggagattgcatgacagacggctgagtgtgtcatgaccaacagaagaaacatcatcaaagaggagcactcagagccctgtgatccccaagtctgggtaagtgcccagcgaggaggatccctctcctttcctgccagaatgacctcgatggctactggagaggtctgtgtgctgtggaaacagatgcagcaccagttgaaccaagcgggccctgttctggatggtccctgcctcagagaggtgcagaaacagcatagaagacatgctggggggtggggtgcctttagcttgctggaacagtgaggaggctgtggggcagagggaaagctctgcccctttcagtgcagtataagcccaacttccgactgctgtgcagagagagggcaccagggaccttcctagacaagagcaggagttggtgtatcagaaggaagcttggtccttatcttgacatcatgagtttt

SEQ ID NO: 23626 - DNA, 1035 bp, Homo sapiens
ctactaaaaatacaaaaaattagccaggcgtggtggcgggcgcctgtagtcccagctactcgggaggttttggcaagagaatggcatgaacccgagaggcagagcttgcagtgagccaagatcacgccactgcactccagcctgggcgacagagcgagactccatctcaaaaaaataaataaataaataaaatagtagtaatcctttccattggtatatcatgttacagttttggattattttccatttttttcctataagttttacatatatatatggacacacacaacttatattctttttcattaagatagcatatgcattttttcatatggctacacaccctgctacacaatcttcctaatatagccttttataaaagcctccccatgtttagactctgttccgttccctcacaaggctgtagcctctagcctccactgtgacgttcacatcagtcaagccctttcccttgccttgctctttgaactctgttcttccagttcttcatgttattagcttgtccttatccctcactgtttatttattatcaatttctctgactctgcaacataagagtagagggcatgtctgtacagtttcactattttatctttaacatttcattaatcagtacagaaaaatcaaagaatgagtgaaaagacattagagtacctatgtaaaactcagtttggggaatatgaaggagctcttagtttaaaaattaaagttttaagatattacttattttttctttgcagaccaacatatgctactccaaaagttctagaaaaggcaggattgaccatgaatgatattgatgcttttgaatttcatgaagctttctcggtaagtaatttgaaagacacatatgaagggactatagtcataaaaaatgtcatccatatttgtgggagagagcaaggcatggtttatgatgtgagtagagcaggagtggacctgcatattttaagtactgattcacactgctgggaggggcccgaggggagggaagcaagggccacacatacagtg

SEQ ID NO: 23627 - DNA, 1034 bp, Homo sapiens
ctcaaaaagcaaataaagaaattaaaataaataaaaaataaaataagcaagccagagaggagtagtctaccttattatgaattctttcaggacaacccccaagtcagtcaaaccttcctatccctgctctttttttgtctgcttgtgccttttcaatgtacttaacatgccaggtgtggtagctcatgcctgtaatcctagcactttgggaggctgaggtgggcagattgcttgagctcaggagttcgagaccatcctggacaacatggcaaaaccccatctctactaaaaatacaaaaactagctgggcgtggtggtgggtgcctgtagtcccagctactcgggaggctgaggtggaagtatcacctgagcccgggaggttgaggctgcagtgagccgtgttcaggccactgcactccagcctgggtgacagagggaggccctgtttcaaaaaaaacagaaaaaccaagtacttaacagtttgttttgaactccagtgtatacttgattgaggacaaagaccatgtggcaaatctttaaacctgcagtgttcaacttggcactttgtaaataatagtttcttttatttacttttttgttttttagagggtgtctaaaaattctatgctaggatttagactcatctaaactaaggacatagctagtacatagcactgtgcatagtgctggataaaagatattctacttctggccgggcacagtggctcatgcctgtaatccagcactttgggaggccgaggcaggcagatcacgaggtcaggatatcgagaccatcctggctaacacggtgaaaccccatctctactaaaaatacaaaaaattagccggacgtggtggcgggcgcctgtagtcccagctactcgggaggctgaggcaggagaatggcgtgaacccgggaggcggagcttgcagtgagctgagatcgcgtcactgtactccagcctgggcaacggcgaggcacggtctccaaaataataaataaaaaaaataaaaaaagaaagatattctacttc

SEQ ID NO: 23628 - DNA, 1041 bp, Homo sapiens
gctggaattataggcgtgagccacgcacctagccagcccatcatcatttcttactactgtctcagatcttttgtccaatttatttcattttagttaggatgggttggagaaatggaagaacctcagacatggagtctgttgaataaacatttggcttattggttgactctttgctaaaagagttgactcttttagcagagtcttgctctgtcgcccaggctggagtaagctccacctcccgggttcacgccattctcctacctcagcctcccgagtagctaggagtacaggcacctgccaccgtgcccggctaattttttgtatttttagtagagacggggtttcaccgtgttagccaggatggtctcgatctcctgacctcgtgatccatcacacttttaagtcttgaaacactgatgtatttcttccatattcataaaacttattcagaaagaaattttgatctttaattatgatttttaaaaatcagatactcaaatgattactacttattttgtatacatactgaacacacatagaaaatataagcaaaggtggccaggtctggtggctcacgcctgtaatcccagcactttgggaggccgaggcaggtgggtcacctgagatcaggagttcaagaccagcctggccaacatggtgaaaccccgtctctactaaaaatacaaaaactagccaggtggtgcacacctctaatcccagctactcgggaggctgaggcaggagaattggttgaactcaggaggcggaggttgcagtgagctgagatcgcgccactgcattcccgcctgggtgacagagcgactctgtctcaaaaaaaagaaaaaaaaaagaaaaactttttcaagcgtgtgactagtataatatgtaaatttcagatggatgaattaggtaatcacccaggtaatactgtgaaccctcaaggagggtttgaactaggctaatattacctagttcaagacttgtctgttaccagttttgtatctcttcttccccatacctagcagtgtgtgtgtgtgtgga

SEQ ID NO: 23629 - DNA, 1002 bp, Homo sapiens
gcgcctggctttactattattttcacctaagaaatgttattctgtctactagtaggcaaggatttactctgaatattttctttcatttcttaacagtacagtgctgtggataccaatccactttctctgtatgtcatgcatccattctggaacactatagtaaaggtaagataattaatatgtatgtactttttgttttagtaagttttaaagattttaacctattttatggagtattataaatgcaactctcagtttcataagatatttagagaaaccacccttccccaatcacaataccccaaatcacataccttttgatttatcttactgttgaagtttataccctgggatttgtcacttttgtaaaatcccttttaaaatttttctaaaatagacttaatgttatgattatagaagtttgctgattacagagttagttaaaaaatagaggatggaagaaagaatgctgatggagattatcgtttacgtgttaatgtctataacttctccatatgatctttcaaatgtatagcttttattatgacttcagtttgcatgttgtagtatacattggacagagattcctctactttaattattttataattattttgcaaaaataggtatttcctacttggctggcgcccaatctgataactttttctggctttctgctggtcgtattcaattttctgctaatggcatactttgatcctgacttttatgcctcaggtaagaatattactttattataaaatttaactgagtagaaaaaaatgaaatgtggatgcttattttctggttttgttaaaatgttcatatttctaaaaaattttgaatattataatggcatcaccttgcctattgaattagatatgttgtctaaaaagcaatgaggttttggcagataaagaataattgggtttacatgaagatggaaaattaagactcaaaactttgcctaaaaatgaatacaaacagggctcagtttacctgtca

SEQ ID NO: 23630 - DNA, 1068 bp, Homo sapiens
atttgcctttctcttactatgaatgagcttttctagtgtttaagagccgtttgtatgtccttttctgcatattttacatctctcaaacagatttttttttctatagggttgttggccatttcctttatttttagaagctattcatatattaggtatattaatcctttgatatagattatagttttccccattattgtttctctttttaacttttcttaaggtactttttgtcttggtggttttaactgaagtgtacctacttaataaataaactggaaatgtgaggaatgaaaatattttttatgaccatgctatccttggattgtatctccttcagtttggtctttttttttttttttttttttttttttttttacaaattctactccaatttttctctagctgttaagtttcctatattatgaagtctgggccttcacttgtgcaagatgaaaagcgggtctacatatatatggtctctatcactgttctctacttgaaacatagagcttcatagataagtatttaacaattaagtactcgtttcagaaagtacattaagtactataaagaagaaacagaagatgcagcgtttctctttggcagcctgtatagagctccggctttctacatgctcactatacttgagatagttatttcaagatttttaaaactaaaattactcttggtggcaaatcttttgctagtttgtctcagcctatttccaacacctcagagctacaagtaattctgcattaattcatttagccttggctcccctttggtgcttcccagcttgacgtggagtaagctgctaaaaatttctgagaacactgaggacctcaggtggtcttctccttcctttccctctaagttcgtctaatttggggaactttgttctacttgggcttggaagtagcagagtaattctttttagagataagatttctgttgggttctagtcttctgttttaagccagatgtcttaggaattgtttagaaggaatgttttctgcctttaatctttaaggccatagctgcattgaccctcaaaccaagtagagtcac

SEQ ID NO: 23631 - DNA, 1050 bp, Homo sapiens
gtttgtgcttgaatgaagagtgtatcttaaaccccctttttttggacaggctgcacttggataaaataggcaccactgtgttgatatgtaattaaattcataactatttatgaatgtgaccattgttaaatttaattatagtgtatttctttcttgaatttcagtctgctgctttgtaaaaaataactgtaattgatatttcatttttaaaatttataaattccaatcattgtcattcaagttattagaaatgagtcacggcactaactcatggttctatactcattttaagaaattgtaaaggttgaggtgtatttggtgactttctctgagacacagatgaacgttggaaatagatgagaaatggatgcagaataatgcagatagtgatcccatgtttgttaattgccatcatggaagtcagagaattaaccaattaagtgacggtaactattttttgtataccttgttctttgtgatctataaaattaaactggataaaatgttaattgggggtagggaaaaagctttgttttaagatttctaagctaattattttaccgttttgttgaccttgtacacaagaatgagattaatctgtattatataagaaaagaactgataaatatttataaaatgacaaacttggaccacaggctttcttgaccttgtacagtatagtaaaaataccctttacttctgacattttaaggtcacgtcctatagtttgggggcccttttacttcaaaggtgtgtttctgccctcttttggttgtatcaaatttatttgaaaattgttttgtgctgtactttatgacttgtttccctatggtggtaaagaatgatgccatagtcagttttattgacattgttagatgaaagaaaagtagctgtcaacaaggggaaagtgaaattgagcaattcactgtttcaggatacttgaggatctttagtgtactgctgactctttttcttgttttgtctgccattcttgaaagtgcatcttgagagcccccatttgttgtgtagagatatagcagctgaagcagg

SEQ ID NO: 23632 - DNA, 1045 bp, Homo sapiens
tctgttataaaattcaaaaacaacccccaattttttcatttaatatctttttgctcttgtttccagcatacgtgaaacactttcaaccttaatgaagttacttaaattgttttaagtttgccgtattgtcaagtggcaatacacatacatgaaacagtcacttttggggggtacagtggctgagggtgcattttaaaaaaaactagtaaagtataacagataaactgagaagtgtacaaaccataagtgtatagcttgatgagacatacccatgtaatctgcaccaaattaagaaacagaaaattggagtctctgagcctactatggctcagaagcctgcctgattcaaaatcttattatttaaaaaagggaaaaaaagaaagaaacagaattatcagtactcaaggagagtctctagttacttagtattcttcctccatatcctgactgcttatacacagatcaatcagctttgcctatttttgaatttttacaaatggaatcatgtagtggatattctctcaccaggggcttcttgtgctcaaggttatatttgcgagatttctcttactgttgtatctaatttgcttatttttttcattgctatatagcatcccattgtatgtatgtaccaaatgtgtcagttatgttgctaatggtatttggatagtttccggtttggggctttcatggacagtgctgctgtgaacattctagtaggtgtttctgttgggtatatatatacctaggagtgaaattactgggtcagggatacacacatgttctgttttagtaaattgtgccaaatgctaagattaatggagaaattaaaaaaaaaatcctctgaagtatacaatgcagctgtttaaaccaaaatcctaaagactggcacaatattatggctggatcagaggttgacttccaactcttattcttcagcaaaaagtagaactttaagctatatctctgactccacagtaatctatcagttaaaaaaattatatatattatatatacatatataatatatgtaataaatattata

SEQ ID NO: 23633 - DNA, 1050 bp, Homo sapiens
taaagatatacaagcacatgtgcttgatgaaaaataggaagggctgttattgcagcactatttgtactaggaaaaaattagacatgacctatcattggagaatgaatggaatgcactatgacacgtccttacaaaggaataccatacagccattacaaagaataaggcaggtatttctgttctgatgtagaacaatctctaatatatatcattgaatgggaggaaaacaatgcagaacaatatttaatgcgtgccaccctttctgtaatacattatgtaatgtgaaatatatacttaaatatgcatagaccatccatggaaggaaacacaacaaaacctatgatgttgcttgtctctggaggggtcagggaggagctgggaaaactcacaatttacatggctttaaatgtttatcatgtctatgttttacctgtctaaacagtaataataatttgtcacccgtggctggctctggctcaccctgtcagagactcaacaagacttgaggagggtgaagttcttgggcccatgtggatggcttatgttcccaaacggacccccagatgcaggcctccgaaataagacacaagcatacagagttgggctttcaggcttactgaacagacagactgtgtttttttgactgcccattcaaacaagaaaggctctgagatcaggaagtaggtatgacccattattgctgactatcaaatagcttttccaatatttcccctttgagtcttttttattcagaggaaaacttggttggaactgtaggacacagaagatgagaagcactaactgggcattgtgaaccttcccacaggttcacaatgtgtgtgatgtgtgtgtctgctcatcccttcatcccttccttcaggcagcaagtgcttgatgaatacctgcactgggccaggtgtcatcataggatattgggtctaaaagaactttagagaacgtttagtcatttcacagaggaggaacccacagggcactttagctttcagtgagtggtatcggtgcagagagaatggtgatttttgccttctt

SEQ ID NO: 23634 - DNA, 1022 bp, Homo sapiens
gagatgttagcttgctagtggctttgcctgacctggcacaaacatcctcagagtgtagtccggtgtaactaccccattcaccagtgctgttactgattccacagccacttttttttttttttttttttttgagaacgaagtctcgctcttgtcccctggctggagtgcaatggcgtgatcttggctccctgcaacctccgcctcccaggttcaagcgattctcttgcctcagcctcccgagtagctgggattataggcgcctgccaccaagcccggctaatttttgtatttttagtagaaacggggtttcaccatgttggccaggctggctggaactcctgacctcaggtgatctgccggcctccgcctcccaaagtgctgggattacaggcatgagccaccgcgcctggcccatagccactttattataacaatatttttatttctatttatttatttatttttttaaggccaaggaattaagtgactgtatttagaacagaaggtattccatgaataacatcaaaacaatgtggacactaagagaatacatgtaactcatggatgcaggggacgcacattgtctgcattcctgttttctgtgcctactacatgtgctccaccccacacctgctgagtacatgctgggaagatcatgtcaacccttggagcagctagtgtttaatcatctcctgctagcgcctcatgttttacattttggcactgtcatgcagatactcccctttccccctaaataagacactgtcacacaatatcttttaactcatctgtatttgtataacaatatttttaaaattatatagtaccaagagattgagttccactgtaattctcctgtgggaaaactgcagttaatagtttcatatatatatgaaatctcactcatataaatacacatatagataaacataccttgggttctggttttgtcctgtaaactactttcttcactcataacctcccatgtcaatacttagagatctacagaatccttttcaatg

SEQ ID NO: 23635 - DNA, 1073 bp, Homo sapiens
attatttctggggcctggagacagctggcaagagcacgggaagcacagcagggctgagttatctgccaggagtcggtgccgggtgggcgaggtgctggtggtggtgtggtgcctcctctggtcacagacgcttgtccttccccagctaaagccccaatcgggagtcaggagtccttgtctcccatgtgtacacctgtctgtccttcttccaggacctgcgggagctgggcttatggaagtgggatttactcacacttacttttgagggtcctcagcctgcccaggcctcaagtaatgaagcctcctggcctcagggagtcagccaacacttacaaggagccaggcttcagcttgaacgcccaagactggtgctgtgcacacttgggctgggaggtgcacgtgaacacacatcaacgcacagctaagcttgtcctatctcacacacacacacacacacacacacacacacacactcagctctggcttctgacaactgccccttagctcttctgtgcctttgaactaatctcactgaacaagtggtcagcagctcccatttcttaccaccctctcacagctaatcctttgcaatgtagcttttgccctctgcacactgatggtccttgttcattaagtccagccacgtggggccgggccaactcagatgaactcatgggattaaaacctcttacttgatcttagcctgttaagaaatcatccctgtggatttatatacaccttcccagaagctatttgtttcattcaactcctgcttgcttggggcccaagcttgatctgtacttgtgtcagtttcttttaaaaaccgtctcaggaggccgggcatggtggctcatgcctgtaatcccagcactttgggaggctgaggcaggcggatcacctgaagtcaggagttaagagaccagcctgacccacatggtgaaaccccatctctattaaaaatacaaaatcagctgggcgtggtggcaggtacctgtaatcccagctactcgggaggctgaggcaggggaattgcttgaacctgggaggtggaggttgcagtgagctcggatcgt

SEQ ID NO: 23636 - DNA, 1043 bp, Homo sapiens
aattcagcacaattgggcctggaggctgggccatcactcacactgcggtgtctctactgagctgctttagatctggggtccagctcacccctccttctgtatggctcaaggctagatgcttgtattagtctgctcaggctgtcataacaaaataccacagactgggtggcttaaactacaggaatttattttctcacagttctggaggctggaagtccaagatcagggtgcaggcgggtcgggttgtggtgagctctctcctcccggctggtcaatagctgccttctcactgtgtcctcacacggcctttcttctgttcctgtgcctgagagagaaagcgagctctctggtgtctcctaaccaggacactaatcctagcagatcacggccctgccctatgacctcatttaacccttaaaactttctaagaggccccatctccaaatacagccacactggggttaaggcttcagcatatgaattagaggggacacatacatctagtccataataactctagagacgaactgtctggctttcaatctctgctctgttacaaactagttgtgggaccttaaggacgttcttttaacttttctaagcttcaggttcttcttggtaaaaatgggggcaatgatggtacctatctccaggcattgtaaggattaaatcagatgatgcacacaatgggcatagcgaagggcccagtatatagtcagtgtctagtaattattagttagcattattaatagagtcctttaagttctgagaatgagttttctagatggtagtcctaggagagcagtctatcctggatttccaggaccagcccaggcctgcgtgaatgggattcctgggccagagaggttccagggctccccagtgttctgcaagggagccaagcctcttcagagcctcgttagcctccggagacttccaactaggaagtggaaaaaaataggccgaggtggtggcagcccaagggttctagagaaggggagtagtcagccccatctattcctccctcacccatctcctttcaa

SEQ ID NO: 23637 - DNA, 1049 bp, Homo sapiens
ccttgtttgttgaggccttctgttaatgatggttgccattattctatgctacctccttcgggagctcacatcaaaaatagtcccttgatctcttagacctttaatctctcccttggctccttcttcactccctgaaaaatattagtcctaaaattgatactttccctcagccatgctccttgggccgtttctaggctttctttactcacagagatcttgacgactgtatacacagtctccacaaacttgccttcagtcagagttcatcaaagtctcactgatttccaaagcagaggtcaagatcttctgtggtccttgcccccacttcactgcatggctccatttaatgctaagggaagggagctctacagaggagggagtagtcagtggtgtcatatgtggttacttgatgcataatccattttgagttcatttttatataagattttaggtttaaattaaggctgggtttttggcctatgaatatccaacaccaattgttgaaaagactgtcctcccttcattgaattgcttttgcacctttgtcaaaaatcagttgaccatagttgtcaagatcatgcagtcttgattactatagctatgtaatatgtcttggaatcaagtagactgattcctctgactttattcttctttgtggagtttgctttagctgttctagttcctttgccagtccacatacattttgacaataatatgcaaaagatttgtgctgggattttaataggaattgcattaaacatgtatgtcaatttggggagaattgacaccatgttgagtcttccaatccatgaacatggtatgtctctccacttacttagattgtctttgatttctttcattggcattttgtagttttcagcatacaagtcctatgtgtgttttttctttttttatattgacagataaaattgtatgtatttgttgtgtgcaacatgatgttttgaagcacatacgcattgtggaatgactaaatccagttaattaatagatgaattacctcatataatgagaggttagaacacttgata

SEQ ID NO: 23638 - DNA, 1042 bp, Homo sapiens
ttttgtaacacattattggttataatttatatgatgcaagatacttgatagaaaattcagacaccaattattattcctataagaaaatatgagctgtttcctaattatctactttagggtatgatttgtgatttgttaggccctgcaggaataaaaaagtacaatctatagatataactatttatgctttattctggcttgtttttttttttcagacagggtctggctctgtcactcaggctggaatgcagtggtacaacctcctgagtagctggggctacacgtgtgcaccaccatgcctggctagttttttgtttgtttgtttgtttgtttgtttgtttgtttgttgagccagggtctcactctgtctcccaggctggagtgcagcctcccaaagtgctggggttacaggcgtgagccaccctgcaccaccgtgcccagcctaatttttgtattttttgtattttttcatcatgttgcccatgctggcctcaaactcctgacctcaactgatccacccgcctcggcctcccaaaatgctgggattacagatgtgagccactgcacctggcctaaaatctggtttcttaaagggacaagaaattttttcatttgatcatataaaatgttacagtgcttagcaaagccagtcatgttttaaactttaaatggtttggatgggggcttcctacctcccagattcagggcagcactgagagagctcagagggcctcctagaatgtaactaccgtcattcacagctgcttagtgggtacctttgtgtaggagccttttcagaaagctgggtgctcaggaagacttgctggttaaagagcaggagttgagcctgttgctctcagggtccctgacctgcccttcatgactgcagtgggcatcttctgccctgagccctgctcaggtatccagagggcccctcaggagaaaggaaaccctaaagattccattcatctatcagggcttctgcaggtccagagagtgtggggagccttggggctctgcgggagaatctcttgcaaagagt

SEQ ID NO: 23639 - DNA, 1067 bp, Homo sapiens
atccctccttccccttctgggccattagaatccccacatccaaggaaggctatgagtccaagttattcaacaaagcttaacactgaacttgtgaatgcttgttgccagcaggttggggttggagagctgatgagagggaattggtatacaattccatgagagtagaactacctccaccatctcacttcagctagactctaagttcggcttttctctgctatcttcactcttaaacattgctatcccaaggctctcactgaagtctcctgtgacacagacagactgtgccacactcattctgtagatgagtaaactgaggttcacatagatgcagtaactcacgacagaccacatggcctaagcggcagagctgaaattggagtcggctttgcctgcttcccacacggaggattttccctatatctatcctcaccctctaagttcctcacctcccctccccttactggtcacctccttttctctacccagtgacactctgaacatcgtggcatcagatcaccggcctttcaccacaaagcagaaagctatgggcaaggaagacttcaccaagatcccacatggagtgagtggcgtgcaggaccgcatgagcgtcatctgggagagaggagtggtatgtttcctagagccccgccccgatctgatccctgctctaatccccgtttcatccccgttctaatcccaataagagtattcactcctcagatcctgtcaaagaatgttcttagaagggctggttcaatcccagctgtttgtttcactcaaaaacaaaacacaaaaggtctttcccccaattagaaaggtagtaagacctattatggaaatttggaaaatacagaaaagtataagaaaaaaagaaaccttaattccacgcctagaaattaaactactattaacattttaatatatttctttcatttagttctgtgcatgtactgtacttttttttttttttttccttttttactatgttgtccagacaggtcttgaactcatgggctcaagctatccttccacctctgcctccttaagtgctgcgattataggtg

SEQ ID NO: 23640 - DNA, 1024 bp, Homo sapiens
gctacaaaactaaaaatgagatggctaagtgacagcaaaatctaaggatgtcaggatgctccactctgctgccaggagactctccggacttcgtttgccttgcttgtcttatgaaggatggtgtgaatactcgctatcacataaggaggggcagcctagtgtggtggttaagagaaaagactttggggtcactgacctgttgaatcagaatattgagttaggagatggagaagctgcagttttaagaaatttccagctgtgtgtggtagctcaggcctgtaatcctagcactttgagaagccgaggtgggacgattacttgaggccaggagctcaagacaagcctagacaacatagtgagaccctgtctctacaaaaaatcttaaaattatctgggtacagtggtgcgtgcctgaagtcccagctacttggggagctgaggcgggaggaacgctggagcccaggagtgtgaggctgcagtgagcctgaaccattgccctccagcctgggcgacaaagcaagactgtcttgaaaacaaacaaaaaattcccaagtgattttgatgcagaccaaagtttgaagaacagtgtagctcccctggactcctgatggttcccaaggaagctgtgtatttccacaccccctcctatgcgccccatgctctccccgctccctgagccgctttccactcagtccttcctatgcatgcatcagaagcatcatcttttgggtttgcttccactaagtgaactcccactcttccttcaaaactaggttacacatcacttcttgcccaaaacttttcctgaacctttgcagaggaatgaatccttctcagataccaaagaataccatgcaaccatcaaagagaatgagggatggaaaactaaccatatttttagaggagaaaaaaaaactcacaatatttctattttgattcagtttttcttaaatgactgtacaaataggtatatatagtttgaatatgtatatagaaaggtctgaggaatatacatacctggtaa

SEQ ID NO: 23641 - DNA, 1048 bp, Homo sapiens
ctcccgagtacctaggactacaggcacaagccaccatgcccagctaattttgttgttgttgttgctcaagacggaatctcactatgttgcccaagatggcagacattttttgtaagggccagatagtaaatattgtatgctttgctggccatattgtctcaagtcaaaactactctactctgctgttgtaaagtgaaagcagctatagacactaggtaaatgaatgggtgtggttgtgttccagtaaaacatcttgaccaaaagggaggctctagctcataatttgccagcccctgcttattagtcataatcacagaggggactctattctttcctggttttgctgcagtcctattttgtcctagatattaataggttgtttaaatcttcaaaagtagtttccactctcccctaaaagaactcagaatcctcagagaaatgccttgcttcaagaccgaggcagggaaactgcaagttgatcctggaacaaattattcttctagaaagtaaggaacttaccaaagaatgatgggatgtgtcaacaagactcaagagccagctgtaaggggctcccactgtggccaccaatactgggacactatgaacatcaaaataaatgataataatgtattataaccctttgaataaaataatcatctatgagtttatactggcctaaataaataaaagaaaaaataaatggaggaggaagggatagcttttcctttatgatggagttaaaagttaagaacagttcttaagtaggttggaggccaaatcagaatggggactttttcaaatacctgagggtctttctaagagaggtgtgtgtgtgtgtgtgtgtgtgtgtgtgtgtgtgtgtgtgtgtgtgtgtatgtgtgtgtgttttggaaaagctccccacaagatactaatgggccttttctgtttggggactactgatattccggccacagaagacagtggaaagatagcagagggaagtatgtcttcagcttgcttggcccattcatatctgcctatcgcctctattccttgttatcctcat

SEQ ID NO: 23642 - DNA, 1032 bp, Homo sapiens
gattgtaccactgaactccagtgtgggtgagacagagtgagatcccatcattcatagatagatagatagatagataactgatagataggcatataattgatagataggtacgtagatctaaacatagaaagggtacggtgaactatgattgcaccactgcactccagcctaggaaacaaatcaagaccccttcattaattcattcattcactcataaataaataaatgcatatatacacacatacgtacatacatgtatacatacatacattaaacagaaagggtacagtaaaaatacagcataatcttatggaaccactgtcgtacatgcagtctgttgttgatgtaaacattgtgatgcggtgcgtgactgtgttttcccccggcttcatggactgtaaacatctttccatgtgttttatcaattgggattgtgttttgaaacaagtaacagcaaaccctgtcaacagtggcttgaacaaataatggggtattttgctcgtgaggcaggagtctgaaagtaggaggtctaggctagtggaacagctcaaggacgttgccaaggacactcctgctgtcttaggcggctgtgttgctttacggtctcaaggtggctcttaactctcagggaggctgagaaagcaggcattttgtgttactggcctctctattggagacaggtaaggaagaagggtgttgggatgggagctgagtcacccagccagcagtgccagcatcattacatattctagaacatccctcttttcagagtggcattgtttggatgtgtcacaatttatttaacaattcattgttggacatttcggtggtttccagtttttcattattgtaaacatgctaatatctaaagttttacacatatctataattagtgattcagtataaaattcctagaagtggaattaaggtcaaagagtatataaaatctaaaggcttttaatctttttttttttttaaccaaactgctctccaaaatggctgtactaaactatattctcaccaatcatgttt

SEQ ID NO: 23643 - DNA, 1043 bp, Homo sapiens
caatttttgtatttttagtagagacgggtttcaccatgttggccaggctggtcctgaactcttgacctcaggtgatccaccagcctcatcctcccaaagtgctaggattacaggcgtgagccattgcacccaacctcattcttttttggtcagcctcttctagctcttaactcatagttcctgggaattccttcatcagcatcctaagttctcctttcctgactacaaagggaaatagtaaagagctttttctaggttgtcactggaatattctaggcccctcttttttttttttatttgagatagagtttcgctcgttacctaggctggagtgcaatggtgcaatctcggctcactgcagcctctgcctcctgggtccaagcgattctcctgcctcagcctcccaagtagctgggattataggcacccgccgccacgcccaacaaattttttgtatttttagtagagacaagatttcactatgttcgctaggctggtcttgaactcctgacctcaggcggattcacccgcctcagcttcccaaagtgctgggactacaggcatgaaccactgtgcccatctaggcctttttttttttttttttttttgagacggaatttcactcttgttgcccaggctggagtgcaatggcatgatctcggctcaccacaacctcctcctcccaagttcaagtgattatcctgcttcagcctcccaattagctgggattacagggatgcaccaccacacccgctaattttttttgtatttttagtagagacggggtttctccatgtcggtcaggctggtcttgaactcccaacctcaggcaatccacccgcctcggcctcccaaagtgctgggattacaggcatgagccatggcgtccggctaggcactttttaatcactattttattgacatcctccctgccccgcttccaatgcacaacactgcattgagccccctgaggtgaaggacatgtattctatttctctgttacttccccctaccaatagaaaatatgcacagtcagtactaag

SEQ ID NO: 23644 - DNA, 1024 bp, Homo sapiens
caggatttaatagcatcgtgttagccaatttccatttcaactcaggcatcaggtgtcaggtgtcaggcatcaggatccccattttactgataagtatagattcagagaccaaggggcttatccaggggcacacagctacctgcttctgctgtttctttttaaaccccaagcctatgcacttgcctctcatcaacatttacttctaacttatttatccacatatctcgcacctatttctgagaaagatttgaggtagcttacagtaaaaagtatgtacagttaaactgttggagaacatttaagaccatggtatttgagcttcaactatagctcagggcttgctggcactggaggcaaacatgagatgccatgggttatgtatggatagagctggttcatgagccctggcaagctttttcctggtgctaaattccaagaggagtttaccagaagtccttttcacagaggtcaatgaacaccgtttagtagtgggaaatatctttctcagttgtctgctagaaactgaagagtcagttgttggttctttttttttttttttttttttttttttgagacagggtctcattctgtcgtccaggctggagtgcagtggtgcaaccatgctcactgcagccttgacctccagactcaagtgatcctcccacctcagcctcctgagtagctgggaccacacatgcacgtcaccatcccagctgtattttaaattttgtataagggacgggttctcactatactgatcagagtggtcttgagctcctgggctcaagcagtcctcctgctttggcctctcaaagtactgggattacaggcatgagccactgcacccagccgatttgttggttctttttctttttgagacagagtctcgctctgttgcccaggctggaatgcagtggcatgatcttggctcactgcaacctccgcctcctggattcaagcgattctcctgcctcaacctcctgggtagctgggattataggcatacgccaccatgccccactaa

SEQ ID NO: 23645 - DNA, 1062 bp, Homo sapiens
ggataaagtgatgttctctatttctctctggcctccagaaatgtgtcctgagaatggatcttgtgtacctgatggtccaggtcttttgcagtgtgtttgtgctgatggtttccatggatacaagtgtatgcgccaggtgaggaattaggccgtctaactagggatacaaggaatgcatagagcaagtcttctcagaaaggagagccacaagaccaggagctgatacaaatttcctataggtggaaaactatagaattgccctagacaaagtgataggtatattaggaaagaactaggtgttaggatgtggccctccgtgtaacgttgtatgggggtgttttttggtctgttgttcacagggctcgttctcactgcttatgttcttcgggattctgggagccaccactctatccgtctccattctgctttgggcgacccagcgccgaaaagccaagacttcatgaactacataggtcttaccattgacctaagatcaatctgaactatcttagcccagtcagggagctctgcttcctagaaaggcatctttcgccagtggattcgcctcaaggttgaggccgccattggaagatgaaaaattgcactcccttggtgtagacaaataccagttcccattggtgttgttgcctataataaacacttttttctttttttttcctctctttctttttaaggaaaggcgccctgcctttacgtgtttcttgcttggggtgggagggactgctttagggcagccggttttttcaggtttcccccggttttgcagtgcggagaccacgggggcccactccccgtggctccgcggaccccgccccttacgtgcccggccccgcccctcacgccgcctgtgtccgcgccgccgcagtctctgctgctgccgccaagcgcgcccgaggctcctacgctgccgcgcccggcttctctccagcgccccgcgccgttagccacgtggaccgactccggcgcgccgtcctcacgtggttccagtggagtttgcagtccttcccgcttctccgtactcgcccccgcctctgagctccc

SEQ ID NO: 23646 - DNA, 1052 bp, Homo sapiens
ccatgttattttctttatatctttttttatgtgggacaggcacaccttggacagtaggaaataacctgtttgttcatctcttccactcattgcaggcccaggcagccgctgaacggctggggtaccctgtgctagtgcgtgcagcctttgccctgggtggcctgggctctggctttgcctctaacagggaggagctctctgctctcgtggccccagcttttgcccataccagccaagtgctagtagacaagtctctgaagggatggaaggagattgagtacgaggtggtgagagacgcctatggcaactgtgtcacggtgagtgaatgggggaagggtgggcgtcgtgtcaggcaggatgagcttttggaagagcagaggcccaggccaaggtctttgagagttgtatgtccctcagacccaggttaggtgcagccccagaggtaacaggaccctggggtgcagccttctgcctctcctgactctgcttggcagtgacctccatggcaccccccttcacaggtgtgtaacatggagaacttggacccactgggcatccacactggtgagtccatagtggtggcccctagccagacactgaatgacagggagtatcagctcctgaggcagacagctatcaaggtgacccagcacctgggaattgttggggagtgcaatgtgcagtatgccttgaaccctgagtctgagcaggtaagctctaggccctggaactgatagtctagttgttaccccctcttcttgtataatttttggcccttgaggttgaggtcttttgggcttacagtccctggagtacaagctggaatcttctttactaggttacttttctctcctttctgagacctctcctagacagggtcttctaggccagtgactttattctccttctttgcagtattacatcattgaagtgaatgccaggctctctcgcagctctgccctggccagtaaggccacaggttatccactggcttatgtggcagccaagctagcattgggcatccctttgcctgagctcaggtacgaggatga

SEQ ID NO: 23647 - DNA, 1054 bp, Homo sapiens
actgtggaggggctgacttgtacacagtaaaatagagcacaacttatatctaggacagctcccttgaggtgctaccgctgtcaaaggaattgtttctcagatgaccagggtagacaggggaacagggactgagggaagggaggggcacccaagagaacattatgagcatatgtagattgcctcatctcattttctgtgtttatgtgaagggttgtatctctttctctaaatagcttcggaaggagtatggggccaatgtgcttcctgcattccccccaaagaagcttttctctctgactcctgctgaggtagaacagaggagagagcagttagagaagtacatgcaagctggtgagtggttgcaggaaactaggttgactatattgaggactatggggagagacttaaaaacagctggttctgtggaagggcctgatttaatttctagatctaggaaggctcttgtttgatctgttatgcagttagcaaagtaaatagtgtacgaggatgtgtaactctgtgtactagcaaaacaatttgggcactaacatctatgagaaatactagtataacactagtcttaatatcagtggagagaacttaatttgtatctgatgtgctttagattaacatcattgttatttccctagttctatagactggactcacctagatggcagccaagggtggggcaggtgaagaatttatgcaaacagtgagtgaggtgaggccagctgggggatgtggcaggccaccatcagcccaggaaatggggtcgggggaacctactgagaggaggactggggagccaagagtgagtgctaagttcctgtaataatgttctcttgtcctcgtagttcggcaagacccattgcttgggagcagcgagactttcaacagtttcctgcgtcgggcacaacaggtagggctttgggtgggaccaagatttaaggaaaggaccttgctggaaggtcatgtcttttatttttttgagacagagtcttgctcttttgcacaggctggagtgcagtggtgcgatctcagctcactgcaa

SEQ ID NO: 23648 - DNA, 1032 bp, Homo sapiens
tggcagacagtgttgaggaataagggggtagaacaggagtctaaaatgttttggtggattaaaagtggaacagattcaagggtattagctcaattctgagctgttttgagtttcactcagcaaaggtgggtaagaaggaggctacctcctgagctgtatgttaatacttcttatccttatttatccaagttcctgaggtctccaattgtcccagattaggaagggctgcctgtgtttttatgttatttgcagggtggatgaaaaaactaaaaccaaatattttcatgtgagcagggattagaggtacctgggatttagggaaggtgaacgcagtacaagtgaaaatttttccttaaacttcattgcttctagaccagcctgaagcccctgtgtatctgttaatttagtctggtgcttttgttgctcctgatttagggacattagatgagaagcagtaggcctaagaaaggggaggtaggtggcatccatgtgtggtctgtagttcaggacaggaaagggaatatgtttgtgcctgttgagggtcatcagaaaggagacttcaggagagaatttggcttttggggcctctctctggagtgagactattcttcattgatgatggtcagattgtgggtgtctcccctactcccagtggctcctgacactatcaacaatcatgtgaagacttgtcgagaagagcagaagaatctacacttctttgcaccagagtatggaggtgagccttcctgctttctctgccctgtcctcatccccctgcttttgcaccttataacttgaggtacagaggcaatataactgaaacttctaggccttctctaccagcatacaaaatatttttcttttcttttttttttttcctaaggcattcctgccaaccctagcccccaatcctctgattaaccaaagccttctctgttttccctagaagtcactaatgtgacaacagcagtggacatctactcctttggcatgtgtgcactggaggtgaggggactggaggggaggggggaa

SEQ ID NO: 23649 - DNA, 1090 bp, Homo sapiens
gattgggtagaattaaataagtttacaaaggataccgagatgaactaaagtacttttctaatgaaatctaaatatttgcacatggaagaatgagctaggggctcttaaaaatttttggtagatcagaaaggagttgaaaataggctaaactttttatgtttgtgatcagaagctgagagttgccacactggtggcaacaaattataaaataaatgcaattatgatagtcattgtatcacaacaaagctttttcttgttatatgtatggaaagggaagtttgagcttaatctggttttttttacaaataatcaaatgtcctggggttgatgggtagatattgtaaaatacttgagaattgtttttgttgagtgctttaaaaataaaacatgagacctggaggagggattccctaaccaccttgatttaatctccaagagttaattatgatcatatgaactgttgccttttcagtatgcttatgcttattcataagagggtatatgggtactgtatttctgagtcctacactgatagtaagaaattcctacatggagagtttcctaagagttattacatgggactcagctcttaatggcctgttggtaccatcaagtctttgttgttgttgttgttgttgttgttgttgttggagatggagtcttgctctgtcgcctaggctggagtgcagtggcatgatctcggctcaccacaacctccacctcctgggttcaagcaattctcctgcctcagcctcccgagtagctgggattacaggtgcacaccgctgtgccctgctaagtttttgtattttagtagagaaggggtttcacagtgttgcccaggctggtcttgaactcctgagctcaggcagttcgcccatcttggccttccaaagtgctaggattacaggcatgagccactgcgcctgtcccatcaagtgtttctagcattgtttgggatggtaggttttggccttagaggcctgccagtccattaatttttaaaaatacctttattgaggtataattagagtacaatagactgcacatatttaaagcgtacactatggtcagctttgacgtatgtctg

SEQ ID NO: 23650 - DNA, 1057 bp, Homo sapiens
ttctagaattaaagctgcctatgctgctctgcaagtggggttcatcctcattgcaaattcttacttgagggaaaaagacagaattggaaaactcaccccatttggggcacttctcccaactttgactcccctgcataatttacttgtttttgtttgttttacagagtccagtgagcaggaggggtgggccttagtgggcttagctgcccctccagagccaggacttctgtgtattaaatttgtgttattggacctcatgtgtggagagccgaaactcattcttccctatttgtaacatactgacataaccagtctctgttatgtttactcatccccatttccatcccctccctcctagaggaaactgtataaacaagtgtgatgtttgcacttaaatatttatgactcctttaaaaaataagctttaaaataagctgctttatgtgtggatttgtttttagcttgctgaactgacattgtgctagagatactgttttgtttcttttttcattcaacaatatactttttagttatggtcgtgtctctatgtgtagaattagtttattgcttctaacagcagcacagtattccatagtaggcatctatcacattttgcaaggatggtcactgtgttacttccaactccctgatgtcataagcaaacctctctatgtgtaattcttattagctctacatctaaagtgttaccttgaatctgccaattcaagttaacttttttccttttgtttactctttctcccatgggctgtctccatagagcagccagaaggatctttctgaaccataaatctaaagtaggcctcacaggtatttagctggaaaagggaggttctaggagtccattgaccactcttggagaactgctgctctgctgcatcttgagccacctagaagaatgtctgatgctttgtagttacagagtaatgttttttagctgtcatactgactggtcttagattttggaatctggattcagctgtataccagaaatctctggccaggttaattcatgcaagatagcatccatcctttagct

SEQ ID NO: 23651 - DNA, 1028 bp, Homo sapiens
gagagagccatctttaaactatcacagctatagtagattcagtactttgcagaggagtaaatataaaagaagtgggaacacatttgcactaaataaagcagattttaaaaaaaactatataattttctgtgtttctcttaagtgtcagagaaagtactgagggaaggaaatggcttaatctttcctaaacaacttgttcaccttctgtttcttttctttttacctttccttggctttccttcttttgcggcttgcatgtatattcttttttcgtttgttttgtggcacaaattattggttttcttccttcaaatgtggagttggtcagtgtaaatggccagattgttcagagaagggagctatttggcatagtcttcatactatttcttctcttttgcagggctgtgaggctgtctacagcagtgtatctggccttaaagctcacctgggctcttgtacattggtttgtaactttttaaacttactatcttaacatgtcctctaaaatagtctgacatggaagagaattcagtttaggtgaacagctagttgtcctgtttaccattatcttcagaggctgctttagatttttatgtctctaagattcttggtctggtattgggtgggatgccagggcatgtccaagacttagaaaagatcaccatagtcacaagtcattatcaatttaaaggaattggaagaaacatatatttgttctgagttcctatccctgaattctaagagattcagctccttgcatttgagcatctcctacactgggcctgccctgtttaggtgggcctaaaactttgtagaatcaccttacatgtgcttacctggattggtaaagatcctctatacccatctgaaccatactggcctctcgggatgggaggtgggatagggtgtcaggctaacagccattcacctcactgaatcttttccatgttgacccaggtgtcctacaacctaccagccatgggaattgctgccattttccaatctcctcacacaaaatgagcaccatg

SEQ ID NO: 23652 - DNA, 1026 bp, Homo sapiens
gagaggaaggaaagaaattaacagtggtaaatttgattgttcattgaactgttgcaacttttctgaaggtttgtaatttttcaaaataaaattttaaaattgtgtataaaaatgctttaaagttcagaaggtcaagggttttctcttggggaaggttttttagtaatacaggtgaacagagaaatcgtttatgatataattaaatagtcctactacaacagcttaggaatacaatttgcattctcttggaatatctcactgcagaaactattgctgcctgatgtggaaaaataaagggaacacctttatttattttctgccctcaaatttgatagtacttaacaatgtgagctttaattacttccataaaatttggtttctgttgctttactggcataagctttcagaatccctaaccaaagcctgagatgtcttctgaaggcagtcatatctttttagtaataatagcatatctttttttgctttaggaagtatttaaaaggtaattatcggctgggcacggtggctcacgcctgtaatcccagcactttgggaggccgaggcgggcagatcacctgaggtcaggagttcaagaccagcctggccatcatggtgaaaccccatctctactaaaaagttagctgggtgtggtggcgggcacctgtaatcccagctacttgggaggctgaggcaggagatttgcttgaacccaggagacggaggttgcagtgagccgagattgcgccactgcactccagcctgggcaacagagcaagactctgttaaaaaaaaaaggtaattatctcctgacaaaatctggcctttatatagttaaatggtttgtctattttcttcctaaaaagttaaaatcaaaagaattggaaccaacaaatttcacttggtttggggcatgctcccaggcatttgtttattgatttatgcctctatgaattttgtgggtggtaaaacatctttaccctgtttcttcctccctccatcacattttcttacactactttttttttt

SEQ ID NO: 23653 - DNA, 1166 bp, Homo sapiens
ttacaaatttgccatttattgaagaaaccggatcacttgtcacatacatgtacccacattctggaattttgctgattgcaccctatgatagtattcctgtattctggccatttccttttttgctttttgttgttgttgtttgtttttgaggtacagggaccactgcagtggagtcttgcagtggggcagagagattgggctcaactccctattctggcttttcctatgaattggtagatttagaagattgaacagatcacttgataagattgaagttctttcttttttggcaaaaatacttcataattggatttcatgtcccctaccccttaattttttaaagtgagcctcgaaaatgttaagtaattcgcccatggtcacgtatctagaaacagagctgggatttgcacccagggggtctggctgcaaaatttatgctcttagttacgatgccgtcatggaataaaaatctcctatggctcagtgtgttacatctcatgatgagatttatactcaggagatataagagtgggatgatgctaagtaaacagactttgtagatcatttattaaagtccctagaattacgccttacaaaatatgtgcttgtaatagctgctctgtgttggatttctccatcttaaaatatagaatcctgaggtatggttccatatctgtttccttcttactgtgttctgccctaatcatgccttttttccattcttcctccacctttctttatgttcttcactatattttcgactggatgacatttctattttgcctctctaggactggttcgttgtaaacccaacaacaaccaaaagctttgaaaagctgatgaagataaagcagcggcagcaagaagaagaaaagcggaggcagcagcacaggagcagaaggtctctaagaaggcggcagcagcctggcattgagcttcccgagacagagctgagtcttagagtagggaaggatcagaggaggaataatgaggaactggtagtgtcagcctcctgtaaggaaccagagcaggagccagtgccagcacagttccagaaagtaaagcccccaaagactaatcataaacgaggaaggaaataggcagtcagtgtaaaagtgctcctaggaaagcagatgtgatgctgttgtcacggggacctgtgctgg

SEQ ID NO: 23654 - DNA, 1052 bp, Homo sapiens
ccctgctccagtcccggctggtccagccctgaactgtttaaccgcctcggctaccgaataagcccgagcagccggtcctccagtggctccgctccccgttctctgtgggctcaaaatgacaggcatgctcctcgttttcttgctgtgtgagccctgccctcgggaccccatctcttctggccttcctccgggagacaaaagccctcccaggctgcagagatcagcgcccttttcctagctcccttcagccttcctctcgcttgctcagcgcccccacttcctcgccactgtcactagttgactcatcagccctgcccgacgctaagaagatgccctggcaaccgccgcgcccctcacccgctcctttctgacgctgtggtggttttcgttcgcagcccagaacattgcggaagtttctctacccatgcggtgtctctatggtcgggtgggtggggccaggaggaagatggcggcgtccgcagctgccgctgagctccaggcttctgggggtccgcggcacccagtgtgtctgttggtgttgggaatggcgggatccgggaaaaccacttttgtacaggtgacgtacacagcatgggtgtagtaggggagcgcaaaaggttgcctccggcaggcggaaggccaggaagaaagggagggaagaggatttggagggtaccggcgcatggctttcgggggcttcccatcaactttagttccttccccggcaaagcctcctcgggccctagccaggttaattaaggctctcttctgcgcaccttcagggcatactcggtccagcttaccacgttgtacaggaattgtcttgctgataaaattgcgtttctcggaggcaagttacaagtaactttaaagattaatacagtgctagcacacaggttttggtgaagatttgccaaatatttcttgcacgcctgtcatgttccattcactggggatatagcgaaaatgaggttgacaagattcattcgtggggccaaatatttaatggaggagatagagaaaacccacatacgaagaatcaaaacaagtaa

SEQ ID NO: 23655 - DNA, 1031 bp, Homo sapiens
ctcatatttcttggtttatttccttgcacagtagtacatccttctgtacttttagcagattaaaaagctggtacaacactagagggcatgggtgatgatagtcttcaatgaatttcacatctttccttttcttggtctactctcttgttttggtggacatcctctagtagatttcagagaaagagtgtataggaaataaattttattaatccttctcttctgaaaatataattattgtagcttcactcctgattaatagtttggctgggaatacaattctaagttggaaacaatttttcttattttacattcagtgttgcttttgagaaatcctaaactgttcagattttgatcctattgtatgtcatcttttttttccgccttgccagagcttgtaagagtttccctttgttctaaaggttctaaaactatgaagtacttttctgtgggtctatttttcttcatttttctgggtacttgttggatccttttgatctagaaaccttggctgttcaggaagttttctgcaattatgtcattaattgtttcgtccctctgttttctatggaattttattattcagacattggacctcttggacagaccatttaagttttttttcttctttttttcatctgtatgtcttttccttcttgagagatttctgcacctttatctttctgtcttctctattttgccatcaaggttttaatttctttctctttttttaaagtttttaaaatcaggcagtctttcatgccagagaaggctcagagactccaaggttttaatttctaaaagttcatttttggtttttgaattgtcctttttaaaacataatatcctcttgtttcatgggttgtaaatatctcctctctgttttctccatgttatttttctttttatgtggtctctgttctgcatgttaaaggcttttcttaggtgtcatgtaattcttcattgtagtttttttatttggggatgaaaaaggtgattgacagtttggaatatataggtggggtttctgcatg

SEQ ID NO: 23656 - DNA, 1032 bp, Homo sapiens
tgctttaatgaaaaattatttaataagaaattgtgggaaaatatacataacagaaaagtgtaccattttaagcattttaagagtatcactcagtggcattaagtacattcacaatattatggaaccatcaacactgttcattttggaacttttttatcattccatactgaaattggtatctgttaaacactaacttcattctccctccttcccagcctctggcaaccaccattctacttttctgtctctatgaatttgactactttaggtatctcacatgatgcagtaagtgtccttttatatatggcttatttcacttagtataatgtcttcaaggtttagccctttgtttttatacgtagtttggcagcttgtagaacctctctttcagtagttgatggtgacattttaagctccttgcctacttgccttctttctttttcttttcttttttaaaaacttatttattcatcattttatctacctctagtatctcggaaaaggaaagccaagaactgggaagatgaagacttttatgatagtgatgatgacacatttcttgataggactggcctgattgagaagaagcgtctgaacagaatgaagaaggctggcaagattgatgagaagccagagacctttgaatcattggcaagttttatttatggaagtagctgtggtatttaatagtttaatttttaataacataatgtattatttaaatatgttttatgataatttttaaagtagtagcattgaaatctgatactgaagtataacttttgtggtctgttaatttaatggtaacagacaactagtcttatccaagttgtttgaaaaaaatatggcttgctgctagatcctttccttcaggatattgatccattaattaacattctttggatatgatattacctctctcaaaaggaaaggaaaaagttccaagttagggcgttctgaggtgaaattgactttagccttctggcagtcaagagaagtcaaaggaattttgaagaatgtagtatggtaata

SEQ ID NO: 23657 - DNA, 1037 bp, Homo sapiens
gatttccctgctaccctacaatatatgtctgtctgtatgtttttgctttatctatattcctattcatagattcagcttttaaaaggttttcattacccctaagagctgaaccttgagtattagtttgctagggccaccataacaaaatactagggattgggcagcttaaacaacagaaatttatttgttcacagttgccagcagggttggtttcctctaaggcctctctgcttaccaatggctgccctcttgctggctcttcagatggccatccctctgtgcacttgcactcctggtgtctcttcttcttcttctaaggacatgagtcatactgagttagggccccaccctaatagtgtcattttaattcagtttaatttaatttacagtcatattctgaggtactggggcttgggacttcaaacatgaatttgggcagcagggggcacaattcgtccaaaacaccctgaattagggtatactgccctctggtggcagaaatctgaagtcctagctatgtattctttttgtttgtttcattgagagacagtctcacactgtcacccaggctgcagtgcagtggccatctcggctcactgcaacctcctcctcccgggttcaagcgattctcctgcctcagcttcccgagtagctgggattacaggcacccaccaccacgcccaactaattttttgtatttttttttagtagagacagtttttcaccatggccagactggtctcgaactcctgacctcatgattcacctgcctcggcctcactatgtattctgaatgagtaatggtttacctaacaagtaggcttttcaatctgttgcggtggggacttaggttttaaatagaaaactttttactaaacagccctccttagagaattttagaactaagtcctatatttaaaagataatataggccgggcgcggtggctcatacctgttatcccagcactttgggaggccgaggtgggtggattgcttgagctcactagtcgagaccagcctgggcaacatggtgaaac

SEQ ID NO: 23658 - DNA, 1034 bp, Homo sapiens
atcaaccttttctaataaatacttttattgaatggctttgattagaatatttagctttattctttgagaaatgtcttcctccttttcttcaggatctgtttgatggatttacatgccttgtttccttgaaattacgctaagtctaaaatgaaaaagcagcacaaatgacttatttctgattgtctgatttattccttagaagattttgtaatcaattgaaatcctttaatatcatgagttataacagtccagaattcctgtagctggcactcatctgaaataactattttagttccttacaagctattttcaagtgttttgtatttagtaatctttgactctaggaactaataaagacacttgtttagggtctatagaggggtaaaatttcatgtcaaagtcccacctccagcagacttctgtggagttcatcaacctaaaaagagtaaacattcagtacatttagactgacctccttgaaaagatttttctcttgttgtcattaagtagaactacttgttcatggttttgtttccctcttagaagttaccccccaagcgtccagaactccctccaactctaatgagaatgaaagatgagcctgaagtagaagaggaggaggaagaggaagaggaagaagagaaagaaaaggaggagcatgaaaagaaaaaactggaggatggaagcctcagtaggccacagccagagatagagccagaagcagcagtgcaggaaatgaggcctcccacagatctcacacattttaaagaaacccaaacccatggtaatatctttcttctccttcctgtgttgttcagtgggcagttacattgattgtggataggttttaaaaagcaaggccagttcttgtctgtgcatttgactttgtatgtgatatactgactctgtagcaaggaaacatactttcttggtcttcttcctttgaccgccagtcattatttgtcttcattgcaaattaagggcagttatttccaatccattccagaattacagaaaattgaaggctatggaat

SEQ ID NO: 23659 - DNA, 1041 bp, Homo sapiens
atatgtgatatggcatttaatgacatttaatatgtatggaatttactttcgttagcttcaaaaaagaaataaaaatacctctacccacattcataaaatgatgtgaaagaccttgttaatctggaacattattgatgccttttatgtagtacttgtctgaaagattcagggaagttctttagaagttcattaacaattccttcttcaatccttccatcagccgaagtgtgaatttctcgtttctgtaacaaaacaatgacagagttagggaaaagaatggcttctttttggtgtgtcacttttggcattcctttcttttagatcttcagcagacacagttatgagtggtaggatctacatgtctaatttctattaactcgaagaggtataccctataggacacagtataaataaaagtataaaacaaggagacaatttttaaaggtcacaagaaccagtcttattacatgtagccagttggccttgaagagataaggtctaagttatctatattctagatctggttcataggagaaataggcaagaacctaatcgaagcaagatttcttttttttttttttaaatagcaattcatatatatttctcttatgttatctagatttttctaccttacttaataagactgtgtatgtttctaaactccattgctagacccatcagtatcttaagggccaagttcttgtttaatttatgtttatacctccttaagatctatcttcgtacttttcacatgtaatgtagtaagtaggatttgaatggatgaatgaatgagttagatgttttccttgagaaactacttgttttgggtatcagagtggtttgttcttgtggtttggaaggatttttattggcctgatagtgtattgcttactttctgttatgcataattctttttaatgacattccctgaaatgagttgacatttttgaaattatagtaggccgggcgcggtggctcacgcctgtaatcccagcactttgggaggccgaggcgggcatatcacaaggtcaggagatcgag

SEQ ID NO: 23660 - DNA, 1048 bp, Homo sapiens
cttttaatatgcttattggcaattcagatttcttcctttgggatatcctttgttcgtcttttaagtggattgtttgtatatttctatagattttaaagcattctttgtgtattttggatactgatcttttggtaattacatgtattacaaatatctgcacaaagtctgtggcatatattcttattttagtgcccctgacatccaagagttttgattttgatgaagttatattctacagtattttcttttttagatttgaatatatgtgcctgtgtgcacgtgtgtgtgtttgtgtgtgtgtgtgtgtgtgagagagagagagagagagagaaagagagttttaagaaatctgggcctatccaaaagtcacacatctttctttacgaattttaaagttttcctgtttccttttttggtctttaaatgggaatttattttttctgtaatatggagtgagatagagatattgtctcccccaccccccccaccgtatggataattggttgacctagcctcatttattgagaaggccatccttgcccatggatgtcaagtttatatcacacatgggcctgttgccaggctttctgttttggtcagtcagcctcactgtccttgtgccagttccatactttcttaactattacagtcttgtgaaatgtcatgatagccagtaggacaaattccccccttccatcttgttctaattcttaaaaattgtcttgcttaaccctgtgttctacatacgtttttgtaacctcatttaaatagttgtatactgtttcattaggaaacataccataatttagttaacaaaaaaacttctttttaattaattgagaaagagaaatgaagagagattaccctgatgagaggcaaattgagaattgaaggttagagaagctctctctgaggaactgagatttaagttgaatcatgaaatagatgaatatactagtccccccttctcattaggggatatgttccaagacctcccctagtagatgcctgaaacctctgatggaactctgttgccgtcagtcagaac

SEQ ID NO: 23661 - DNA, 1031 bp, Homo sapiens
gttttttgaatatttttgatcaactggtttgctgaacgcatggatgtggaacccacggatagagagctgactgtagccattgtgtaactggagtgagatgatatctcattgtggttttgatttgcatttccttgataattagtgatgttgaacattttttcatatactggttgaccatttatatgtcttttgaaaagtgtctctttaggtcttttactcatttttaattggattattttcttctatttagtggcttgaattctttatatattccacatattaacctcttgttagatgtataatttgcaaatattttctcccattctgtaggttgtctctgcagtctgttgattgtttcctttgatgtgcagaagcttcttagtttgatgtaatctatatatttttgcttttgctttctgtatttttgagagcttttccaaaaaattcttactgagaccaattgtgacgaggcatttctcctatgttttcttctagtagtttcatagtttccgatcttacgtttaactctttaatcctttttgagttgatttttgtatatgatgaaaggtaagggctagtgttactcctcttcatgtggatatgcagttttcccaacaccatttattgaagagactgtcctttctccaatgtgtgttcttggcacctttgtcaaaaatcagttagctgtagaagcgtggttttatttctgggctttccattaattttagcaaccttaaatctattgtatacaagatcagtaaggtcatagtgtttaattaccacaatatttgtgatagaattcagcctcctacaatcaacataatattcgtctttagatgaacaaacacttctcagcaacacacattttaacaaatgtagtattctaatacaaacacacttaattgaaaggttatatagttttacagactcttggaagataactatcacagcaaacagaaaaggtctttgccttttttttttttgagacagaatctcgctctgtcccccaggctagaatgcagtggcacggt

SEQ ID NO: 23662 - DNA, 1028 bp, Homo sapiens
gctcatactttattcccaatctctagttgagtatctggcatttagagaggtttaataaatgtttgtggaaagaatgagccgtgttcattctttggatctgacaacaatgaggtttgataggaagtgacagaacttaattctgccagttctttgaataatgctgtttatgcagctttgaagagagattattgaaatattgtaagttatattgagcaagtctgtggctagtaaatcaaacagtttgctaacattggttttacatttgaaattatctgtggtttaaacaatttattttaatcaggggctgttttattataagaaacccactggaactaacataaattgaagaatttatttgtctttgtaaggaatcaagtaaagcctatgatgcccaagggcagaaaggacagccaggttctcagggactagaaccgggaactggaaggctggtagacatagtcgccagtcagcatctgtgtccatgtttgtgtctttctcctgcaacatattctattgtcactgtattctaaccgcccctccaccccaaccaacccccgacttctgtttctccccacattgggtagaaatgacttcctgagcccctacatgaggactcaattcaaggccaccagagaggttgtcattgagtttaaattcctgggagagaggatctgattggcagcttgggccaagtgaccacttgtgatcaagttatatggccaggatttctgggtcatgtattatcaacctgattagtagaggttagttttaacacaagataagataagcatagcctggcagatacccagaaaggtatctattaccctgtttcaggaattctttctaaagaatttccaaatgaaaatgtagacatttttttgtctttaacaatagagcagccaggcgcggtggctcacgcctgtaatcccagaactttgggaggtcgaggcgggcagatcacaaggtcaggagttgcctggccaacatagtgaaaccctgcctctactaaaaatacaaaagattagctg

SEQ ID NO: 23663 - DNA, 1043 bp, Homo sapiens
taataaaaatacaaaaattatctgggcatggtgacatgttcctgtaggctcagctccttggggggctgagatgggagaattgcttgagcctgggaggtcgaggctgcagtgagtcaagatgacaccgttgcactccagtctggatgacaaagtgagaccctgtctcaaaaaaaaaaaaaaaaaagatatcagtttatttgaagaattaatcatctggaaagtgcttttcaaatggttttcttaaactaatgtaaatttcttttagaagtttttctgatacagtcttcagaatattcatacttagaaaggaaataaaaaggacctgtcattttcttttatttcaggggatatcattttcaatgcccaatacccagaactgcctcccgattttatctttggagaagatgctgaattcctgccagacccctcagctttgcaggtgagtactgcagacttgcttgaatgatctttctttggtgaaaggaaaacaaaattggctttcagcagttgcttaacagatagatttgtcacacatctgcatttttttcccacccctcttttctctgtcctgtgaaatagatggaactctttatgtgccatagtagttaaataagaggtttttttcattgctgtttagtttcagggtatttcgaattaatgaaagtctctagcatattggttgaaatatttttacttcagtttaaagagacatgttgaaaatattttctttgttttaacataatatatcatgcctgcaatcaattttctaatgtttactaacacttcattacagggctcgttaggagagtgtttcttggctcttcaaggagccgtttttatatagaagtgaaagtggcaaatttggacttgtatccgcattatctcagtatctcagtattgttatcagaagggtaaagaccagattaagtgttctttatcaagcaacaccagaaactttgtagttgaaataaaatgtttctggaattaaagcagaaatattcaccattagggaaagggtggtggtacttgttggagcacatatg

SEQ ID NO: 23664 - DNA, 1047 bp, Homo sapiens
cactattattattatttattatctctattttatattgccttgttaacatttttgtcatggatgtgtgtatcagaagaaccagtgtgtcttagtccattttctgttgcttacaacagaatacccgaaactaataacttataaagaaaaggaatttattccttacagttatagaagttgagaagtcctaggttgagaggctgcatctgataagagccttcttgatattggggactctgtgcagagtcctgagatggtgcaaggcatcacatggcgagagggctaagcatgctagcatgctcgcttaggtcaatctctctcttcttgtaaagccgccagttcccctcttatgataacccatgaatccattaacccagtaacccatgaaaggccccacctcttaatactgccacattgggggttaaatttcagcatgagttttggagaggacagatattcaaacacagtgtttattaattgcaacaaagcacaataagcaaatttgtgaattttattttgatttgttttgatttccagaacttaaagttggcttatcatacctaacattttgattaaagtgtttttttttttgagatatgaaatgtaagttttgaggtattccaaaaccatatagtttacatataaaaatcatcaatgggtgatctgtgagagaaaacagttttttaagcaacatattttttccttaataatgatttatgcttttataatggggatgtgagacaattaccttttttgcttgtatctgacccaaatcctagtaaggttttaaaaatctttggcttatccattaagctctggcaacattaaaaatattgtggagaaaagaaaggagccattttatggtatctcctcacttgagttaatgtcttaagcttccctcatgtcatcgtgctgcaatatcatgtgcaaagggaaagtatctgagcaatgtttgagtgtgagctcctctacacagaggccatttgaagatgtgttggagagggagagtgatctagggggcaggagctttgggttttcattctgccaccc

SEQ ID NO: 23665 - DNA, 1875 bp, Homo sapiens
gggtgcagtgggtggatcacctgaggccaggagtttgaaaccagcctggccaacatggcaaaactttatctctactaaaaatacaaaaattagctgagcatggtggcgcacacctgtagtcccagctacttgggaggctgaggcccaagaatcacttgaacccaggaggcagaggttgcagtgagccgagattgcaccactgcactccagcctgggcaacacagtgagactctatctcaaaaaaaaaaaaaaaaaaaaaaaaaaacctcactgagatataagagaacacagataaaccgtacaaagaaattggaaaaacaattcaggatgtgaatgtgaaatttaccaaagagatagatatccttaaaaagaaccaaatggaaattctgaaactgaagaattcaatgaatgaaataaaatatttattcatgagcttcaacagtagactagatcaagcagaagaaaattcagaacttgaagatagctcttttgaaataacccagtcagaacaaaaaaaaaaaaaaaagaagaaggagaagaaattttaaaaaatgaacaaagtgtatatgacatatgggacaccataaagtgactaattcaaattttgagtgttccagaaggtgaagagaagcccaaaaggcatagaaaagcctgtttaatgaaataatagctgaaatctttctaagtatagcaataaattgagacattcaaataacaagaagttcagagattctcaaacagataaaatccaaaaaggttcttccctgcggcacgtgatagtcaaactatcaaaagccaaagacagaaaattctacaaacagcaagagaaaagtgtctagtcacatgtaaggaaacctccatcagactaacaagagatttctcagcagaaactttacaggccaggagaaaatggcctattcgaagtactgaaagaaaaaaaaaaaactgttagccaagtatactatgctcagcaaagttatctttcacaaatgaaggagaaataaggtctttcctagacaagcagaaactgaggaaattcatcaccactagtccagccctacagtaaatgcttaccagggctctacacctgaaagtgaaaggacaatatctatcatcatgaaaacacccaaaagtataaaactcactggtaaagcaaacacacaaatgaggaagggaaaggactcaagtgttaccactacagaaaattaccaaactgcaatgataaacaataatagagaaagaaacaaaggatatacaaaatagccagaaaacgattgaacaaaatgacaagaataagtcccctcatatcaataataatcttaaatgtaagtggattaaattttccactgaaaagatacagactggctgaatggacaaaaaaaaaaaaatgacccaattatatgctgcctaaaaaaactcacttcactggtaagacatatatagactgaaaataaagggatggaaaaagatattccacacaaatggaagccaatagcaaacaagcagaagtacttatcttaatatcagataaaacagactttaagtgagaaacagtaagaagagataaagaaggtcattatataataataaaaagatcagttccacaagagaatattacagttctagacatatatgcagacaacactggagcacccagagttataaagcaaatagtattagatctaaagggagagatagactccaatacaataatagttggagacttcaacatcccactttcagcattagacatattatctagacagaaattaacaaagaaatattgaatttaaactgcactttagaccaaatggacctaacagacatctacggtatattctacccgacagctgcagaaaatacacacattcttct

SEQ ID NO: 23666 - DNA, 1059 bp, Homo sapiens
aggctattataacaaaatactatagattgagtagcttataaaaaacagaactttatttcctacagttttggagactgggaagtccaaaatcaagcaccggcagattgagtgtctgatgaggactcacttctttcatagatggccatcttctcacatggcaggagaggctagctccctgtagtctcttttaaaagggctctaggccaggtacagtggctcacacctgtaattctagcactttgggagcccaaggcaggcagatcacctgaggttgggagttcgagaccagcctgaccaacatggagaaaccctgtctctactaaaaatacaaaaattagctaggcgtggtggtgcatgtctgtaatcttagctactcaggaagctaaggcaggaggatcacttgaactcgggaggcagagtttatggagagccgagatggcgccattgcactccagcctgggcaacaaggcaaaactctgtctcaaaaaacaaggggggggcggtgctgtaatcccatgagggcagagccctcatgatctaatcaccttccaaaggttctacttactaataccattaataccatcacctgagggttaggatttcaacatatgattttgggagagacacaaacattcaaactatgacaaacatctagaagagaacataggaaaataatcttagtgaatttgggcttagcaaaaatttcttaagtatgatacataaaacaacattaaatataaaagaaaaatcagtacattacacttcaccaaaatcaaaatatttgctcttcaaggcacggttacaaaataaaacagccagccaacaaacccaaagaggagaaaattgcaaaacatatatatgacaaagaactgttatccagagtatacaaagaactgttacaacttaggaataagaagacaaacagcttaatacaatttaggcaaaagatttgaacaaatacgtagtcattggggaaatgcaaattaaagccacaatgagattaatactatacacctactagaatgggtaaaatttaaaagtttgaccaaaacaagcatt

SEQ ID NO: 23667 - DNA, 1061 bp, Homo sapiens
aatctgatatatagattcatgtaaacaccaccacaatcatgatacagaactgttctatcaccacaaaagaagtctcttgtgctgcctctttgtatttgcattatatttaggtatttctttttattttttgagagcaaataaaaatgatattacatttttaattttgatttccatgtgttcattgctggtatatagtaatacgattaacttttgtgtgttgattttgtgtccaacaatcttgttgaccttgtgttcatgagaatagttctgtgagtgtttttatagattccttggaattttctttgtagacaatcatgtcttacacaaataagggccgttttattttttcctttctgatatacgtatgccttttttcttgcttcattgcattggctaggacttccaataccattttgaataagagtggtgacagcagacaattcttgccttgttcccaatcctaggtggggaaacatttagtttttgtcattaagtattatgtttgctgtaagatttttgttgatgttctttatcagcttgggtaagttcctctctattcctagtttgctgaagttttttttttttaatcacaaattgtgttggattttgtgaaatgcttcttctgataatgcttatgcaatttggcaagtgaaatttttcctgtgactgttgccctccccaagcactccttgcaggccccatattgccatgcttaaatatgataaaaggagaaagattccagagaaagcaatttgggatatgaattcatattattgttaattctacatcaatgaatgtcaagcagaatttattatatactgctaactagactagaccttagtcagttttcaccatctttttcactgcatttacttctgcgtgtgtgtttgtgtgtagctttgtacaatttaatccaatatatagattcatgtaaggttctggattttgtagtttttctcctttcatagtaatatttattgaggtaggtagagagcaagggattaggagtgtgcactttggaaccagactttgttctaatgtggcctttatcatttactagt

SEQ ID NO: 23668 - DNA, 1075 bp, Homo sapiens
ttttaaaaaacattttgggccaggctcagtggctcacacctgtaatcctaggactttgggaggctgaggcaggctgatcatctgaagtcaggagttcgagaccagcctgcccaacatggtgaaacctcgtctctactaaaaatacaaaaattagcagggcatagtggcggactcctataatcccagctacttgggaggctgagggaggagaatcacttgaacccaggaggtggaggttgcagtgagctaagatcgcgccattgcactccagcctgggcaacaagagcgagactctgtctcaaaaaaaaaaaaaaacaaaaaaaacccatttattttaattcttttgaattaaaaaataaaaataaacattttggggacaattaggaaattttgaaaatggacagggtactagatgaattcagagaccaattgctaaatttgttgggtacaataatggtattgtggttatgtagaagaaagttttattttttagagatgcatactgaaatatttaagagtgaactgtcatgatgtctctcatttcctttgaagtgttgattgataggttgatagatagatggatggctggaggaagcaagtaggcacaatagtcacagttgttgaatgtaggtagtgggaataccggtgttcactttactattctttctgcttctctgaatctttgaaatttcttataataaagcatttaaaagattcccactctacttctcagctttgggtttctattccaggtgcagtacgtgattcaagggtatcacaaaagaagagagtatattgctgcttttctcagtcactttggcacgtaagttctgccctgtttgaacgatataccggtgatgccctcgcttgctgatgacctcaacatgggggcttgattaagaaaatagcacttagttcttacacatgataccttttttttttttgagacagtctcgctctgtcacccaggctggagtgtaatgacatgatcttggcttactgcaacctccacttcccgagttcaagcgattctcctgcctcagtctcctgagtagctgggattataggcatgggc

SEQ ID NO: 23669 - DNA, 1033 bp, Homo sapiens
caactcgtttgtcagtacattcagtaatgtagctattgctgttgcttttgaaggtttattccccacagaatattttctccttggtaccatgtgttcagtatttcttacagctccttctctgcctttctatcttagcttttccaaatcagacatgcagaattgagtcccaaagtcatcttttcatttcattttgaattaccttcttcagaaacatagaacccccaggcactcattagaacagctacccgggaccttgggagttgtttaattgactttttccagtgtttcctggagctcttattcctgtactcccccggctgtttggtccctgtctcttagcatcactgccacactcttggctcttctggcagataagaccctgcctgtgaaccaaaggactttgatgctgtttcctgctccctcactaactcacagcctgtctttaaataaattattttcacccatttccttttttcttatctaaaatataggacttgctacctcggagtgaagcttggttagataatgtgttttacttagtcatgcagttaagcatctgacacttaccttcctttggaagcatctgctggcttggttacaatgcccaagggaccacttgttcctttttctcccttccatgaagatggggaggggaatatgaggtggcagagacttaacaaagaacattgcagtgaattattctgagatctcaagaggtgaaaaggaggaaggaagtgcctggaaatagagccattcccctgtggctgcctctactacttcatggaggttgaagacctagcaggacatgaaatagcatctctgttctccccttcctccctattctcctcgggcccaggataattgctattgataggatagctcctggcaataattatgtgcattttggatgctagaggaaagaggcactcttcttgagacagacagctctgacctcagactttgccagactttgaaaaagcagattgccttaaggaaaagcattgcacagattctgggatctctcaggaggtac

SEQ ID NO: 23670 - DNA, 1056 bp, Homo sapiens
catttcagagctgtaggattggggctggggtggcagtgtttattcagtctaatgaatgataaggttcttactctgatgtttttctttattttaaatgactaatgttcacacagatgtcttagtattattctttctgtatttgtctttaactatctgtttgttcatttgttcattcattggttttcagttgacattaagtaaaaggaaagcaattattttgtttttcagagaacacagtttctggtaagactttttttttttaagccagaggaaatcaacaacttcagactaattctggtagtcatttaaataattctttccttataggcctgtaatcaaggccaataaattagaaatcaggacagcttttgaaattttaagtaaaaatcagaagcttctgtttattgctacaaatgcttctgccgagctctgattttgtcaggctctccaattcctggtataaccaaggaaattatttgcattgatgtcgcactgtcacctcaccactaaaacacaaagctgtcgtagtagcagccactcagttcctgagctaagcgaggtagactttcatctgcccgctatagaaacagtgtttcgtcgtagaatatttagcactcaacaaacaagatggctactacataaatcggtaaaaccaaaactgtgatgttgctcaaaacctgcttacttttttggatacagttcacatctttatataaaggaatatacttgaaaagcaaatcggaatcagtaaaataattaaaattaagaaccacaatgctatgtgttagaatttgtttcaagccaaatctatagaaagtgtaatattattttagaattaccatgtttacctcatatcagacataaagattcttagtttaattttatcatttctagtattaataactatcaggctaggtgcagtggctcatgcccgtaatcccagcacttggggaggccaaggtgggtagatcacctgaggtcaggagttcgagatcagccgaaacatggtgaaaccctgtctctactaaaaatacaaaaattagccaagtgtggtgg

SEQ ID NO: 23671 - DNA, 1021 bp, Homo sapiens
ggctttccttgtgtatacataggatctgccctaagaagatgggcattatttgtggtacgtgctgaaccagatgtgtctttgtggtttccatggcaaagctatcttggtgtgtatgtgtgtgtgtgtgtttcctaagtagacattttagcaagtatgaattgagtctttaagaagttgcagaccacaagcccgtgatttcagtataggaatatcgtaagtgaagcctgtttatcttaacagattggttcagagtttcaagagacatttgctttatgttaacaccagtctaaagaaaacatctgaagtaatgtttaaaaaatctgctttctactgtagcgaagatggatccattttaaatgtaataaaagagaaagccagcagctcgtgctagcaagaagaaatagtttaagtttccattcttcagctgaactgagtaaccaccctgtgctgtgtcagaaagccagataaacaccgtgaaagaactgtcctgcagtatagtcttgagattggtggagaaggttgaagacaaaggatggaaagagaggagggtcaactgtagcattccttccacaccctgtttctttgtcctgtgaaaatactgtacgtacacagtgcgtaaaaggctataattcacttggggagctctgcccatgacataaacactctcatggtttatgaacagcagtggagccttttgagtggaatcagctgtttattccctcctgtagagcaaaattctaaacaatgtaacctcagaaaggacacttcctggcactgaccagggcttttcctaccacatgtgcttctttctttctcatggctgtctagcagattctgtccctcgcaagtgaagcagcatttacaaggtgagcacaggctttggggtcatgtgtgccccagttgctattgcaaagtctaatcctgcaagctctgtggtcttgggcagagctcttaacctctctgaacctcattcctaaaacaggactgtactcctccctattggatggacttgctatgagag

SEQ ID NO: 23672 - DNA, 1030 bp, Homo sapiens
tcttttcttgtgtttgtccttgtcaggtctttggtatcagtactatgctggcttcattaaataaactggaaagtattccttcctcccttgttttctgaaagagtttgtgcagatttagtattatttctttccaaatgtttggtagggtttcctttgtgcaaaaaatatttagtgtctttagtaaatgtagggatattcagattgctgtatttcttcttgtgttcattttagcaagctaggttttttaataagaaattgatccatcatgtctaagttgtcaaagtgattggcaatacattgtttctaatgtcttccttttcaagtttcttagagtagaagcttaggtcacaattttaatccttttttcttttttaatataaaattactttctacagattgcttaagctgcattccacaaagttttgtatgttatttttcattattattttattagaaatattttctgatttcccttgtgatttcttcttgaaccatgggttatttatagttgtgcttcttgaatttcaagtgtttagaaagacttttctaaatatcttattgatttatattaattcggttttggtcagagatcataacctgtatgatttcaagcctttggaatttgttgagaattgttttgtagaccagcatgtgatctatcttgataaatattccatgtaaacctgaaaagaatgtgtgtcctgcagttttggggtatagtgttctatatatacattaactaagttaaattacttgttagtgttattcaaatcttttagctctttactgtttttttatgtctattgtatcagttattgaaaggaggtattaacattttcacctgtggggttttggattcgtctgtttctccccttctgctaatttttactttttatatcttaaagctttatttttagatacatatttagaattgttaggtcttctcaataacttggtccttctatcattatgagatgactctatttctggcaatattctttgacttgaaatctgctccatttgatattaa

SEQ ID NO: 23673 - DNA, 1061 bp, Homo sapiens
atccctctccctccacgtcacccgaaagcgaggaaacccgcactcgcgtcctctaacgcaaatgaccatctttggcaacgtgcgccaatggaacagaccaagggcgctgggcccggggggtgagcgggggactggggagggccggggctgcctcggcgcctccgaaccgtgcgtggcgcccgctcccgcccgtgccaccgcctggcttcctcgcgcggggtgcgcggttggcgtcagcgcggccgggagccggggctgggaggggagagctgcgcccgcctcctcccctcccgcgcctcttcctcctccgcggcctcctccccccgcctcctcgtgcgctcctccctgcaaggtggagtctggggttgacgtgagtgaatccacatggtacagggctggagaataaagagtgtgagttgaactcgtgccattgtagtgactcatctcgggcagagcgctagggctccgagcgaaccagcgagcgagcgaacgagcggcgctcggcggggacagaaagagggagagagagagagagagagagggagaggcgcggccgggcgaggcgggcccgtccgggagcgggctccggggaaggggtgcgggtctgggcgccggagcggggagcggggccgcgtccctctcagcgccagctctacttgagccccacgagccgctgtccccctggcgcgctcggggccgcgggacgggcgcacgccgccttctcctagtcaagtatccgagccgccccgaaactcgggcggcgagtcggccacgggaagtttattctccggctccttttctaaaaggaagaaacagaagtttctcccagcggacagcttttctttccgcctttttggccctgtctgaaatcgggggtccccagggctggcaggccaggctcgctgggctcctaatcttttttttaatttccaatttttgattgggccgtgggtccccgctgagctccggctgcgcgcgggggcgggagggcgcgcgcaggggagggaccgagagacgcgccgactttttagagggagggatcgggtggacaactggtcccg

SEQ ID NO: 23674 - DNA, 1062 bp, Homo sapiens
ttcactccggaatatgctgtcctctgctgaacgaagcccttgcccgtatgtcctcactgatgaacaggaatccatgttagggaaaacgtggggaggaggctggtgacacacacctcttcccctcccacagcggcccctccacgtgcacttgctcgcttctgcttctctggctggggatgaaagaagggggctgaggtccttgcggggtgaccctggcatcctcacaggccctctcgggctgtcacgttacttctgtgtcaagcgtggtggctgaaccaaatgttctctgagggttctgggagtcctgaaatatgtgcttaagaaattggagcaaaaggccaggcgccgtggctcatgcctgtaatcccagcactttgggaggctgaggcgggtggatcacctgaggtcagaagttcaagaccagcctggtcgatgtggtgaaaccccatctctatgaaaaatacaaaattagccgggtgtggtggcaggtgcctgtagtctcagctactcgggaggctgagactggagaatagcttgaacccgggaggcagaggctgcagtgagccaaggtcatgccactgcactccagcctgggtaagacagagtgagactctgtctcaaaaaaaaaaaaaagaaagaaattggagtgaaaaaagggaggaggagaggctgtgataatcccacagggatttgctgagcacttctgagaagccaggcactgttctaggtgctagggatacaggagtgtgcatgacaaagtctccactctctagcagcctagggcttagcgtttatccatccacaggtgggctggcatggggttggggagtaagagaaggagagaggtgggtagagctgtgttccgtacccccttctccatgcagatctctgcagtactcacccctcaggggtaccgagggggcagtcctggcaccaaggccatagaacatagaccctggagtcagatacattgggaatcaaatctgggctaccccacctgctagctcggtgactttggaaaattaacagaacccctctgaacctcagtttcctcatctgcaa

SEQ ID NO: 23675 - DNA, 1025 bp, Homo sapiens
gattggcttttgcatttgatttgagcagagcttaatttctgcacaaacttagtgaaaatctatttttaaagcctgtcttgtattcgaaaggtatttgtaggtctacgcagcatttgaactttccgggctcaagtgttcttattgaatagttttatgttggtgggaaggcaaggggggaaaacgaagaggtggactagccgggagttaaatgtattgattcattgcaggatattattcaaagttaaatgcagtcttctgccaaacagtccctctaccctaaagttttcgtcatcaataattgttttgtgagtgtgtagaaaagcctttaatcctttttaaacaatttagaggcctctttgttagccgccgtccagcgattgcatatgtactgtttgctttcaaattaccttaagataattgctagagtgaagcagtatgtacttatatttggaaaatcatcaaagaatattgtaatgggggaggggtaattcctttttctcaaagtatgtgtcggtatctcaaacccaagttctgtgagtacctgttctgtaactaaatactgtgtatttgctccagatgtgaaagccatccagcagtcttaagactgaataggaagcaaaagttttaccaggaactcttatttaccttttcctttactatcaagttattcctgggaggccccctggtgcctgcagtcagtgttcactacctaagactttgtttcagatgtgaacatcttgctgggtctttgagaaatttgctttgaaaataattgtattttgtaactgttttatgagggaaatacagttaatttaaaaatgtgtatgtcttgtttacatttgggaagtagaggcctactcctttttattttttttttatttttattttttgagacggagtctcactctgtcgcccaggctggagtgcaatggcacggtctcagctcactgcaacctccgcctcccgggttcgagcgattcttccgcctcagcctcctgagtagctgggattacaggcaccccgcc

SEQ ID NO: 23676 - DNA, 1040 bp, Homo sapiens
attttgtatttttagtagaggcagggtttctccatcttggtcaggctggtctagaattctaaatctagaatatccttcaatagtaaagtaaaatgaagacaaactaaagctcagaaaatatattgctgatatgctgacactagagaatattaaagcaagttctttgtgttgcaagaaaataacagataaaagcaaagaactgcagaaagaaatgaacaatggtaaggataaatgtgagtaaatacaaattctgactgtttaaaataatagttgtggcttgtgggatttaaaatatgtggaaacaaaaatacgacaactgtagaacaaaaggctggaggcgggtggtaatcagtcaaaagtgtatttgtaatctctagagcaacctctaaatgaaaaaagaatatataacgaaaagctaatagaggagaaaatggaatagtaaaaaaataactgattactccaaagaaatgcagggaaagagagaggaatgaagaacagatgggacaaacagaacagatgacagaatggtagacttaaactcaacttcgtcgatgattatattaaatgtaaaaggagcaaatattggctgggcaccgtggctcacacctgtaatcccagcactttgggaggccaaggcggacaggtcacttgaggtcaggagttcaagaccagcctggccaacatggtgaaaccctatctctactaaaaatacaaaaattggctgggcgtgggtgcctgtaatcccagctactcaggaggctgaggcaggagaatcgcttgaatctgggaggcaaaggtttcagtgagctgagatcatgccgctgcactccagcctgggtgacagagtgagactccatctcaaaaagaaaaggagcaaacattgaaattaatgcaaagctcagaagacctaactattatagatactgtttacaagggatgtattttaaatctaaggacacaaatgaggaagtaaaaaaaaggggggggggaggggggtgtgggggagacgatatcatgcacacattaatcaaatgaaagct

SEQ ID NO: 23677 - DNA, 1032 bp, Homo sapiens
aagtggaattcctaataactctgtgttgccctttaagacattaaaaggggcagggcgcggtggcccacgcctgtaatctcagcactttgggaggccaaggtggttggatcatgaggtcaagagatcgagaccagcctggccaacatggtgaaaccccgtctctactaaaaatacaaaaaattagctggatgtggtggcgcgcgtctgtagtcccagctactcgggagactgaggcaggagaatcgctcgaacccgggaggtggaggttgcagtgagctgagatcacgctactgcactgcagcctgggtgacagagtaagattctgtctcgaaaaaaaaaaaagacgttaaaaggaacacttttcagtatctttaatttcacatagtgaatctattttgattaaatgctttttattcggtgactgttaaaatattaaaatttttagctgttagtactatgtctcatctttttatttataggattgtcaccagacctgcaatctatggagcagattcggagaattatgagacctactgatgtccctgatacaggtaagtgtagagagaagtttaattgttttgtgtaaagtgttttcatatttgaacttgattacatttagtggaagtaggattggcttatgtaataaataaaagagcttttttcatagtcaataagccagctacagattactttatttgcagtaatacacaatttttcactttgcactgatcctcaaaatgcggaacctttttatttatagtcataatgtagttatttgatcacaaaaaagattttgctgttgagtccttatacctatttttctaaattccctcattcatactagcattggttatgttcttcaaaaatttgttaaattagacaaaagttttttaattaaaataatctattctttgcttcttaggcaaggatacaactaccttcttttcaaatgtctagtagttttttgttattttctatgtcctctatttgaaatttttagagctttttttcaagggggtgtgggagggattt

SEQ ID NO: 23678 - DNA, 1029 bp, Homo sapiens
agaagatattctcttttctatggtattggcttgttttacagtgaaagaatggatttctcagaactttatgctaaaaacatataggctggtgagccgtaatttaaaaaaacacggaagagaagttctgaaatcataataaatactcagcattataaactgatgtagtgcttttaagttagggtcattgtctttttgttgggaagacatgagctgttaacatcacttttgaaatgaaagaagtcttgtggcatttgccacttgagtgagacttttgtctctgaagtcactgaatcactgagccagcccttgaccagtcagtggggcaacttctctcttgtgtgctctgagctgctctactagttaaagctatttgttgactcaaattgaagttaatgcacgtttataaaggtaaaaacttttgaggctcttttcttgacaactaagctagaatttgtggaaaaattaggagagataaaggagagttggctgcttagatatggacttacggattcatagatttttgggtatgaatctctttggttggggagtgaaggcttcgcttaggttggacctgtcaggaggggcggcctgtttctgagaagtggaaacagcattgaggcttcttggacctgttaggagagtaccaagaacatactaggttttcctatttgctgccttttttccataggggtgggagacgggggacatagaattacgagtttctcttcccattggagggatttctttttgaagtagtgagaagtaaatcacccaatagcttctctcttccccccttttaaaatgtcttttgtgggctggtgggcatttgtatttgttcattaacgatgttttagtatttgcaatactaaataaaaacattgtttttctttttttccaggaaagtccccagaggaaaaaaaggaaatcagaagctgtaggaatgagtaaccagactgacttattggctcttggcacagcagttggtagcattttattatacagcacagtaaaaggagagttacacagtaa

SEQ ID NO: 23679 - DNA, 1267 bp, Homo sapiens
tgaacaagtgagtgaacacatcgctaaattgctttccaaaagggtatgctagtttacactgctgctggcaatagtattatgtaacctcaccagcatgggcatcataaggctaaacacattgctacaggaacagactaaaaatgccactttgttttggtttgtatttctttgattactaacaaggttgaatattttggtatattttctaactgaattctttctgtggaatgtatctgttcatatcctttagttacttgcgtgtatataagacttagttcttggagtacacagctgataggaaggaaggaaagtaactgaatgtaacattttaaaatatttttcttttgaagtggtaacaatgttatttccaagtagctttagtaattttgagtaatcacttttattcttagcttagatatgtacatagtggtgtttcattgtatacgtatttactttattcctgcaagattttaatacataaagctaaaaatggtacaaaagtaaagtaactgtaggagagatgtcacaagatagcatgtgactatttgtcagatgagttccagcagtgttgggaaggcctggaggagaagtgatttcatttggaccttctgggataggtaagatttggatagaggagggtggagaatcctttcaagggtggggagaggaagttggggagatggcaagagcaaatgaggggagacaggaatgggagacagtaatgtaaaagattgacttggcactgagcaaactaattcagaggaggggcatactaggggataatggataatggataaatgtgacttcaggtagaaagaatgaaatgcttgcagtgtgggtgatttagcacctcattctgctaagtgagttagtcctggaatgtttgtgagatgggaaacatgaatgagctcttctcagtttctattcctacgtgcctcttagtgagtgggcatcttgctatgctgtaaatgtataagtattgtttatatgctatggccccatagtacaaggaagcatttagtgtttacctgaagtaacagtgatttttgttttgagacatagctttggtacatttttttacaagagatttttcgaggatatttttgactatacttgatttttaccttaaatgctgacttggggtgtggaagtagtttatttatttatttttaaacaggagaaggaaagttaacattttgaaattctagctgtttatctctctcttcttctctttttttttttttttttgatatggagtttcactgtt

SEQ ID NO: 23680 - DNA, 1098 bp, Homo sapiens
ctgtagtgagccatgattgtgccactgcacttcagcctgggtgatggagcaagacgctgtctcaaaaaaaaaaaggctgggcttggtggctcacgcctgtaatcccagcactttgggaggccaaggcgggaggatcatgaggtcaggagactgagaccatcctggctaacatggggtaccatctctactacaaagacaaaaaaaattagctgggcgtggtggcgggcctctgtagtcccagctactcgggaggctgaggcaggagaatggcgtgaacccgggaggcggagcttgtagtgagccaagatcacgccactgcactccagcctgggcgacagagcgagactccgtctcaaaaaaaaaaagccactgcaggtcagtgtctctgggatagagtattcagagtaatgctttaggaaaaagtaatctgtcagcaatgtgtagagtttaggggaaggagctagttaaaggcagagaaggcagatagattgttactgtaatctggttgtaggatggtaagtgtgggaagttaaaatgggaatgatcgcaatcattgagttgggatattgagtttagttttcagctttgctaactaggcaagtaaaccaatttagagggaggaggtactagggggataatgcatggtagaggatagaaattatggtcagaagagatacatggttttggggtttttagacaagttggctttgaaataacattatgtgaaagataagacccagcagacagggtggtgctagaggcttagatttaagtaggggtttggggttggagatgcaggtaagtaaaccatctccctgatggctcagtgagtatttgtgctccatttacttgtagcagacacagtagtttctatgttagtaacctgttagaaatgcctgcagaggttctgatccagtaggtctggggtagggcctgtgttactgtattctggatgagaggtcacaaagataggtccttcacatagggactagtaatgttcaaagagccattcaacacgtgtgcgttttattgtatgtaatcataagcctgtgaggtgaactttagccccactttgctgttttgaagtagattaaacaa

SEQ ID NO: 23681 - DNA, 1054 bp, Homo sapiens
gcctgcctcggcctcccaaagtgttgggattacaggcgtgagccaccgcgcccagccgaaacaaggtttttttaaaatttaaattttattatatacaccaactatgtatccacaaaaaagaaagttaccttttaaaaaacaaaacagattttgacacagggtctctctctgtcgcccaggctggactgcagtgacgccatcatagctcattgcagccttgacctcccaggctcaagcgatgtctcacctcagcctcctgagtagctgggagtataggcgcttgccaccaggcctagctcaaaaaagattttcttaataaaaaagtttttactatgtgatgattatggtaattttgatttctagcctacatccagcatttagtccacttactgtatttgactgtggagatttagtattatatttttggaggaggaaaaagctttcactcagggcttacggaatatttggtgctgtgatgatgccttaatattgtggtttcgactcactgagagtaaaatgaggacctacaattccttggctgtgtctgagcacccaaagtatgccttttaaaatggatagaattaagtgaatctttaattcaagaatgtaagaaacaaaggtgcggagtggtagggtcatgggagttagaaggaacatctaaattttcagtattttcagatggatttttttaaaaagtgggagaattatagcacaaataaccttatttgcttagaattgaattgaacagttacttcatcgtggagctctcctttccgatatgtatcacatatggcttgttttgataatatatactattaatttttgtccctgctttgaatctgctctcctaactgagatttaactttctctagcatttcacaggacatgcaacgccagtttcgtcactgatgttcactaccatcagacctcctaatgagagccagccctttgatggaattacaggtctttatttcttatctggagcagtacatgaccggttacttaatgtctggtatgtagttcttttggatttgggaggtagcattgaaagaat

SEQ ID NO: 23682 - DNA, 1037 bp, Homo sapiens
gtacaaactgatgagttgtaacatacatatacattgtgaaaccctcaccacaaacaagataatgaatgtgtttcctcatgtcttcttgtaatctctcagagacttgttgacaggttttgggccattacaaatacaattgctatggacattttttgtgtacaagtctttatatggacatgtgatttcatttcttttgggtaaatacctaggagtgtaatggctggatcatgataggtgtacgtttagcttttcaagacattgccagatttttttttcaagatggttgtagcattttgcatttttaccagcagtgtataaaaatgaaaattccttcacatcctcatcaacacttggtatagcatttaattttagccattctaataggtgggtagtggtattttgtgttgttaaattggctttctctaatggctgggatgttaagattcatgtttttgcattatggatatccagggatcccagtatcatttgttgaaaagattatctctgctgacttggttttgcatatacctctccccctataaccccgaacacctacacacacccacacatccctgcacccacacgcttatccctatatcggttctcgttatttataattgttaagtcctataaagtccccatgaacactgatttagtcaataacattactccttggggaaatagcttaggttcccatgagcctccagttgtaacatttttttcatctatttatttttttgtttatattatttatattgtaaaggtagccagcttgtaacatttttgtcattaatatataaaaccttgttttatgtttgtttctatttaaagatatcttatttaatgcatatgtttttgattgattaactttgaattcagagcactacaactcatgtctgagtgaagcttatttaacacatattttcactgtaaggcacatcccagtcttcttgtgcttaggaacaccatagagcacttcagaattatgcttgggggccgttgtaattagtgaaatctccaagaaagcacaaaaatgc

SEQ ID NO: 23683 - DNA, 1562 bp, Homo sapiens
tatgttatccattataatacgttggttacatttttcttttagcctgtcaagttggctgttgtttgcagagatggtcaagtccatctttttgaacacatattaaatgggtaagtaagaaattttccaagtaagaaatttgtttctttccctgacttgttacttggtcatactcccacctggttattctttgcatcatattactattcagccagattattttgaaagcatttttctttatccacatgactatatacattgccagttaaaactgggtgtcaaatttatatatttgtgattaggagattggctttttatgatgtatccttagtacatgttggataattctaatgatacatttcagaagaaagtggctaagctggagagattcacttgtgaaccttgatgatgttttatttatctttgagcgtgctttacttccccttgccagtgctgttgttttgatagacaggggagtattgttgtcaggttgtgtagcagtcatagaccaggagtcagcaaaccggcttgcaggccacattcagtggagaccatttgtggtctggagaacctgaaatttttattattttgcccttttcagaaaacttgccaaaccttgtcattatactgtaaacatggtctgagactcagttttgcgcacaaattttgttaagctttaaaatggttttaacctcttgttgtcagttggcacccttcttttaagataccagtataggaatttatttaaatataaacagattatgaaaaaagtgtatactcatttcaaaacacccaggatgcccaaacacttgattttaaaacctgagtctccctccattgagttctgctcctataggtaactgttaacattttagtgtgtaactcttgaagcttttatttatagaaggatgtgtgtacctggaatgtataattgagactcagaagaagtgggacccaaaggtagctggccacagtgaggactacctgggcagtggcaaaccattgaaggatttcaagcagaggattcgatgagctttggcctgagttttaagacagtcgttcattgagaatagactatagagggtgaaaggctaaagtagagaccccaaatcctgggtttagagatagttgtggagtcaggatgataggaggagtaagttggaaagatagggatcatgagatgcttacacctgggatattatgcaggatgtacacttgtggagaataagtggtaataagatgcgtagggtgtgaggagtttgtggctgaaatacagtgaggggcatgttcatttgagaaaggagttgacagatcagagtgtcaggagtgtccatcaacctggacactgggtgtggaaaccactaagaaaggaattcatttagagtaatgttagaagtaatgacctcaagccactgaaatctttacgaaatgtggatggtggcagagatcattggatgacggcaggagggagtggtagctggtatctggtgacaacaattgaaaagattttagggacgaaaaagggatagactattgtcttgaagtgtcagtgaagagcagggaac

SEQ ID NO: 23684 - DNA, 1010 bp, Homo sapiens
taactgccgtcagtctgagtggtgatcgtggttaacaattgagtgtggaagtcttccatactttttaatattttataaaaatgcacaagtagtcatttatttttcattttgttcttattcccagttgctttgtttgacactcttttttttttctttcctctcatcttcccctttaaaaaaaatatattttcaggctttaaactccagagaacctcatatgtgtttagtaagagatatttcaaactgctgggcccccaaagtagaaacagctataacaaaggtgagcacattacaaatttgaagttttaagaaaaagaatatttctttgggtgaatggaactgttacttagtattatgattaaactgagttttttattctttaatatctttattctcttgtcttataaattttgtgggattatggttttagatgtcaagattgtactcctgatttgttgagtgaatgaatgaatagaagactagcagttgaagaccttggatgtggttcttccctgcccaccatgcatgatcatctgggccaggaagaatgtagggataaatatcaatatcagatttatcagtagatagtttttatcaatctcagtacttaaaagagcattactttgctgagaggaatgctgtatttcagggtgtaataaaaccgtcatggggctagaatataataccacaaaagcataggagcatcatcatggtgctccattttgcatataacttggtgtctacatgtaggggacgtgtttcgtggtttagtgagaaagggaaagccaagacatgctatgatgacatccatatggtttcgctgctggctgagtttcagagatgacacctttctcttggctgtctgagcatttctggcagagattgaattctggaggtagttgtaaaatgtgtaacttcactttttaaatttttaaaaatcattgtgtctttatgtaatctgtagttttttaaagccagttgaatttagtagtgggggcttgtataccaac

SEQ ID NO: 23685 - DNA, 1078 bp, Homo sapiens
cctttaaaagctgttttctcattgaggatacttaaggactaaggtatgatttcctttttcacactttggctattcctgttgaacaggtgaggacaccagtgatgaattctgaagcaaaagttctggtgcctgggattcctggtcatcatgcagctatcaagcccgctcctccacaaaccgagcaagtagagagcaagaggaagtcagggggaaatgaggtaatgcaactgctttgaccatatatttgagtttgtgatttaaaattactgggaaattctaacaagtgtgttggatagagccaaagttaaatctttagaaatttactgagatttctcctgttatgctctcttttatcttcaccatcatagatttcataattctagattgtcatctttgtttaacagagaagatggaaccttcagtaactaaagagggtgctgttttggccattagttagtagttagctgggtaacataaaatggaataagtcaagccaggacttgctgtgatgactatcattgggtttcgcatgttgctgagttccagtgatgcctcttttctcttggctgtctgagcaatcctggctaacctagtgccagttggtctctaaaagtgatagtcattataactgcctaagtgtttatgatcttcattttttcctcagttcccaaaatcctttgtggttactgtacatgtctgtgcagagttgttttttatcttccattcacattcttccctcttacataaggaatctggaattttaactgtttcattcttacagaaatactaggtttctttagctgattttactttaatttgtattctttttttttctttgtccaatttttgaaggataatttagctgattttaaatgcgtttattgggtggtggggtggggataacatagcttcataaaacatgttcataacatgttcataaaagttattcctcagttacatgatagctgactttaaaaataaagcgccaactttctttggcttggcctagtttcaactttttaatttccccatgtcctttttaatcttttttgtgttaggataaaccaagcacatctgt

SEQ ID NO: 23686 - DNA, 1023 bp, Homo sapiens
ttctgttcttggaaaaacagtgttaggagtataacaaaacaagctgagggctgggaacaaaatattagcaactcatgttagacaaaggatttgtatctggactttaaagcagttggtaaaggtttgaatagacacttcacaatagaattcaaatggccagtaagcacatgtaaaggtattatgcattattaattatcacagaaaggcaaattaaaaccacagtgaaataaagcttgcacacaccccttataggttgataaaaatgcgaaagacagacaataataccatctgttggtgaggatgtagagcagctgaaattcaagtatgttactggtgggaatgtaaatggtataactactttggaaaacaattagtttattaaaaattgaggatgtatccacatatgatggagccattctgctgctagatatttaccaggagaataacacacatacgttcatacaaagacttcctcatgaatgttctttgtaatggccctaaactggaaagaacacatatgtcctttaacaggtgaatggagaaacaaattgttcatctagcaatataagtaatgtgttattaatagaccagtagtattcatgaatctcaaactaaggctgtgagaaagaagccaagcaaaaagtaatataaattcctatttatataaaaattctggaaaagcagaccaatacatagttcagtagctgcctgggaatcggggtggaaggagggatacatttaaagggacccaaggagacccgagggtgatacagtgtttatttttatcatatcatagtatttgtttcatgggtaaagagtatgtcaaactgatcaagcagtacactttaaatatatggtgtttattacgcttcatttgtactgcagtaaagttgtaaaagaaaaatcttgtcttcaacaccaccttcttagtagttataactatggcttataggtttgtttctttacatacatccttgatggaaattaatgaggctgactcctctgtttattatcatttcactt

SEQ ID NO: 23687 - DNA, 1033 bp, Homo sapiens
aatggaggtttgggaacatctttaaagtggcatatgtctgtattcaaacgtctagagatgttttaataaaacacaaagaagtaaaattacttcagtaatgaagtaaatttactgatacccaaagactgtgcttgtctgttaagcacaagacgtaatataacatactccattcagtccctccaacctttatttttgctaaattcagtttgtagtttattgccttggtcttaaatgatttaaaggattcatttttacagacttttttttttctgtgatgtccttggtttgtcagtatgctcatcttaataatccttttattttctcacagaaagtacttcaaactaggaatgtaaaccttataaagaagactgtattaaggatgcccctgcatactattattccgttgttacaagaggtaactgactgcttttttcatttcagcatcctaatgccatgagttaaatggaaaattcagtagttagagaaatggatttgtaatacgtaaggacacatggcatttagagtgagtaatggatggaggaaagtactttagacaaaaaaaaaaaaaaaaaaaaagtgaaattaattcctggggcaatgaaaggaaatgtcattggcagttttacctttattctgctaatggctattgtgtgtctgtttacctggaggcacttggaacttgtggcacagaatgctgtatgtacaggatatcatctacatgggaataattgttgtaaacaccccaaacataaagctcccaaattctcattttggtttttcccagtatgtcctgtgaggtaccttaacctaacaccgaaaccatttttatatgtattgattttcttaatcacagtttggttgttaatctctgtgactggcagtatggaattggaggtgggaggactgcttgagcccaggagtttaagactgtaatgcgctatgattgcacatttaaatagccactatactctagcctaggcaacatagcaagaccccatcttaaaaaaaaaaagtatatataatttcactgaaa

SEQ ID NO: 23688 - DNA, 1055 bp, Homo sapiens
aaatgtttttgaataaacaaatgatgaatgaatttaacgtaaagttcttccaacagaaattttatatgactttctagtgctctaagtaagagttgaacatttttctcttatctttatttgtagaatgacaaaggacagatccctgctgatgttgttccagacccagtagatatgccgttagagatggctgacgccgcagccactgctaaggaaatcaagcagatgcttctagatgcggtgcctctgtcatgtaacatctcaaaggccatgctcccaaattatgatcatgtcactggcaaggcaatgcttacgtcacttggcctgaagttgggggatcgtgttgttattgcaggacagaaggtacagtaagtaactgcaatctctgaagccagggttgttatgtccatgacctatgttcaaggacacagtatggtcagagttttgagtttttgaaaaaggttcaacatgtaggtagaaagatgcttaatggaaaatgtaaaacttagatatgaatttactgttaagttatgctttaagaatataaactacttgaacttaataaagaagacatctttatttgaataaagagtggagtggagtagaactcttgagtgaatttagaagcatgagctaagggatgatctaaggtggaggattatctttgcagtcccctctttccccagtggtacttctctgactgctgctcctccatagaaatggagcacaggagacccttgctgttcatgggtgtttgtctttgggttcccacaaatagggcagtctgagatattatgtaacctggtgataaggatttgtgtggaaaagaggactcctactcccatcatccagacaccttttttcctcccaagcttttgtttccatattgtattcatttattgccagttgctttttaaaaatatctcatatgggaggttttcttgttttttctttttttaattattttattatactttaagttctggaatacatgcacagaacatgcaggtttgttacgtaggcatacgtgtgccatggtgatttgctgcacccatcaa

SEQ ID NO: 23689 - DNA, 1029 bp, Homo sapiens
tttaaaaaatacattttatgtttaatgttaaaattcttgcttaaagtgttttatttttgtgtccaaggattaatgacatcaaaaaaagatagtgcttctgagtcaacactttcattgcctcctggtgaagaacttaaaactgtgacagagaaagatggtaatataccttgtaacctctgtttctcaaaatttaacttttgatggaactttaaaatatggtaggaaaacagtttatatggaggttaagttttaaagttggcaagggaaaaattatagtaaaaattaaacttggaaatcactgaagcagctcatagcaagctatatacattatattttttgtgtgtaaagtactgcattatgattcttttacttaaattagataactactggactagatttaagaaaataaacggaaattccataatatagagcactctacacaaatgtttcatttgcctttagctatcaaatcattagatgaattgagcatgagtattccttcttgccttctggtttaactcaaaatgtcttaatattaaacttttgttgccttaaaacatattaatatcatgtttaatttttgtataaaaggggactctactatgtcatctaaggtgagaggtgactgatggtcattagattaggtagtcagttcacatcaattgatgtggtgatacctcttacataagattgtgatcttaccgtgggaatccttaaaatattattgcttgtgttataaaatcttttatatataaactacaattgctatttggatgaaattaggcatttaatttgacactagataatccataattgaggaagttaaatgaagaatttcagaaagatttgccttgacaagctgcttcttggtccacatcttattttccaccgtttgacacgttctttatctgttacagttgccctgcttggatctgtcagcagctgctcctctacatcttctttggaacacagacagagctaccccaagaaacagaatgcaatcagcagtaacaagaagacaatgagcaa

SEQ ID NO: 23690 - DNA, 1070 bp, Homo sapiens
ttctattcacttttttgtacttaataagtgatttttatttcttgactttattctggctatattcccaccctctgtttttttttttttttcattctgtttactgcctctacttgtgtagaagttatagtctatgaatatgcttcttagtaattactgtagataatttaacattgatacttggcaaaatctaaagttaatgatttttatcctttctcaataatagaaaatcattagaaactgagttgtccagtctgtattttatttctcctataaatttgatattattgtaatagttttatattgtaatgttactctcatatttcccagtgtctttactcattaaccctcagaatttgtacttgggatcatttttaaaatttcatgtatataaaatttcttttagaaagggtctgttgggtaacaaactctttgtttttgtcttttccaatgataactttactgggtgtagaattttaggtttaaagatattttccccctgcatattgacagtatcgttgtgctgtttttggcttctgtcattgttgatgagacgtcacctgtgagtctaactaattcatattattgtttcactatcatgtctaggtagagatttctttttgtttatcctgtttatcctttttgtttggcattacggatttttctgtatctgggagttgatcaattctttacaattcttatttattataattaaaatagtttctcctttattatttttcttagctccttctgaaagtctgtttagtagtatgttggaccttctcattttctttcccatgcgctctcatatttctcacaacttgtcactctagactatattttggatatctttagacccatcattctgtttcttgattctctcttcagctatgtttattctgctgcttaatccggccataaagttgtaaaattataaaaattgtctttttttcttttttcaaatctgcttgcaagttaccattgcaattctttccccatattttcaaatttttcttttatgtctttaaatatttaaagtattatcttttattttgtgttaaataattcagtat

SEQ ID NO: 23691 - DNA, 1081 bp, Homo sapiens
agcatatatatgtatgtgtgtgtgtgtgtgtgtgtacacatgtatatatatatatatggcaaatgaaatcttaaatccagaatggggtagtcttaaaatagcgcaaaagacaaaaacttttaaaatgttaaacagaagtacagttgaactttgagtaatgagtgcaggggttaggagtgccatcccctgcttgcctgcaacagttgaaaatcagtgtgtaactttggactcccccaaaacttaactactgatagcctattgttgactggaagccttacctataacataaacagctgattaatacatattttgtatgttacatatagtatgtactgtatttttactataaagagaaaaaaatgttaaagtcatagggaaaatatatttactattcctgaaatagaagcggatcatcataaagatcttcttcttcattgtcctcactttgtgcaggctgaggagaaggaggaagagaaggggttggtcttgttgtcccaggtggcggaggtggaagaaacttctgtgtatgcgtggacccacgtacttcaaacctgtgtagttcatgggtcaactgtatactctaaaactgctatttaaaatttaaaaatcaagttgtgaccataaagtattctcttttgggaactgagtgaatgaattctgaatctggcagtggaaatgaatatgatgcattgcattacgtggcttcagcactaaataatttttcccacttttcccttccgcacagatcgaaagctgctttgcgtcgcagttggagcagcacccccaccgcaggtggcattgaagggagcgtgaagctgcacgaggggtctcaggtcctgctcacgagctccaatgagatgggtactgttaggtatgtgggccccactgactttgcttcaggtatctggcttggacttgagctccgaagcgccaagggaaaaaatgatgggtcagtgggtgacaagcgctatttcacctgtaagccgaaccatggagtcttagttcgaccgagcagagtgacctatcggggaattaatgggtcaaaacttgtggatgagaattgttaagcttctaaaatatt

SEQ ID NO: 23692 - DNA, 1030 bp, Homo sapiens
aaatacttttattagttgttttctttttttttttttatgtagtctcactctgttactcaggctggagtgcagtggtgccatcttggctcactgcaacctccaccttccaggttcaagtgattcgcctgcctcagcctcccaagtagctgggattacaggcgcccaccacaacacctggctaatttttgtatttttagtagagacagggtttcgtcatgttggccaggctggtcttgaactcctgatctcaggtgatccacccacctcggcctcccaaagtgctgggattacagatgtgaaacaccgcacctggccttagttgctttctaatgctactttttagcataccaaagaaagatttttatttttagatagtcaaacctatttttttaatgtcatgatttcctttattttatagttatacaatcttcccttcaccaaagattagataaatatttgctatcttcttctagttgtgtttgtttttgctctcttcttaaatctagttggaatttaatttggtgtctagtgtgaggtaaggacctaaattgatttgcttttcaaataactactcttccaacactatgcataagataatttcctccttacccattgactcacgattaaaaacaggtctgtttctggctatattttcacttcatctatttgtctgcttcttgcattgataccattctattttactttctgtgtatttgtcttaaatctgaaaaggcatttttctctatttctctttaaaaaatatttgatttctcatttgtttttttaaaagctttatgagatgaattcttcgtgttctaaaagaatcacctttgatattttgattaaaactttaaaccactacctaatgatcagctttttgacaaagactatcttttagtgtgattgtagttttctgaggttagcaaatattaccacaaaaattgtagagaacaatagttccttcatcttctaagaaacatggggtgcttttattgtcatcatctgtgtgaaatttcaaagactcttgtga

SEQ ID NO: 23693 - DNA, 1205 bp, Homo sapiens
gagccaaaaattaatatctttaaatgtccatccagtggattccaagatctcatacaccaagatctcatacagttctctgatctttagtttcatctatcagatgcccactcattagcttcactggcctattttaataggcaactcaaatttaacatgcccaaacggaactccttctgaacccacaccatctcctctttcattctttcccaactcagcagcacctctggttatgcatttgttcaagcccaaaacccaggagtcatccttgactccgttatcccacacccctccacttcccatccaacagtcagcagtcctgttaactctacattcaagatagatcttgaggccgggcgctgtggctcatgcctgtaatctcagcattttggggtctgaggtgggcggatcacttgaggtcaggagttcgagaccagcctggccaacgtggtgaaatcccgtctctactaaaaatacaaaaattagctgggtgtggtagcacgcgtctgtaatcccagctacttgggaggctgaagtgagaggattgtttcaacctaggaggcggaggttgcagtgagctgagatggcgccactgtactccagccggggcgacagaatgacagtctaaaaaaaaaaaaaaaaatcttgaatctgactactttgcgctacctccactgccaccaccaagccacatcgctctcctgtttctctcagctagcaatgtgcaggattttcttaactggtttctttcttcacttacccacctctagtgtaaattcagtggcagagagattttttttataaagcaaagatcatatcacactcctgcttacaacccttcaaccggcatcccatggtgtttagaataaaatccacatcccccatctgagttccaaggccgtctgtgttctgacccatcccttccacccctattggccctgggctcccttagctccgaccatcaggacttgatttcattcctcagcaagcaagctaggctccttcctgcctctggctgttcacactggcttttcctgcagtctggaaagcctttctctcagatctttccaaggcctgccctttctttcaggtattgaagttacctccggtaaggagcttccccccgcccacctttgccaaaaaaaccccagctcctcctctttctgcctgattgtcttagagcacttcctaatccttgcagctatata

SEQ ID NO: 23694 - DNA, 1052 bp, Homo sapiens
acaccatgaacttggtgatggggacagagttaaataagatgtggtttctgtctttgagcttactgtgtagagggggagataaacacaaatcagtgccttcactacagaggtcattgagatttcatcatctgtaggttttctttgatgaaaagtaaacatgacggctatgaaactattatgaagaccgtaggtagtaatggtgaccctctcttttaataacgtgtgagtgccaggtgtatactgagttctgttctaagtgctttaagtttttaactcctttaaccctcccagcttccactgtgaagtaaatacaaatactgttattatcctcattttacttatgaggaaacagaagcccaaagaaggtacggggcatggatttgaacctacgcagtctagtttcagagtctgtgctcttaattactatgctataatgcctgttttaatgtactgtaaatttaaaatatactgtacttgtgtggcattaagtgtaagggattatttcaatgagtatgccttgtattacaagttatgtccaaagtttctgaatatccatgctgaatgtaacttacggtagctacttagggtgagtctgtctataatgtgggagatttaaatgagacatcctttttgccttttcccctttcatgtgttataatgattgttttgatagtcttgcatgttccattatatcatttcaaaattcagtaaaatatattaccaggtttattgtttgtgttataatcatacacataatgaaattttatgatgtagtgctcaacctggacagtgtgaattactgggttaacatacttcttaatgagagtaactgcagatttaaacttaggtttttttattttttatttttattttttaatagagacagggtctcactctgttgcccagactggattgcagtagcctgatcacagctcactgtaaccttgaatgcatggactcaagtgatcctcccatctcaagcttcccagagtagctggtactacaggcatgtgccaccgcgtctggctaatttttttttttttttgtagaga

SEQ ID NO: 23695 - DNA, 1048 bp, Homo sapiens
cctttccgggatttttttttttcccctgtacccagtgctaattctttgactgttctttctagaaaaaaaggtaataatgttacatatctatatccttaaaatattacacagtagaatattgatattcaccttttatactttttgcttaataagatatcttgatttcaaggacaatcagcattttttaattaggacatcacagaagcttaaaatagaaatagtgcttgatattctcattcttctagataacctcaccactcaattttttattatagaagcaaggatcatgggaaatactaacttttacatgttagaaatcataagatttatttatagggcatgataaaatttacctatggaaaatcataactttaatttgctgtatatctgtattgttttcttaggcattattggagaccatgtttggtgtaaaagtgattataactggggatgcatttgttcctggagaaagaagtgtcattatcatgaaccatcggacaagaatggactggatgttcctgtggaattgcctgatgcgatatagctacctcagattggagaaaatttgcctcaaagcgagtctcaaaggtgttcctggatttggtaggttattcacacattattttaagtggttcattcattttagatgtaatgcacccactgtaaaactgacttaagcattaaagcgattccatttttttcctcactgggccaaaaacaatctctggttcttttgtctttagtggatctgctatggcagatgactttattttaatctgtttttaaaaaatattactctgaaagagaaaataaactgttctcaaggaaatggatatatagtatctgaggaccacagcattgaaggatatgaattaatagtttagtaactttttattgcaggtagtacttgtgatttcggccagaaactggtctgtgctgataaagtacttgacattgactgattcattcatattcatgtagtaagtattaattgaatatgtaggttcgaagcattcattatgctaggtgctggtactttctgaacttc

SEQ ID NO: 23696 - DNA, 1048 bp, Homo sapiens
ccatctctggctcacattgcatttataatagtaagcctctcccagggtggcatttcagttacccttttgaacagccagcatgttttaggaggcaaggaagaaagacagacaaattactgaaatactgggtgcattatatatcatgcactcagaccttttcatacagccttttattgctggaaactatgaaattggataagaccttccgttatgttaaataagatgtggttgtacagtagacttttgacatttgctagaatattttctgagacaatttccatttcctcaattttggaaatatttttgtagattagtagctgactttcttttgaggccattttacaaggaacatgatagagtgcaacaaaacctaaatgagatttgtacactgatgagtggataagcacctggatcacctaagtgacctggtgacctgcacatcatgaagcagaaattattcaaatttgcctcaggagaagtatgcatgaccgcatgtcagagacctttgatgtctcttcatgttgaattttcaaatgccatggtatcgctttagaccataaagggaattcatattgtttctttgttccttttagtcactgcccacctcgccccctttccctccagcgaaaaatctgagctgctcatttaggacagatcttcttgtgtttagtgaaaaaagtcatgattgccttaatgaaaaaggatagaagccctatctatgtacttaaaaacaaccatctaacacttatcaagttcttcttatgtaccaggtattgagttgtgcacgtttctttaccttgcccatgcagtagaatcaaccatagagctttttaaaaatacagatactgaggtccaagctcagacctattgaatcaatctggtgatggggacctagactcatagctacttctttcaccattcatacgtatcccctaattctcctacctaagctaggtggtagtttgctttgtgctgcacctgtggagcctggctccgtttagcaactttcacagggtcatactgctgctgagcagaggaactttaaact

SEQ ID NO: 23697 - DNA, 1043 bp, Homo sapiens
taatgcccttctttgtcttttttgatctttgttggtttaaagtctgttttgtcagcaagtagtactacaagccctgcttttttctgttttccatttgcttggtaaattttcctccatccctttattttgagcctatgtatgtctttgcatgtgagatgggtcttgtctttttatctagcttgccattttgtgtcttttaattggggcatttaacccatttacatttaaggtaatatgtttgaattcgaccctgtcatcataatgctggctggttattttgcagacttgtcaatgtagttgtttcacagtgtcattggtctgtgtacttcagtgtgtttttgtagtggttggtaacggttcttcccttccatgtttagtgcttccttcaggagttcttgcaaggcaggcctggttgtgacagattacctcagcatctgcttgtctgtaaaggattttatttctcctttgcttatgaagcttaagtttggtctagaagaaaagaaaaagaaagaaactcactcaaaaccatacaactacatggaaattgaacaactaacttgctcctgaatgactcctgggtaaataatgaaattaaggcagaaatcaagaagttctttgaagtcaataagaacaaagagataatgtactagaatcttgaacacagctaaagcagtgttaagagggaaatttatagcactaaatgctcacattaagctagaaagatctcaaattgacatcctaacatcacaactaaaagaactagagaaccaagagcaaacaaactccaaagctagcagaagacaagaaatagccaagatcagagttgaagtgaaagacacagagatatgaaaaacaaacacttcaaaaataaaaacaaattgggttggaaattcttttctttaagaatgttgaatactgaccccaagtctcttctggcttgtagggtttccactgagaatctgatggccttccccttagtaggtggcctggcctctctttctggctgcccttatcattttttccttcattttgacctttgagaa

SEQ ID NO: 23698 - DNA, 1061 bp, Homo sapiens
gaattgaaagaaaatatggtatcagttaaacaggaaatctaagtagatgatataaactagacaataaaaataatattctaaagttgaaaagtgtagttactgaaattaaaaatttacagacaacagcctcaacagcagattagagatagcaaaagaaagattcagtgactttgaatgcaggtctgtagaaattactaaattgatgactctcacgtagcaactttcacccgtagtttggtttcatatacaatgctttaactctttttgctattttttctcttactttctgtgatggaaacattttgtgctttgattttaatgggtgtatcacagttatatacatctttacaaactcatcaaattgtatactttatttatatatttatttttttttgagatagggtctgactctttctcccaggctggagtacagctgaaattagttgggactacaggtgggcaccactgtgccagctaatttttgtattttttgtagagatggggtttccccatgttggccagtctggtctcaaactcctgggctcaatcatttctgccgcctcagactcccagagtgttgggattataggtgtgagctactgtgcctggctggtatagctttttttttttttttttttttttttgtgacagagtctcactctgtcgcccagggtggagtgcagtggcgcgatctgggctcactgcaacctctgcctcccgggttcaacccattctcctgcctcagcctcctgagtagctgggactacagatgcgtgccaccatacccagctgatttttgtattcttagtagaaacagagtttcaccatgttggccaggatgatctcgatctcctgacctcgatccacctgccttggcctcccacagtgctggcattacaggcctgagccaccatgcctggctgttggtatactttaaatggatgtaattcattgcagattatacctcagtaaatttttatttagtttttgagactgagttgctctgttgcccaggctggagtgcagtggcacgatttcagctcactgcaacctctgcctcc

SEQ ID NO: 23699 - DNA, 1124 bp, Homo sapiens
taatttttgtatttttattagagatgggatttcaccatgttggccaggctggtctcaaactcttggcctcaagtgatgcgcctgcctcggcctccgaaagtgctgggattacaggcatgagccaccacacctggcctcatagcttacatttttagagaatcttttctagtacttaaatcggtaaatatggttatcttttaaatgtaatatattgaactaatttaatatttgctcttgtgatttttaaaggctaaagcagtagctgcagaatcgaatgcaaccttctttaatataagtgctgcaagtttaacttcaaaatacgtgagtgctctgtttccaatattgtcgtattttaagttactgtctaaatgttactgtgttaactgtaaatggtaatatttcatgaaaatatttttctaggagcttatctattgtatctattatttacatatgatgaatatctatcttcagagtagaaagttatgtacatttgtgttgtcaaatactgtattagtttactggggccatgtaataaaataccgtaaactggctggcttaaacatcagcaatttattgtctcacagttgtggaaggtagaagtctaagatcagtcaaaatgttggcagggttgcttcctcctgagggctgtgagggaaaatgtatgttgtgtgcctctctcctggcttctggtggcttgctggcaatcttttgtattccttggcttgtagatgcatccctcctatctctgtctttatctttatgtggcattctccctgtgtctgtcaccatgtccaaatttcccctgtggattaggacccaccctaatgatctcaatttaagtttgtcatcagcaacaattctatgtccaaataatgtcacattcataggtactagggataggacttcaacacgtttttggagaacacagttcaacccattaacaaatactatcactttccacttaagcttcaagtaaagtggattttatctcaaggagccaccagataggaacacagatctgatggcataaactgagtatttctggccttctgattctgatctaaaatatgacagaagattttccctgttttaattttttttttttttttataatagagacacag

SEQ ID NO: 23700 - DNA, 1035 bp, Homo sapiens
gaggttgcagtgagctgacattgtaccactgcatccagcctgggtgacagagcaagactccatctcaaaaaaacaaaacaacattttttttaatgccctccctttaacagtacagattgtgaaatttttagttactggaagcccctgctagaaatgaagtcaaacaataatctctgacattcatatagtcagaacctgatgaaagtccattagcaagtaaaatagtcacaaatcttcctatatttatattgtgacaaaatcacaaatttaaagctattattatttttcaagtgaaaagaatgttacttcttttttttttttttttttttttgagacagagtctctctctcttgaccaggctggagtgcagtggcgctacactcaggtcactgcaacctttgcttcctgggttcaagcgattctcctacctcagcatcccgagtagctgggactacagccatgtgccaccacgcctggctaatttttgtatttttagtagagctggggtttcactacattgaccaggatggtctcaaattcctgacctcaggtgagccacccgccttgaacctcctaaagtgctgggattacaggcgtgagccactgcacccggcctgaaattttttttagatatttattttccctcagtaaatgtgctttggcttttgtgtaatctgcttatgactattttattatttcctgccactgaatcagtgagactttaaaatttcaaacttaaaatcttaaatgacacattgctacttactgaaatgataggaacaccctgaatatgaatagaaaggcagtttccggccgggcgcggtggctcatgcctgtaatcccagcactttgggaggccgaggtggttagatgacgaggtcaggagatcaagaccatcctggctaacacggtgaaaccccatctctactaaaaatgcaaaaaattagccgggcatggtggcgagtgcctgtagtcccagctactcaggaggctgaggcaggggagtggcttgaacccgggaggcggagcttgcag

SEQ ID NO: 23701 - DNA, 1543 bp, Homo sapiens
gctgggactacaggtgcatgccaccatgcctagctaatttttgaattttttggtagaaacagggtttcaccatgttggccaggctggtctcaaacttctgacctcaggtgatctgctcttggcctcccaaagtgctaagattacaggagtgagccactgtgtccagcatttttttttttttttttttttttttttaaggagacagcgtcctgccctgtcacctaggctggagtgagtggtacagatatagctcactgcagtctcaaatgtctgggctcagatgatcctcctacctcagccttcccagtagctgggattacaggtacacgccaccatgcccagctgatctttttaattttttttgtagagacagtcttgctgtgttgcctaggctggtcttgaactcttggccttaagcactcctactgccttggcctcccaaagtgttgggattacaggcacgagccactgtgcctggccctgccttacatttttatctgaacttcttctgtcctttgtctcaactgtactactcagtttggattctcttgccaatgtttctttttgatatggagctttttttttttttttttggaggggagctttgcctggttactttcgagactcatagggctcagactattccagcccttattgcagacccagtgtatttgcccactgttgtaatgtgcaaaactcctcccagttgcagctgcttttctcatattggctgtcctagatttccattaagtcttgttagccgctttggggtttttaggtcagtcagatgtgctgttgcttcctgctgcacagattgtgttaccttgaaggtcttacaccttttatttgggttttcataagggtactaggttactttctttgttttaatggaaatatttgaggcatttcaaacactgccaccactgctgccatcttgcaagaatcccaacataatttttagttttcttagttttacattatctaaatatgccataatttatttcataagtcccttagtgaatatttagattctcttctatttttcctatattaacaggtctaggataaacttttttttttttttgtttttgttttgagacggagtctcacactgtcacctgggctggagtgcaatggcatgatcttggctcactgcaacctccgcctcctgagttcaagcaactctcctgcctcagcctcccaagtagataaaaactagaaagaagctatctgtgaaactgctttgtgatgtgtagattcatctcacagagttaaacctttttattgattcaggaggttggaatctctctttttgtagaatctgcgaagagacagccgggattacagatgccccaccatgccccacgtctggctaattttttgtatttttagtagagatagggtttcactgtgttggccaggctggtctcgaactcctgatcttgtgatctgcccgcctcggcctcccaaagtgctgggattataggaatgaggcaccatgcccagcctgggataaacatttttatgggataatctttgtaaa

SEQ ID NO: 23702 - DNA, 1036 bp, Homo sapiens
aactacacaccttgagtcttatgttcatttttaaccattctttcctttatttttttaattaattaattttttaaaatatggaacgcttcatgaatttgcatgtcatctttgcacagaggccatactaatcttctctgtatcgttccaatttgagtatatgtgctgccgaagtgaccacttaaccattcttttaattgcgttaatgacattggatggcttataaacacaaagaatatagtcatcaactcagaacttggcatctagaaaccacacctatgaagtccctggttaagacccaggaatttaataaaacaagcttttgagctgctaaaagttaatatcacaaaagccatagattaacgcatgcactgtaattataggagacttttcaagttcatactctgaaaacagagtttccttattttaattactttgatttccatatcagactgaaagaggatatggcatctttaatacttaggtagtgacaactgtgaatggtagtggcaaaagaaaagggaaaaatcaaagatgacttgatttcaagacgtggcttgtcttagctaaaagtaataaactggaagtcaaattcaaggaatatagatattttctctgtctcatgattgacagtagctctcttactatttttctgtattttgtatttcaagtcatagattcagatacagtgttactaaacaatttggctaatttatgtgcagtttatgttttgtaagaatttttttcttttttgaaaatctgtgtttatttagagaccaacatggagtgtctgctggacattttatttaattttatttactctctttttttgagactgggtctggctctgttgcccagcctggagtgtagcgacatgatcttggctcactgcaacatctgcctcatgggctcaagccatcctcacacctcagcctcccaagtagctgtgactataggcgcgcaccaccacgcctggctaatttttgtattttttgtagagatggggttttgccatgttgtccagtctggtctcaaactc

SEQ ID NO: 23703 - DNA, 2052 bp, Homo sapiens
caatgaacaaatggttcttgctcatgtgaccaacaggctgtacactctagtgtctactctaactgttcaaattttcaaggatgactggattaggcctgccttattgtctgggcctgttgcagccaatgtcctaaacttttcagatcatcacgtaatcccaatgcctcttttaaagggtactgatgatttgaacccagttacatcaactccagctaaacctagtagtccacctccagaattttcatttaacactcctgggaaaaatgtgaacccagttattcttctaaacacacaaacaaggccttatggttttggtctcaatcatggacacacaccttacagcagcatgcttaatcaaggacttggagttccaggaattggagcaactcaaggattgaggactggttttacaaatataccaagtagatatggaactaataatagaattggacaaccaagaccatgatagactctaacttatttttataaggaatattgactccttggcttccaatttatttagtaatccaactttgcattgactgtttaatcatttactctaaatgttagataatagtagtcttgttcacatttcatgaaacctatgaaactatatttttgtaaaatgtatttgtgacagtgaaatcctcgtaaatgttaaaggctttaaataggcttcctttagaaaatgtgtttctttaaatttggattttggtatctttggttttgtagttgactgcagtgtgatgtgaccttacctttataagagccacttgatggagtagatctgtcacattactaagatacgatatttctttttttttccgagacggagtcttgctctgccactgtgcccggccaatacattattattaacttaaggctgtactttattaaggcttccttagtttttgttttgttttgttttttgagatggagtctcactctgtcgcccaggctggaatgcagtggcatgatctcagctcactgcaacctctgcctcctgagttcaaatgattctcctgcctcagcctcccgagtagctgggattacaggcacctgccaccacgcccagctaatttttgtatttttagtaaagacgggggatttcaccatgttggccaggctggtcttgaactcctgacctcatgatccacccaccttagcctcccaaagtgctgggattaggtgtgagccaccgcacctggccgatattttctttaatgaaatttataaatatgcttcttgaataatacacattttgggaaagggaaaaatgtctgttcaaaaagtaaaagtctcttttatagcttttccaaacttaattgctaaatttttctttgaggttctcctgaattatgtcttacaaactaaaagcaaaaatttttagcagaaattttggaatacattctatctagcacaatttgaatttttaattatcaagatttttgttaaagtttctctcctttaaaaattttagtacatttgtaaatagtccatggttctcagtgttttattttgattaagtgactacccaacttttggtgatatgcagtgaaagaatcccaattttctatgttacatttaatcaaatactgacataatgaatttatctttcctgacacattttcattcattggctttttaatttcttattttattaacaaaatatatcagatatattaccaaaacacatggagttccatacataatatggaatttgatgtcttttcaagttgcacaaagaatttgagcatatataattttaccaaagcataatggaccttagattatagaatacagcattgttaggtctgcagtgggcagtttctttttgttttgctttgtcaaaaatgggaaattgttaactgtgatgaaatgtgagaattacatagattatgttattttttagttgttttccaaatgcagagtttaaggactttctaacatggctagtattacttccaaaaagtataacaagcagcagtcacacatgacctaggagggttttttattgttttattttattatgcattccataacagttttaaa

SEQ ID NO: 23704 - DNA, 1055 bp, Homo sapiens
cttgctcgccctggcatggtggctcacgcttgtaatcccagcacttgggaaagctaaggtgggcagattgcttagcccaggagtttgagaccagcctgggcaacatggcaaaaccccgtctctacacatacaaaaaagttagccaggcatggtggtgcatgcacctgtggtcccaattactcgggaggctgaggtgggaggatcacctgagcccagggggtcgaggctgcagtgagctgtgatcacaccactgcactacagcctgggccacatagtgagaccctatctcaaaaaaaaaaaaagaatatggatgaatctcaaaaacataatattgaacagaacacagatacaaaagaatatactttatgattctattaatgtaaagtacaaaaacaggatgttagttacccttgagtggcaaggaagtaactgaaggagagtacagagatttgggcttctaggatgttagcatgttctatttcttaatctgagagctaattacatgggtgcagttagtctgaaaaatttatcaagctgtagacttataacatgtacacctttctgaatgggtattgtgcttgaattaaaagttataagttggaggtcggatgcggtagctcacacctgtaatcccagcactttgggaggctgaggctggcagatcacttgaggtcaagaccagcctggccaacatagtgaaaccccgtccctacaaaaaatacagaaattagccaggcgtggtggcacatgcctgttatgctagctactcgggaggctgaggcaggagaatcgcttgaacctgggagacggaggtggttgcagtgagccaagattgcaccactgcattccagcttgggtgacatagtaagaacatgtctcaaaaacagggtataagttggaaacacacagaatgaagtgtcagcaaagtgttgataagtttagcgttattttaaatgttgtaaatgttcatatttttatactatggaagaacatgataatgaaccatagcttggatcatgtcttgaaacatcctgaaatctcttttgatactgtgc

SEQ ID NO: 23705 - DNA, 1033 bp, Homo sapiens
agaatcacttgaacctgggaggcagaggttgcagtgagccgagatcacgccattgcactccagcctgggcaacaagagcaaaactccgtctcaaataaataaataaatacaaaatacaaaaattagccaggcatggtggtgcatgcctgtagtcccagctactcaggaggctgaggcaggagaatggcttgaacccgggaggcagagggtgtggtgagctgagatcatgccattgcactccagcttgggcaacagagcaagaccccgtctcataaaaaaaaaaaagtaattacttcatagggttgtagtgaagactaaatgttaatgaatgtgtacgcatgcatgtgtgtctgcacctatgtatataggtgtaaaaatgtacaaatacatttatttctcagttctgtcccctcatagggcccagtagcaatgagaacacgtaacatccagatcttggcttctaaatcccttctcccttaaaaataaccatgatttggactggctctagctcagtattcctttgacaaaaaaccgagactccttgaatacatgcttagttctaagactggagcagaaaaaatacaagatgagcctggaacatcgctttgtgccatggcataggtcacagaagcctatttgaagagccccttattggccaaatctgggaccatttgaacatcagaataaaaaatgaagtcaaataaatatatcctattgagtaaagaacaagaccacagtgaggtggatggatggatatacagatagatagagcacatgagagtgagcgacaggagatgtgggagggggtagcaaatgtagtaaaatggtaacaattggtgaatctgggtgaaaagtatccaagagctctttgtactattcttgcaacttttctgtctgaaattaagccaaaataaaacatttgaaatttttaaatatatgtaaaagagcttacaatgctgcctggcacataataaggagtatatgtgtgtttgctgttactatacgggtaacttccaacaagtggtaggttgga

SEQ ID NO: 23706 - DNA, 1052 bp, Homo sapiens
taggtagaatgtttcactatatatatataatttttctctgaaatcctactgactgtaccagtcagagtttggtgcaagaaacagaaaccactggaagtattttaagcatgaaggaatttattgcagagatgtatgcacttagaaaatctttgaaagggccaaaggaatagattctaggcagggcctttaggagtgaaacctagaacagtactgaacctggccgggcgcggtggctcacgcctgtaatcccagcactttgggaggctgaggcgggtggatcaccttaggtcaggagtttgagaccagcctggccaagatggtgaaaccccgtcttaactaaaaatacaaaaaattagctgggcatggtggcaggcacctgtaatcccagctgctcgggaggctgaggcagagaattgcttgaacccagcaggtggaggttgcagtgagccgagatagcgccactgcactccagcctgggcgacagagcgagactccatctcaaaaaaaataaaaaaaataaaaataaaaaaagaacaatactgaactgactcaccacgggagctgcctctgaggccactactttgagtgagttcaagaccacaatatcttagatgcattccagggttcagtcttgttgccacagcaaatgcaccccaaccctcaggaagctggaaaaggaacattgaaggaggtcctataaaaaacaaaacctcacatttccacgacctcacctgcagcagaaaaataagcaaaggaacaggaaaatagtttccacctcacttatgccttccaaatctcaaccaaatatgtctaattggtggaagcaattcacatcccaaactgtacctgcaaaggagccagaactgtggattttagtcttctacttctgcagtacaggaagctatcctgtaggagggtagaatgcaggttgagggagccaattaatactatccactaacataacatacaaatttaaagtgcaaaaagatacactgagtaggaacaggaaagaccactgaaggtataggctagaggccagatgctgtgcaagg

SEQ ID NO: 23707 - DNA, 1027 bp, Homo sapiens
ttaggttagttgttttcttcctcattcccttcagtgtggttatattatttttatttatttatttatttatttatttatttgagacagggctcactctgttgcccaagctagagtacagtggcatgatcatgactcactacagcctcagtctcctgaatagttaggatcacaagtacatgctaccatgccaagctaattgaaaaaaatttttggggccaggcgcagtgactcacacctgtaatcccagcattttgggaagccaaggcgggcggattatgaggtcaggagtttgagaccagcctggccaacatggtgaaaccccgtctctactaaaaatacaaaaattagctaggtgcggtggtgggcgcctgtaatcccagttactcaggaggctgaagcaggagaatcgcttgaacctgggaggcggaggttgcagcaagccgagatcgcaccattacactccagcctggcgacagagcgactcccattcgggaaaagaaaaaaaactgtagatgtgaagtctgactgtgtgcccccaccgatcttagactcttgggctcaagcaatccacctgcctcaacttcccagagtgctgggtttacaggcatgagccactgcacctggcctatgttacagttaggttcacttgttatcatttatattccattttaggtttatttcataccctcattgaaatttttaaatttgtttattaaagtttattttattttattattttgttttattttattttatttatttcattttaatgagagatggcgtcttgctatgttgcctaggctggtttcaaactcctggcctccagtgatactctcgcttcagcttcccaaagtgctgggatgacaggcccgagccaccatgacccgccaagttgtgtttttagagaaaatatattctctttagaataaggattctaggctgggcgcggtggctcacgcctgtaatcccagaactttgggaggccgaggcgggcggatcatgaggtcaggagatcgagaccatcctg

SEQ ID NO: 23708 - DNA, 1890 bp, Homo sapiens
caggtaatccatgaagatttcctgaaggaagttcgcatgaatgtgagagggcaattaacttttataatttttattgagcacgtagtatatacttgtcagatgctcttctacacattttacaaatgattcttaatcctcacaacagatctttgattaggtttttaaggaaaactagttctttccaaaataacctaatgatcacaaaacatatagaacatacaactctgcatcttgactatggtgcgtaggtctacatgtgataaaatgacattgaactatacacacatcatacaactatcaaatccctccttttgagattgtactagaattatgtaatatgcaaccattgggggaaactgggtaaagagtaaattggatctctctgtactatctttgagtagtgtttaggtattttataaaaataatgtcctacagtttgggtttgtcaaatggttttctcatagttagataggggttatggcttttggagagaaagaccacagaggtctgtagtatattttcaactgtaatctatttcaaaataaaaagttttaaaaaaattctccaaggggggatgattagtaaattgattagtcctttctagacctccaacacaccccaccacacactcacacagacccacactcctattaattccggtaactcgggttgtttggaatgtggatagagaaactaagcttaactatgcgcttccagcacctcgtatctggtacttctgttcaacagaaagccttgggaatggggagggcaggcgtggtaaaaggtacaggtttgggaaggtcgctcggttccttccaatccaaacgagaggcttctgattgtttattctcacaccagagccgtgaccgagacccagaggtccgcttccggccacggccgaacagctgcaccgtgcgtaccgggaacggtcaaggcgcagctggaaccgctgcaaaaggcctccgggcgtaccggacaggtcgcaagggcgggggtccccacctagcggaaatgcacggaggccaacccctccccctgcccccgcgaggagcggggcggactcggcagccgccactccccaggctcacaggaagaaactgggacgctgcggacgcggaactggccagacccgcggcgcgtggcacgcgcgagccctcccgcgcatgctccacccgccggcctccagcccgcgccccgggccccgcctccctccctgcttctccccctctcccgtcagcctccctccgagtttggcccctccggccgggcgatcgacgttccgcgtgcgtgcgggcgcctgacttcacttccggctaacgcgctcggcttgccccctggccccggatggtgactggtggtggtgctgcacctcccgggactgtcactgagccgcttcccagtgtgattgtgctgagcgcaggccggaagatggcggctgcggctgcggcggcctcgggccccggctgctcctcggcggcgggggcgggggcggccggggtctcagagtggctggtgctgcgggacggctgcatgcactgcgacgccgacgggctgcacagcctgtcctaccaccctgcgctcaacgccatcctggccgtcactagccgcgggaccatcaaagtcatcgacggcacctcgggggccacactgcaggcctccgcgctcagtggtgagtcttccgcacgccgggcgggcgcgaagccggggaaagaagccgtccagccccggggctcggcctcgcgactcggggaagcgagatggcgagagggcagggctgggggttcgggcccagccgtgaagggaggcccggaagctgatggagggggaccttaggacttggctttttcagcggctgcagttgggaggaaagaccggcgagtcagggagtgg

SEQ ID NO: 23709 - DNA, 1025 bp, Homo sapiens
tgctgctgtcttttatatttttgtttgcccaaactgtccttagtcacacagtagtcttcaaattcctacaaatgttattatggattcttggaggtttccataccctatttcagttaggcatttatttaatgatttaagaagatttttgtcagtgttgttaatcagttatgatatcaaactactctttatatatcatttaagcctattttaattatatggttgagatgtgtagtagtgattttaacactgtactttcaggccaggcatagtggctcatgcgtataatcccaggactttgagaggtagaggtgggaagattgcttaagcccaagggttcaagaccagcctgggcaacatggtgagaccccgtctctgcaaaaattaaaagaaaaaagtagctgggcatggtggcgtgtgcctgtggtcccacctacacgggaggctgaggcaggaggattggttgaggccaggaggaggtcagggctgcagtgagctgtgttcctgccactgtactccagcctggatgacagactgagaccctgtctcaaaaaaacccacaaaaccaactgttcttttttctttgctttctcatatgatgtatactttttttgaaattcaaattgtttactttgttttttgatttaagtgatgatttactggaggattcagacagtgaagagcattccagatcagattctgtgacaggtatgtaaaaagtattagataatgtatttaaaaaattctttacacagttgtgcatacagctaactaccacttaattctgaatttcttagttaatgctaactctaaatttttgctagtatacacagaagactgaaatattgtgtgtcagagatctcaaattagtagtatgtacatagtgttccatatttaaaatttaaatggtacctatttgagccaaaggaattacagtggatagttacgttaaagttttgtcacatatgtcaggtaattaaatgtttttatttgtataatgtattctgttaactaaaagtagtgtttaa

SEQ ID NO: 23710 - DNA, 1052 bp, Homo sapiens
tggttgttgctttgtttgttttgtgaaaacaaacaaactgttgaatctgtgaaatctgaatctgtaaaatctcttctgtattgtgcagctgctgatttctgtcatttattctgcctagttttaatttttaagacttgtttcttattttgtttcttttggggcagcagagcttagtattcagccaaagattgataggtttggtgtccaaatacctttagccagtaaggctgtgctcaagtgtgccctggcttttattttctgttgtgctttctcaggtctcttttgcataggcatagaggcttagttgactgaggatgtaataatggcttcggctccctctggtctttgctggacacgtgcacagcctctgatcaaggtgggatttgtggagagtttaccaggccccctgtgcttctctcactacatgtaattctgtgttaaatccctggtgtttccagtgctttgcttgccccacacagaattgtgacctcaagtagcagatctccttgtttgtttcccattgaaatcacctgtttaaactggacgctctccatcaatcaagtcccatctggagatagcagtgaatgtgctggttttcactgcttacctcaccctcgttaaattacagttttgtctagctttatagttgcctttcaggaaggggatttatcatcttccttcttctgctatgctggaagtgaatctccaaattagaatgttagaatatactattacccattaatttttttgtcttaattaaagctaaatttgctgtcagtttttttcctgtgacagagattttaaactagaaatttgagttgccttcatttcattgtgaatgctttaaaaaataagagtatttgttaagttttgttattgttgagattaagagatctggctgtggattccagtatagctagtgcctcatctgtaaaatggccacagtaatagttctaccacaagggtttttggtaaaaagtaaatgaattaattaaagcacttaaaatactgtctcataaaagtaaatactagataaatacctgttttcatgt

SEQ ID NO: 23711 - DNA, 1055 bp, Homo sapiens
taagtgtgcccgatttctagccttgtgcattaggttggtatgtttttaagttgaaagcatactttctaggtacacctgcaatttagtgggtgataccttgtttatagtgtgatttgatccttgtttaatgtatgtataatttaagagaatttcaaaagttgatgaagattgttgataatcttagcaagaattttgggttcttaggggaaagtgtcatgttaaataagtctatttaacttttaagaaaagaagtctgctgagcttctctgcctgttagtagcagtttggagaatttggcaagggaactcttaaacccttttcactcctactttccttggttgtcttttcttgccctaaagtgttttctctgttatgtaacaatcttaccgacttttttttgtagcattgtgcagaccctttttttctaaaccctgaaacaaattagaacagtctgccctgatccccagggcatgtgtcccaagacccctcccctccccagtggagacctgaaactgtagctagtactgagccatatatatagtattgttttttcctatatatacatacctgcaataaagtttaatttataaactaggcatagtaagagattaacaataactactaataaaatagaacagttataataatatactatgataaaagttacatgaatgtggtctctcaacatgtcttattgtactgtactcacctgtgtttagactgcacttgaccatgtgtaactgaaactttagaaattgaaactgcatatacgggttcttaatgtttaaaggttcctacttgctactgtatctaggaagtgtctaagagctaatggtcagtattgactgttgtaaagataagggtttaatgcataagaaaatatttacaaccctccttagtataatcagttcccgctatcttttggtattttatatagctttaaggcaggtttttcttttaatcggtatagaatacattttaaagatttttaggtaccacaccaggtttagggttgaatttagaccttgagtaatgtctttacaatttttcttttt

SEQ ID NO: 23712 - DNA, 1052 bp, Homo sapiens
ttctttatttgagtgtctttttgttaggaattgccttatatatccaattgtggaggtagctactaagtgaaattcacagtttatgtagtgaatatgagctttttagattaaaaacctaatatttcctttatatggtgattctagaaaggtcagaattaatttgtatttgttttcttggactatatagtcattttgtagaaacttttacatttacactagaatagaaacatgccatgacaaaaaatttgaactttcagaaaattattttattataaatcaggacctttcgtggaactgtattgaaattaattatcctgggcctggcgcggtggctcatgcctgtaatcccagcactttgggaggccaaggtgggcggatcatgaggtcaagagatcgagaccatcctggctaacacagtgaaaccccgtctctactaaaaaatacaaaaaaaattagctgggcatggtggtggtgcctgtagtcccagctactcaggaggctgaggcaggagaatggcgtgaacgtgagaggtggagcttgcagtgagctgagatcgcgctactgcattccagcctgggcaaacagcaagactctgtctccaaaaaaaaaaaaaaaaaaaaaaattaagtagcctggtttgagacaagcctggtcaacatggcgaaacctcgtctctactaaaaatacaaaaagtattgctgggtgtggtggcaggcacctgcctgtagtcccagcttcttgggaggctgaggtacgagaattgcttgaacctgggaggtggaggttgcagtcagctgagattgtgccgctgcactctagcctgggtgacagagtgagactccgtctcaaaaagaaaaagaaattaagtatcctggatttttattttattttacaaaaattcatgtgtttgcaaaaggcacataatttttaaaagataaaaggttaggtttgaaaaagtttttctccacactccccacccatttctccccctgcaaagcaagcaatggaacgagtttcttgtctttacagggctagtctgtgtatatatatgc

SEQ ID NO: 23713 - DNA, 1048 bp, Homo sapiens
atcttggtcttgttcatatatgtattatattatatatatgatatatctgatatagatatatatatctcatatgtgatatatatcatatatgatatatatatatctcatatgatatatctcgtatatgatatatatatatatatatatatatatatttttttttttttttttttttttttgacatggagtctcgctctgttgccaggctggagtgatggcacaatcttggctcactgcaatctccgcctcccgggttcaagtgattcttctgcctcagcctccccagtacctgggattacaggtgcccaccaccacacccagctaatttttgtatttttagtagagacggggttttgccatgttggtcaggctggtctcgaattccggacctcaggtgatccacctgtcttggtctcccaaagtgctgggattgcaggcatcaggcaccatgcctggcccagccctatatttttttataactagagtttttgaggccctttgtagtataaaaatagaaaaagatattgaaaactcggattgtgcaaaagatttctgattagttctatagtatcaggatggcttatttttccttggattgtttacgtcttctgtttgcttgtagtgattcacttagttttccctgtgttatttgggcgttagattttaaaatcaattaaatgtaaatgttcacagtattaaaaaccatatatattaccccaaaatacaagcatggtatgaatgatttagcaagtctaacagtttccccttgactgttgggattaatagctgtcgatttgctgtggaacacttgaaggagcagatgattttattttgggactacgcatgttttatgagatgcaattgctctgctctgctctgctctcttctcttctcttctcttctcttctcttctcttctcttctcttctcttctcttctcttctcttctgttctcctctcctctcctctcctctcctctcctctcctctcctctcctctcctctcctctcctcccctcccctcccctcccctcccctcccctctcccct

SEQ ID NO: 23714 - DNA, 1046 bp, Homo sapiens
aaaaaaaaaaaaaaaaagtcattcctgtatttcctagatcttgaatgatagtattatcaatatactttattttaccattgtttccttatttatactttccagatttcttttttagaatgaaaattaactatagttttagcatcataatagtgccaaaatatttgaacatgttttgtctttaaccttttcttcatcctggtgttttttgtttttgtttttaccccttgtcttatgccagtgagttccttcggggttactcctgcagtaggtggactatcatctgggacagttggggaagcctcgacagccctgagttcagcagcccaggtagctttgcagtctctctctcatgcaatggcttcagccgagcaacagctacaggtgctgcaagagaaacagcagcagcttttgaagcttcagcaacaggttggagactatttggctctttgttcatgctgtctctaaacttcaaaagctgaaaaagtactttaaaaatgaccattattttcataaagaaacgtaggttgactgatctgagctaatcagtttcaacaaaaattgaggtaaagtctttgtgatatttaaattggttaaaattgtatgaatacatcttatttgatacatatttgagggaatatgattgatattttttgtgcaatcttgaagtaaatccattctctacacactcgatcaaagaatatgtacagttactagttactatttatatggagtatagttcctaaaacaaaattttatagaacagttaaatttaatgtgacttaaaattcactaataatgacagatgcttcataaattttattgtggcctaaattaggggtctccagtccctgggccatggaccagtaccaataaatagcctttcaggaactgggctgcacagcaagatgtgagcggtgggcaagcaagcaccacctgagctccatctccttttagatcagcaggggcatttgattctcataggagcatgaacattattgtgaactgtgcatgtgagggatctaggttgcatgttccttatgagagtc

SEQ ID NO: 23715 - DNA, 1022 bp, Homo sapiens
ttggttttaactaccaccaacatttttgtgctttagcagcagtagaattcaacaaaatcctcagggaaataacatggttatagtatacactgtagcatgtatcattatatgaagaattaaatagtatttgcgttcttgcaatgtggttgtttcctctttgtaagagggagtttgaaagctaaaataaaagtcttacagtattttctgcccaactaatcattcattggtaacaacattagtgttgatgacatttagagtggaaatttgttattctgaagtcttatgggagatgagcagttgtttacactgtagtttgtttttttatacatagcaatgactgtagtacataagcctcctgaggaggataactatgttctttctttttttttaataatttttcttgttagggaagtattagtaactgccttgttttcttttaaactagctctgtcgagaatagcactattcctagaagtttaatttagttgttttccttcactataaaatgtagctggtaagattactagctgacccaccccaaaacaataaggaagaaaaagaattatgacattattaatgatctgccttctgttttttaattgaacttattcttgtaatgtgggtgaaatgagggatgtaaatctgctttttctttacctatctcatctggcattgagctgaagagactgggatatgtctatactgggaaaaagcattgtttgagatccattagaggaccttcccaaggcctttttcagtggtattttgattatatatgattgtagtcctgctttcactttggatctaaaccccaatgaatgcaatatgcaacttcacaggaagttaagcagggcttaaggaaactaaatcaaataatactatttggtatttaaatgcatctagttgtgaaattaagaaaaaaagttgccaatggctgaaagaagagcagattgatcctttacaaaattaactaatatactgcatttgctgatttaattttttaaaactctgatgttttaaag

SEQ ID NO: 23716 - DNA, 1035 bp, Homo sapiens
ttgtctttcattagatttgatgttctactcagtttctggctgttggtgtctattttttagacttattacatataaatattagtgttagtaatgataagatatgttttggatttatagaatgttttgtttcacttatattatcagatctaattaggaatcctaaagtcatctggatgtttttcctttgctgtcatctctctccaggagtactagatattcccatgatcagttgggttgttatgctggtgtccaggttgctggattatgtggcaactgttgaagatgaagcagcagctgcaaagaaacctttgaatggtaaagacagggagaggtttctgacaggtatcagaagtttataataatatgttggtggggattttgagtgacttcgcagttgttccagaactggctattggcctggagctaccagctgtatgtaatttaaggaaaatacaaatgaacttcactacaattctgtttaaagataacatttatacttggtggactttatagacaagctcctttgtctggacatgacttttagtttctaaatgcagctatgacttttgcaaggtgtcttccctcaggcttgtttaaagactttataatagcatgcatgtaagttagttatgaaagggaaatcagagtttttattttttcttagtatgatgtgtcatttcatttagcattattggtatctactaattaactacaaatggcctgtatttttaaatacagaaattctcagattttgagttgtaagctttctttataggttcaaagcacagaaaaatttaaaaattaaaggaaatcaacctgcaacattattttattaccctcttcccagttaacaaggctttttatttttctttatttttatttttcctcagagattcttgttctgaaaataagggtttttaaataaaggatttgagatacctaaatccagtatgtaagccattgagatatgtaagcctacatatgcttacatatggcttacatgtagtatgtaagccattgaaatccataaaattt

SEQ ID NO: 23717 - DNA, 1047 bp, Homo sapiens
ctttaatttataggtttccatctcttcaactatattattattataataaaatttgttttcatctgtttttaattttattatgagaaatattaaatatatataaaaaataaaagagtaaaaaatagttattcctggctgggcacagtggctcacacctgtaaaaccagcactttgagaggccgaggtgggcagatcccttgagggcaggaattttagaccagcctggccaacatggtgaaaaaaatacaaaaattagccggctgtgttgacgcatgcctataataccagtttttccagtatctgttactgttttcagttgccagttttgtagagtgtgaggatttttagtaaattgtattgaagtagaaatgcctatggtttggaaagtacaacatactgagagtgataacatgtcatttcaggtgttgtgggctgagctttaaaccttatcctaaaatgttactgattcttaatgcgttagttgtatttaatggagaattccttttatttgcatgttttgaagacactggttaaggagcggatttaaagaaatagtgtcttgtttttaaatttattcttttgacttagttcttcataaacattgtttttctgaaaaatattttccctttctcttttctgcatagcatcaataactagctttctcacagtgttagcttggtatcccaatactttgctccggacatggtgccttgtgcttcatagcctaacactcatgacaaacatgcagcttaattgtaagttcataaatttattcatttaaatctctgacatatactttagtgttctactattggattcttaaaacagagttttccaaggagtggtatacttgtcaaagtggttgagttggccagatgtggtggctcacgcctgtaaacccagcactttgggaggccagcacgggtggatcacttgaggtcaggagctcgagagcagcctggccaacatggtgaaaccttatctctactaaaaatacaaaagttagtgggcgcctgtagtcccagctacttgggagggtgacgcacg

SEQ ID NO: 23718 - DNA, 1069 bp, Homo sapiens
gctattatatattcattcttcagcagttttggaaaaagtgacttttcagcttctatattttaattattatttgtttcaccatgttggccaggctggttttgaactcctgaagtcaggtgatccacctgcctcggcctcccaaagtgttgagattacaggcatgagccactgcgcctggctggatatatatacttttaatgtggtatcttttatttttcttaggagcaagtggattacatctcactaaacatgaaaactttcatggtgggttggatgccatatcagttggggatggattatttaccatactgacaacccttagtaaaaaagcttctacagtccacatgatgctgcagccaattttaacatacatggcctgtggatatatgggcagacaagtaagttcaagccaacaacagttgcagtgattcaaataaatttattgcgatgtaagtggaaaattacaggacaaagataaataagtatatttattatatatcggacaatgaaaagcatcagtacaagagggctgtggattattaataaaagttggagaataaagtttctttgaagtggtattttcagagatgaccacagtgatataagagtaaaacatttaatgtgttcctgagttttagattttttaatatagtctcaagaagttcttctctttttcctaaaagtagcatagtgtaatactgaggtgttctccatagatgttatgtaagaagaagtaatgtgaaatcttttgaaatttatgttgtgtattcagcttcttttttttccattaaaagagattaggctaattaaagaaaataggttacaaaatttttcctttttgtatttcatttttacaaatgaaattgtaggaaccagattattttactttcttgtccatttcccattttgaaatgcagatattagaacagtttcttatgtcttttatatagcagtgtataattatcatttttgtaaacatttgttgaatgtgtatatttctctattagaaaatacaaaggtactttaaatggttcaaattttaaatgaaattggtgtctaaatgcatatt

SEQ ID NO: 23719 - DNA, 1028 bp, Homo sapiens
tcacgtacacccaaactatttttctttgctcatgggctggatgggaattacccctcctccagtgcaatgtcatcatagactgtccatgacagatgatagcaaaaagcaggatcttagttcatctttaacagatgactctaaaaatgcacaagcacctctcgcattaactgaatcacatttggctacccttgcttcctcttctcaatctcctgaagctattaaacaattactagactcaggtttgccttctcttcttgtgaggagtctggctagtttctgctttagccacatttctagctcagaaagcattgcccagtcaatagatatttcccaggacaaactcaggcgccatcatgtcccacaacaatgtaataagatgcctatcacagccgacctagttgctcctattcttaggtttttgacagaagttggcaatagccatattatgaaagattggcttggtggttctgaagtcaatccactatggacagcacttctgtttttattgtgtcactctgggtccacttctggaagccataatttaggtgcacaacagaccagtgcaagatcagcttctctttcttcagctgctacaacaggactgactactcaacagcgcacagcaattgagaatgcaactgttgcgttctttctacagtgcatttcatgccatcctaataatcaaaagctgatggcacaggtaagacaaaaaaataacttacattttagttgttttattacataagaaagggccatgtataaaggccaggtaataataaatttagtgagggttgagtgcctttaaggatctgaatttaagctataaagtactgatatctcctttctccccctcaaaatatgctgtcactggaatcacttattctttatgatgagatgactagcagatgcattgggatgctagctagatcatacaacccttattttcaaaaatttctacaaacaaaaagaaaaagcccaaaaaaacatttcagctgctggaacagtatggacactgatcactgagtact

SEQ ID NO: 23720 - DNA, 1093 bp, Homo sapiens
gttctcctgcctcagcctcccgagtagctgggattacaggcgaccaccaccacgcctggctaatttttgtatatttgatagagacggggtttcaccatgttgaccaggctggtcttgatcttctggccttaggtgatccacttgccttggcctcccaaagtgctgggattgcaggcatgagccactacccccggctctgtggttggttttgtttaatagctgaaacaggtatcctggtgatgctactatgctgcttagttgtcctgacacattattttttcagtgttaatggtatgtcatatttttactgttaagtacttaatgtatgaataaatgtaagaaaacaattgcctattgttagcatgtagattaagagtcaggaatgatgactcttgttgacatgggtggctgagatagtgacacctttgctttctgatggttcagggtacacaaactttattacaggcacaaaattatcaaaaatacggtataaaattaccttaaggctatgtatataagggatgtgtgtatgtgtgtatacacacaaaaataaattttgtgtttccacttggatcccctccctaagataactcattgtgtacatgcaaatattagaaaatgcaaaaaaaagaaaaaaaaagaaatctgaaacagttctagtctcaagcattttggatgagggatacccatcctctattttatcaccattttcatgctgtattaaaatgaaattgccaactcagttcaaaggaatttttcttcttagctttacattgttgattcatggtggaggcgaacaaactatcgactggtgggttggataccttggtccagagaggtccttgtgacatatctcatggcccattacctaggtgatgtgagtcttgccttctgcctgcaataaagttttgttggaatgcagctatgcccatttactagtgtattgtccatagctgcttctctgctacaatgtagattagcagttgtaacagagactatatggcccccccaggttaaagtatttattagctgtccttttatagaaaaaaatgtcccacatcagatttatggaaatgtctgttcctttgtttac

SEQ ID NO: 23721 - DNA, 1077 bp, Homo sapiens
ctttgtgtttgttgaatgaagtaggggaattattctctttgatttcatgtcgtgtgtgtgtgtgtgtgtgtgtgtgtgtgtgtgtgtggttattttggtatagtagctctagactctattatagtttcctgagctgctgtaccaaaataccacaaacgggctggcttaaaacaactgaaatttattctcaatagttgaggaggctgtaagtctgaaatcaagatatcagcagggccatgctccctctgaattcaggctgtagggaagactccttccttgcttcttcctggcttctattggttgccagtagttcttgctgttcattggtttgtagctgaatcactttaatttctgcctacgtcgtcatatggccatctttcctgtgtgtccttgtatctctttctccttataaggacaccagtcatttaatgtagggtcctgcaaaccattatctcctcatcttaacttgattacatctgcaaaggccccatttccaaataaggtcatcttcataggtgctaggggttaggacttgaacatatcttgggaggacaaaatgcaacacacaataatacttattcatgttattgcttccctagtattcaaaaatataagatgatataactatgttataaggtgattgacacagaatgagcaaaattttcttactagacaatgacataattactcaaaagtttgaagcagaaaagaccccaacattttcagcattattattgctcaacataaatgattttttctaatttagtattcagtgtggttcactatattgattagtaactggaaatggggtcctggtaatacatacctaagaatgtgaaagtgactttagaattgggtacttggcagagtatggaataattttgagtagcatgatttaaaaaaaaaatctagattaccttgaatagattgttagataaaatgtggatgataaagcttctgccagtgagggcccagaaggaagtaaggatcataggggagaaaacctacagtgtcttagagaatatctgaattgtcataagcagacttggtagacatacaggtgtttaaagtgctgac

SEQ ID NO: 23722 - DNA, 1015 bp, Homo sapiens
aaagtatcatgtcttctcagtttgctgtgacatataatgagtatcagaattaaagacatcacatggttggaatatcgtaattcctaaaagcctgtgatataaatcatatcctgttcatctaatttaaaataatttatttgtgttttagacattattcaaagtgagcacgtccttattagagtcttttctttgggaaattgagctgttttatcctagtatatcagaaataaaatttctttgttgttaattgagcaaaaagcatgttttcatatacttttcagttttgactttcaaaatgtgaaataatacaagtgaatataatactttaaaaaattaaatccacttaatattaataccctaaaacagttctgtttgaatcgttatacttgtgacatttatgtaaatatcagtttatattctactgtttggtgcttttgctgaacctgtattttgaaattaatctttgttgatgcctaagcctgtggtggtctcatttgtatagctctagcatacttgctgtatatttaactataccttattgtgtgtattagtcttaatgttgactagcatttttatttccagttgttagctataatgaaaaaagttgtgaagaattgtatacatatctaatataagacttaaaaatttgtatctgtataatgggtgatgggaaatatatgatagtggttttaatttgctcttctgattttcgtgaagttgagggtctttcacttgttaaagaatttgaatgctataaattgagagctctttgattttgctgtctttttgctttcattgtatttgttttgttttgtggcatcatatgagaatagtcctttaagaaaacaattatgatgaggtaaagttctgcttctgtaacaatgttctattatataggtacttttatatgaaactatcttctgtgcagcataaaataataaatatagaggatctttaaaaatttgcctataaagggtttcaaaatggtttagaagtgaaaagtgcctcaaattcc

SEQ ID NO: 23723 - DNA, 1025 bp, Homo sapiens
aggctggtctcgagttcctgacctcaagtaatccacctgcctcagcctcccaaagtgctgggataacaggcgtgagccactgcgcccggctggaagcttgttttttaaagcaagcagctttattaatccttataatcctatattttaaagagatcatttaaagttaagtctttactttgaatctgatgttgaaaatgtgaatggccaagccaacacttttctttttctttaggtgagtgctccagttgtaacatctaccactcaggaaaagccgaaggatagcgatcagtttgaatgggtgaccattgaacagtcaggggagttagtttatgaagcaccagaaactgttgcggctgaacctccacctatcaagtcagcagtacagaccatgtctcccatacctgcccattctttggctgcttttggattatttcttcgtcttccgggctatgcggaagtgctactgaaagagagaaaacatgcccagtgccttcttcgattggtattgggagtgacagatgatggagaaggaagtaagtgtttagtattaaatttatcaacacatatgtgaataggttgtgtaaaggtatccagatcattgcctattattcatcatttatttccttcatagttaagctgttagatgatttgtaagtggtagctcacttccagtattagttatacataataaatcctaaagaatcttcattttcatctctgtgttcattcaaaaattattttccttgtgctgacaaaactgttgggcatcactggggggatgtaaacatgaagcagttatttagagctacccccaagtagctaatgttctccagtaatagaaacaagggatgtacataaacatgtatacttagcaagttataaaatcccttcagtactcttgagtgcagtattatggagaaacacacatgtgagattatttctttactactcagcaatgtgaatgaagtggcatggtagtttttagtggggccttgaaggacagattagatttaggttgggatgag

SEQ ID NO: 23724 - DNA, 1005 bp, Homo sapiens
aatcccagctactcgggaggctgaggcaagagaatcacttgaacccaggaggcggaagttgcagtgagccaagattgtgccattgcactccagactgggcgacaagagtgaaactgtgtctcaaaaagaaaaaaaaaaataccaaaataattaatggcataagtgagtttattaataatacatcatggggtcagtctataaaaattagttaatttctacatactagcaacagacataaaatgagctttataaagatatattttagaatagtaccaaaaatagaaaatatctaagagtaaatctgaaaaatatgtataatacctctttatgaaatttttgactgggcatggtagctcatgtttgtaatcccagcactttgggacatagaggcaggcagatcacttaaggtcagaatttcgacaccaccctggccagcatagtgaaactctatctctattaaaattacaaaaattagccgggcctggtggctcacacctatattcctagctacttgggaggctgaggcaggtgaatctgtctgtgctcatgtatatcttcagtgggttagatatgatagtgcaataatattatttcttcccagatcaatccttaagtttgatacaattccagattcattttggaggaagtttacaagccaattataaaatgtatataaacatgcaaagggtcaggaatagctgagatatccttttgctatatttatcctaaaaagatctgctcatatctgtattcttttcactgttttctcaattcaattttgagtcattgactttttaggctctaaggtggtttatcccttcttttcttgataaatatttgaaaatttgtatttatttatgtgtttattgattcattcattcttaaatataagcagtttctctccatttaccccttcccccagcccctggcaattaccagtctgcattctgtctccatgcatttacctattttggatattgcatataaattgaatcatgtaatgtg

SEQ ID NO: 23725 - DNA, 1674 bp, Homo sapiens
ttttgtttgtttagattgacctgtttgatacatcagactggtcttttttaaaaagtagatgtcaaatgcataatttttttttattaaaatgtttgagactatacattttaattttagattatatagaacaattgaatagggtgcgataggtttctttttatctcacttctctattattaaactattattttcttaatccttatactgtgaagatatgacctaccaaaaattttaaatttctgttttggtctgaaattgactctcttataacactgagcttttatctttatggttcattgtcaaaaaggaaatccaggattatttacataatatttacagtaattgttgttcatgtaagtgcacttcctgggaaggtgtgtatgttaaactgatttttggtaaatgtatggaattgcagagacttagatattataccttggaactgttttagaaatttaatgtgacagatcgaagtttgacctttcttttatgatgtattattttcctggaaaaaagaaatttctttcatcaggctttagatgttcttgaatttggtaacttgtccagtggttaattctaattgatatatttggatgtggtaacaaatacttattttgagataataccttatattaagataaaatgatgtaacttatagtcagtaggttaaacggtagcatgcctcctaaatgatattaaatatggattgttttcaggaaaacacagcttaatataagtatataagtacatatataattaagtaaacataaatataaatatataaatatataattagttatcagttttggttagaatagtaataattttttaagtggctactatttatttatttgagacagggtttccctctgtcacccatgctggaatgcagtggcacgatcttggcttactgcaacctccacctctcaggttcaagcaattctcctgcctcagcctcctgagtaggtgggattacagacatacagcagcatgcccggctaatttttgtatttttggtagagatggggtttcaccatgttagccaggctggtctcaaatcctggccccatgtgatctgcccaccttggcctccaaaagtgctggaattagagacctgagccaacacaccctgccttaagtggcatttaaaaacctgaacaaattatctagccagagtcttccttagacttagtaaaatttctattttggaaaattagtctaaagtttattttccaattttttcatttgcgtatatagtattatttttggcaatgtgggagttgaggtaatgtgataggatccactccaccattttttactacatttagttgtcatgtccttttcttctgtaatctggaagagttcctagcctatctttatctttcataatactgatatttttacagaatgtaaccatttattttatagaatattctacagattggtttgtaagtgtgagagtagtcctcataattttgcctgagacattgtattcaagggatgatttgcttatattgctagcagatgatataaaaaaacgcaggcctaacataatagccttttctgagaactttagtaaaataatgcacattttctttctataacatgtttttaaatgattggtgagcaagacaagaaaatataggaacacactagtttatgccttcctttcag

SEQ ID NO: 23726 - DNA, 1049 bp, Homo sapiens
taaaatattcagtgttcattaatgctaactaaaacttcatttttctaaacattttcatagtcttctttcctatactgactaaatttccctttcctgtattcagtagattactagaggcttaaggaaaacacaaacctaaatgcagttttattttaattaatgtgtattttatatgtactcttagaaaaatggttgtagcatttttgctgttgtgtcttgtatacgttactaaatcttgtatgttttggagtagtccatcttcagtgtccatattcattgctttgtcctgtttttttcctctgtgtaaagttaaaatttacctgtttgctttgttataattttattcctcaaactggaagcatcatatagtaattgctcttagagcaagggagttaccctgggatgtatgtcttaatattctggaggtgtgcttttaaaggatagtttctaaatctttcttgttagagccaggttttgccctgaatgcagtcccttgaacgagaccttcagagtgtggtatggatgtagaccaaaacaatcactaagaggttaagtactgttccagctatacctaacatagtcaagatagattcttctttttcttctcttcttgcttcttaacatcttctgctgtagtgatgacagaagtaccagttttcccagaaaatgtcttcatctagagaaaaagagaatgattgtgaagcaaattgctagaaaatgtatttattacaaatactagtacatactagaaaattgctagaaaatactagtaaatactagaaaattgctagaaaagaaatactagctagtaaatactagaaaatgtatttactagcagagagctagtaaatgtatttattatacatgttgcatttcttgcgtagtttttcagtgtgcagtcctactttagtctgttaacgtgttggaaaatgatagtaaatgagtgtattttaatagaatttaaaatctgttgtttttaacatttgggctgaagagccgaaaatataatgaaaatgtagaagttagattctgccatttacgtattctgt

SEQ ID NO: 23727 - DNA, 1046 bp, Homo sapiens
acaaaaaactacacatacttagtgtatacaattcggtaagtttagaacatcaactcctttttaaagcaactcttttggggagcagttgagcagaatagggatttaaataattttttcctttgaagattagaggatcattgtgtcattaattttataatctagtattgaaattaattccattttactaatattttgaaaaagcaattaatagcagagtttatctcttaataaaagatttatttccacagattaaacacatcacatatttaagcttaaaataatggagttactaaatgtcagagttttaaaataattaaaagagaagtgctgcttaccctacattgcatcaggagtaaagtgttatcagatatgttgctttagtccacaatagtgatgaatgaaccttttctcttcacggagggcttgtgaacaaaagctgaacaagcttcatatcaaagatggcaaatgttttcagtatatcctgaagggatgtatcttcgctgttagtaatctgtggtaaatttcactgtaactatttgatgtaaattgctagcctctgcaagtaagtcacactgtaaataggctctattttttagtttttttaggttttttatatgctgaatcacatatttcctccaaaatgctaatgtttatggttatttcttttgaattttctgtctgatgaacctttacactgttctttttcttttcagctgtttgaagatacttttccccattgaaatgttttagttccaaatgcagaaagtgattttattcctctccctactaccagttactactataaaaatgaaaaaaattgtttattggcataagttttgtaatgtcacacacccgcatctgtagctgttgatgacaattccaagatagtcttcaagctatgcataaatcagcaaacaggcccttttgaggattggaaggatagtgacttcacttgcctggttgtaagctgtaacactgattaaacatgcatttggtgcttgctgagtaaaggagctgcaagctgcacttggagacatggtgttgca

SEQ ID NO: 23728 - DNA, 1077 bp, Homo sapiens
ttggccaggcacatttgctcatgcctgtaatcccagcactttgggaggcccaggtgggcggatcacttgaggtcaggagttcgagaccagcctggccaacatggtgaaccttgtctctactaaaaataaaaaaatgagccgagtgtggtggtgggcgcctgtaatcccagctacttgggaggctaagacaggagaatcgcttgaacccgggaggcggaggttgcagtgagctgagactgtgccattgcactccagcctgggcaacaagagtgaaactctgtctcaaaaaacaaaaaacaaacaaaccctgtaccctttagttatcatcttccatcccctcatcttctctagcactaagcggctgataatctactttctatccttatatagagttgccttttctgaatattttatgtaaattggatcatataatatgtggtctttttaaattggctttttccatgcagcaaaatgttttcagggtttattgatgttgaatgtatcagtagttgataacttcttcgggctgaacaacattccattttatggctgtgtactacattttgcttttccatcagttgatgtctatttgtttttgcattttggcagttgcaaaaatgttgcagtgagcattagcatacaaatatctattggtgtttctgctttgaattcctttggtaatatacctaggatggaattgttgagttacatggattacctgacttttaaaattacaataatcttactgggtgtgagatggtatctcattgtggttttaatttgcatttctttgatgactaagtatgttaagcatattttcatgtgttcattgactattcacctatcctttccagagaaatatcttttcaaattctctgccccatgagtgggggctggctagaagaggggattgaatgtcaacttcttagccatgtgtaccttctaacttagcagcaggaggttgctgtggtaggatgggaaatgctgacatcctgcccctcaccccgctaggaaggcaggctttcagctctgtactaaggcatagctttccaacttggacctctgggagagggaggc

SEQ ID NO: 23729 - DNA, 1013 bp, Homo sapiens
ccacacttgttcatttttttttttttctgtagctattgtaaatgagattgctttcttgatttaatccttggctagatgattattggtgtatagaaacattactggttttcatatattaatcttatatcctgaatctttattgaattcatgtatcaaatccaagagtttctcatggagtctttagggttttctagatcatatcctcagcaaacagggaaaatgttgacttcctgctttttgagtttgaatgccttttttttttcccttgcctgattactctggcaagatgtccagtacgatgttgaataagagtggtgaaaatgagaactcttgacttgttccagttcttagagggaatgctttcagctttttcccattaagtatagtgttagctgtgggtttttcatatatggcctttattatgctgtgtgttccttctatgcccagtttattggggatttatatcaattttatcacatgctttttcaacatttattgaaatgactatagagtttttgtcctttattatgttgttatgatgtgtcacatttatggatttgtgtgtgttgaaccatccttgtatccctgggataaatcatacttgatcatgatgtattatcttttttttgttgtttattttttaaaagttatttatttatttattttgagatcagcttgtgagactggctaatttttttattttgggtagacacagggtttcaccatgttggtcaggctggtctcgaactccttgcctcaagcaattcactcaccttggcctcccaaagtgctgggattacgggtgtgagctacagtgcgtggccatttatttgtttgtttgtttgtttgtttgttttgagatggagtctcgctctgtcacccaggctggagtgcaatggtattatcctggctcactgcaacctccactttctgggttcaagcgattctcctgcctcagcacccccaagtaggtgggaccacagacttgcaccacaacacccggctaatttttg

SEQ ID NO: 23730 - DNA, 1058 bp, Homo sapiens
tgagtagctgggattacagacctgtgccgccatgcctagctaattttcgtatttagtagagacggggtttcaccatgttggccaggctggtctcgaactcctgacccccggtgatccatcagcctcagcctctcaaagtggtgaaattgcaggtgtgagtcaccgcgccctgccagtaaatgtttatggaatggctgttcagtaactgtcattggaagagagatgttagatccttatctcacgttattcacaaaagtaaattccagttggtatacaacacaaaacccaacaaaacaacttataaaagccttagaagcaacgtgtgttcctcgagtaaggaattcactcttagatacaaataattttaatacaaaattcatttgatttatagctagtaattggaagttaacataggcaatattttcttttttactaaaaagaaagttgatttattgaaatagactctggataaattgcaattctgtcattcgttttcacaaaagataaaataacttcatcattcaatttagtttaaaaaagtttccacttcatactgataaatatgtttccagccataatatattatctggtgtatttaatcatttctatatgtaatataactagatatttagttacatttcttgttctcccctaaacttgatactttacttttttttgttttccaaaagtgcctattattatagtttgtatattggtgcttcttaaatatctgctgcattctttcatttagcagctaacctattaagttgacccttgaataatgcaggtattaagggtaccaacccccacatatttgagaatccaagtataactttttctttttttttttttttttttgaggcgggattttgccctatcacccaggctggagtgcagtggcatgatcttgtcctccccagttgcagggactacaggtgtgcgccaccacgcccagctaattttttgttatctttttgtagagatggaagttttaccatgttgcccaggccggtctcaaactcccaggctcaagtgatcctcccaccttggcctcccaa

SEQ ID NO: 23731 - DNA, 1047 bp, Homo sapiens
ctgtcctactgttttgggggactgagattttggtactcatcagcactcttgctctcatattatggacttaatagatagttagtttccaggtagaaatatattccatgctccagatatttgtcttaaaaagcaatctgtgttcatattggcaactgcagatttatctctagggatctccttcaatagagtacaagtgccatagcataaatggatctgggaacatggcttcctttgttctcatatacgaatccgacgtctacaatgttaggcagaaattttccaacactaatcctattacttggttatttgacggactcaggcagaaagctatgatccgtcgattgatagaagctaagtcgttaagtcaaaaagcatcttaaatcttttgtattaaggtcctggaatggcagggtgagactccatacatgttcatgtcttcctgttcctctactgtttgcttaaagctgtcacccagctaaagttgtagacatggaacacttatacaacattaaattttgtgtcctatctacccaaatctaaaagagaactcatatgatggtgagatattattaattttattaaataagtcagttttcttgattgaaaactgaaggaaattttcttggtagaaattctttgttagaatgcagaaccttggcatttgtgaggaagaacttttagatgttataccacctatgctactgtttacttaaatttttctttgccttttttttctacttagaatttttcttcagatcaacttaaaaaattaaacaagtttttcttaggcttttaaagaggaaacttcaaattacccccatagcggatggaccattatcatttgccataaataggagacagtgtaaacatgagtgaaccatttactgtgaataaaatagtgtttacttattaatccttgaaatatattagaccatgtgtgcaaagcagtacaatcgggaataatcattcagattttgtttgttaaatgaaacactggaaaaataaatgcatgtccatcaaaaggaggattgtttatactacagaata

SEQ ID NO: 23732 - DNA, 1030 bp, Homo sapiens
cctaaaattccataatatgattggctgccatttgtttaaccagtaagtggaactttagtttgtttccagtatttaaatatcatatgcaacatctcagtggctttcattacctgtaaatatttgtgcatatccaggattaattctgtaggatgaattaacagaagagaaatgattgattaaaacaggctgtgcatgttttatcaagtagccattgtctttgattgaatcatttatttaatgaaatctttgagttaatagaccctgtcctctatatgatataaaattttcccactgggcatagtaatgggcccatttcttgcatctgttagattgttttttataaaagttaaagaaaatgtatccctatagcatgtgaaagacaagagtccatccatctggcagtgctaatccatctggcagtgctaatatataggtgttatgtaaacatttacacttttgctattcttccatggttggaagttctctccagttgagtgggagaaggactagtgattgtttgtgatttttgtcattataacaattttttgcagttctgggttttattttttcttctccttttagatacgtttgaaatggtttctgaagatgaagatgggaaattgggatttaaagtaaattaccactacatgtctcaggtgaaaaatgctaatgatgcgaacagtgctgccagagctcgccgccttgcccaggaagctgtgacgctttcaacctcactgcctctgtcttcatcctctagtgtgtttgtacgctgtgatgaggagcgacttgatatcatgaaggtaaaaaataatgataataaagcactctcccttatctccttggctcatctaattactcaaatttttatacaaaactggaaatactatacaaataaattatacaaaacactagaaattttggtgaccatttttagacggcagtgaaaggagcctccccacccctcccccccttttttttttggcgacaggatctcacttttgcccaagctggagtacagtgatgtgatcac

SEQ ID NO: 23733 - DNA, 1048 bp, Homo sapiens
tcttccgcctcccttgttcaagtgatttatctgcctcagcctcctgagtagctgggattacaggcatctgccaccagacctggctaacttttgtatttttattttcattatttattttatttatttatttattttagatgtaatcttgctctgttgctcagcctggagtgcagtggcttgatctcagctcactgcagccttaacctcctgggttcaagctattctcctgcctcagcctcctgagtatctgggattacagtcacctgccatcatgcccagctaatttttgcatttttagtagagacggggtttcaccatgttggccaggctggtctcgaactccaggctggtcttgaactcctgacctcaagtgagccaccgcgccccgcctgactgatagactattagatcatttcagtataagcatttctaaccctctgcgtctacctgttaaaacactcataacatttgtctaatgtttgtcttttgtactatacttttcatctgtagactatcttggcttttctgcttatactcttcttaattctttcagtgtgttttcctttttcttttttcctgagcaattgtttacctgaaggcttactttttggccttcagaactattttttttctgtctttctgtttttccttcattgtgtctgtaaccctgactttggccatttactctctaaaagtgacacttcaaactgttgtcagctgttagctttctcttgagttgtattactgacattttttacatagataccctgtcatcatctccttaaaggagattttcctcaaatcaagttttctagctttctatttacttaattttacttgattttaaaccatttttctctgtcttagaatcttcaagtattatgtatctcatccttcatccagcacccctggtcagtactaggtcctgtcagtattacttcatgaggggactgtcctctccccaacccatgatttctgttgagttcccacagctttgtctgtttgtccagcttccttgtaccaggttctccccctttcagttccttct

SEQ ID NO: 23734 - DNA, 1133 bp, Homo sapiens
tgtttctgtgacagcttggcagcatgggtaggatctactggtgggttactgaggtcttttcagcaacatcggttactttgaggttaaggattcttgtcagttttgcttacctactatatcaagtgcctgtaacagtagcttgcataaggaggggctcagtaaatatttgtaggcttaatgctttgggctttgttgaaattcagttcctgcctcaaatgatgttgtgctagagggtttgcagttctaacattagtccttttctcctgcatagcgtcacactgctcagctccgcgaagagttgctgaaacttccctgccctgaaggcttggatcctgacactgacgatgccccagaggtgtgcagagccacaacaggtgctgaggagactctaatgcatgatcaggttaaacccagcagcagcaaagaactccccagtgacttccagttatgagctgcattgatgtggacttcatagacacaaaggcttcgaagcacaagccaaatatgtcaatatttgtatgtaagaaactaattatgtaataggtaatgaaactgaaactatactatgcccttaaggagatccagtttaattcaaggtgatcttttatttacctgtacaggagtgtaaacttttttgtgcttttatttttcaattgtgagaaccactgattggtatgttcaacaaatttgtgtatacaaagaaatggataaatcactgctatataagggaaactaccttaggaaagaatgtttactgaatgtttattttattttattttttttttactatagagtgaggggttgttaacaaagaatatatattggtcattcttacaactactatttaaagtcagcaacttttcactgaatttgatagattttatgtttggccatatcttcatgctcacatttgatttctgaagacctcctacatacacttcaataaaagttaaatggacatactccctcttttttgatttactggtacatttttaaaataataaatctgccataaaatgcattatatctggagacttgcacttgtatggatgaatttattacattcaacatatttaattttatgccttctaattctaagatgcagaaaaaaataaatgaacatgattttattc

SEQ ID NO: 23735 - DNA, 1060 bp, Homo sapiens
catgttgaaaggaagctccatcctgctttctctttcctcttcaaactctgcccagtttctagcagccatccaagcctcctttctctcagcttctagcctcctgatgcttcaagctctaaaggggctgacgtgaaccctgtgagcctatacatttcctgtatagaagaggcattctctggccttctttctcccttagttcctggatgtgatctcgtagtgctcccatgagctccaccaaaagtctgctttccattgcttccttcatgtgtgtccctcttcaggttgcactagctgttttcctgtgcaggaagagactgcagcccaccaccattttaattgttttcagttttattcacgtctcacttctccagggagggaatacccagtccaattatgtcagctgcaggctgccctgggccgctgggagacctacggcctcaggttagacacttctgcctgctggggtccccaggatactgcccctccccacctccctgtactcctctgggtcaaaaggtagacaggcatttccctcgttcttattcctaccacttctgttccttgctgttgctttcccccagcctttctataggttttgttctttggtttattccttccctttttcaccttgctgtctgcaaagtcagcaaatgcagccatagagtgccttccagctctggagcttttctcatctttagaggaaccagctagagctcctctgtgccgcctttctgggagctgctatttttgttattgcccttcttgccagataagtatgagatttcccaagcctggccaattttcaaatatttgtcctgttgggtttttttttttcttctctttttataagactttgtcagaattttttgatataaattcacaaatgagaaaaaatattttttcaagcccaaatcactcatatgttagttttggtttaaaaaaaaaaaaaatcttccccctggttgtctccataccccaaaggtagcagttacttcctgaagcaaggcaaatacttcctttgacccaaagggcaaagttaatctcccaaaggagtttagca

SEQ ID NO: 23736 - DNA, 1092 bp, Homo sapiens
ggccaaggctggcggatcacctgaggtcaggagttcgacaccagtctggccaacatggcgacaccctgtctctagtaaaaatacaaaaattagccaggcatctctgggcatggtggttcacgcctgtaatcctagcacttttgggaggtcgaggcaggtggatcacctgaggtcaggagtttgagaccaaactggccaacacagtgaaaccccgtttctattaaaaatacaaaagttagccgggtgtaatggcgggtgcctgtaatctcagctacttggaaggctgaggcaggagaattgcttgaacccaggaggcagagtttgcagtgaatcgagatcgttccactgcacaccagcctgagcaacacagcgagactctgtttcaaaaaaaaaaaaaaaaaaaaaattagccaggcatggtggtgcatgcctgtaatcctagctactcaagaggctgaggcaggaatattgcttgaacatggaaggtggaggttgcagtgagccaagatcgcgcaccgcactccagccgaggcgacagagtgagactctgtctccaaaaaaaaaaaaagtatgttaagcatcatttgaaaaataatatatatactgtcaacaacttaggagaattaataaatatgtggaatactagttgtagatgtcattcttgtagggttgcagaggcaagttaccttaatttcttggcagctgtaaacaacttttgacttctgcttaaaaacctgttttcctgtagtatattactatgtatacctcattttgtgctgaaattttgcctttttctttttcttttttttgagatgggagacagggtctcactgtgttgcccaggctgatcttgaactcctggcctcaagtgatcctcccacctcagcctcctgagtagctggaacttcaggagcacaccatcctgcctggcttctcttgccattcaactgaagcattattctttctattatagatttttcctgtgggtctttactatatcattcttttttccctccctccctccctccctcctttccttcgttccttcctttcttcttttcttccttcctttctgctttttttttttttttt

SEQ ID NO: 23737 - DNA, 1021 bp, Homo sapiens
atgacttcttcagaattacagagtggcaattaggatgtgaatctaagttttactgaccccaaattctgagttcttctttatgttacttaagaaaatgttattttggcaagttcataattgtcatctcatcaggaaattaaactatgccaaataaatgtattcccaggcattatgtcagctgaactatagctatattgaggtaaactttacatttaagagaggactaaaaatccagaaaatgctcatcttttctggatacttgtttttcccaaaggaagatctcagtggaatttcaatatatagagcagataaaagcacagaattgatttcaccggcagtttaactcttcattgtttggtagaaaccacttgcttattttctgaatcttagtgcatctgatgcagtttataaacctgtggttagaatagtaatgaatttatgatttgcatgtactaagttactgtggggtttttaaatagtgattttcttatattggctgatctctgtctgatccctgtggtcgctaacccccatgaagaggtgacttagacattgtgttaggctgggttggtttggaaaggagacttagagaaggtgaattcttttttttttgttttgtttttttgagacggagtttcactcttgttggccaggctagagtacaatggtgcaatcttgactcactgcaacctccgactcccaggttcaagcgattttcttgcctcagcctcctgagtagctgggattacaggcgcccaccaccatgctcatctaatttttgtatttttagtagagacagggtttcaccatgttggccaagctggtctcgaactcctgatctcaggtgatctacccgcctcagcctcccaaagtgctgggattacagctgtgagccactgtgcctagcctgagaaggtgaattcttatacattgtagattggtacaacagtggggatagcttcaggctccttccctagactcttgctgttcactggcctcctgcttgagttggatttttacc

SEQ ID NO: 23738 - DNA, 1081 bp, Homo sapiens
tatattttataagacagtgttttcttttcattctgtttttttttttttttggagatggattcttgctctgttgcccaggctggagtgcagtggcacgatcttggctcactgcaacctctgcgtcctgggttcaagcagttctctgcctcagtctcctgagtagctgggattataggcacttggcaccatgcccagctaatttttgtagttttagtagagacggggtttcaccatcttggccaggctggtcttgaactcctaacctcgtgatccacctgccttggcctccataagtgctggcattatacgcattagccactgcgcctagcctcttttcattcttaatatatgaaatatttatatacatttatatgccctttaaaatttgttaaattaatatatggaatatttggaattacattccatatatatatccacttatatatattccatatatattattattatatgtggaatgtttcatatattaagaatatttaatattccatttggaatagtctaataataaaaagaactctggtgaaaagttaactgttatgctgaatctaatgtttgtcattttcttgccttttaaaaaaaattttaatttcatgttttgtatgcttgtaagtcagttgcttaaatttgcttgtttttgagctttataaaagtggtatcttataataaatatatagtcctctgtgatttgcttgttttctctcattattgtattcctgtgatgcatgttgttatatgtagctgcaatttactttgcagtatagcattctgttggatgaatatacaacaatttgtcgttttccttttgggcatggattgtttccagatttttcctattatacacaatattgctatggatatttatgtatctcattcttgatatatctgttcaagaattcctctggtctctctatctaggatggaagtactgagtcgaggatatgtgaatgttcacaaagaatagtgccaaactgttttcttctttttttttgagatggagtcttgctctgtcactcaggctggagtgcaatggcgcaatcttggctcactgcaacctccgcct

SEQ ID NO: 23739 - DNA, 1058 bp, Homo sapiens
ataccctataaagaggcttgttttctaaagtaaaggtatgtattgaattattacaaacttctaaatagtacagattgtagaatttatacatttattacaataagcagacccctaaaaaggcagattaggtacacctgcaagtgaaacaggaatctctttttacaccaagaagtattaattatttttacttgatttttctagcgccaacttgcaagtttgctctttgagttgggatgtaccagttcagcccttcagatatttgaaaagctagaaatgtgggaagatgttgtcatttgttatgaaagagccgggcagcacggaaaggtatgtaatagtccaatttgatgtactggtgagagccttccctctgggagcatcttctcacttgttttgtttttcaaacccacttttgccaatattcacttatattccttttttcactttttttccagaaaacttttaaatgttttctctgatttccactggggcagatttttacaaaatttttaagaaagactaacaagagctttgaagacgtgggattttgatttctttcctttactcaccttctcccttaggatgacttcaaagcgaaatatttggaatcattttaatgatcactgggttgcctgatgatcagatgctgtgggcctcaatggaggttccctaggagagagggtgagagcagctgggttggtctttaaaagaaaatccaaagggtgtgacgacacctcttgaggcagaagagttgtcaagtgtgtaatgcacatttaattctacccttaaattgggccaggagggaaaatgttgcaatatttgcatctgttatttgtctgttgtttttttcccctcatacatgaacagaattttaagaagaataaggggctctgcattgttagtcactttaaaaactgacacattgaaatcatatgttaaattttggattaaaaatttaaaagacttaagttgagtacataagcaagcagagtaaagcccacaaattggatcatttatacctacagtcaaccttttgccatcaccctaaaaaagagcaatag

SEQ ID NO: 23740 - DNA, 1066 bp, Homo sapiens
agaataattaattttaattctgtaatagattatggaaatgtacaaaattataattgtacagcttgattaattctcctttattattttttaatgttcacataatcagcattaaaatttttttactttaatgtagttttatttttcaataattttgtttttgaaaataatttttgaatagaatcatcttataagtccccagatggagtaaaaccaatttattgatcaacagtttgttggttgataaatatgtttatttaaaccgtgtaatttaaattattttctttagtgctctggttcactttcaaaagtgttgcagtttgtacattacattatgtggttgcctaactaagcattatcaagtacttgtatatcagatatggatgtggttatgaattgtgctatgtcaacctatcaacagagaacagagagtttctgccaggaaatgataatggacagaactagtttccaaagggccttaaatgccctgtatcaagattacctaaccctgtagatgtgggagcctattgtggttttgaattaaaaagtgatatgacaaaagtggtattatgggaagtttaaataaggaatgaatatcatgggtgagttatcagtggcttgagtggtaagcatggaaaacatagaatgactgaagcctcattacagaggaaattttctgggacttacacattgggctggcagtattgagggagacgttggaatcagagaggaggccagttttctcaattttctgattaaaaaggaaaatgtctctattgatagccatagggatttaggaggaagggaaaatatcttttgccagcaaggtgatgtggttttggatgttgaatatgaggagatggtgctgtattgtagcagagattgttgctagtccattggagataaaagccctagtgaagcccaacagtgaggcctgagcatgcagatggggcttttctgtggaagttacttgaaaccatgaaagtgagttcttcacagaaaactgtgttggaagagaataacaggcaatgtcctgagctttgggcatctcctgaagttggaagaagat

SEQ ID NO: 23741 - DNA, 1045 bp, Homo sapiens
acacccactaggatggctactagaaaaaaaattaaaaaaaaaaaaatagaaaataggccaggcgcggtggctcacacctgtaatcccagcactttgggaggccaaggcgggcagatcatgaggtcaggagattgagaccatcctggctaacacagtaaaaccccatctctactaaaaatacaaaaaaatgaatggtggcgggcgcctgtagtcccagctatttgggagactgaggcaggagaatggagtggacccaggaggtggagcttgcagtgagccaagatggcgccactgcactccagcctgggcgacagagcgcgactccatctcaaaaaaaagaaagaaagaaaatggctgggcgcggtggctcacgcctgtaatcccagaactttgggaggccgaggcgggcggatcacgaggtcaggagatcgagaccatcctggctaacacggtgaagccctgtctctactaaaaatacaacaaaaattagccaggcgtggtggtgggcgcctgtggtcctagctactcgggaggctgaggcaggagaatggcatgaacccgggaggtggagcttaccgtgagccaagattgcaccactgcactccagcctgggcaacagagcgagactccagctcaaaaaaaaaaataataataataataataataataagtgttgacaaggacatggagaaattggaatccttgtgcgctgttggtgggaatgtaaaacagtacagctgctgtggaaaacagtatggtagttcctttaaaaatcgaaaatggaattaccatatggtccagcacttttacttctgggtatataccccaaagaatttaaagcaggatctcaaagagaaatgtgtatacttacattcatagcagcattattcacatagctaaaacctggaagcaacccaaatttccatctatggatgaatggatacacaaaatgtggtatgtacatacaatggaatattagtcttaaaaaggaaggaaattgtgacacatgctacaaaatggatgaacctggaggaggtttatgtta

SEQ ID NO: 23742 - DNA, 1085 bp, Homo sapiens
aaaattctatagcctaatgttacagtgaaaaaggaagataaaacagtttacataatattatattataaaacttacacataataaaaagattagaaagaaatttactctgttagtaatgtttgtgattggccgatggacccaataagcataatgttacagtgaaaaaggagataaaacagtttatatagtattataatataaaacttacatataataaaaagattagaaagaaatttattctaatgttagtagtgtttgtgattggccgatgaacccaataagaattttcttttttaaattttgtattagctctgacatgggggaaattctaattttaaaaaaaaattacaaaaacaaaacccattctggttctggttgattcgagatttagcaaagaaatgataaaagttactagcatacatatttcataaaagagaaacctttccaatgtaaaagaacttaatagaaaggaagaaagaggagaggggagctgtgctttgtaaattgatgtagcaaatgcttgataacaggatccaggactcagactgaattcagattcaagcctgaagcctgctttccctcggtatgacctgggagaggttcttcagctcctctgtgctccagtttgttcatctgcacaatgcacataaaaatagcatcatcctcatagggttgctgggtgggttacatgtgctcacagagcatgtggcacataggaagggctatatatgtaagaggtgttatctgcctcattgttttcatctcctcatccttatctaagctcaggagtcacaggtcactggtgatcagaatccagcttcatgactcacttgctgtgtaaccatgagaaagtttgttttacctctttaagcctcaggttttttatttgtaaagtaggggtaataaagtacctgcttcctagggttattgtgagaatttaatgaaatcgggtaggtcacgtgcttagcacagggtttggcacaaagcgagtgctcacagcagaagtagtagggaggtatcaagagctgacaccatggtggtgaattctgtttgagttctgttttgaaccatgaggaaacatggaa

SEQ ID NO: 23743 - DNA, 1032 bp, Homo sapiens
tcttgctacactaggagtgatccactcacctatattcctcctcctttaggtgacagaagtcctacatcttgattatcctgtattggtgaactggaaaggaaccttgggtaatcacacacagatgtataataaccaacaggttgttaggctctaaatgtcttcctagctggactgcattctcattagttattatttaaaataatataaaataagtaacagtatgacacaaaaattgcatatgtatttgatactattaataaagcagtttttgtttcagacttatattcatttaatttagctattaaggtctaaagttgctaggaaagtttttgtgatttgctttgtgaagtagtgtagtaacatgctgcttgataaaaataatggtaattgcctttcacagaatcagaaatgcttttcatacctagtgaggaaatgctatacttcttttaaaaaacttacatatccatatcagctttatgttcagattaatttaggatgttcataaaaaacaaggatttgatcaagctcagctttatgttcaaataatttaggatgttcatgaaaaacaaggatttgatcaagctccattaggaagtctttgacaagaaaccaaaagaaatgattgggactttcaatttcacatgtatttgttgaatatttactgtgtgccaggcagtgtgctagcagccaaactaaatagtctttagtttcaatgaataattgataactggaatgtttcttccatcatttctagtgtaagtggttttttttttcatttttagtagagagctatattttcataggacaaaacatgtaatactgtcccctctgttgatattaagtcagatattttatctgttcagtcaaagcccagttctggtgttaatgggcctggatttaattaattaaaggattaacttactgtatcattacctgtgtgcaccaggcacccttctgaattgcagacagcatgtaggaagatctaactaaactttaaccttacaagtacaaaccacttctaggtgttctcag

SEQ ID NO: 23744 - DNA, 1039 bp, Homo sapiens
caattaaattaaattgagggagtgaatggaattaaacatttttttttaccctgtatttctttttcaggaatctgagttggaatttgataaccatcagtttattataacagggtcagtactggagtgataatgggttcggaaaggcaggttctgggcaagggaaagctgataatggttgcttacggttgaggttttagatgacgaagcttggttttgtgtgtgatttagattgggactgcaccaaaatgaggaaggagagtaggtgtaaaatctcgggagtgcaggggaggaatcaaggagcagccagaaaagagagatcgaatgggaccggttttggaatctgggagtggttggggaaggctaggtagagtagggcatggaggcccatagagatttcattccttggtatggaagaaaaatgagcaagagttacttgaagggtaagcagtggtttgagatcctgggtcttgattatgggaggcagtaatcagtagttagtgagatcctgaaagcaggagagggctgctcagagagaattcacagggcatccaactgtgagtgtagacccagatgcttggagcagtgggtatgagaaactcaagctcctgagagcgctgtctgccaacacacatgacgattagcagacccttcctggtggttaaggagctcacaggtcagtggaagacatacctgcattctgcgcatatgtgtacatgcatagaataatatttctttgtaataaaggtaatgagaggagctttgcagcaggtgatctgggagttccaagaagagggatgtgccttttcctactccacagaacctaaactcatttcaaagcccttggtaaacacgttcatctactgcctcctcaaccacatatgtcactgctctccaatccacgcctcactgtctcttccctcttcctgctccttttctgctccacactttgtgttcctgcctgtcatatcctcccttgaatggtaatgtcaggtattttgcatgcattacttgtgacaggagacattcagatgattgaact

SEQ ID NO: 23745 - DNA, 1049 bp, Homo sapiens
cacatagcccaccgagtagagtcttgtgttgctcactgtcttgtctgggtcaggcctctttattatttgtttatttattttttctagctagatggctatctaaagatacagactgtgtcttttctttttctttctttttttttcttttttgagacggagtctcgctgtgtcgcccaggctggagtgcagtggcatgatctcggctcactgcaacctccgccgcctgggttcaagcgattcttctgcctcagcctcccaagtagctgggactacaggtgcccgccaccatgcccagctaatttttgtatttcagtagagatagggtttcaccatattggccaggctgttctcgaactcctgaccttgtgatccacctgcctctgcatcccaaagtgctgggattataggcgtgagccaccgtgcctggcccagactgtgtcttttctgtattcccagtgcctaatctggaatggagcacatgataaatagcattcattcctttatttattctgcaaactcttaatgaacacctgctatgtgtcaacctttgtattagggcataaacagataaataaggcaggatagtcacccttaaataacccacagtttactggaagtctcagtctctccctctgtctctctcttgctcacacacatatataattataatgataaagatatgtaccagatgcatctagttgcatttatttgaagaggtgaggtagctgagagtgataatggtatgtgtatcctttacaggatactaccaaactgtttgctatagtgactataccattttgtttccttaccagccgtgtatgaaagttttagttgctccacatcctcatcagcacttagtattgtcagttttttctttgtgccattctaataggtgtatagtcgtagctcattgggcttttaatgtgaatttttctagtgatcaatcttttcacatgcttttgagtatctttgcatatgcgtacttgccatccatagatcttctttggtgaagtggacctttagcccatgtttttaattgtgctatttat

SEQ ID NO: 23746 - DNA, 1037 bp, Homo sapiens
agaccatgaagtccagaggagggtggtggagggagagagtgtttcaggctagaatggccggttttagctgtggatggaaaggtagtatttgatggaccaagaggagaggaaatctgtaagcaattgctcagaggaggaggaagtagaagaaggaatttggctgagcatgttttacatgaagtattcctattaggggagtagccataagtgagggtgagaatgcaacacaggtgaaataacattttgggaaatttatctggtggtggaggaccaggcggtggaggaccaggcatagagaagggaagagactaaaatgagagacggtgtttaaatagttaatgcaatcacatagtcatgaagagggagggcttaagcaaaaaggaagggatagctaggagagcccttgtagagggtggagaaggcaggctgtgccctattcaaggaaagggaggcagtgggtcaggtgattccactgactcttagactctatattcacagtatagatttctgttcgttttttttttttcttcaaaagcctttaaaaatgttcaaaaggaaagcatttagaccttttatgaaatagagttgttaaaggaaaaagtatttttttttttaattatactttaagttctgggatacatgtgcagaacatggcaggtatacacatgccatggtggtttgctgcacccatcaacctgtcatctacattaggtatttctcctaatgctatccctcccctagccccctacccactgacaggccctggtgtgtgatgttcccctccctgtgtccatgtgttctcattgttcaactcccacttacgagtgagaacatgtggtgtttggttttctgttcctgtgttagtttgctgagaatgatggtttctagcttcagccatgtccctgcaaaggacatgaactcatccttttttatggctgcatagcattccatggtgtatatgtgccacattttctttatccagtctatcattgatgagcatttgggttgattccaagtccttgctattgtgaacagtg

SEQ ID NO: 23747 - DNA, 1044 bp, Homo sapiens
ctgggtaagagataaagaactttattactcatggcatagcaggcagcatgagcttcatgttcagattgggtctccacactccctaagcttcatggggtaatgcagagtagcccaggtcgatgttactcgtgtagtaggtttgtgtcgcagttgaggaaccctgagcttaggaaataccattctttaaaaggggctgctagccaactttgcctaatctttgtgccagatggagatgttattttcatttccctggatagcaaacaaatctttcctttgccacagaaggagatactatctgttttccaagactgtgtactatataaacattcttgaaaagacaggccagaagaaaagctgataaagatatgcagaaacacagaaggcacatgggtaattttttcccaacttgtattgttgggattttcttcttagtcatgtcatgtcaaatacagttagtattgtgtctttccagtatttatgcttctccccttttgctatattttactagccaggactgctagtgtaatgtagaacaggagtggtgacagtggtcatctttgccttttgttctaggttttagggtgaaagtatgttattttaccaatcagtataatacattaacaaaataatcattgtagaaacggggtctaaaatgaggaaattatcttatattactcatttgctgagtgtttccttttatcatgaaggcttgttgtatttgccagatgcattttctgtatgtagtgtgatcatcaataaaaatacgattattttttattcctttattctgtcagtatggttagttaaatcaattaagttttaaatgttaaaccaaccttgcattactaggataaattccacttgaggtgaggcatggtggttatacctgtaatcccagctttggaaggctgaggcaggaagatcacttgaggccattagtttgagaccatcctgggtaacacaatgagactccatctctacaaaaaataaaaatattagctgggtgtggtggtgcacgcctgtagcccaagctactcaggaggc

SEQ ID NO: 23748 - DNA, 1060 bp, Homo sapiens
cttgctggtacagttgggtttaaaaggattaccttgttgagtcagttttccctccccttggctagcagttggggcagaatgtggaaatacagatttgcagtaatgcatgacctgagaggatgctgcttgagtcaggcttggcttccatagtgtgcacagacttcttcatgccccatgctgctctaattgtacttaagaaccatctaggaatgctatgcctctgggtagcagcacttttgtggagcctccctgtccatgtccagaaagctgtatgaatggaggtttgcctggtacttaatgtgtgtctacgtgtgtgtatgtatgtgtgtgcatgcaatgtatgtttgcatgactctcattggtggtcgtggggagtgtgtcatctcctcccatggacacttcctatatttctggtagcctctggtcctgtggggctgtaagtagttaattgttcctagttctctctggtctatgagcagcttaagcatagatattgtgttaatactagtagtaacagagaccctttgagttctggtctctctctgttttaatgatgaagcaactaagccaaagatgggtaaatagtgcctgaggatactcagcccatgagtagaagagctgaggttcctacgtaaggcggtccaaggtcaacatctgtactctcttcactattctctgttctctcttttatctttgtatccttggcacatggtagttaatcagtaagtcttagctgaataaatgctgcttatgaacacttctaggtggaaattaagcattgcttttaccagagtataatgctgaattgtaatatactcaaggatggtggcaagaatcccctgtacttggtgccgaatcctctgactaatcgcccgaaggaagttctgtgttctcagagcatctgtcctatttgtgtctcttgggtctggatttcccagtctttagtccagtttcataatctgcctcctgagctcttccagggaaactttctgagcttttcttggtgctgtttggagttccactttcagagtgaattttcattctgatgttccctgattgg

SEQ ID NO: 23749 - DNA, 1044 bp, Homo sapiens
acctgtctgtcattggctcttcattcatatctgttgtaatagtttggtgatagtagcccacgtttagagcgctagttttcaaccatggaactattgatatattgggccaggtactttttctgttggggtggggggctgttctgtgcattataggatacttagtgtcatccctggctttttcccagtagatgccaggctgccatctccaagtcttgacacttaaaaatgtctccagacattgccaagtgtccctgagaagcaaatacagcccctggttaagaaccactggtaaaggaagatttggaattacttggttgtgttgatcatgtttcttaatgaccattactaaaaatcgcttattttctatattttttccctcaaatatctaccttctttcattttaatttctcaatcccttttgtctctttcatctcatttagtcgaagacaatttttattggtctttctcttatattttcatttctcccattttcctgactttgtgtttgctcctttcattttacttttgctgtgtttttctggcatactctggttttcccatattctttactggcagtctgtatatgctgtttgtatgcactgtccgtatgcacagtctgtatgctgaatgcacagtctatatgttgtatgcactgtctgtaagctgtacgcattgtctgtatgcagtctgtatgctgtatgcactgtctgtatgcacaatctgtaatgctctgtatgcactgtctgtatgctgtatgcactgtgtatgcacagtctgtatgctgtattcattgtcggcatagtctgtatgctgtatgcactgtctgtatgcacagtctctatgttgtatacacagtctgtatgctgtatgcattgtctgtatgcatagtctgtatgttgtatgcactgtctgtatgcataatctgtatgctgtatgcactgtttgtatgcagattctctatgctgtgtgcactgtctgtatgcacaatctctatgttgtatacacagtctgtatgcatagtctgtatgctgtatgcactgtctg

SEQ ID NO: 23750 - DNA, 1045 bp, Homo sapiens
agactgtggttttgatttgttttctgtgatttgttattggaatgaaaattcccactgtgtgtgtatttccaccctcgtgtgtatatatgtattttaaactctcaaatcttggttgaactgtgttctgaaagatgaaattatatcttagaagaatgtgaagataagtttcttatctgttctgtccatatctttcccgctcatcctgtttaaatatattttctacatagtaaggagctagtaaaagaatgtagactaatatacattatcacagtggtggtgttctctgctcaaaccccctaaaagatggctgttgttcagaaagaagctcaggaattaactgaaagagttacgcatgtaggaaagacaagaagggagatgtggctatttttgctgaggccagagctctactgagagctggagggctagttggaaagtttttaaaagagataatttggcaggaccatgaaggatactgaaatggcaaaatggagtaagaaccacaaaagatgattaaaactggaaaggaggtacaggtagtaggagggacctaaacatactgtctctgcatactcctgttctgtggtaggtaaaagaggaggctccaaagaagccttacatggaacagaaaggaaggaacagttagtcagagaagtctgaggaaaagcagaagcttttatagcatcttcatttttatatttacagaagagatcaaatgcaaacattaattttttattgtgctgaaagatttgaaggtcaaacagaagctgatagctctgattctttagaaaaatagaagatactaagatcatttgagcatgatgtatcttggagtgaaattgaagaagtgaggtatgtcattgtagtccactgccattacttttgagaagctatgggaactagagaagcggttgaaaactagaggttggcaataacaagtgttatcttctccctttaaaagtgattaaaaagggggtctacagtaatgaccagttggtatgtttaatattgatatattacaagagcaataataataatgcataccttg

SEQ ID NO: 23751 - DNA, 1073 bp, Homo sapiens
aaatacgtacatgtatatatgtatgatggctgtgtgtatatatacacacatatattcaatcaagtatatatgtgtgtatttttttaacttttaggtttaggggtacatgtgaaagtttgttacataggtaaacacgtgtcacggggtttcgttgtacagattatttcatcacccaggtattaagcccagtaccgtagttatcttttctgcccttctccctccttttaccctcccacttaaagtagaccccagggtctgttgttcccttctttgtgttcataagttcttatcatttagctcccacttacaagtgtgagaacatgtggtattcggttttctgttcctgcatagtttgctaaggataatagcctccagctccatatatgtttctgcagaagacatgatctcattcttttttatggctgcatagtatttcatggcatatatgtaccatattttctttatccagtctgttattgatgagcatttagggtgattccatgtctttgctatcgtgaatagtgctgcaatgaacattcattcacgtgcatgtgtctttaaggtagaacgatttatattcctctgggtatatatccagtaatgggattgctgggttgaatggtagttctgcttttagctctttgaggaattgccaaactgctttccacaatgattgaactaatttatactcccaccagcagtgttgtatgtgtattttttaaagtaatttttttcgcaattaaacatcatctttattaagcaaagtactatgctattaaaagactacaaaacttcattagtacgtggttgactactcagacttacatgcagtttcttaatatttagcatggtatgcaagtcaggaaaaataattcccaaatctctccctgagtaaatataattcgcatggagctaactttggtgattatcatcgttatttctcattagatccactttctgaccacttaaatacattttcctttagttctgttggaaaactttctaattagtctgattttcttcagtggaaataaattttgtaaagtcttttttttttttttttttttttttag

SEQ ID NO: 23752 - DNA, 1053 bp, Homo sapiens
tacaaaaattagctgggcgtggtgcaggtgcctgtagtcccagctgctcgggaggctgaggcaggagaatcagttgaacccgggaggtggaggttgcagtgagccgagatggtgctactgcactccagcctgggcaacagagcaagactccgtctcaaaaaaaaaaaaaaaattactccaaactgtagtgatttaaagccacaaacattaccttagagtttctgtggttcaggaatttagagggacctcagttggttggttctggctcagtttctttcatgaaattgcaaccagggtatcagtaagagctgcagttatctgaaggcttgactgggcctagaagatactttcaaggtggttcactcatgtgactgttggcaggagatttcagttctttgccccatgagtgagtgtctccttagactgcttgagtattcccgtagcatgggagttggcttccccgagagtgagtgatccaacagagacagaccacgacagaagccacagtgtcttttatgatgtagtctctgaagttgcaaagcatcattccatttttttctgttatttatttattttttagaaacagggtcttgctatattgccagggttagtctcgatctcctgaactcaagcaatcctccccctcagcctcccaaagtgcagggattacaggcattagccaccatatctggtttgttcttagacaagattcacaaaaaccagcccatgtccaaggggagattagacttttagatttcacctcttaaagatagaagtatcagggaatttgtggacatattttaaaaccatcacagtgttcaacagaaggggcactcttttgatgagagtcaaaggaaatgaggaagctgaaaatgggcaacctaaaaagaattagctgacagctggaaaacttagagtgtacaactatacatcagtaatttttttattggcaactaattgtttttcaattttatttatcacataatattggagcatagctagctatatatgatgattttgggaaaaggatattgaggctgaaatctttcctaa

SEQ ID NO: 23753 - DNA, 1042 bp, Homo sapiens
cacaccctgaagagtgtacacgtgacttgtgtattgaatcagcctgtaggtctctttaaaccgggtggtggctttaaaccacagagaggttgcttcttcccagaggatattgcctgtgctggttggtccccattgtttaagttggatgcacgctaatgtgctgttgcggcattctggacgaatgctgaggagactgtatttgttcatgacatctgatgtgagtcttgaacttgttacatttatttctctgcttttggtcacatcttggtctgatgaccaaacaaggcaactgtgcccttttctagactgatgtctgtttgtcaagcacagttttcacatttttatatttttctctattgttaacaaccccgaagcagaaatgaaagctttttatcacgggaggaggggtatcggcttcacttccatcccattcaccattcactctgaatatctgtggtttgttttaaaccgagtgccagtgcctcttcttggaggtataaatttgcacagggtctggcagacgctgcagacaggatgttgactcttgagtgtcttgactgactaggaggcccaatggcggtgctgcatggctccaggcaatctgtgcctctagccaaggcctccaaaacccaaagttttaaagtgcttgcttaagattttgggggctgattcacctaaagggatctaaaaattgcattttttttcctccaaaggaccaagcacagaagttgtgccagtggtttccctgttaactcctgactggcctgatttttgcttctcagacttataattcctaatcacctggtaggtgccactcgggatggtcttctgcctctggttagtcctgagcttgttttctcactggtgcagcaggaccttagaccaaaatgacctccagcatcctgtgagtcttggatctctgtgggatccgacagtcacccttgccccatgcttcgggttactttgtctattccacaattattgggtgcctactctctgcaaggcatcaggagtccttgaatattaccttattcaagacatg

SEQ ID NO: 23754 - DNA, 1033 bp, Homo sapiens
ctttatagcagaatgcttgtaaaacacaagcatttttatttttatatgaaataaaatatagcttctgcttccaagaagatgtgaacattgtaaaaatcagaattaagtcatatgaaactgtctctgccttttgaaaatccagatgattccaagccaaaagaaatttttttttggcaaagaaatataagaagtttttaataacaataggcccggagaatctccagtgcttataaagtgactactgtagctgggaggtgaaatgggaataatgattaagtgcttgctttctttggatgtctcagtttgcctaagtgagcataatttaggtgactgtgtgagcatctgtgtggcagctgctggtgctacaagttaatgccagagaagacaaaatagttggcacacggattctaatttcatgattgtaccaggagccagaaaaaggaggagtttatattcttttgaagtgggaaaatgttgtctctttttttcttgggtttcacacacttgaacacacaaagtatcctcaagatatttgtaagcattttccgacaacttagattataagctgatttgtttgtgctactgtgaaaaagcaaatcaaactaggtgaattttctctgctggtgaaatcaggattctgttgttttttttgaatttctaaggtagactcccagataactttaaaatgtcctgtaagcatttaaaggaggggttactgaagtgtttaagtaaagtttgattggaacacagccatgcccactcatttacatattgtttttgacaggctgctttccagctaagcgggtccacagagttgaataggaatagagtccttttcgcctacaatcctaatatagttacaatttggccctttgtagaaaaagtttgctagccctcgatttaaagtattgactgatagtagcatcctattggatgtcattttgcaaggtgccagaaggtctgcttggccactaggacatcttgccatttcagacaacatgtcttgatcctccagggttagaaccaccggtga

SEQ ID NO: 23755 - DNA, 1046 bp, Homo sapiens
caggctggagtgcagtggcgcaatctctgctcactgccacctctgcctcccgggctcaagcaatttttctacctcagccgctcgagctgggatcataggcacccgccaccacacctggctaatttctgtatttttggtagagatggggtttcaccgagttggccaggctggtcttgaactcctgacctcaagtggtccgcccacgtcggcctcccaaagtgctaggataacaggtatgagccaccgcgcctggcctcaaatttaaatagaatattcaatccagagaaagaattcaactttaaaaataacgattatggacaatttccatttctgtagccacgaagagaaaatttattaggggcttgaggagacttgccccttttaattgttggtggatgaatcgcaaaacttgaatttaatggaatccaagtgccttggactgcttttgagcaggtcattcatgtggttagagcaacgctgcttccaagggaatgttttgattgattgtgtcagcgtccttgggtggcccttccaggagcttgaatgcctgtgtaagtttggtttcctctggctagcttctaagctcctgcagatgaggtaccacatcttctttctattttgttcttctaataatgactagtgtaataaattaatcagtatggaaattcagcacaggtaggttgacctactatagaaagaggctttttcagctctgttgagagtcactagatattatagacaagtactatcaactaggtatttgggcctcgtgattagttgcagttatttctgcctcattattactggtcattgtggttcttaactcagggatagaaggtagattttattttatgtacccactctatctgttgctgaccagcacagtatgctgagaattcggagatgacatctaggcccagcaagaactatgataggttaataatttttgttagaggagaggagagtgcagcacctaccctataggtgctgctgtcatggttgttgccagcagtccagcagttatctcaatgaagactgggtctttc

SEQ ID NO: 23756 - DNA, 1026 bp, Homo sapiens
ccagaagcctcctgtaggtgggacctgtgccatcttctcacattttacacacatgccatacccttaagagttatgttccctgatggtccacacaagagatttaaacagacagatacaactaaaatctaaaaagcctatattgatcttacacactatgaggctcttattaagaaaaaaaggcattggaaatttaagttttatgaagtactctgagcagtgacagattttcttagactagaaaaacatcaaggtgctcccatttggaaatgtacttgttcatttttgtgttgtattgatttctgtccaggtattttctttccaagttttatagtttttttcctttctaattgtgtcgataacaagggaactggtttatagcgtggctgtgagggacagcagtgctctggggctgggcatcctgcactcaattaaccttcatatttcacacctaatcattgcagtgtggcaaagcgctccctggcctttcaaagcaagaggactgctgtggaactgtgggtacctcctggggctttaacaaatgccagaaatgccccaagaaaccatgtaagtaatgtttcctcactcctttgcaggttaatgtagcatatctgttttttatgattactcctttaatgatgaggcaatattagactttcaaagaactctcctactgaattctagaatgtagtactatgatgtgcatttccagaaaatttgcaagtctgaaaaagttttcatgtcaattattttgtaataagcacagttattaattatcctctttagttggattacttatggggaaaaaaagtcttaagtggtaatgagttaaaatggactttttgtctcaggggaagagaaaataagatctcttttaaaatggtaaataaatgtttcaaaccctgtaaaaagtacagttgttatttcctaggtttaaattccttaaatgagatttttattaatgtccacaacttatgttgtagtttttgttatattatcggttttcaaatttcattaaaaggaaagcta

SEQ ID NO: 23757 - DNA, 1091 bp, Homo sapiens
gtggctggtcatcttagtggggcagagccacatgtgaatgaggcaatagtcctcgttgggggttagttttgccctgttgcagaccaaatatggacccctgggccaagacatttacttacaagatcagactttgggcctcagggaaatggctgaagatatgtgcgtggattagcaccactgggaaaaatttagggctttccatagtagcaccacatcaaaggttcttttttttttttttttttttgtaatttcacacaattatacatgtaaggtcctatgatatttctttgcctttctaagaatataattaattacataaaaatagtaatatgtgggaaactaaaaataatttccactttcaattcttttttttttcttattctcttttaaaatacaaccatccaggaaataccttcattggatcaagagaaaaccaaacttgagcctggtcaaccccagctgtctccaggcatttccactattcatctgcatccacagtttccaggtagcctgtgttgatctgtgctgtttgtcagagtattctgaataaaaatgtaagacgggaaatttttgtctttgactttgtgtagtaaattactagacttcataactgaagttcagtgttaagtatagtaatatacttatataatgttagcataattacagcattgtaaggattgtagtgggaaagataggttttttttttttactgttttctgtgatcaggagtagtatacactattcagacattattgaaggttatcatttgatgaacgatcatttttcttggcttccgcatcactctcagatattcttgctaaatgttgaacccagagccttgggacatagaacagttctttatatctgacaaatgctgtgatatattgctagactaaattatgcttgcattttgaaatgggatctcaatgcacataacgggctttaattttctttttatcctctgcttcctcatatagtagtgattgaaaaaacatcacctcctgtgcctgttgaagtagctcctgaagcttctacgtctagtgccagccaagtgattgctcctactcaagtgacaggttggtgcagtattt

SEQ ID NO: 23758 - DNA, 1024 bp, Homo sapiens
tttgcttttgtgaactctcccatcctattgaattcatcaatttccaaaatagacctcaacccatctttggttctttggaaaatgctttcttgtagagatgttgcactaaatctcccgtctcttccttcctcccccctacaacaagccatctttacttcttgaatttattcacagagcatatttggttccgagttactttcagaaggtaagttaaagtatagaaccgtcatccatttagctcacgacaagctgctttttctcctttgggctaatttgaaagtttatctttaagaatctgcctggtcttctgaaggtctactgtttccatttctaaccaaatttaactttatccatgttttctttttcttctttttttgttctttccattacgcaacattcttcaagatgtggacgagtgcctggaaccaaacgtctgcgcaaatggtgattgttccaaccttgaaggctcctacatgtgttcatgccacaaaggctatacccggactccggaccacaagcactgtagaggtaaatactgtgatcaagtttcccatttttatttaaacttcatttaaatatagattagagcaattagccttagaaaagggaaccctgctacctgtgtttattttgaccgagcgacttagagcacatattggttggcttggctgaaagtggctccttgctgtggttaaatacagagcatatctatttacataaagggaaacgatgtatttttagagagtgtctgtgagccacagatcggttcatctaaatttttttttctcattataaaagcaatacacacagttgcacaactctgtgaatatattaaaaaccattgaattgtacattttaaatggaattgtatagcatgggaattatttctgaataaaattgatatgaaagtaaccaatatacactcattttagaaaatttagcaaatagagaaaaaagaaaagtaacaatcttacataatgtcattaatgaatattcatatttcgtggatattgtatataaagat

SEQ ID NO: 23759 - DNA, 1060 bp, Homo sapiens
tttaagactctattttaaattacagatattaatgaatgtgaacatccagggctctgtggtccgcaaggggagtgcctaaacacagagggttctttccattgtgtctgccagcagggtttctcaatctctgcagatggccgtacgtgtgaaggtaagataaaccatacgaaatcatattgttgtgtgataaaagagagaggagattgctttcacttatacaaagacttgaagacactaagaggtactgcataattcagagcctcaaagcatgtatgcatcaaagtaaaccatatctgaaagcatagctcaggggttgctgggatttacgaagaggataacctaaggttatgatgataaaaacactcacagatggctccacgactggtactgaattaatgagtggaaatgtgcaaggactgataggagacatgtaggagacctaaaggaaaactgtggcaacttccctttcccctgggactctgcttcttttgattgtgcttcatgtagatcgtcttgatcattctgtgtgtaaaaaatgtcttgcggctgggtgcggtggctcacaccagcacttttggaggcccaggcaggtggatcacttgagatcaggagttgaagaccaagcctggccaacatggtgaaacctcatctctactgaatatacaaaaattagccaggtgtggtggtgggtgtctgtgatcccagctacttgggaggctgaggcaggagaaccactgtaacccaggaggcagaggctgccgtgagccgagatggcaccattgcactccagcctgggcgacaagagtaagactccgtctaaaaaagaaaaaaagaatgtcttgcttgatttttctgtatcactgtgaacagatcttctagaattcttcccctaatatccttatttccaaggcagtatatttacttacctaccagtatttattatctcctaaaagctaattaagttgtaagatgttaagataatgctcttggcttcctacttacaacctctgtatgtttgcaagaatacagcactggttattttcataagatttgtgttctt

SEQ ID NO: 23760 - DNA, 1086 bp, Homo sapiens
gaccttacccacaaaatgctgttcttttccttgattggtgtacagaggaaattctgtggtaggaactgcatcttattcttaaaacagaaggtataatgaaaagaatacaatgaaaaatatatatatattataatccatacaggtattctccactttaagacaagcaaacaaaatcaggaagtataaagcatataggttggggtggttagttatattataaagtaattcttcactttactcaataatttatcataggatttctttaaatatcagttttcgctaatacagttcgctaatacatcttattcccacatcatgagctatatcctagacttctgcatttagaaaccaccttagtgattttccagctcaacttttttatttataggtaaagacactgaggcccagagaaacatctgaaatgtcattcttaaggttatatagctaatgaatggcagaattggtccaggaacccaactcaggatcttctcacttcaccatttctaattttagggctgaggacaacaagacatcaaattcttctcaaaattggcttttctcattttgtttttcattattaagataatacacattaatcatagaaaattggcaaatacaaaggtaaatttttaaaaagtctcctgcagtatcaccatccaatatctgtcaccatgttgacctctggactctgaaaggacatccatattcccctgtctcaacagaaccgttttccatttgaccttcagtgcactgaaatcaggccctctgacttttcatctaagtgagccgtcagtgagcttctatatggtaaactccttagtctcatcccagagtcgtcttctgaaacatttgacagtggtttttcatcttttcccccgtctttgccctgtgattgatttcatgacattactgttccctgcatcctcctgcatcttggactagtcttttcctgtctcattctcaggttcttcttctcctgtccattccttaaataataacatcccaggcagttacatgcttagctgtcaaattatttatgttattcccctgggatatttcatctgctttggagtcaaccattactta

SEQ ID NO: 23761 - DNA, 1027 bp, Homo sapiens
attaatgtttcctcgatgactcccctgagccaatgacagcatctgctcccacagtttgccaggacattaaagcaagagctcctctcagctctgtatgatgtatgatggacaggtcttatcaactgcattttaatcaggttctttcttctctgctcctaaggagaagtgttttccgtgttgtggcattgacgtacagaggctctcaccagctcttttcataaattcataagaaaattagtttatagttatgaaataataccttacattttccttgtccagatttgcttctgtcaaaagaggaagatttgctatttgcttagtaagggtgggttgagtcagtgtctctctctgtgtgtgtttattcattttataagaagataagacatttatctgttatgtagtttatgtcatagaaaaagttgtagatataataattctattttagaattatttctaagtggaaataattctagatccaagctgtgctttgaaactatcatttcattttatgagaattttatttctgaaatgacattcatgatctaatattaaatgacttcttgtgaagttatttcgtagcactgaaaaaaggaatcatggaaataaatgatgtaaatatatgcatttcccaaatctatcactgtttgatccaagggccattgtatgggtattgctgtggagtcttgtataatgaaagaatcttagaatgtttatcttagaaattattttaggttagtgtttccctattgatatgctttggctctctgtccccacccaaatctcatgttgaattgtaatccccagtgtagaaagaggtgcctgggaagtgattgaattggtgggtggtgtctaatgcttaagcaccatccccctagtgctgtcctgtgttagagtacttatgagatctggttgtttgaaagtgtgtagcaccttccccttcactctgttttcctctcgctcctgccgtattagacatgccagcttcccctttgccttttgccatgatcgtaagtttcctaaggcctcc

SEQ ID NO: 23762 - DNA, 1028 bp, Homo sapiens
gcccccaggagagtgcccccgcggccctgcgttccctctccttgttccccccgacgcttaggcagtcgcgggcgaggttgggtatggtgggtgggggcgagcgagtggaggatcgcccctgtccccgcgcagacgcgcacacgtgtggccgttcctgctgggactgggtggcccggccttgctccccgaggtgggggcgccgcgggcggggggcactgcagattctgccgcgcgcgagcccctcggggagcccggccctaccgccctccccgcactggcgcagtgtggcaccgtgagccgcacgccggccgcgaaagtcctttttctgttggcggaggagacgtgtctccagctcgcactccccgagtgactcttattattttttccttgagctcttccttcaccccttcctcctcctccgcagataaatcagtttcagccgcggaatatgtcagcccaggggaagttacacacggtggttactcatttatttgcccattgtaaacggtcaaaggctttctctcctgaaaggaaaggggggtgggggttgcacctgggagtaaaaagttgttgctattagtggctgctttttaatatcagatacccgcgtgtttcctgtcgtgttgccggttcctcctttttgtttgtttgacagcggggattgttctgctggcttctccagcacgcattgtgctccgcggtgtcgagattgacggtgggagaaacagattagattagtggagtctttctcgttggggagccaatgttagtgcgtgttggctttaatccctgcccgcttgcgtcggccttcagggtgcctggtctggtttggggtctagagcgaggcagtgagttattttgatgtggctaacgggggcacggttcggtaagcatcagttaaaagtgggatccctgctctggctgacgttgggctgatgatgctgttccgggggcatcctggcgagtgagcagagcgcacgcagcagcctcgtttctggggaggcggcgaggagggacaggcgccctct

SEQ ID NO: 23763 - DNA, 1026 bp, Homo sapiens
cagagaggaacaagcagagggcctataacattatgttaacagggaatgggaagagaaaccaacgaagtaaacaaggaaataattagttcctcccaaaagtaaatattggcaaaacatggagagaccaactattcactgcacttaaataaatgacaggactcagtgaccttcactttgattgccaggcttatagaatcttccctgttattgaggagtcctgtcacataaaacacttggcaaagggcagatggattgtgtattatcagaatggcaaaaatagcaagtctggagatatttgttgccattcacacatattgtacactgaccaggaaaatctccaagcaagaggttggcagtagggttgtaagcagtcagattaatatatgaagaaaactgaacagtccttaatctgtgtaggcattacatccatttgtaggaggtatttggtgacttggtacaggtttctttgttttgtgtggtttgttgaagatgcaatgaccgggatgaatgagtgaacagctgggtgaggcaggggatgggcattatgaagttgggggatatattgtagatgaaacagatgaccctaaggaggtaatgagggggtggactaaagaatgacgaatgggagaagggaaaatattgaattcatcttagcacaagtatatcatcctttgaagaataatccaaaacacattccagacattaattgtgaaattcctgaaaaatgtgggtgtgcttaacatctcccaggctatggtgcaagcagagatgatagtgttgctttagcctgtaaatacaagagggtaggaggtggtaaaatgagtggaagggaaatacatttagtgaagcgggttcctgtaacactgtgttccgtatggcacgtttggtatcaggattttggagacaccccagtaaagctcatttaattatttgagggagaaacagtagactagccaagcatgcatgaataacacattgaaagctttccttctcagaggtctaattctgcaaagctgcattttcaaa

SEQ ID NO: 23764 - DNA, 1023 bp, Homo sapiens
ggaggacaaatatacatggcttccagtagttcaaatgttacttgaatttcttacaagttttttttaattcctagggctaaactgcctttcagttataaatttgcatatgtagtcacaaaaattccttcatggcaaatctgactgaactgtagtaaaatgctagtactactggcatgttaacagttaaacagataagaaatcacttggatgcacattttgttataactgaagacaaatatcaccttcttttctatgttgaattttttcaatatggtgtttttcttctttttctgattttcctttcagagtactttactaatttcattgttgtcttgaagataggaatgtacctttatgtgtctatgttatatttgtgtgtgtgtgtatgttgcttctctctgtctatatatataaaacatatatatatatcttatatatgtatgttgtttctcagaaccaaatttaggctaaataggagaacagattttaaataaaacataaattgtgtgtcggtataaacttcaaatctgaaagataatcattttactaaaagctgaggctttgatcaaataagtgagcctgatctcctgaaatctaaaacaagagattttctattctcccttttcaaaggaccgccctgaagctctttatgtagtagatgacattcttgtaacgacctcttgatgagaaaattatttatttcagtcaggaagagcagacttttacttcacttacgtactgagcaatgatgccagcaataaaagcttaccctataaaaataagagccatttgtttgtactgtcttttttttttttttttttttttgaggcggagtttcactttgttgcccaggctggagtgcagtggcatgatcttggctgacgacaacctctgcttctctgtttcaaacaattatcccccttcagcctcctgagtaactgggaccacaggcatgcgccaccatgtccagctaatttttgtatttttaatggagatggggtttcaccatgttggccaggctga

SEQ ID NO: 23765 - DNA, 1120 bp, Homo sapiens
tgtgaaatacaaggagagcagctttgtgggaggttggatgaggtaggtactctgtttggttatgtttgaggtatctatggagaatcaaggggaggatgagagttacaggtctggaactcagagagagatctgagctggagataagaatttatgagtcaccctctgagggagactgtggtgtctaatgactttttgagtacataaatgatgtgaggagtatgagcatttttaggaagattaatgtgacagtaatgtgcataatggaggaaaaaagtgactggcaatgttaacacaccaagagtgataccaagtgtatcttatacaaaaggaccccgtgcagggaagctggcacaggaagtgactcctctgttagcatggtagaagaaaatccaagggttgctactgttagccaagtgaaagtctaaaacacaattgccagtgcccatgatattgagatgtataaaatggaatacattattttaattaattgttaattgattggttgactaatttatactcccttgttcaaaaaagcctttaaaagtatctgactatagtagagctggtcagacccacacctggaattagggctagttcagagtagaagcactgaaatgattaagtaattggatagagaggtcaagaaataggattatagtcatagactctttcagtccagaaggtactcagcattctctacaagtaccttccgaggcgaccgctttcagtttagagctgctttaattgttgattcattcatgcatttattcatgtattcattcaaaaagaatgtattgagcacatgccatgtgccactacacctcagattcactagggcaaatttagtttgcttttacctgaggactattttctaaatgacctaaattgcaacacattttcaatatactatgggagcttgctttgtttttttgtttttatattttgattttacattgtatggctatgttctctgaaatgaaactaatttttacacaaagacttctgttttatagccttttttcttttcatttttaaaagcgcagataacagttgcctcagatcattaacttaattatcctgtactctaaatttactatttcagtgctacctaaggaaatgg

SEQ ID NO: 23766 - DNA, 1051 bp, Homo sapiens
gtcaaaactgttttctttgtgaaagaaggcctggtgatgggagtgcagaggaataacatgttcctagaaagtgatgattctttaccaaaaaacagaaatctgggaccaattaaaaagccggcatgctgtatttggcaatagattgaatctctgaaatgcatagtccagaaccaagaagagcaatttctggaaatacctcagtgagtgtactggccagtgtaaaatttcactttctgggacaattatgatccatccgttttttataggaggcccagtaatgatatcttgactgaattgcctttttgagttacaatcattaatcttgaaggtcatttgagatgtctcaagtctcttatttaagtctttgagatcaagtaaaatccctagcatgtatcaatagccacctgtatcaaacattgtgtatgttttttaaataaagaatatctggctataggattcccttagcctctttggaagaaattatcttgaatagggaagatagtgaagaactggtatgtccaagtagaactaggaattagagcaatagtctggatcctggagctcagaaaatgggcagtaagtcagggacaaaaggtggcttcttaatctgttgttaaaaattacttagagtagaaattcacattgagccagtccatcaagctcccagtatcactaaagaaaacctgtggtactaccactcccccttgtttatatctgacctcccacaaggctccttttttgtatgtgtagtgctttccctattccagacacatttttatgttttttaattataacatggacaaaggatagcattgacataaaccccaaattttaataaatgactttcctgaaaatgagagtagcagtgactttaaaaatggtaagaaaaggagccgtgcgcagtggctcacgcctgtaatcccagcactttgggaggctgaggcgggtggatcacgaggtcaggaattcaagaccagcctgactaacatggtgaaaccccatctctgctaaaaatacaaaaattagccgggtgtagtggtgtgcgcctata

SEQ ID NO: 23767 - DNA, 1034 bp, Homo sapiens
acactcttattgcacataacacaaattcccaactactggcatgtggctttgtgagagctgtttcaccataatctgttgagacttatttgtggaatcatgatgtcccgtgacatttgaaaatggaagagaatcctggaatatgggagcaacactgacgcagaacacagtgttcactttggaagcagtcatgatctcttcttgctgtggaagcctcaacagtttgcctgttccctccattgtactcctctctgaattctctctcaggcctagatgctgggctctgtgtgggttgctgtatggtatagaagaggatgagattggcggggacggctcttgttcaggtccatcaagactgtcgctgtcctctataccttgagccagctctactgtgcatttatagaaaagagagaccagcacacagaaagagagaaagcagctgtttttagggggaggagagaagatggtggagcttacaagagactgatgtttgcaagtggatatggtataaagtagtagttctcaaagcacggtgcctagacagcagcatcaggagcctgtgaatttgttagaagcacacatcctgaggcttcacccaagaccaggggataagatttggcaatctgtgcttaaaaaagcgtttgccttgctcacttctgagaaccagtggtctaaagagtgttgggaagcctgacagtggtagttacaagggtgtaccctgatgggagtcctgggatcaaaaagacttgaactagaagtaagggaccaggtgagggagcattcccttcagagagagttgttaaaataagccggggttctcatgatgctgctgaaaggagtgtaagtactgtacctcctgtgtttgggaccaagggtgtatctagccttaggcttccattccagcacatcccgtcagccagatgtgcaaaagttcctccgtatacacactgtactgcttaaattgctggtattttgaaatagaaaaaggtgcttataaacccatactgactgtgatgaacagggagtactttttccac

SEQ ID NO: 23768 - DNA, 1026 bp, Homo sapiens
gactgtaaggaataaatgaaataacacatgtgaagtgcttagcatggaaataactgaaccgtaccaagtattctgtaaatgagagatctgaatccgagacagttcctacacattcacagaaatgccagaagaggcccctgttctcatctctagagtgggagtcccctccctgtaatttaatgatcttattgaattctcttattactgttgacagacttaaaccacttgaacctcacgtcctaatattagctcttttgccattgtcttctgtttccatgcatggaatattttcttcactattctcttaataagaatagagcgagatgctcttcacagttcatctcttctatcccttaaagcaaacagcaccaggctttcaagagttggaaagattgcagatgaataatgtgttctgattttgtgtcatttcccagatgactttgtggtgcagaagccagagctcagtactccctccatttgccacgcccctggaggagaatactttgtggaaggagaaacgtggaacattgactcctgtactcagtgcacctgccacagcggacgggtgctgtgtgagacagaggtgtgcccaccgctgctctgccagaacccctcacgcacccaggattcctgctgcccacagtgtacaggtaagcgacaccatgccttgtgggtgcttggtggggaaggatgcagctctgggtgttgtcattctgtgggacccacagggcaggatcagccccatatgggagtgtgccaaacccagtatcccatcaggaacagctggcagcctgcttcctgcatgtattctctttatcaaccacctatttatgcagtcagcatgcctcacacctgagatgactgtgaaacaaaaaaggagactgttgctcttgccaatttttttccttaaccctgcatctcaaactcgaggcgtatacctaagtagagaaagtcccaccgcaccaaattaaccaaacgattctgttactgtgaaaagtcatctttatgtaacaaatgagaagaata

SEQ ID NO: 23769 - DNA, 1030 bp, Homo sapiens
atatctgtgtataattttgtataaataatgtcgcatgcctcgtttggcagacaactgagttggctgactatgcaatacaccttaaaaacacatgaatttcatttaaaggaggtaagatacactctatacatatttttgacctagaactctagtctcaaacataccgacatctggccttcttcccccaaaaatgacatcttgcgacttagacttttagaattagagtcacatattttagtttagttattttcacaagcagattttctacacatgcaatacattatgttaaaatgttaatatttgtttaaaactaagagtgaaaaatggagctataaaacacgtcttaagaatgcatttaatctattgtcgaatttgaaaaatgctttttcctcaaagggaaattctgttcattatcaagactataaatataatgaacttttataataaacttttatttctctcgttaagcaatggtcttagtaaattagtaaactaccagctttcaggatcttcacttacacagaaaatgaaaaagcagagaatgaggaaaataaggataaccgagcacctgtttctctccacctgaatttccaaaggtgtggcggaggccattctgaatgacatttgagatcccttccatgctgaagcgctaaaggcggcaatatacggcccagaagaaaaggacagagaaagaagttcaaagtctattagtaagaatgtaccatgatgacttatgtgcccaagaggcaagcagttagaaaatgccactactcatccagataaagcacataaacccatgctctttttaaaatgctgttgcttccatttctttgcaagttaaatgcaaaagcaactgtttttatgctactatattcatgcaggcatttttctgatgtagctaattgttccaatgtaaatgttgtaagttgtacacatatttgttctatacaaaatttactgtgtaatttttaagatactttttgatattatttacctacattttatcagaagtctgaaaacttaagatgaa

SEQ ID NO: 23770 - DNA, 1053 bp, Homo sapiens
gaccctaaagctagcattaaattgtggctgtgttaatataatgaatttctgttcatatctaatttcaagacatccttttttccatcagatttcaggcaaacaatgagcaagaaatatcccttcatcttggaaggtatgtttttccttaagtaaaaataagtataaaacaacttcttcaggtaacctataaattatgtagtaatttctttacaaggaatttctaacaatactattcacatgtattttagttcttctgagactaaattctcatctattctagtgagaggagaattaggtaatgggctggattctgaattcttctagtggttaagaatgtaaactctggaatcattcatatatgaggtgatagaatcaaaccacagtttaaacctttggttttaaaagatcagtttcatctcaggtttgctaacttcttggagctgtctctttctctgtcaagtagataaagactgaacaagatgacatcatgtagttagacgaaatagtgctcattacaatgatcagagatgccaggacttatatgtgaagtctgtaatcctactgtcctctttttcattttgttatgtagcaatatggaaaaaagaagttgtttttttcaatacatttaattttaacaatgcttccacatgactttataaatgagagctatttttatttatagtttattacaaatccactgagaagtctggaatgtatggaatcagagagctagatcaaaaaacatggttgaacagcaaaaattagatgtaagtagaattttaatctataatttacattaataactcatttcctttgttttttagttttttgagtggttttaatcctcttctttttaaaatgtttctttttcttgatgatactttttgcatctctgttgtgtagccagtcatcacgttcagcctcccatctaagctgtttgagacctttgagagaagaagaaaagatgagtgtactaccacactgtagactcttggtggtcccacagaacatgctgctgagtcacaggaacttctagcctgccttggcctgtgg

SEQ ID NO: 23771 - DNA, 1030 bp, Homo sapiens
tgaggttagagttctcatcatctcaaagatgagattacttcctagacctagagatgttatcaaatcaaggctgtgtacattttatttccttggtctttttttagactccataatctgaatcattgtttttatcagatgccaaatcttttattttcatttgttaatcataatttatcattaggaaaccaaattgtgcattgttcatttcttatttagattatgcttaataactagtaggttaggattcttatagactgctggagagtggcttgggtaaggaacacatctctctgaaatattacctctattgtgacatgactaaatcattgatgtaaatgattaggaaacttaaaacctacttaacacattgtatttttttttcttcttttggtatttaggtgttcactcaacttggatctgtgctgaaaaattgtgacatttcagtacatctggtagaggtaagccaaaaattaagtgagattcaagcattgacactgactaaagagaaggtcccgttagagcgaaatgctggatccccagtgtatatgaaaggtgtcactaagtctgggattccaatttcctggtaccgagatctgcacgatgttccaaaaggtaattacctttatgtggattaatgaaagaattttgatcacaaccctcacagtattgatgggactgtaactttttacagcaatataatagattgagttactgctgccaagtcccttatccatagagagtagcctacttttttctagaaaagagcatcttaatagaaaataaagttgcctgacattaagtagtagtttatttcatgaagctttgtaaaatcccaaacaaaatgtaaatctcctttgtacttttgagtatttccctatagctagggttgtaccgatgacggagcagcccaaggcagctggggctgatggaagcagtgttagtaggtgggtttagttcagttatagagtcttttaaaaaatccttacttgcctaaagacaagcaaggtgtgggggaaaatccctgtactag

SEQ ID NO: 23772 - DNA, 1048 bp, Homo sapiens
gtaatggtattgtccacaggaagagtttacatctgtgaaagcaatgtagtacagactatagtaaattaacaataacagctaacgtttgttgagtactttgtgttactctgttttctcatttaattctcaaagcaactatattaggtaggttctattattatccttctttgggctacagcatggcttttatcccatgcttccacacagatctcagtttgattcggccagaatggtagaattactactgctttctgttgatctcaaggaatcattgcaagagcctgtctattgtggcttgtttaaaggtacaaaaaaatccctgtacttctcaggaacgtccaggcttcagactgcctctttttttttaatcctttttttccagctcagaagatgatttttactttctggaccttaactgagaacttcttacttagaaattatcagttttaaaagcacaagagcttttaaacttaaatgtatgaattaagttttgttaagtataaatttaaatgtcagactgaacacttatgaacacctgttttttcatagtatagcaatctaagtttacctgaatgacatattcatagaactaccaagaactaacctcctggccctgggagttcatttagttcttgacctaattagtattcacttaggaagggagggagcgaatattctctttcacttgaatgagatgcgtggtaatacatgtcatcttgaagagtagcctaagatagaatgtcagcatgatcagcgtgtccactgatgcctgatgaggctgacttcatggtttttatagttaagccacagtaatttgattgcactattagctaaatggttagttatatttaatcctcacaataaacctacaatatctataaggaagaaaacaactcagaaagtttaagtaacttgtctaccagtaagcataggaagagctgagatttaacttcatctgactctatgcctgttaccataggcagacatcagggcaggtcattactgcatttctataataaggtgttaggaaggagtacaagttaatgta

SEQ ID NO: 23773 - DNA, 1053 bp, Homo sapiens
agacaggagaatcacttgaacctgggaggtggaggttgcggtgagctgagatcgtgccactgcactccagcctgggcaacaagagcaaaaatccctctcaaaaaaaaaagtaaacatgggcactgattgttttaataaaaatgggaaacagactaaatggctattcacaggaaactgataagatatatgttatttttttaaatgagctagggcaatatgttttgacagaaaactctctaagatttagtaagtgaaaaaaagtaggatgcaagagtttttatagttgattccatttttgttgaaggagaaaaactaaataaatacgagtaatttcatagaaacgaatacactagtgtacactggttgttttctgtgatatgtacttgcatacaaagtaaggaatgaatgcacaattttcccaatttggaagtgactttgaggggcagggtgtggctgggtatttgaatttcttacattgtgcatctgtgcattttttaaaaaattatgaaggtcacagtaagaaacagtaaatcttgacatgtagttcaaatatgagttggagaccagcctggccaacatggtgaaaccccatttctactaaaaatacaaaaattagcctggtgtggtggtgggcgcctgtaatcctagctactcacgaggctgaggtaggataatcgcttgaacccgggaggcggaggttgcagtgaggggagattgctccgttgcactctagcctgtgatagacacacacacacacacacacacacacacacacacacacacacacagaggggagatcgctccgttgcactgtagcctgtgatagagacacacacacacacacacacacacacacacacacagcctaggaggaataattttcagataaatgtcaaattttagttctgtattatgttttcattttttggttgttagaagctgtgtgttaatactggaaacaaagagttagagaattattaattagcaacacagatttacaagggagattaaagggaaagaatactttcccttgatgtcttgaatttacggctt

SEQ ID NO: 23774 - DNA, 1051 bp, Homo sapiens
ggccctgccggcccaggcaatgaggggcttagcacccaggccagcggctgcagagggtgtgctgggtcccccagcagtgctggctcactggcggtgtgctggatttctcaccaggccttagctgcctcccggcagggcagggctcgggacctgcagccccccatgcctgaacctcccccgcctccttgggctcctgtgcaaacggagcctcccccacgagcgccaccccctgctccacggtgcgcaattccatcgaccacccaagggctgaggagtgcggcgcacggtacgggattggcaggcagctccacctgtggccgggtctgggatccactgggtgaagccatctgggctcctgagtctggtggggacttggggaacctttatgtctagctaagggattgtaaatacaccaatcagcactctgtatctagctcaaggtttgtaaacacaccaatcagcaccctgtgtctagctcagggtttgtgaatgcaccaatcaacactctgtagctactctggtggcaacttggagaaccttcatgtccacactctgtatctagctaatctagtggggatgtggagaacttttgtgtctagctcagggattgtaaacacgccaatcagcaccctgtcaaaacggaccaatcagctctctgtaaaacagaccaattggctctctgtaaaatggagcaatcagcaggatgtgggtggggccagagaagagaataaaaggctgccggaaccagcagtggtaacctgctggggtccccctctgcactgtggaagctttgtttttttgctctttgcaataaatcttgctgctgctcactcggtccacactgcctttatgagctgtaacactcaccgcgaaggtctgcagcttcactcctgagccagcgagaccacaaacccaccagaaggaagaaactccgaacacatccgaacatcagaaggaacaaactccagacacgccgcctttgagaactgtaccactcaccgcgagggtccacggcttcattcttgaagtcagtgagaccaagaacccacca

SEQ ID NO: 23775 - DNA, 1072 bp, Homo sapiens
gtaatcccagcacgttgggaggctgaagcgggaggatcacgaggtcaggagatcgagaccatcctggctaacacagtgaaaccctgtctctactaaaaatacaaaaaatcagctgggcatggtggcgggcgcctatagtcccagctactcgggagaatggtgtgaacccgggaggcggagcttgcagtgagccgagattgcgccactgcactccagcctgggtgacagagcgggactccatctcaaaaataaatagcttctctcgccaggcatcctcgtggaagtgacatcgtctttaaaccctgcgtggcaatccctgacgcaccgccgtgatgcccagggaagacagggcgacctggaagtccaactacttccttaagatcatccaactattggatgattatccaaaatgtttcatcgtgggagcagacaatgtgggctccaagcagatgcagcagatccgcatgtcccttcgcgggaaggtcgtggtgctgatgggcaagaacaccatgatgcgcaaggccatccgagggcacctggaaaacaacccagctctggagaaactgctgcctcatatctgggggaatgtgggctttgtgttcaccaaggaggacctcactgagatcagggacatgttgctggccaataaggtgccagctgctgcccgtgctggtgccattgccccatgtgaagtcactgtgccagcccagaacactggtctcgggcccgagaagacctcctttttccaggctttaggtatcaccactaaaatctccaggggcaccattgaaatcctgagtgatgtgcagctgatcaagactggagacaaagtgggagccagcgaagccacgctgctgaacatgctcaacatctcccccttctcctttgggctggtcatccagcaggtattcgacaatggcagcatctacaaccctgaagtgcttgataaaacagaggaaactctgcattctcgcttcctggagggtgtccgcaatgttgccagtgtctgtctgcagactggctacccaactgttgcatcagtaccccattctatcatcaacgggtacaaacg

SEQ ID NO: 23776 - DNA, 1033 bp, Homo sapiens
acaaattgagttacatcttttgactcaactttcattatctgaatagtcctgctgggacaggtaatattctccatttggggctacaaatgtttgcattagaaatcaatctatttgtaaatgttgtattcaattttacatgatcttgatcttattttgtttaaatttgttgtttttttcaatgacaagttgatgcttccataatacatttaaaaacataacatacaatcctgtagttctgactgaactttcgtcaggtttcagcactgtaaaccaagaaacatcaacagatgaaaagttctcctcccaaaagggttaaaagtctccggggtttctaactagattgacttcagtatattctagacattcttttgctgttgcttggctcatttccttcttgataagattctattttccttcctcttcctcttctctctgttacttaatatagctccaaaatatggtatagtcctccaaaccattgctttcagtgaatgtgtttattatgagataactgaagattctgggggcacgtgtgtttcttatgttcctgttagtttgttgcttcccagtccacttctgatataatagaatttggaaccagattttttttttttttttttgctaccattctgacattgtaacagccttttccattctctttgaaccaagattaagccacaattcagtcttaaaacaataaatcatcatttgctccacattcttgacccttggcttaataaggagaaaccttaggaacaaacaagcctcttttactctttcaagtattatcactgtgatttgaatttgtcccccaaagttcatgcattgtaaacctaatccgcaacgcaacagtgttgagaggttggatctttaagaggtgattaggttgtgagggctctgccctcatgcatggattaatgccattgtctccagagtgggtcactgattgtgggagtgggtcctgataaaatgatgagttcagcctctgatgagttcagcctccttccccagtctctcttgctctctccctccc

SEQ ID NO: 23777 - DNA, 1052 bp, Homo sapiens
tcctccaggctggagttcagtgatcttggcttactgcaacctctgcctcctgggttcacgccattctcctgcctcagcctcctgagtggctgggactacaggtgtgcaccaccacgcctggctaattttttgtatttttagtagagacagggtttcaccatgttagccaggatggcctcgatctcctgacctcgtgatctgcccgcctcggcctcccaaagtgctgggattacaggcatgagccaccgtgcccagtgaaaaagctttgatcctttgtcttcaattgcacctatgaaaaggaagtttcgtataaaagctgatataaatggctaataaagcagagaaatagcttaaaatttgactgtagacatttgctatgtatgattaatatgtatcagtttacagttaattttaggaaaacttaaattttataaattgccaagaaatcacccatgaaaaactaattttcacttagcggtttaattttttaacattaggatttttaagtttcgctagtcttatcatctgggacactggaattttgtcttgttggaattgctgattaaacaaaataattcttcaaaagtgcttagcacaatgttaggtaaatagtaagcactaagtaaacattggctttattattattaggtggtcctatactatgattcctcctatttatatcacgtgtgtcttgctgcatatttaaggacgctcccatctatatgtttggactagtgcaatagtaaagctgccagctcaggtgaagaaaaccatttaaaaatttaaagttaagcacatgatggaaaattcttgaatatgtggtgagttaggtataaaaaatatagggggattgtattgttgaatacaaaaaagccattagactattttaagaatgctctcttctgtcattagggcttggttatgaatagtatatcacatgcatgaaaggaggtggtggctagtttcatttccctaaaacatgtttcaatggtaaattagaggcagctgtggtttactgacgcataaacccagtgaggtctatgataactagt

SEQ ID NO: 23778 - DNA, 1032 bp, Homo sapiens
tgtgaatgagggttgctctgaacccttgcaggccacactggatgctggttagaagtacagattctcagttctaccccagacctacagaatcagaatcttcatttggttgggcatggtggcttacacctgtaatcccagcacttcgggaggctgagatgggaggatcccttgagcccaggatttcaaggctgtagtaagctatgattgtgtcactgcactctagtctaggcaacagagtgagaccccatcaaaaaaaaaaagaaaaaaaaagaaaagaaaaagaatctgcattttaacaagagtccttggtaattcacatgcacattgaagtttgagaagcctggctccaactgtctaaaatgtcctggcctcagcaattagcctagacagctgggactccatgtgtccctgtatatgtctgtacccctttcatgtgcctgctatcttgtactgcctgaccaagctatgtgcccttagatttgggaaatatgtatctcctgaaaatcaagtctgtgctttgtctttattgagcagtcagccctgtttcaacagtggtagctgccttcatctgcgtgctagagggctgggctggacttcagctttcacctaggaaatgagtcttgctgccctttccagaaagtgacacatccttgggcactcaaacctgggcatacagaattctcattttactccatccccaacccacagagtaccagtgtatcccagacagcaccatcccccaggaagactaccgctgctggccatcctaccaccacgggagctgcctcctttcagtgttcaacctggctgaggctgtggatgtctgtgagagccatgcccagtgtcgggcctttgtggtcaccaaccagaccacctggacaggtgagccagtgggagaagcccttccaagggagatggcaggacctctctggaggttgatagatagtgatcccccatcggaagtcagagggggtgctgaggtgatgagagagaggtatacgtgtcttcaaggcagtcaaattagggagaatg

SEQ ID NO: 23779 - DNA, 1424 bp, Homo sapiens
ctttgtggaatggagaaagggaagaggttattaaataggctgaagtgccttttcagtgttcctttcaccagatgaaggtaatcttctggctaggaaaatcaaaactccaggctagtattcgctgccctagaagctgaatctggaattactattcttcgaggccattgaaatctagtaaaagattaagttcaactgttagaatggtgagagaaacagtttcagctttggctgataacgcagttgtgtgatacctactgctggaactgtattttgagttttttatgtgcaggtagcttgtattcagacgcctttcttttacatttcttgataataagtctctacttggttaatgttcactgatcagtgagcagtctggccataggccgtactatatccagataatatcgagatgagatggatttttaaaatctaaagtaaaaaagtaagtcaaagagcaatgggcctattatagatattaaatagtaaaacctataattttggccttccctttttcttgggcagaaaaaattgtcgttatattgctttcagagtggaaatcctaaaataggaggcaactgagtgttgtgttactctttcctcctcaaaggcacctgttgtccattatctaacctttgatgtcttgtaattccttacttaggttgggctctttttagagagacatccatttttccctggttcttttttagctccatgcgttggtttattcacagtaagtgttggaccgaaaaacttgtcctatatgtccgctgaagggctgatcttatactaaagtaaaaattgagtgtcttcttaggggatgttgtggagagctgtgctatctttatactgtattgggtcctcatcctgtaggagtggtgagatcactttaacttctttcgtgttggctctaaagatttctggagggcttgttaaagcttcatcttctgtaagtgtttaggaggagtctttctcaccagttggggcacttaatgtttattttcaaacattgattatgctttgtaatagctttcttctttcttaaccagtttatgaggcaagtgatacaaaagaccgagagatgaagatgaattgcagttggggctcacacttttcataaagagcgtcattgttgaccctaatgttggatttaaaaaattcatttgatgccatgctttgggtggtatgtgatgagactttcctttagatatggtgttaatcaggagcagaggagatatgcctatcagaggaacctgcatctgcagagagggaaggaaatggttcctggcagtatttctggagctgttcttgatgaagatacttctcagtgggagctctgtgctttctctttctgtcccccttgcaagagtaaaactaggccccatcttaattgaaaccttaaaggggtgggggaggagtagtgctgg

SEQ ID NO: 23780 - DNA, 1031 bp, Homo sapiens
agcctgggaggtggaggttgcagtgagcgcagatcacactactgggctccaacctgggtgacacagcgagaccccgtctcaaacaagcaaacagacaaacaaaaactcattatgttcttatttctcatttcacctgaaataagtgaaatgttctagactttattgggaatctgataaagaattctgtgccagattctagggtattttcaagtacaagtcatgtgcatgacctgttaatggtttttgaaatcagtttagtcgtggtcaggaccaacattagaaaaatgaggagaagaggaagagataatgtaaaatatcagtacttcgtgtgatattgcttcatggaacatttaatttcagttacatatatttgtcttagatttcagtgtaaaatttctgttggtcacaatcagatgaaagatacatttttagtggctaatccctatctttgagagaataggtggaaaggttgacatacatgaaaaggtggatgaacaatcagaagtaatcattgcgggctatgtctttgacaagtttttagaatctgaatataattagaatatgtttaacagcagcagcagcagaaagatatttattagttgtagaatcagtgtaattcaggcaaactcagtatgtaaagaagtgattttataaaattggtagggctagggtatgtttaccttgcaaatcaattctttactttgaaagagaattttcaggccaggtggtatagctcacacctataatcctagcactttgggaggccagggtaggaatatcacttgaggcctggagttcaagaccagtctgggcaacatagtgagaccctgtctctaccaaaaaaaaaaaacaaacaaaaattagctgaacgtggtggtgcatgcccagctccttgagaggctgaggtgagaggatcgcttgagcccaggaggtggaggctgcagtgagctatgatatgccactgcactccagcctgggcagcagagcgagcagcgagaccctgtctcaaataagaaagaggattttccttg

SEQ ID NO: 23781 - DNA, 1023 bp, Homo sapiens
tgacctcaaatgacctacctcagcctcccaaagtgctgggattacaggtgtgagccaccgcgcctggccaggtttcatatttttttgatgggttatagtccattactatttattttgatgcttaaattgaccctgttttggcaagtagatacccctctaaactgtcttctttgttcttttgccacgttctcatcattctttgaagactttcttgttttgtgacacaataagatgatccaggttcatcttgtgccctttttgctccagccctagaatcagccatttttgccaaggagccctagttcttttatggagaaaggtatttagaaaccaagctctatgtgctagttgtgttcagtgctgctggagtcctcgtcacagtagttaaaattaaggaatatatttatgtacatatgtgtgtggcaatatatagatatagttacagctatatttttacaacagcgtagggttaatttttgtttcctccttttacatatagttacttccccaacagaaacctggcttccattatgcttaatgtatttatttatttgatgagtcctcccctacataatcaatctcctgtctccactggtttcttttttttttttttttatgtagaaaaattcttcttttttttttttattatactttaagttttagggtacatgtgcacattgtgcaggttagttacatatgtatacatgtgccatgctggtgcgctgcacccactaactcgtcatctagcattaggtatatctcccagtgctatccctcccccctcccccctccactggtttctgcttccttgcttgttcaggttctgattgaacctgtgctgggctgccccctcatcttgtgccgacattctcatcccaccagggctccagcatcctatgccaggctgcctttctcatccacctggttgttgataccctgcactaaactgacaccccgtactgtgctgctcctctgccagaatgacctccttacacacttgccttgcactggctgccttgatag

SEQ ID NO: 23782 - DNA, 1063 bp, Homo sapiens
tatcttcacctcctctcatcttcttcccttcattcttagataaaagtatctcttctcagaaaaggctcattctttgtcttgttttttctattttagcccttcacatctctaacgctggagctctgctccatgtccttacgtgttagtataaataactctgttggttccttccctcaaccctgtaaatctattactcttacatttaaataaaaacaccactgtcagctttgcagacactctcttcacccccgtctggttaaaccctttccatcttcaatcacattccttaaaagactgccttacctcccagcctcacttcagtgcattgcagttatgcttctgttcccatgactccactgaaacttctctggtaaagattccttaatactggccaaatcagatggaccatttttagtcattgtcttttgatatctttgcagtctaacattatgtctcctttcctgaacctatgactagctttctgacagtttttattctgtcttctctgctggataactttggccctattcctttctcactccaagtcatcaattctcacaactccagttatcagatatgtcctaataaagctccgaagtgtaatctctaattcaggcctctatcttaagcccaagacctagttatacttttgttataatgacctcaaactcagcagatccaaaaccacacatctttctgctccctcattccccacactgttttttttcctttgttctctatcagtgcatgttattgaaccatttattcagtcatccaaatagaaaaacagggatcttcctgtactttttatcctcttatgtaatcaatgaccatattccatcaattctgtcttgagtatcatctattaaaattatccctttatggctgggcactgtggctcacacctgtagtcccagcactttgggaggccaaggtgggtggatcacgaggtcaggagatcgagaccatcctggctaatatggtgaaaccctgtctctactaaatatacagaaaattagccaggcgtcatggcgggcacctttagtcccagctactcaggagg

SEQ ID NO: 23783 - DNA, 1033 bp, Homo sapiens
gatagacttgaacacaaagataggttgaggacaaaaaggcagcagagaggaagaccaatacggggaaatggggtggtaattgatgaggcaagtgtcctgagaatttgagaagggatctttgagaaccacaacttctagccctgataactgtgaatatatatcgagataatgataacctttaggtgcaaagataggtcgtcagtggtagaaaaaaagagaatgcatgtttgaaatggttaaagcggagaatggaagaccgtagacatttgaaagagatgctgagagaccctgaggctatggaggcgggatacttattgtggaggaaaggtgagtatcattctgcccggttttgtgattcccactcttttccctcttggcctcatgtactctgggtctgtgtatttacagtggagagttagatggaagaaaggattgatctttttcattagtgatagtgagataaatatgtcaatgacaaaggacaaggggcctgagggtttggcaaaagacttgataaaaaccactttgactaataaagtgttatattatgcttgcttgcttgatttatttatttatttatttatttatttagagagtcaactttgaggaccgccaagatcaagccagaaaacaattttgtttggttatgaattgatttttataggaggattttggatttttagagtaggataaggagctagatctgttaatgtatatgggctttatagggaatataagctttgtatagagagggaagaacaaatttcctatatataatatacagactcagaacccgagggtacatataagtattttaaaacctataatagaaaatgataacgatgtttgattgctattcacatttttaaaagcttattttaaatagtttatattagtttttttaaacttttttaggagacacggtcttactctgtcacccaggctcactgtaacctcaaactgctgggcacaagtggtcctcattcctcagcctctggagtagctaggactacaggtgtacaccaccatgccc

SEQ ID NO: 23784 - DNA, 1044 bp, Homo sapiens
tatttgatacagcatttttaaaggcaaaacagaatcttcgatatatctatgttagtgggaggtcaaatgctattataacttttattttttaaccataactataaaattaaggcttatttcaaaaatatagtactatctggggtgtgtgggggtgtatgtgtgtgtgtgttaggggatggtgggcaggagggctgtggaattacagcaatataagtttcagtggattacagatttgcattctttatgttcttttcatcagttaactaatttactccaataaaagtgctcacaggattttcccccttttgtaatttctagcaaattattcgatgtagagtttggagagaccataggtgatcagctacaaaatcttaaaaccgttttcttcaaagaatgagtgaggaaaaatcttaagtaataagatcatgtgtaacaatgtactgatggaaaatgcttacctcaataaactaatgctagtgaccgaattattcattggtgtggattcatagatacttaaccaaacagttgatgacaagaatgttgaagaaataccaagatcttcagcccttttaaaaattccgtctagaggccgggcacggtggctcatgcctgtaatcccagcactttgggaggctgaggcgggcggatcacgaggtcaggagatcgagaccatcctggctaacacggtgaaaccccgtctctactaaaaaatacaaaaaaaatagccaggcgtggtggcaggtgtctgtagtcgcagctactcaggaggctgaggcaggagaatggcgtgaacccaggagggggagcttgcagtgagccacgattgcgccactgtatcccagcctgggtgacagagccagactccgtctcaaaaaaaaaaaaaaaaaattccttctggaactcaatctttgtcgtcgtcattacagaatctagactttcccctacaaaggatgctaaactttattacctgtactccactttgagtagaaaaagggaaactaagaaaatgttagaaaattttagtacaattttaaataaatttcc

SEQ ID NO: 23785 - DNA, 1046 bp, Homo sapiens
actttatagaggcagggtgtcactgtgtttcccaggcgtgtctcaaacttttagcctcaagcagtcctcccatctctacctcccaaagcgttaggattatagctgtgagccgccgcacctggcctacattttttagagatggaaaataagtgtcacatgatctcattatttctggaggagaatctgaatgtcctcaaaatgtttttttcagacttgaataatcttaaatttaatttttctcttgtagaacttcaaactaggcctgtttagatttaacacataattacctggtcatgttgagaaactgaatgactcagatctctactggaaagaaatctgcttattttgaggaaaaaggaagtcatcaatcactaaatccaagtcttcctcttactgtgctgcctccctgctctaggattagattcattgttatttaccatttcagtacagtgatatcctaactgtacaggtatatcaaaatggaaggacagttataatatcttagaaaattgagaagtaattgactgttagctacctgtccaaaaatggcttcagattaaaaatacttgaaaagtcattttgaattatatactgtctaaaatccctcagtaatttattgtagccaaatgctttatcaaataatttaaaaataaataaaacgaactcatttataaaattggggaaaggaaaaaccctgaataatcttgtcattctaacaggttacagttctgatgtgtttctttattgttctttatcagatatacattttatacattcattcattcatttaacagatatttactgagtgcttattttgtcagaccctatcctaggcattcagagttacagtagttacagtgttgaactgtgtggaacttacattcatgctccatagacaaaacagataaatacttcatatgtcaggaaggtgatatatatgaggaaagaataaggagagcagagaattgctattttatatagagtagttagggaagacatttctgatatggtgacctgaaggaagtgaatgaaatatgaagtatgta

SEQ ID NO: 23786 - DNA, 1047 bp, Homo sapiens
taaagcaagcttaaaaagaaaatcactggagcaactgatcttggaatggagtatgcccagagccatctcccttctccactctgcctgaatttttccttttcctttgttacaatttgtgaacgattaatacttttttataaggatcttaaattactttaaaaaccattatttatacgtgagtatgaaccattttgaaaatatggctttgctcagaacacctgagataactgtcccaaaagaatgagagttttgattagggaatatgataaccactttgcaatttgggacacctcggagtatcagatggcctaagggagatacaaaagtagaagagcaaaacccaaggaaactgaagggcaagcattaggaggaatgggtgaaggacacagaagggaaagtgcaacatcaagtatttcaattttttgcctaacaatcactctttccaaagatagtagagcagaaacatcttcctcttctactgtactccctgatttccagctgttgggattcagagctcaagctagtactatttggattaaaaggaagctgtattgtcacccggtaactggactagcctgaggcccttagcagtatctgaacagcactgcctaatggaaatacaatgtataacgcatatgtaattgaaatttttctagtcaaatttttaaaaagtcacaagtaatattaagttttaatagcatatttttaactcaatgtagccaaaatactgtcattttgatgtgtgatcagtataaaaaaattattagtgagatattttacttttcctttcatactaagtcttcaaaatctggtttgtatatttccagtatatctcaattcagactagccacatggtaagtgttcagtaatcagtgtcttgtcattttagacagagcaggtctagatcatagttttagagtggaaatgtttcccgagttctaagtaatagaattttggaacaaagtctaaaaatttatttaacctctctgagtgttggtttccccttctgtaaaaggaggttagactaggagagctataagatttcat

SEQ ID NO: 23787 - DNA, 1035 bp, Homo sapiens
gatctgcatttctctgatgattagtgatgttgaacagttttttgtatacctgttggccatttttatgtctttggagagactacaaaagaaaagatgtccttagtccattttaaaatctgttatttaactattgagttccttatatatttttgagattaaccctttattagatatatggcttgcaaatattttctcccgttctgtaggtggcctttttattgttgattgtttcctggcataagaaaaagttatgccgtttaacatctgtaggttcatccagtagcgtggtagacatggttgttgtctatccaaataatctcactcttcttttcaagtgttagaaaaactgctgtcacaaaattttctttagcatttttctactcagccttcctggacttcttgtagaaatgtgtcaacttagataaattatattttaattatcaaaaaattattctcagttaaggaaatggccattggtttatttttccctacaatgttttagactaggactttatagtatcactttgttttctgtatgctgtgtaatgtagttggccctctgtatccatgggttctacatccacagattcagccaaccatgggttgaaaatatttggggaaaaaaattgtctgttatactgaatatatgcagacttttgtcattattttctaaacaatacaacaactatttacatagcattcacatcatattatgagtaatctagagatgattcaaaatatacaggttatatgtgaatactatgccattttgtatcaggaaattgagcatccatggatttgggtatctgaggaaggtgttcctaaaatcagtcccccgtggatacaggacaactatataacaaaaacaattgtatataatgagactaaaactttgaagtagtcatttttgtcttgtttttattgtatcacgttaataatccacttttgtatgactatacagaaaatacgtatgacttaacttttgtcttgtgtttcaacagaaggagaatatattaaaatgtttatgcgcggtcg

SEQ ID NO: 23788 - DNA, 1027 bp, Homo sapiens
tagaaaggaacttcagcaaatgaaaacagttcgttagcatgccacagttataaatattttctttgaacttagtgtttcattaatctgtgcagcttaacaagtaaaaagtacagctgaaaattcagaaatcttcagatatttgatgattgtttgatttgctgaagaaaacagataaacgtatgttttttaacgattaaaaactgcttatttgaaaaatgtcagtacaaaggtattctgttgtttcatgtttcctgtgtttaaaatcattcttaatactgctttttagccttgctatacatcctgacaaaattaggattgcaactggacagatagctggcgtggataaagatggaagggtgagtggcatagtgttatgccttctgtacctagagacattgctgttagagtggaatctattgtaattttaaccacaactcatttgttttattcttttaaaatttaagtactgaggaatttctagtataagcatggaaaaaacattaggatataagaacactttaaaagacagagtcatactaataaattttgtttttaaaaaataagtgttctcccttaagaagctatttactgtaaaaatgggaaaactgatacgctcgttacattttctttatataaaataacatataaagtaaccagtgtctgcgggaaggtactgcagtttcccttagttgatgaacctgttgattcttatttactttcttaattaattaattaattaattataggggtggaatctcacttcgttgcccaggctgggctcaaactcctgggctcaagtgatcctccagccttggcctcttgagtgagtagctggactacaggtgtgtgccaccatgcccggctaactcttgattttatgtgtgactagaactgatacaacttaaagagttacagttactatttaatattattcagttggtttgtataacaaataccttatttctaaggatcaacagtgactattaatggtgactgagtaacgtatgtatgactatactcatgacat

SEQ ID NO: 23789 - DNA, 1032 bp, Homo sapiens
tagagacagagtttcaccgtgttagccaggatggtctcaatctgacctcgtgatcctcccgcctcggcctcccaaagtgctaggattacaggtgtgagccaccgcacctggccgctaaattctttttatatgttactcttcacaagaatgtaacatagtgtttattaatatcgtgattgcacagacaggaaaccaagacccatagagttctgttacctgtgattgagctcaggttctgcatggttccaaagcttgtcctttcctctaatccaacagtactctttgagatatttacagcattaattagaaatattgttaggaaggtttatctttgacaattaaatcactgattgacattgttaaagcatactatgtatacaagggagttaaacactaaatgggcgattgtaaggctagcggggtttgaatcatgaagataaactgctttggttgaagaaaacactgtgtgtttacaaatagacatacacggccccaatttgtagggaaaattgttctgaaaaactcactgaaattactttccagcatttacatagctgtgaagtcatcattgacaagcttaaaatggaaagtcactcaattttagtgacttaaactaaaggtaagccaattggtttctcttggagttgtaagtagaaaacacttcatgagagtgatgtgataactaaattgaaagtgctggcagtccatttggggattgattagaatctaggggagatgtagttgtcagtgttcattctgtatgtaactcctgtctttggtttcagatctggttaggttctgttgatccttggggaactttctcatttgtttttatttttgccttggatctatgaatacctgaatgtattgtctaaaatggaaaaatcttaatgtagccattctattactatcactgaccctaggcctgaaaaaagtcacacctagggttaagaaatttttattttattttattttatttacttatttagagacagtttccctcttttgcccaggctggagtgcaatggcatg

SEQ ID NO: 23790 - DNA, 1049 bp, Homo sapiens
ttccactgaaagtgtcatccaatctaatactcccacaccgcctccttctcagcccttaaatgagacagctgaagaggaaagtagaataagcagttctcccacacttctggagaacagcctggaacaaactgtggagccaagtgaagaccacagcgaggaggagagtgaagagggcagcggagaccttggtgagcctctttatgaagagccatgcaacgagataagcaaggagcaggccaaagccacccttctggaggaccagcaagacccttcgccctcgtcctaacaccctggcttcagtgcaactcttttccttcagctgcatgtgattttgtgataaagttcaggtaacaggatgggcagtgatggagaatcactgttgattgagattttggtttccatgtgatttgttttcttcaatagtcttattttcagtctctcaaatacagccaacttaaagttttagtttggtgtttattgaaaattaaccaaacttaatactaggagaagactgaatcattaatgatgtctcacaaattactgtgtacctaagtggtgtgatgtaaatactggaaacaaaaacagcagttgcattgattttgaaaacaaacccccttgttatctgaacatgttttcttcaggaacaaccagaggtatcacaaacactgttactcatctactggctcagactgtactacttttttttttttttttcctgaaaaagaaaccagaaaaaaatgtactcttactgagataccctctcaccccaaatgtgtaatggaaaatttttaattaagaaaaacttcagttttgccaagtgcaatggtgttgccttctttaaaaaatgccgttttcttacactaccagtggatgtccagacatgctcttagtctactagagaggtgctgccttttctaagtcataatgaggaacagtcccttaatttcttgtgtgcaactctgttttatcctagaactaagagagcattggtttgttaaagagctttcaatgtatattaaaaccttcaatactcagaaatgatggattcc

SEQ ID NO: 23791 - DNA, 1038 bp, Homo sapiens
tgagccaagatcacgccattgcactccagcctgggcaacaagagtgaaactccgtctcaaaaaaaaaaaaaaattgaagggaatttgtaaaattctggactaggctggctgggcacggtggctcacgcctgtaatcctagcactttgggaggccaaggcaggcggatcacggggtcaggagatcgagaccatcctggctaacatagtgaaaccccgtctctactaaaaatacaaaaaaaattagccgggcatggtggtgtgcacctgtagtctcagctacttgggaggctggggcaggagaatggggtgaacctggggggtggagcttgcagtgagccgagatcgcgccactgccctccagcctgggtgacagagtgagactgtctcaaaaaaaaaattctggactaggctaaattgtctgtggtagctcacacctgtaatcctaacattttgggaagctgaggcctcaggatcctttgagtccaggagttccagactagcctgggtaacatagggaaaccctgcctctaccaaaaaaaaatagccgggcatgatggcacatgcctgtagtcccagttacttgggaggctgaggaagattgcttgggcccaggaggtcaaggctgccgtgagctgtgattgcatcactgcactccagcctgggtaacacagactgtctcgaaattaaaaaaaaaaattatggttttggtgtaataaatataaagtagctttgtacctttggcccaattaaaattttcacattaagatttgtccgagatggtcgtttattaggacaaaagaagccttatgattgcaggagaagaaacttttgttttgttttgttttttgttttttgagatgaagttttcactcttgttgcccagactggagtgcaatggcgcaatcttggctcactgcaacctcttcctcccaggttcaagcgattctactgtctcatcctcccaagtagctgggattacaggcatgcgccaccatgcctggctgttttttgtgtgtttattagagacagagtttcacc

SEQ ID NO: 23792 - DNA, 1042 bp, Homo sapiens
tgtgaggtggagtctcgctcgctctgtcacccaggctggagtgcaatggtgcgatctcggctcactgcaacctccgcctcctgagttgaagcacttctcccacctcagcctcctgagtagctgggactacaggtgtgcaccaccatgcctggctaatttttgtattcttagtagaggcagggtttcaccacattggcccgactgctctcgaattcctgacctcaagtgatctgcccgcctgtttgctttttttaaaactgtgttccagttttcatgactgtgtgttattccacactttgaggtactgtaatttgaccactgtgtactggtagaggattagggtatttttcatcgtttgctactgagcagtctgcagaacatagccatgattgctttgtgacaaggatatgttctgagagatgcgtcattaggtgattttgtctttgtgtggacatcatagagtgtacttacacaaacctagatggtatagcctattacacacctaggctatgtggtatagcctatttgtacttagggtacaaatctgtacacatgttattgtattgaatactgtatgcaggtgttacccaattttgggtatttgtttatctaaacatatttaaacatagaacaagtacagtaaaaatgcagtagaaaggataaaaagtgatacacctgtgtagggcacttaccatgaatggagattccaggccttgaagtgagtcagtgagtgagtggtggtagaatgtgaaggcctagtacatactgtacaccactgtagacttactaaacactgtacacttaggcaacactaaatttatggaaacgttttccttcaataatgaattaacccaatttattataactttttaacttcataaaccttttaattttgtttagctttttgactcttgtaataacaacttaaaacacaaacacattgaatggctatacaaaaatattttctttcatcatatatccttattctataagctttttttctttttattttatttattttttatttttatttttttgaaac

SEQ ID NO: 23793 - DNA, 1050 bp, Homo sapiens
gctgactttttattttttgagccaatttgaataaatgttttactccatgacatgttataacagagcttccctttccttcttttttaccccctgcacaggctattttttttcttgatttcatgataacgacctgtttatagtaaattggcttgtcaattattatatcttatagagtgaaaattctttttatttgatgtttgattctcattcagaaacttgtttttgcctcttcttttacagttttttatttactatccaaatgtgttttttaaaacgttaaaaaaacaaaccaaaacagatacttaattcttccttattgtgtttgtggtttattcagtgctgttgggacattcgccagagccctggattgcagcagttctgtgaggcagcctagtttgcatatgagtgctgctgcagcttcccgagacatcaccttggtaagacatggtttgaaattttgtgggtatttatccttctgttacttgtttaattttaaagccattgtggcaatactgtagaccgggagcttttgggctcttagccttcctgactgctaggttgatttggcttggttacttggttgactgggttatgataacactcgtctgtgagttgagagttttttgtgtctgttcattagaaagaggggctgtttttttttttttctttctttttatatttggagatggagtcttgctctgtcaccaggctggagtgcagtggcatgatctcagctcactgcaacctccgcctcctgggttcaagtgattctcgtgcctcagcctcctgagtagttgggattacaggcacgtgccaccacacccagctaatttttgtatttttggtagagacggggtttcaccatgttggccaggttggtctcaaacttctgaccttgtgatccacccgcctcggccttccgaagtgctgggattacaggcatgagccaccacacccggccagaggggctattttctatataattttattacattatagttgatatcttttaaatctatttacttttttctttcggtgatcaaatgaagc

SEQ ID NO: 23794 - DNA, 1985 bp, Homo sapiens
gggcgtggtggcacatgcctgtaatcccagcgacttgggaggctgaggcagaagaatcgcttgaacccaggaggtgcaggttgcagtgagctgagattgcgccattgcacgccagcctgggcaacaagagcttaactccgtgtcaaaaaaaaaaaaaaaatcttaaaactttgtattttgtggtaatacaaaaatagtgcaaagacttcctgtattcacttcatccagattccccagttgttaccatctttaccacatttgctttattattattattgtcaaatgacacaaattagagaatttagtttaagcatctaattggctttcatttattctatctataaagtagaataagcattctgatgagctgagcagaggtgattggctttatagacaggaaagggctgaagaaaagcagaaacagggaacaagaagcagattggttgtttcaaagttgctttccttaaaatagagaggacttccttatgcctactcaggtaaactggccccttctgattggttgctgtgaatcttggcactaagcacaagtgactgctttctagtctgatctgctggggcctagtgcgagagctcagtccaaaataatggccttccataaactctaacactatatatatatatatatatagttcttaacagtttgaaagtaaaatttcagaataaatgtccctctactgctaaatatttgaaagagtatttcctaaaaataaaaaccaaggatattctcatatattagttcagtataataatcggactcaggaaattaaccttgttacagtactgttgtctaatctagagactttattcagatttgttagttgtcccagtaatgttctttatggcaaaagaaaaaaaaaattctggcccaagatttccttgtgaatcacttgtgacatttagttgttgtatcttcatagtctctttcattcctgaacgattcgttagtctttctttgtgttttatgaccatggtattttgaagagtgcaggccacttattttgtagaatgtccttcagtgtgggttatggttataatctgatttataattagaataaatttttgttctacttaagtccattttggtcagttatgtccatctaggagattatatatttccccctaaaattttcaaatttaacatttttacagtatttttaaacagtttgccgtatttgtagttacaaatagattttcattcttgttattgtttatatgtatcacataacctttttttcttgattgttttgcctgaggtttctttattagttatctaaaagaatgggaacttaattttggtaattaaaaaaaagtggtacatattctgtttatttttactcttattttcttctgcttttctttaggtttactctaatattcttttgctagcctttttaagacctttttaaaattacttttcatgataaacatacaagattgtgaatgtccctctaattatcaccttggctgtagcacatatcttttagtatgtagtatttttattatcatttggttctaaatattcactaatttgccttataatttttaatttaacttgtgagttaatttagaaggaagtgtggctcatctacctattttaattgcctttgagaatgtggtcagagaacatgtgtgctaccaattgtttccatgtcttgagatttctgttagggcctggaataggatcctccccagtattttgctccctgggccttactgactctggcaacatcaaggtctgatgcttgtcacatcagactagtaaaaaaggaaacttgctgtttggctcgatttcaccttatagcagtctagaaaataccctcatgataaaggccaagatcagtgtggaaactcaactattacacttttcagagggatcatcacctctccttgcctgtattggttctccagtgtcttcacacagttgttttcacatatttgtctggtttgtgccaagaatcacagcc

SEQ ID NO: 23795 - DNA, 1872 bp, Homo sapiens
aagtggctgggattacaggtgcgcgccatcatgtccagctaatttttgtatttttagtagagatggtgttttgccatgttgaccaggctgggcttgaactcctgacctcaagtgatccacccccgcccccctctgacctcccaaagtgctgggattacaggtgtgagccaccacaccagaccagcatatgaaaaactttgtccatatcagtttgaggtttactcatgagagtttattataatcttcctctgcttggaaaaaaagaatgtggttattaatttttaaatagatgtgatattctgaatgctgtaattcctgtaggaggtatatatgtgaagtttttgtgaaattgtaactgaacaaatcagtacagatggccctcgacttaggatgttcaacttaacaatttttgctttgttttgttttttacaatgggtttatcagggtattaaatgcacttttgacttatgatattttcaacctatgatgagttttttgggacgtagccatcagttgcagagcatttgcagttagtattgaatatagtatatgtgtatcagttagctgttgtcataatactgcattttacaggttgggttccctggaagcagattctgatagcagtttttatgtgggaaatttattagggattccccttgggatcagcacttgtggaataaaaggcaaggaggcaggattgactagtgggaggaggtggatacaatcgaatgaaggcctcagctgactccagctgatttgtggcatcccaaatcagggtgaaaagctgggcctttacagccctgcattattggatgcaggttgctccaggaagagtgtgtggactttcacgatgaattgttcttgaattgaaataattccgaaaaagatcagcagctgaggactgtcttattcacaacacttctggcaactaggtgaattaagttctttagtctcaaagaggaaaacacatctattacactgcccaaatttcagtggcttataacaacaagcattgatttctgatacactcatctgcagattgtctaggattctgctgagctagactgggctctgatgtaggtgccaagctataggttgggtccagatctgctccatgtatttctcatcctccatggacaaaactcagtagcacaagagggcaaggccaaatgtgcaaacacttgtcaaggctcagttatgtcacatatcctaacatcctatttgccaagcaagtcacatggccaagcccaacatcagtggagtggaagaatactctcctgtggaggtgtgggggagggaatgaatatttgctgaacaatagtccaatctacccatagtgtggttctgcttaacaaaagatgagaattccattgccaagatttacttgtcagtctttctcctaaaatacttctttttgtcatctccatctgttatgaatgagatgaaatgtgacaacaccttcactgctttttggcagagagaacagcttgtgctgggttcttaagatttttacaatttagatttgaatggatcgtgcaatgtgtattggtatctctattgaaaacatggtatctttgcaaagtatttaatctggagggaagacttttagtttagttttcttcttctttttttttttttttttttttgagacggagtctcactccatcactaggctggagtgcagtggcccgatctcagctcactgcaactgacacttcctgagttcaagggattctcctgcctcagcctcccgagtagctgggactacaggcgcgtgccaccatgcccggctaatttttgtgtttttagtagaggcgaggtttcaccatgttggccaggatggtcttgatctcttgacctcgtgatgatctg

SEQ ID NO: 23796 - DNA, 1048 bp, Homo sapiens
atcttactgataaaccgcaagtcgttggtcctgtgttatgttactgtgtcttttcctagcttattttctttatttaccctacattttctctactggattttgtctcttctgttatagaaactgtattcatgtaaagctcttaagggtaagattagactacgtaaagtccattcaaaagaaacttctgtgtgtatcagaaagatggggtttatatggacttctggcacataatatgattctctggtttcctttatgaagttggtcagtttcaaaggaattatttcctagtaactccacagtgtacacacctgatgagtgtttactttctacacattctgagctttactctcctctcctttggtctttggtataaatgtgcgctttggaggtttcatatctcctggtgaacagtaattccaatgtattctttctcatttgatttgagacagtacaggagctcctcctctgaaagcaaatggttccttcagtgttcaggaacacaaactaaacactaaagagtagaacctttgaaacaatgaatataatcattttttgtcataatcacttgatgaaggctaagatactacttcagttctttgaagccctttaggtaacagcccatcatcatttaaaaaagtatccataagaaaagcagtttcactcatttaacatgaacacaaaactgaaaatccattcatgatttgagtggttggtgtagcatcagctgagaaaaatgcacttaattctgtgactggtttcagagcccctgttaattataaaaatttcttttggctagatgcagtggctcatgcttgtaatcccagcactttgggaggccaagacaggcagatcgcttgagcccaggagttggagaccagcccgggcaacatggcaaaaccctgtctctactgaaaatacaaaaattagctgggcattgtggcatgcacctgtagtcccagttacttgggaggctgaggtgggaggatcatctgagcccaggaggcagatgttgcagtgagctgagatcatgccactgcactccaacctg

SEQ ID NO: 23797 - DNA, 1035 bp, Homo sapiens
agacacagctatgatttgagcagtgccattagtgtcttagtaccactcggaggacctgttttatgcagagatgaaatggaggaatggtcagcctctgaagctagcttatttgaagaggcactggaaaaatatggcaaagacttcaatgacatacggcaagattttgtaagtagaaaattatgagtaaaataaaatgttgagatgggaatattctgttttagaaatctggtaaaccttacagtattcatttagcaagtttgtgagttaatagtttttatctgctcaaagtaaaatgaaggttagtcttgtaaagggagaaactgataattgtttggaggagtagttgtagtaagacccacgctatcaggccgggtacggtggctcacgtctgtaattccaggactttgggaggccgaggtgggtgaatcacaaggtcaggagttcgagaccagcctggccaatgtggtgaaaccccatctctactgaaaatataaaaaactcgctgggcgtggtggcacgtgcctgtagcccgagctactgaagaggctgagaaaggagaatctcttgaacccggaggtggaggtttcagtgagccgagatggcaccactgcactgcagcctgggcaacagagcaagacttggtgtcaaaaacaaaacaaaacaaaaaaacccctacactatcaggaagtcctgtgtttttggtgtaaaccttggcaatattaatttatcctatttacttctctctgagttccaagttaaaatctggtcagcttttctcaccatttgcgctaaacagtctgatctctgcttttagactagttgctctgctttaagctttctgtatttttctagttgtcttactaattgttgagcctgaatttgatctggacccttaatgaaatgacctctgctaagcacagtaggagaatttgttttatgggcttttgatctttgattcttcttaatgatgtagaggagtggtccccaacctttttggcaccaaggaccagttttgtggaagacagtttttccatg

SEQ ID NO: 23798 - DNA, 1052 bp, Homo sapiens
agtcattttgtttaatagatacaggtcttttattgttacctctttcttcttgagtgagtttggtagtttgtcttccaaaggatttgtcccttttatcttaagttgtctagtttactattataaagatgtttataataggagtttagaattttctcatgttatccttttatggtctgtagcatggatctgtatttacatctactctctcgttcctgatactgataatttgtgtctttttttttttttcttttttcttgatcagtctggctaggagtttatcagtgttgttgaactttgcaaaaaaaaaaaaaatccagcttttggtttgattgactttgctctattttctgtttcagtgatttctgcttgtgtctttattacttctttcctttacattgctttggacttaattgctttttttttttcctagtatcttcttattgattgaagcttagggctacagatgtggtaacacaccctgtagtcccagctacttgggagcttgggaaactgaagcgagaggatcacttgagcctgggattttgaggctgcagcatgctatgaccatgcctgtgaatgaatagctactgcactccagcctgggcagcatagcattacactatctcagttaaccaaacaaacaaaaagattgaagcgtgcatcattaatttgaaatctttcttccaatataagcacttaatggcagtacaacgatgaattcagctttgcttgaaaaactctgctattacttaaaacatatttcattttttatgtaattcacttttatccttttctttttcagtactgtaaagctgtctctttatctgatgtacctagtttctgatgagaagttcctatgatgtgatgtttctttttctttgttttcaaaattttctgtctacttttggtttttagcatttttacttccacagtgtgactgagtatgttcttctttgtaattattctatttgtaattctctgagcatcctagagctgtttttttgttttccattaattttgagtaattcttagccattttctttttaaacatt

SEQ ID NO: 23799 - DNA, 1057 bp, Homo sapiens
gtacacttaaagcccatgggctcttcattttagtcagctggtggggaatgctgtccggcctgggatcacccttcagggcactgggctcccctctggcccaaggcaggtccagaaattctgttcaggaactgaggcctgaacctggggaccccaaaagcctgcttattcctccaccccactgtggctgagcagtaactaaggtgcaaaacaacaacatccctttacttttccatctttttaaacagaagaagcctttcaccatagccacctatagctgggaatgtgcttgggaatgtgctgggtcacactgtagtcagcacatctcagagcccaaggcccatggtgtactactacccaggcattgctgctggttactcggggcccatgggctctttagtcagcagctgatgaatcttgcagggactgggtccttcctttaaggcagcaggttctgttttgtccagatggtgtctagaaatgtgtataggagctagggcctggaatgggggcctcacgactctgcctggtgccctgtcctactgtggctgagcaggtatccaagatgcaagacaaagtcctctttactcttcactttccatcccttaagcagaaggaaggagacatttttgcccctgagctgtactgcctaggtttgggagaggggtggtgcaatcactcctttagccaccctgggtgtctccctaggtcacatgccacccgaagtcctctggctctgagtccagcccagcactaggagttgtttaggagttgaagtccttgtgtacctaggctgtcttctaagtttacgtaggtcctcagagcacttcagcccatggtcatgaggcttgttgagaaactcaagttccaaccgataggataggtgattaccctctggctaggtctggtacagattctccctccctacacaggtactggctgaccccagcatggatttattctctgctgtcacagggcagcactaagttcaatgtaaagtcccctggtcactgtgatgttcttcctccatatgcacagactctggcactgcaaggcctct

SEQ ID NO: 23800 - DNA, 1023 bp, Homo sapiens
atgcttatttagttctacttagaatagccacagtcactcctcttgcctggattttggaaataaataatctctgaatatttttctaaaagcagagagagagagagagagtgagagtgtgtgtgttttcttctagagaggcaaataagtaataaagtagaaactaaatttggaaagtaaaaatggttactttttaaaggtcctgtttattcagtcatagaggaatggaaaatggagttgctcattgctttatttttttaaacctatgcctaaaattgtattaatacttaaagttgtgtaccacagaatctagtgacttttcttagacattattgcagtttaagaatatgcatatgaaagaaaagcttaagatggtaatttttgaattacactttaatacgtattttcttgtgaatttttaagacaatgaacagtagtaataattaggcattgcatgtaaaatgttttattcatcttttgaattagaaacgtctaaaagcagcagaagctgagagtaaactgaaacaagtatatatcccaacctagtaagtaattgaaatcttttaaaatatttgttttggtcttaattttatcattgcagaatatgtcattttgttcagtttcagcaaaatttgaacttttgtgtatctttcttcttctacaaagcatgagacttactattataccactacaataaaaaggagccagtgagagaaacctcaaatagactaacctgaagactagaggaagaaatgtactatgtactatacttttattaaatcaaagctgcagggaaagcgtcagaaaacctatgaaatgctgtattatttgaagcaaatgtgtttcagaaagctagcagcttttcaaactatagattttgtttgggtaatgcatactgctctttggaggtttgttgtttatttggttgaggattttacattgttttcttggttccaatggcaattagaaccatatttggtaaatgtgtgataaataatggagaggttttgattattttgtttgtct

SEQ ID NO: 23801 - DNA, 1028 bp, Homo sapiens
taggtagtgccacaatgtaacccctaaggatgctgttataatgagactccataatcgagacagtacagtccagtcttacatggattcattaggtttaaataaaatttgccaatttacactaattagagactgtatgtctttgtaaacctctcgtttttctcatgaaccttttacaattgtcatacaacattatggaaattcacccttgattcataacaaatactatatttattagaaggtctagcaaattacaagtaaattttaaactcatttttgggtgagttttctgaaattacacattgcattttcataagctagcatctaaacatatggttgagcagcctgtttgtccagtttggtttccatttcatgatcatgtatcatatatatcaccacataacatttacatgacttactactcttattttcaacacatttggtcttgcttatcttttttatttttatttttgttagcacagagatcatatgtgtccatgaattgtggatcgttttgtcattaccatgtctctgacaatatgtgtataattaatatgttagctctggagtcacattccaggctagcatgttagagccgtgcagcttttgttccttaaggggtgacaaaacttgctgtctggcctaacagataggaaatcctaaagccattctaagaaatctcttactatgaaatgttcccctttgatttaaagaggatatcaataaaaggaatgatgactgaaaaaaacattttttgttcctaaagataatttttagcagaatagttgaaaggctttaaaacttaagtagcagctctataagaagaaaaatgctttgtaaagggagttgagggctgggcgcggtggctcatgcttgtaatcccagtactttgggaggccgaggtgggtggatcacctgaggtcaggagttcgagaccagcctggtcaacatggtgaaactgtctctactaaatatacaaaaattagccaggcgtggtggcaggcgcctgtaatcccagctactcaggaggc

SEQ ID NO: 23802 - DNA, 1070 bp, Homo sapiens
ttgagattcccactcagatgtgactgatttcagaatcttctcgtttaaccactgttatgaatgaaatcgtggctctcaaatgcactgtattaggttctatcagcaaagtagaaactatataagttatttcaacagctaatttcataaaagaaatcagtatgatggatattggaggacagaataaatcaacagagaacatggggcaggggcacaggaaacagccaccattctcagggttgggagagcacaaggaagaagctgggcttatcacaacccagaagctcaaggagggcctcagagccagaacgcaacccagaggagagggcactgccctgccggtgcaggcacctctcaggaggtgtgatgaggctggttctggtacaagcttctgcacctacctggggggacactgacagggacaggaccgagcagttcctacctccctgctccagcactgcagaatccttctagcgccctgctggtgtgacacagagccagacagcaaaggggaagtgtgcttgtagagtcccacccacccccagcatcatggagctgagaaacaagagtgtaatggaggcacacatgttagaaagtgcccacattcttgtgttacgaatggaccttttcattgggataatgggcctgtttcctatgtccacagggtataggatcctgattaaccagagtttccaagatgaactcaaagtactggaaaaaatgttctgttaatacttttcatgagctagttattaccatcatatactgaaatagatacaaactcatgggaaagccttgttctgtgtgatccaataataaaatcaattagcactgctacttaattatcagcatgtcagacagatgagcataccaaacagagtgttgatgggcagaagaaactgaattggaaacaacacccggggctgctgagatgtttaggcctcttagctttagggcagcctgcccccttcagtggcttgcctcctccactcaccctctacctttgcattgcaggttctttttttttttttaattttattattattgtacttcaagttttagggtacatgtgc

SEQ ID NO: 23803 - DNA, 1065 bp, Homo sapiens
cttccacacttccctagcagaggttctccatgagggccctgcccctgcagcaaacttttgcctgggcatccaggcatttccatacatcttctgaaatctagatggaggcccccaaacctcaattcttgacttctgtgcacccacaggctcaacaccatgtggaagctgccaaggcttggggtttccacactctgaagccacggcctaagctctacatttgcccctttcagccacagctggagcagctgagacacagggtaccaagtccctaggctgcacacagcacagggaccctgggcctggcctatgaaaccactttttcttcctgagcctccaggcctgttatggaagggactgctgtgaagacctctgacatggcctagagacattttccccatggtcttggggattaacattaggcttcttgctacttatgcaaatttctacagccagcattaatttctccccagaaaatgggtttttcttttctatcgcatagtcaggctgcaaatattctgaacttttatgctgtttcccttttaaaactgaatgcagtacccaagtgacctcttgaatgctttgctgcttagaaattttttctgccagatatgctaaatcatctttctcaagttcaaagttccacaaatctctagggcaggggcaaaatgccactagtctctttgctgaaacataacaagagtcacctttgctccagttcccgagttcctcatccccacctgagaccacctcagcctggacctttttgtccatatcactatcagcattttgggcaaagccattcagcaagtctgtaggaagttccaaactttcccacattttcctgacttcttctgagctctccaaactgttccaacctgtgcctgtcatccagttacaaagtcgcttccacattttcgggtatcttttcagcaacaccccactctgctggtaccaatgtactgtattagtctgttttcacactgctgataaagacatacccgagaatgggaagaaaaagaggtttaattggacttacagttccatatggctggggaggcctcagaa

SEQ ID NO: 23804 - DNA, 1030 bp, Homo sapiens
gttggtgtgtgtacactcacagttttttatattgctggagttacagtgtgcatactacttttttaaactatagaaaataatcgtttcccctatatccttagacattcttcaaaacattaatggtcatgttaacattaagtacgatacatttctatattttttcctataataaatacctctgcagtagacatctttgaacctaaatgagatggagtttcgctcttgttgcccaggctggagtgcaatggcacaatgtcggctcactggaacctccgcctcccgggttcaagcaattctcctgcctcagcctcccaagtagctgagattacaggcatgtgccaacactcccggctaattttgcatttttagcagagatggggtttcaccatgttggtcaggctggcctcgaactcctgatctcaggtgatccgcccgctctggcctcccaaagtactgggattacaggtgtgagccaccgcgcccaccaggaacctaaatcttgtggacaggtccagcgaattcctttgaattcatttttagaattttcctatatcttcaacaacattcagtatattttaaattcttaccaggcaaaaaaaaatatttcactattgactcaggatgcgtttctttattagtgcagttgaatatatttttcaggtgtttggtagtcatctgtgtttactcttcaatgaacacctgtttttatctttgtgtattgactgcctgttagccacaggataaatcagaaatttcttaccttagcatataggactgtcggggttggatctaggttttgtgagaccgaagcttatacagtttgggaaatgctctttaagacaaagacttgaaaatggattacttttgcacattttagaaatcatatgaccatgtaaacacagttaataagcctttcccaggacctgtgcccaagagggaatctgaagcttaagcttcatctgcatcaagaacactttgtcatctggctccactggcccgctctttctccacttcctgcctccagcagaca

SEQ ID NO: 23805 - DNA, 1048 bp, Homo sapiens
agggcagaaaagcttctctatcttttcctctctgcccaacttttcccaccctaaatcatttcttggactcattaggtgaatcatgagtcctaaaccacagctgaactctgcattcttctgttcattcattcatccatgcacatgtttactctgtcactcatttgctcattagtatttactaagttctgtctgctaaacattgagctaagctctagggatacataacctattgtttcagatggattgtacatgaacttccaggactattttactttgtaacaacaggcctataaacaaaccactgtatggcaaatatcactatgagtcacatgaacagactgctgcaggaacactgaggaaggagacccaccctgcccagggatggccagccctttccccaagggaaaaattatgccttttgattccttttctttctgttgaaacatgtctctttgtactttctcaggctcttaagatacatcttgccttgtgttatatttttctgtgtgtttgttttatactcactattaaattgcatgctccttgaaactataaactcactgatcctaaaatcttcctcttgtacctactgtagtgctttgcacgtaattaataattatcacttaataaatattgctgaatagctgtgcaactttgggcaagtcaggttacctctctggacctcacttttcctcatctgttaatgaaatacttagattagaaaagtaaaatctaaggtatcttctaactctgattctatgagtgactatattattgataggtgagaattaatttttttctagtggaactgaaagctgtatactaattaagaaaaagatgataaagttagtattcttaaacatctataaaattaatgtacttacgggaagttgaacgttactttttaaaattacaaggaatagatttgaactgtagagcagcatggattttaattctaacttcagcattggaagtaatattaaatacccttttctgttctgataaaatgtgcttgctggcacaaaatattattaaataataatattgc

SEQ ID NO: 23806 - DNA, 1200 bp, Homo sapiens
agatggattgcttgagcccaggagttcgagaccaacctaggcaacgtggcaaaacccagtctccccccaaaaaaataaaacaattagccgggtgtggtggcactcacctgtatgtagtcccagctacgtggaagactgaggtgagaggatcacttgagcccagaaggttaaggctgccgtgagccatcgtgattgtgccactacactctagcctgggcaacagagggagaccttgtttcaaaaaagaaagaaaaaagtatctgattctgcttcatggagaacattattttggaagataaagagaagcgattaatgcttctattgttcaattaatagtaatcaccctttaccaaagaagcccactgccctgctgccttctctttctccttccaaccatctgttcatccattcggttgacattgatcgaacatcttttatatgctaagcatcctgctagacactgtggaaacaggaatgaaaggcattctccctgggaagcaacttgtgtatcaggacttgtacaccaacaatgacaataccatgagacaaatgctgtggtggaaaacagagagggcacttaactcaccccagaaagttgggagactaggaaagcctcctgaagagagtgatggctaaagcttgaaggtgagaagtaaggaaagagaagtaattcaggtgaagagtgtggagtattctaagatgatcaagaaaaatgtatgaaacagatattccaacaaatgggagaaagatcatactagaggaatgtaataggattttcagtcattgttgactgccattttgatgatggatgttagtttgatactaatctgcccagagtacatggtttttctccaccatcactcacttgcatgggtgcaggcatggaggaggaaggtgattacctggggcagtctttgctggttgggtacagtgcaaagtgagggagctcagggcatgaatggtatttaacagagatgattgtaatgataaactatgggctctgagatggaaaaggagaaaagtgaaggtaggaagaggctgatggagtaggagcgactgttagtggggggaagaggggtgtcaatggacatttgagacctttcactaaggtcaaagagttattactgtggggatgcctgaagaagtggttagagaatgtgttgtttgtacatgtgattttggaagcagtgcagtttccag

SEQ ID NO: 23807 - DNA, 1025 bp, Homo sapiens
ttccacatcatgtactcattaagtttgaagaacgagttaaagttaccaagatttctttattcaggttttgttttgtctactcaaacagaagtatttgctgggcaacaaaacagtgattctctttgtaatctgtatttgttcaaagccatatttattttacctgtttctgtgattggaaaatagagcatgtaatttgttctcctgatttgtttaaagtttaccagtaaatcagaagctctattactaaaaatacgtggagttatcaaccagttggcatttggcattgacaaaaggtactgctaagatattttttatatcatttattgagtgattgatttagccaatgttgtctcatctgattattgttctactcagtctcttgtgtcttgaccaggaaagtgacccagatggcttttcttaaagggataatttctttttaaattattattattttatttattttattatttattttattattatttttaattattaatattattatttattttgtcaagactcaacataaaggggataatttcatattatttcctgcttcttatattctttaaatatttcttaaattttacaaccaaaatgttacataacatttagtttgaggctggaataaaataatgataatattatactagctccctgatttcttttacttcctttcccacacttcagtagcttccctctactatcactttcttttactgatttgaaatggaattgaaaattttggtatgtatcttcttagccttgctacttctcttggttttgatttaaggtaatagggtctgtcactttttttcctataaaatgtttatttatgctatatgttaatttttgaaatcacttaaattgatagtcactcattcattcggggcaatgctctcattagtggctaaatgtaaaactagccgataatattgctgtcatatttacaggagagcgtggcagcaaatctaattgctaaactaatttagaatctttctcttctccacgtagcaaatcaatat

SEQ ID NO: 23808 - DNA, 1056 bp, Homo sapiens
tttaagctgacctatttttttctgtgcctagaacaaggaaaaaaaatagtcacacgagtctcccataggtttatgaatattatttacattcttgggtccgctcagtcacaatttccaaataaccacatgtccctgcaagttgtaagagcaagggactataaaccacttccattgcattcaaggcctgcttggatccaagaggcacaaatggagtcttaatggttaaaagacttgagatgtcctgtcaagaaagaaatacatggcactctcatttcagacgttcagagcagtcatgcacagtcggcagcttcacttccattttcccagccatggctttcactacctgctaatgagatgatcccttattttgaaaacaactattcctaggatgacaagagctggaataaatgaatacaaaatcagaaagttcattgtgaatctagatgttgcacctgggcaggttttctcaatgaattgaattccttgagtgaaggcacacattggattagttgtcacagaaacatttgagctgcctgtcaaggaaaagattgacagtgtcaggtgtggtttatctcaggtaatttaatcaacaagtatttaccaagcgcttgctaagtacccttaatgaaaaatacaggacactttagcaagcccagagtttacaatttgatgaagcaagagtgagcagttctggcctttggcttcatttgaagatggacatgcttttgtttctattttgggtatagattcattaccatatttgtgataaaaatcatgatcccttagcacagactatcctaaagttactgacattatcacttaaaattatttaaaacactactaaattcagccatattctttggttgtctttggagtggccctgagatttttttggttgttttttttttgttttttttggggttttttttttcgttttttttttttttttttttttttttgagacacagtttcactctgccgcccaggctggagtgcagtggctcgatctgggctcactgcaacctcagcctcccagattcaagtgattctcatgct

SEQ ID NO: 23809 - DNA, 1056 bp, Homo sapiens
cattcttttttatttttatttatttattgattttcgagagcctctgttgccaggctggagtgcaatggcgcgatctcagctcactgcaacctctgcctgccaggttcaagcaattctcctgcctcagcctcccaagtagctgggattacaggtgcctgccaccacgcctggctaattttttgtatttttagtagagatggggtttcgccatgttggccaggctggtctcgaactcctgacctcagtttatccacctgccttggcctcccaaagtgctgggattacaggcatgagccactgtagcctgcccattgttttttattaatcactgcttctatctgctttatggcttccaaaggcttttgatatctctacccattgatggcatacctcttgcccccatttcctgctcttaatttttcattgcttcgtgttttacacctttttaaaatttttcctttactaacattttgatggcatgttgggagggattagagataaatggctttgttccacctgtcttgaactagaaacacttttatcatgtggattatatcgtgtgaatgtgaatgttttcattacaaaaatatttcacaaaagattaagctaccattgggcattgtggacagatcattatttgatactagtagagtggacagatcattatttgatactagtagagaaatttgagtttatttgattttttttttttttttttttgagaccgtcttgccctgttgcccaggctggagtgcaatggcccaatctcagctcactgcaacctctgcccccaggttcaagcaagtctcctgcctcagcctctcgagtagctgggactataggtgcccgccaccacatccagctagtttttttgtgtatttttagtagagatggagtttcaccatgttggccaggctggtctcaaactcttgaagtcacgtgatctgcccgtctcagcctcccaaagtgttgggattacaggcgtgagccactgtgcctggccaagtatatttgattttgagaaaatattgaaacttactctcatgtctttttttc

SEQ ID NO: 23810 - DNA, 1047 bp, Homo sapiens
tctgaaattcatcttgagcaatttgtatcatctctatgaacctcaactgttttcatctcttagggctggctgtgttataaagaaagtacgtacatactgcatggctgagagttgatatgcaataaaagttattaattattactggcgatgagtacctatataacctcttttggttttttcctaataaagaagataatattattaggattattctgtcttatactattttaattgaactaacagggcagaaaaattagataaaattagcaaaatagctgtttattaaaatgcctcattataaatgttgccttaaaaacctggatatattgctgagtgatagaagtggtgacaaaaataagacctcttaaaatatgttgttttgtgtaccttttatgtttactttttattttaacagaaaaatctatatagatgtttcatttaatgataaattggtaaagtcctgttccaataaagtaaatattgattatgacttttatataatcttggacgtaaagtaaccatggactgaaaaagtgatttttcacttgatgcctcaaaaatttgattttattatgccaatagtgatattgagtttgtgactagaaaacccagcagagggcgccacaatcataattctttgtcatagcccaatataattaggataaatagctcaaataataaccctaagcttttaccatgtagacatataaagatgtgtctaaacatttctatttgattcatttataatatatttaatatattcagtaattcaaaaatacaaaaaaatagatttttcctggccgattttttaatttttaaaaatatcagtttaatttttctacttctagctttaaataaagaagtacttttgatagagagtgaaagttccatacaagagtatcagttcataaatcaccaccatggtagtatgttaaaggacaattagaatgaggaaaaaagtttctaatagatgagagaaccaagagatggaattatctatttattttaagaatttgtttctaggttaataatgcttcctagtaatag

SEQ ID NO: 23811 - DNA, 1044 bp, Homo sapiens
tccaaatgcaagtttatgatgactccatgagtttgtaaaactgttacagactttcaaggatctcaaagcacgggcagaaggcatttgtttctgggcaatgtgctctgcttgttggagtgacccagctaaacagagcaagaagttattttgccttttcctgccatttctccatgcatttgggggctttaagagtgctttgagtctaagaaatatatttgaaatataggttggaatcatctttgttccagtcatgttgaacttaaggctaaagtcaaagagcccaactcttcttacagggctccttgagccccaccagtgaaattgtttcttatctgaccagcctagacataccagaatctcacttagactcaaactgacatccctaccctacaagctgtgaagctgactttgaagcaatgtggaatgtgtttgctttggtgactcaggaggttttatatatatgtgtgtgtgtgtgtgtatgtgtgtgtgtgtgtgtgtgtgtgtgtgtgtatgtcttatggatggtgaattatactgttaattcaaactaatatttctggataatacatattatattcctactactgtttcggtttgttcaatctgaaatagccctagctggacctgtatctctttgcttctttcctggtctctatgttatcatacttacttcaacatcatttaacataatggagctactaatgactcttccaaggtttttgttgttgttgtttgagattgttactttaatgggaccaaaagaagaacgtataagacaaaagaataaggtcaggagatcgagaccatcctggctaacaaggtgaaaccccgtctctactaaaaatacaaaaaattagccgggcgcggtggcgggcgcctgtagtcccagctactcgggaggctgaggcaggagaatggcgtgaacccgggaagcggagcttgcagtgagccgagattgcgccactgcagtccgcagtccggcctgggcgacagagcgagactccgtctcaaaaaaaaaaaaaaaaaaaaaaagacaaaagaata

SEQ ID NO: 23812 - DNA, 1032 bp, Homo sapiens
agtagccacatgtggctactatattggacaggaatgatatagagtatttctatcagaaagatgtattaagacagtgctacttcctttccaagacattaattttccacagtagtatcacatactcttagaattctgtgctattggtattgatcgtaattgtagaaccttttatcccttattttttttattatccatttttaatatcatggtattatttttcacagaatccctcttttacttggtgtagtcagaattctccattcctcctcttaacttacattttctcttttcttaaaatggcctgtttggaattagccttgccacccctactaatttgaattccacatcatgaaatgaaagttcctactttgtgcttacctggccagtacctgggggaattcacctattaaatcatattcttccccttaatatattcctttggttcctcttccttaacaatttttttctcacttatttggtgtctgttaaatatcaaaacacttttcctgtgactcaatatatgtttatatgccaagtctttttttcagtttgaggtacttgaagttcgtgccttttcatttgacttgctggaaaatagttattccttccctacatcatgagttttcaggattaaaaggttttttgacctttaaattgtaactaataatttgcctaaatcagtgttgctgggtgataacatctaggataacaagtgagttacaggttcacagtgatgactcggaattaatccttagcctgtgtcatcaagcttgcaaatagaggagtctttagaactaagactctatctgctttctctcatggcacacggcatagtaccaagcatttcatcttgtgcactcaatagatgtagatgattaactgtataaaaagactgcgctatcttagggtagggttaactatctcttgatacttctttttttttttaaacccaacacagactgaataatatagtgccttcgaatatctttcagattggtgcattgatatttgtagatataatttcaaatttag

SEQ ID NO: 23813 - DNA, 1074 bp, Homo sapiens
gctaggaagagaagggaaccagggatgcctgctcccctctttctagatgagtagccattcatcttcagtttgtatccctttcaaatgcatcccgaacccctgggattcccttgaaaaatgccctcttttttcttttctcctccttggttctctcttcacagataggtaattgtgtctccatactacgggacattcccctaagatgcaccctccaaactgggaaaagttaatttcccaaaccttaaactggttggcttaggactgggctcaggggaagtccaacatgtcggcaaaagggtagttttttttttttttttttttttttttttttttttttttttttttttttaccagttgggcttttggtcttcctctccccatgcaaactggtaaaaggcctcaggatttttgagttgtcctcagccccctcctcttgtttcattttaatacatgttttctaataacccagtttgtctcttcttactttcagaccatcaaactccaaatggtcatgcaaccaaagtcttgaagtctcggacaatgaccccttctgccaggaactcttagataggcttctgactgccattttccccaaaacaagaccctctgtcagcaggaagcagttaagatctgtcttcatccttatctttatccttattctaatgtcagttagacatacttctttagaggggggaatgtgacagccaagtataaaggggtcgctagagaacctctgggactacaggtgtgtgctaccacacccggctaattttttgtatttttagtagagatggagtttcagcatgttcgccaggctggtctcgaattcttgacctcaggtgatcggctcaccttggcctcccaaaatgctgggattacaggtgtgagccactgcgcctggcaacagatatttactgaatgccagttatgtgtcaggttcagttgcgttgattattcactctcagagcctcccagatttggtctttcccttatattatttatttatttatttatttatttgaaacacagtctcgctgtgtcacccaggctggagtgtagtgttgtgatctcagt

SEQ ID NO: 23814 - DNA, 1272 bp, Homo sapiens
tggcactattgtctaatttggtgtgccttgtgttgtaattcaatcatctattattaaaagtagatgtggctgtagggagcaaaaccacatacaaatccataaacatacatatgtgcatatttacttatactcacatatatgttcaataaggtttttgttttacctgctattaatgtttgtactagtgagtcataaatggaaaatatctattagctctaaggtaaaataaaataggttttgatttagttcaagtgaaccatctcatttaaaattagcccaggggtcttgtaaagaatgcaagtaatctaaacataataatgcacattgcccaattgcttctgtgtatgatacaggttcagtgctgtagtgctttgacagcccattactgaatgtaatgaacagctatttttaaacagaagaaattcaagttgacagcttggcaatgaaattcagctagtgggataatttttgtcatctttagtatagagaatggattcagtttggtttaagcaaatttgtatcatgtagtttatagcgcaaacatttttattaaaagataattttattgtccattttgtggagaggggcagatgttactgttaagaatatgtaatcagcttttaatgaatactttaatgaattactgaaacatcatttctagaacctaggtttaaaatgaaatttctcatttttctttcctgccatgggtgaaatagtctaataaaacgactataagattaagaggtgtttttctatgctgctttttagtctttcagagtttaaaacaagtagttttaagaaataagatagtctttggaaatggatataaagcttgaggcagtgttgtcttaatggaagtaagaattagacaaaataccattgagagagagaaggaaaatgtctgcctgactatattttagagaaattcttttactaagaataaggagacggtaacatctgattttgacaactcttaaaaaataagttggagaagcttcgtctgcaattcttaaataaaacatatatttttaactcatactatgaaaaataatagggtaagtcagagtgagttatttcattctcttctgtttacagcagaaattgtttgagaattctaattgctattttttctaagttgagctaattgccagagcttttaaaatagagacttcaggttcaacgttgtgcattgtgttaaatgtggcttgaaaaatacattactcaacgaaatctgggtgaacaaagtaagtaaactgagtactttacccaata

SEQ ID NO: 23815 - DNA, 1089 bp, Homo sapiens
ttccctaggtgatgaaatgtattattatttagaacatttattttagtgtgtgttctgtattttaaaagagaaaggtatttaagcagcaaagatgtaactgttatgaaatttatttttataaatagctttcagcagaaatcagaacagtgctttaaaattacagttaaaaaatcatttaatcatcacactccttgatggctaatagagtagtaagtgactcccccatatcccccgcaataggctattctcgatatgctcacttaagtggccctaagaatagtactagtatattttatgttagcaagccttgatagcaaagtgccaaaagttcagggggcatttgtctcctttctcaaaaattcatttaagtcttgctggagctttaactggggcagacagccatacaaatgacttgagataaaatgaaaataatggactgagctgggtgctggggatggtagttatgctgagcacacatcaataagcttggagtgtgattctatgctaatgcaagcctgatggatcagctttctcttttagcctggaggaccattaagctctggaagctgagtcaaactgatagagttggcaaatacagcccatcagttagcagcaatagttaactgactgtgattcctaatatgcgaaactaacattgcttaaaaaccctccatgttcaggacatagatcagaaaggagataatagattctgctttaatttgcataatcaaagcttctcattttcccaccttatagttaacagaagagggaaaaaaagccatggctaccttcattttgttgttagtcttgaatcatagcaaataattttcataaaaatgtaaataacttgtttcaaaataaaagagtatatttgaaagattctctgtgttatttctttggaattaaactgtaggcacagttacatgggttgggtagtaagtgtcttggggatatgaaaagtaacaaagtcttaaaaaattgtgagtctttttagtgattgattattttcatatataatttataaagttctatacttttacttgaggatattggctttgcaaacttatcaaaaacagttcaaattctgtt

SEQ ID NO: 23816 - DNA, 2581 bp, Homo sapiens
ttattatagtttttaatgacctactctgttgtttggatttatgattatttaattggccttataataatagatctaaattcctttttttgcttttatttttgatgttccaaacaaaactgtagtgaatatgtattcatatatctatatgaattgttgctgggtcaaaggttttattttttgggtcatgtgtaatctgacagtttaaaattatacaaaaatgtgctgaagtccttgcgttcattgcttagggagtatctgtgtgcaagaggaacattatatgaatgaatagaaatataattcaggtctcagctatttagaaaaaaaaatgcttcttaattctcttaatctaaagatttcttctttatctccttttgctttttctccttgcactttgttaaagaaactattgttctgtaggttttcctgtagagtctgagttttgctgattgcatccccatattgtcatttaacatgaactgctaccttctgtatttcctatacattgatcgttaaatctagaggcttgagccaattcaagtttgattttatttacttatttattcaaagctacttcatagggagagcttttcttctctgccagaaggccacagtatcaatcttattgtagtattgtagtacttacagccattcttgatcaatgccatggatacctatgttaatgtctttgcagtcctttaagttgttccagtttggatttgcataacacaccacttcaaaacttaatggcttacagtaatgtcagcaagaataggaagccctagaccttgttttcccacaaagacactgacttaacaatatatgacccaaaaacatttaggatagctccagaagccagttgtgaattcacagcaccctaggcaggatcaaagccatgaatagttctattgaaagagataagacaagtagttccatttgaatgatgtcagcccctctcttaagccagcatagctcataatagggaggaaaagcccaactcatggcttctgccttgagaggaaaacagaaaagtgaaatgtacatgcaatatactagctttttagggggtgaaaaagtaaggggttgggtgggagttgggctgcccagaatgttgatttcagtcttgcctgactcagagtgctagctgaaccagcataccttggatacctggggtctacagtgaacaaaagagaacttagtagctttttgcagcaccaagaaccctgccagtaccacagacaggcgcaagagggaggaagaaactataaaccgaaaaagaaactgacaaacttctctaattgggaatttacatgcagagagtgagagaagatacatctccccataaaaggattgagaggctgtcagattctctggctgtgctgtttggtgaaggtcttcccctatagaaagccagtatgtaaagattgggagaggtggctgtttttcaaatgcaaaaatcacaacaaaaaataacaaggcacacaaagaaacagggaaatcagtcaaagaaacaaaataaatctccattaactgactccgaagaaacagagatctattagttacctgaaaaagaatttatgataatcttaaagaagctcaatgtgttacaagagaatacagatagacagctaaatgaaatcaggcaaacaaagcatgaacagaatgaggatatgaacaaagatatagaaactataaaaaagaacaaactagaaattctggagctgaagaaaacaactggttaggaaaattcactgtggaagaccaacaagagacttgatcaaacaggaaagaatcagctaactcaaagacaagtcatttgaaattattgagtcagagtaacaacagcaacacaagaatgaagaaaagtaaagaaagcctgaaggacttatggtgtaccatctggctgaccaatatatacattatgggagttctagaaggagaagagagaataggacagagagcttatttgaagaaataatggtcaaaaacttccaaaatctgaggaagaaaatggacattcaaattcaaaaaactcaacagactgtagatatgatgaatcagaagaggtgcacactgtgacacattataaactgtcgaatgtcaaagacagaatctgcaaagcagcaagagaaaagcaacttgacacatacaagggagctcccataagttatcagtggatttctatcagaaatgttacaggtcagaaagagttggaagatatactaaaagtgctgaaagaaaaaaaactgccaataatactgtatctggcaaaattatcatttaaagatgaaggagaaataaagaccttcttggataaacaaaagctgagggaattcatcatttatcatcactagaccttctttacaagaaatgctaaaaggaatctttcaagttgaaacaaaaggatgctagacagcaacacaaaaacatatgaaaatgtaaagctctctagtgaaggaaaatatatagataaatacagaatcctataatctgttatgaagtgcataaatcacttaattccaaagtgattccaatttaaaattggatatttatcttttaaattggattatcttttaaattccaa

SEQ ID NO: 23817 - DNA, 1034 bp, Homo sapiens
ctactaaaaatacaaaaattagctgggtggtggcgcatgcctgtactcccagctactcgggaggctgaggcacgagaattgctggaacctgggaggcagaggctgcagtgagccaagtttgtgccactgtactctgtcaaaaaaaaaaaaaaaatcaatgaaacataaagggagacagcaagagagaaaaggagagacaaaataactggaaaatatagaaatagtaagttccatgggaacggtgagagcttctctatcagaagttacttcaaatgtgaatgtttactttaaactccttaatcaaagaacagagagtagctgatttaattataaaaacttcaaacaataaatgctgtttataaggcactcactgtagatatgaagacttaggctgaaagtgaaaggatggaaaaagatactccatgcaaatagcaaccaaaggaaaaaggaggttagccctacttagacaaaataaactttaagtcaaaaactcacaagagacaaagaaggacattatataatgataaaaggatcagttctccaggaactcaaaacaagtctaaatatatatgcatctaacagtagagcacccaaatatataaagcaaacactagcagaattgaaggaagaaatagtaacgcagttaacagtaggatatttaaatatttcacttttcataagggatagatcaactagacagaagatcataaggaaacaaaggacttcaataacattatagtccaattggatctaacagatatacagaacactccactcaacaacagcataacacacatttttctcaagcacatatagaacgttttccagtataaatcatgttaggccatcaaaagcggtcttaacaaatttaagtagattgaaatcactttatgtattttttctgaccacactgaaataaaactagaaatcaacatcaaaagggaaactggaaaattcataaatatgtggtgattaatcaacacactcttgaacaaccactgtgtcaaaaaaatcaccagagaaattagaaaaca

SEQ ID NO: 23818 - DNA, 1033 bp, Homo sapiens
cctggggctcccaaagtgctgggattacaggcgtgagccaccatgcctggcctaaagtactattttcaaatagtactttaaggggttggtatgaagattttcaaaagaactatttatgattcttcctaaaagaattaaatgggcaattattttttgctttgagatggagtctcgctctgttgccccggctggagtgcagtggtacaatctcggctaactgcaagctccgctccctgggttcacgccattcttctgcctcagcatcccgagtagctgggactacaggtgcccgccaccacacctggctaatttttttgtgtgtttttagtagagatggggtttcactctgttagccaggatattaaatgggcaattcttttttaatcagtgtatgaaatttgctttggaatttcatttgaatgattattttttattgtgaagaataaatgagataatgtatataaagtacataccatagtagtcagcgaataaattgtagctattactactgttgctgtgaggctcaatctaataacttgtctaaggttcgaacttttgcatcagcccccaaaatcctgtttgtactaaaatatactatctaaaaacattcataatacaaatattccatatatcctctttcatttttaacaaaaatttatggatgatacaatgtaagcaagaacctgaggatacaaaaaagtaagacttggtgcctgtcacctaggagcccacagttggtagagaggacgggcagatataggaaagaagaaattgcttttcctaaattatgcatcccagaaaatagcattctggagtgtggttttgaacagaattctattctgcagatagcaaaacataagttacatgttgatgagattaaatgttcaaatcaaataatgaaatatatttatttagatacatttaatgtcttcttatataagttatcaagttgcattttttctagctgcatttaaatctatgtgcatttccttcctacttctcctgagattgatatgcagccagcatttcagtt

SEQ ID NO: 23819 - DNA, 1079 bp, Homo sapiens
acaatgatgagatcaaaattagttactcatgaattcaaccacagttattaaactttactatttttgaggtatagggatccaacagtacctgttctgaagttcattttagtctaatggactttattagccttaaagatgttatctagttaatgcaatatattacacataggcagtgtaattgctctcctctgtttagagagtgtatatgagtagtcataaattcttgatggcataacccaaactggtatcctaaatccttgacttctaattttagaccattgtacttctaaagtttgcttgtaatttgagtattaagaaattaaaggacaagaacatatgaaggccatcatgtagctcaaggtctaagggaaaataatgctgtttcagttctcaatataaaacaaaaataattatatgagtaattattcattttgaaaactgatcttcaagtaaaactgggcttaatcaaaaaaggagtaagccctgaagaccttttgcattgtaaaattctagcaaagttgtgattcccgttgattttaaagagtgataggagtggagcttctgaatatcccctgagattttagaagtatatgatactggcagttgtcacaaaaatatatttctagagaagtctgaataattgactctttaaaaattatgttttcttgcaaaatctctaaggaactgaagaagtttctaagaatcacaggcatgctcttaaagcattaccatgagcctttactctgaaatacctcatagtggtacctcataccttctttgcagaaatgagtgcctaagtcctaatggggagaaatgtactccaaaatgatctgaagccattggcagggagacagaagagatactattagcagagcagaaacaaaaataggtggatagagccaatgggttttttttttttggtagaaactgacaaacgattttaacgtttatatgaaaatgtaaagaaccaataatagtcaaaatcatctggaagaaaaggaagaaagttggaagatttacactaccagatatcaaggcttgttataaagctacagtaattaagatagcgtggtattggt

SEQ ID NO: 23820 - DNA, 1007 bp, Homo sapiens
atatcttaaataggacaaaaaaaaaaaaaccatacagaaaagattgataaattggtctatgttataattaggaatttctgttattgaaggacactatttagaaagtagaaatgtaagttacagagtaggaggcggtatttgaaatgcatataactaaggacttattttcagaatatataacaaattcttacaaatcaacaggaaaaaaaagaacctaatttcacaaatgtgaaaaacatgaacaggcacttcacgaacagtatatccaaatggccgataaacagaaaaagatactaaaccgaaatagtcaccaggtaaatacaaattgaaaccaaaataagataccaacatatttccaacagaatggtgaaaactaagactggcaaaaccaagtattgataataacgttgagcaattgaaactcatatacactactaatggaaaaaccattttggaaaactgcttgacagtgtctgttaaagctgaaagtatatgcatcctgtttcctggcaatttcgttctctggtatagtagaccctacaaaaatgtgtgcaccaaaagacgtatgcaagaatgttcatagtattttttaatagctgaacactggaaataactcaaatgcccatcaacattagaaaagacaaataaattgtggtttattcatataatggaatatttttaaagcaaagaaaatgaatcaactatttccacacacaatatgctgtacaaatctcacaaacataatgttgagcaaaagatgacagactcaaaataatacatacagtcatgcatcacttaacaatggcgatacgttctgagaaatgtgtccttaggcaattttgttgtgcgaacatcatagagtgtacttacacaaacctagatggtatagcctgctgcacacataggctatgtggtatagcctgccgctctgaggctacaaacctctccagcatgttactgtactggatactgtgggcaactgtaacacaatggtaagtatttatgta

SEQ ID NO: 23821 - DNA, 1032 bp, Homo sapiens
taggtaaaaacgtttagagctgctggcagtgttttttgttgggatcatttgttgcatttttagtgtaacagtggacttagaagttaaatgtcaacctttggccgaaataatctgctagtcaaagaccttggacatttaggggtttttaaattggaagtggaagggtatcctcatttattattcatagctacagtatgttagttattattcttttgttaaaaatgtgacaaaattaaaggcaaatgtagttttaaaggctccagagtaaattagaaaactgatttcgtacatctgcaaaaattttattagctgattattttacctcaattaatattgggaatgttgacagataactacacatcgctgtttcacaagaaatattttgtgtatgtttattctttatgatcagaaaaataaatagtgtagattggacagtgttcatttttcataaatggaaaagaacattgttcttttactagccagagttggaagaaagtacttgggataagaaataaaaatgaatgtgtacatttcagtatgtgtagtggaatggattcaggaaattcattctttcatattaatttttctaaacattttttatgtagggataacagataagagagagtaaaaaaaatcccatttagtaaaaaaacaaacatatttgtatagatgtagtaaagatacacctgaaagttacataccaaattattaactgttcttttgggggaataaacctctaaccagggaccttttctttttaagaatttttatacctccatattatttgattttattttgaggagcatgtattatacctgtaatttaaaaaaattaagcaggcaaagagagagagagagagagagagagagagagagagggatagtatatgaagggctataggcagccccagaagagcaagaaaggcaaagaccaagcaggcatcagagctggatcctgacatagcaagcaattcagacacctgccgggcatcggggcagggtgaagtcttcttaccagaagagaaatctggag

SEQ ID NO: 23822 - DNA, 1044 bp, Homo sapiens
tcatggcagaaggcaaaggggagccagtgtgcacagaggtcatgtggtgaggggtgggaggagagatgccaggctctttttcacaactagctctcactgaatctaatagaccaagaactcacttattactgcaaggatgataccaagccatttgtgaatgatcccatccctgtgaaccaaacacctcacgttaggccccacctccaacactggggatcagatttcaacatgagatttggaggggtcaaacaaaccatattgaaactagagcacccactttctaattgtttttttttaataattgagttttgagaatttgtaaatatattctacatgctactctttgttggatatgcagtagtttgcaaatgttttctctcagtctgcagctactcttttcatctgcttaatagggtcttttgctgagcaaaggcttttagttttgatgaagtccaatttatttttctttgtgggttgtgcttttggcatcaattctaagaactagttttgtagctctaggtcctgaaaacttttcttctgtttttatctgaaagttttatagtcttatgttttacattaagtctgtggtccagtttgagttaattttttgtataaggtgggagtttttggtgaagattcacttttttgctgatgtccagttgctctattctttatcataaaggtcttcatcctcatcatcttaccattgaataggctgaggtgaaggaggcggaaaaggaggagtttgtcttgctgtcagaggcggaagaaaatccatgtgtaagtggacccgtgcagttcaaatccgtgttgtccaagagtcaactgtgcttcctttataaaatgtcagcttgttcctgttacattaaggagaaacaaggagtttatttactttatttatttatttatttatttatttatttatttatttatttgagacagagtctggctctgttgcccaggctgaagtgcagtggcgcgatcttggcttactgcaacctcctcctctcgggttcaagcatcctcccagctcagcctcccaag

SEQ ID NO: 23823 - DNA, 1025 bp, Homo sapiens
gtaaattatctgaaagtaaaaaggtacttcaactgagggctgagagatctgcctcctaaaaccatctggggctcttgctccctccagctgttccctcctcctggactgttcttccctcagattttatcttttggttgggtccctcacttcaagtgtttacacaaatttgaccttgttagtgagacctccttgaccaccctatttaataatactgcaaaccaatctgtccaacctgcttactctgcccaccccccatcttctaatagtactgtactttgtgcttacctaggctgtccctcttgtagctccttgtaatttcagactttagaacaggtatgaatgaaaacgttctgagaactttctctgcttgtgggtggaggaaggagtgcacagtgaaattgttcttccgattgcgtcttccttacgtcagccatgacacttgtagtcactgctgctaccacttaccaaggaactcagactccaggctgccactaccttgcaggacaatattagctgatgcttgaccatgtctatgtaattttgtacacaagacaaaaaaggggcaaaaagttactagctcctccccttagccaacattttgactttggacaaataagttcacctttctgtttctcattttctttataaactgaggctaataaatcataggtttgctgtagggatgaaataagaaaacatataaagcacttagcatagcacctggcatgttgtaagcattaaatgagtggcagccattattattattttctagcttttatggatgtattttacacatggcacaaaattgtactttcatttatctcattttgacagtatacctcttcttctgacctacaggtacctaaatttaaagaacagtttttcctaccctttcattgttgctagcctttcaagagtctcctactttttttgtgctttctcaattcctgtatgatgtttctaaactacaataaattaaagctagtatttcttctctattggaaggccagctggttaaagacaac

SEQ ID NO: 23824 - DNA, 1021 bp, Homo sapiens
tttttaaggtggagtctcactctgttgccccggctggagtgcagtggtgtgatcttggctcattgcaacttctgcctcctgggttccagtgattctcctacctcagcctcccaagtagctgggattataggtgcccgccaccgtgcccagctaattttttttgtatttttagtagagatggggtttcaccatgttggccaggctggtttcatactcctgacctcaagtgatccacccgcctcagcctcccaaagtgctaggattacaggtgtgagccactacacctggcctccaacgttatttttcgtagaaatagaaaaaataatccccaaatttgtatggaaccaaaaaagagcctgaataggcaaaccaatcctgagcaaaaagaacaaagctggaggcatcatactacctgactttaaagtatattacaaggatatagtaacccaaacagcatggtatcagtataaaaattgacgtatagaccaatggaacagaatagagaacccagaagtaaatgcacatatttacagccaactgatttttgacaaaggcaacaagaatatacattagtaggacagtctcctcaataaatggtactgggaaagctggatatttatatgcagaagaatgaaactggacccatatctctctccacgtaccaaaaagccaactccagatggattaaggacttaaatatcagatcccaaactatggaactattagatgaaaacataggggaaacagtttaggacactggtctaggcaaagattttatagttaagacctccaaagcatagacaacaaaaacaaaaatgtacaaatgggacaatattaaactaaaaagcctctgcacagcaaaggaaacaatcaacagaataaaggcataaccttctgaataggagaaaatatttgcaaactatttatctgacaagggactaatatccagaatatacaaggaattcaaacaactcaacagtaaaacaaacaaacaaacagttccattaaaaagtgagaaggg

SEQ ID NO: 23825 - DNA, 1050 bp, Homo sapiens
ctcagtaaagttgcctttttagtgggggtttttacttcacaacatagaccacaaatcctaagggtaagtgagtataaatcccttgggttggcttgcttggctctgcaaaatgtgtccaaaatgtgttgaggggtcctgagggtggggaagaacttgattgagcagaaaaatatcaagcttaggttttttgttattgttattttctgtatcctcaaagaaaatgttaatgtgctaggattcagaggacattttccaggtacacaaacctagttgaacaatatcagtagtcttattgggtcctctagcagtcacttggaaataagctcagcagaagtaaaagtaaaaactgttctatgctgatagttggaaagacagtacctcagcagggattggtcaagctgggaattcagggttcaagtaagaagagtggctctaaaaaatgttagatgatgctgacgtggtggtgcatgcctgtggggctactccgaaggccgaggcaggaggatcacctgagaccgggaacttgaggctgtagtgcaccatgatcatgtctgtgaatagtcactgcactccagcctgggcaacatagtaagacctcatctctaaaaaacaagaaagatatgataggtgaaagatgaccctaaacttaaaaggcagtgaaaaaaatcatcacaggtgtaaaagttagcaatgcatggaacaagattagtacaatgtttaggtcttggggtctggaatacccaggttcaaatgccatctctgtactatcatttcctcatttgaaataatacccatttcatagggttactatgagaattaaatacgagcttatgtaatatatctgacacataggagaagttcaaataacattacttctctctttccttatctctaacggcctaaatttggttaattataatgcaaaagggagggcaagttttgagctgaagctgcagtggaaagggatcatcaagacagctgtccttgagtgtccctcctgcagtactgtctctcattggctgcttgcccatcagaggcacactgatcact

SEQ ID NO: 23826 - DNA, 1111 bp, Homo sapiens
cctttggggcagaatttggaatttcttttcagtcaggctgctgggtcgtatgtgaactattgtttgactcacacaggggctgtcctaaaggcctgtgagccataaggccaccgtgggggcttctagttgatggtggaaggatcaagcagccctctttgccacagcagcaaaaaatgatgttgacatcatttaaaaaaaaaattagccataggaaggaggttaagaagttgtggcagaattgaaacaaatctaggcctctcaactgacaagctgagaaccctgcttgacatttatgagtggatgcgtttgaggaattatgtaagaatagtaagttaaaggatgcttttaatttaaaaaattaagataacctgaaaacatacctgtaaaaacatttcagttgacacagtctcttatgcttataacaaggattactgttaatgtgtttttgcggagttgggctctgatctgtaaatatttctcagggagataagagtctatggttaaacagtcgtagtagtagtagcagaatttgggtgtcattgtatagccaaattcagaagcttgggggaaaagaatagctaccataggaaccagtatttcagaagcaagttctgcttgtgagagttatcagttgaccaagggattcctgtgtaggtttgtaaagagtgtcagatctggcattctcagtatggaattactggcatgatgcaatggaggaacaggaatttttctgcagctctttcagtagtattggtttggtgttgggttatccaaataatgctcagattgtcctaattaacattaattcatcccctctgttgggctcatgtgacatatgcaacccgaccatcagtcagtggcgtattaaaatgctctccacaggaccacagagcagtgggtgatctctgcatggacgtgatctttgttgagcaggaatactcatatttctgccctaagcacagagcaaccggctatcaactgggatagaaaaattatgttcattcaggagactactgaaacatcttgcttctctcccatgtcaatcctttgtaatagagtaagggaaaagtacatacacttttgagtaacagtttccatacaaatgctctga

SEQ ID NO: 23827 - DNA, 1033 bp, Homo sapiens
attaaaattgcctaatttttagacagtttttttgtttgaataattttactttttaaaagatgaaaagcaaacgaataaaaaacaggttataggctattttgaaagcaatctgtgttacttcataatgtggttacatgtaggttatgaaggcacaaatttggggaccatgttttaagaagatcattggggattggtagtatttcaggttattgttacatattttagcttcaaaagacagtcgactgtattttagtgctgtcgttcttttagacaggcacttattgataccaaaaaacaccacgaaaagtaaaaaggaaaacccaaaccacaagaaacattttgatttaaaggttagatagtctgaattcatgagaacttagattcagagcatggcaaggttaaaagaaattttattaggatcaagacacaaaccatgtttaatgcagtctttttgttttgggggaactagagctgatattttaaatctagtcgtttttaccaatgtaagggaatttaagagataaaatttgaatagaaaggtaagatttgtatagtgattacaaagatgtgacctttaacagagggttttgttgtgtttgttttccacataaaagaatgaagaatttgtgagggtgaggtaaaagagaaggggtctccttaaaacttgagagaaggaaagaatttgtcccattgtagcaatatttgaaaacaggttttattaaggttttaatatgtgttgaagtaaataattatgcaaattgaactagaaacttcttagtttaaatctagtctgctatttacagtgttagtagctggacatcatacttttttaaattaatgtaatattgataaatagcaatcctgtgtattctcttatttctcagacttaataacaaagactttataaatccacatatgtagtgggtttcagttgtttgcacgttattcatgaccaatattatgtacatagcattgttctaaggccttctttgatctgatcttgggtataaagaaacaaaaacaagccgggtga

SEQ ID NO: 23828 - DNA, 1033 bp, Homo sapiens
cactaagtatatttatgttgttgtgcaaccatcaccaccatccatctctagaactttttcatctccccagactgagactgtacccattaagcagtaattctacaatctccccttctcccagtccctggcagccaccattctacttttgtctctgtgaatttcttttttaaaaaatttaattcttttgtagagacaggttctccctgtgttgcccaggctggtcttaaactcctgggctcaagcaatcttcccatcatggcctcccaaagtgctgggattacaggcgtgagctgccatgcctaggctctatgaatttcatataagacgaatcatacagggtttgtcctttagtgaatgacttaattcacttgagataatggcatcaagattcatctgtgttgtaacgtgtcagaatttcattcctttttgaggctgaatattattctattgcatgtatatattaatactatattttgtcagtccatttattcattgatggacatttaggttatttccgtctgttggctgttacgagtaatgctgctgtggacacaggtgtacacatgtctgttggagtccctgctttaattttttggggtctatctctggaagtggaattggctgttatgagtaatgctgctatgttggctcttatgagtaatgctgctgtgttggctgttatgagtaacgctgctatggacacaggtgtacacatgtctactggagtccctgctttaattttttggggtctatctctggaagtggaattgctggatcatatggtaattttatgtttcattatttttaggaaccaccatagtgttttccacggtggctacatcgttttacattcccaccagcagagcacaagggttccaattgtatctcttgtggtttttgatttgcatttccctaatgattaggaatgttaatcttttcatgtgctgtttggccgtctatatcttagtaatagtaatcttttcgtgtgctgctattactgttagtaatagtaatcttttcatgtgctgctatt

SEQ ID NO: 23829 - DNA, 1035 bp, Homo sapiens
gttgttagctcttctcatctgaggtgtattgattgtataatcagtagatagaggctgtgggcagatgaaattcagtgttgttgggcaaattatcggctgcttgcctgttgacctggaccctgctggttgtaccttagatgctggtgggattattactcatttcagtgaccctactttatgacagagcactctgtattattataaaagataaatgccatcctgcttgctgtggttgtggttgactacacaaatgtcagaatatagctagtctgcaaactaggcagtgcaagtatgtttccgatgagatcaaaaggagaaattttcaaagattaccttttctgaatttgtctctttgtaagaatgtaataacaaaaagcctatgtgtatctagctgatgataataatgaaacctttatgtatatagctgtttatcatgtgctaaggattatgacaaatcacttaatattttgttttaccagcaagaacactgaagccgacattaagctaagcaaatgggctaagatcacatgtcaatgagcagtagagcttggaattaaatctgtttcttctgaatacaagtcaagtttgttatattctactgctctgtcttattaggttatccaggctgaccattaaatatgtgtatactgacagatctaaggtttcatccaactggattaaaaaataaagacctcaatgttacttaaataaattattgcattgggtaatttttgagactatttgagctattaaataattataacattccaaagcccaaggtctaacatgggattacttttatagacaaaatcattttatataaagagcactgtaaattttatagctggtggctgtttttaaaaaatctagatggtttttgccgggcgtggtggctcacgcctgtaatcccagcactttgggaggctgaggcgggtggatcacaaagtcaggagttcgagaccagcctggccaatatggtgaaaccccatctctactaaaagtacacatattagccaggcgtggtgccgcgcgcct

SEQ ID NO: 23830 - DNA, 1050 bp, Homo sapiens
taatagcttaacatatgtcctttgattgttttttctctatatctgtactttttaagttgtgttttacaaaaatgataccatattgcatatgctatattgtagtctgctttttaaaaatatatttatttatttatttatttgagacagggtctcactctgtcacccaggctggagtgtagtggtgccatctcagttcactgcaacctccacctttcaggctcaagcgatcctcccacctcagcctctctagtagctgggactacaggtgcacacccccacacctggctgatttttgtgttttttgtagagatggggtttcaccatgttgcccagtctcgaactcctgagctctagctcccaaagtgctggtattagaagcatgagccaccatgcctggccctgcttttagaaaatttattagccaattttgataataaacattcctccacctattatttttaatgactacctagtattctatagtgtgaatgcaccataatttactcaacctgttttccaacatttttattaagagaacaacaaaaatgttaaaataattttatagtaaacacacatatatccaccatttagattttacaactaacatcttattatacttgctattagtctgttctcacactgctctaaagaactacctgagactgggtaatttatgaagaaaagagatttaattgactcacagttccacaagcttaacaggaagtatgactgggaggcttcaggaaacttacaatcatggcggaaagtgaaggggaagcaagcacgtcttactacggcagagctggagagagagagaacaagggaggaagtgccacactttaaactatcagatctcatgagaactccctcacaaacatgagaatagcatgaggaaaattcgcatccacgatccagtgacctcccaccaggtccctcccctgacacctggggattacaattcgacatgagatttgggtggggacacagagacaaatcgtatcacctgttttatcacataccagtcaaactagctatctctccattattttt

SEQ ID NO: 23831 - DNA, 1028 bp, Homo sapiens
tcagtaaattgcccccttagggtcatcctgtataattctttaattttaggcccaaaaaactatgaaaggaattttgtgtaaaatgtaccaaaagaactgtcccatttaaaacattttatgccatgcttggaaatgaaaatggacccttcaagaagtaagtctataagttgttttatcaacttatagatgttactcagatggaatggtaacaacttggcttgtgtgttctctaaaaaattatcacgttttcaagttatgcatttaacctgtattgacatatggaagttttgatgtagtttcctttctcaatcaactccaaagagtcaaaagtgattatcaaagctgaaaaggcttttgtattttcttcaaatgttaaagccatgtatgtgaacaacaaggctgatgaatttgctgttttatttcgttgacatcttaattcaaaatgtaaactgaagtttcttttcatttctttgcactgttaatattattctgtttttggttaggttgggtaaaaactgttcactggtgtcattttttataattagacttttatagcttggggtttttggtaagcaaataaatattttaaatgtaattggtgcaattactgtatgtgcactgaacaactttatattgagcttcatgtcatgtcacatttttatgctagtggtttcttatgatttttttaattgtatgtggtattcttctgaaatatataattaccaactcaccctgagttggagaagcaagagttctgtcgttctctcaaacagacttgtattgaaagatataaaaaagcttgctttattctaacattatttccccatcgataaaagtggttcatgtctatgttatttttacatcttgtacaatcccagcatcacattgttctagtaggagtacaaacagataacccaagcttagtccagatttgatttgggagaaactagaaggctgggaaaggtagatggaaggttgtgatgagtaggaggccaggggtaaaagcagaaggaaacaagaataatgta

SEQ ID NO: 23832 - DNA, 1050 bp, Homo sapiens
cacacatttctcctgtctcaagaactgtagaccctttaaagcacaagttgctattatccgctaatgtttaagacactccctcttatttgctgaagattttagaacttggctcactatcttcctctttgtcattattctcaaagtcttcaacatccacatagatagatcatctatctgtagtttgttattcctccccgttatctccatagttctttccctgcacaccctcttagctacctacccccgcagtcataccccagaccttgtcatcaccaataaccacaccacctctgaaatctccaggtcaagcatcccattctctgatccccaacttctttttctacagctcaggtactgtgatagctccactccaacagtgtttcattttggacctccactccaacaccgtttacgtttttcattgctcatcactccctcctccctgcctgcctcaggttctcatttatcttcttccctatttaggttccatgcccatgactaggtatttcatcctcgacactcagcctctatgccccttcctctctcacttcaacagtccagctctaattaaactctgagcctgtccctgagcagctgactgtggcaatcaaccatgctgagtggctttggtttgaataatgaccacagatctcaaatcagcatttgagaaatcctgctacatttccctggtaaatttgttcttcaaacccctccaatatctcctctcctattattctcagctgatgacctggctgatcttgcattgaggaaacagaagcaactacaccagaactacttcatttcccatcactagagccacctgtccacctgtgtctgtgtcgtgtctcctccttttcctttggtaacagtgaatgaatggaccacccttgctcctcactaaggctaggcattcttcttatgcttcagaccccagctctcctcgccagcttaagtattttgctcctaaaattattccgtttccttcattaccacattcctctctctgctgatcgactcctatcaccataaaatcatgtggcagtatcactc

SEQ ID NO: 23833 - DNA, 1049 bp, Homo sapiens
tatgctgtcatccttatctttgtttttatataaaacatctttttcctctgggtgcttttcagattttctctttatcactacttttaggcaattcgattattattatgtgcctgctagttttcttcatgtttcttgtgtttgggcttgttgaaatttcttgctgagttaacagttttcattaaattaggacatttttcagccattatttcttcaaatattttttctgttgtctcccttctcctattttttgagaagtccagtttcacatgtattgaccacttaaaattgtcccacagctcactctttattttattcctttttttctccatatatttcattttggatagtttctatcactatgttttcaagttcactagtcttctcttttgcggtgtctaatctgctgttaatcttatccaatgtattgttcttctcaggcattgtagttttcatctctagaagtttgatttggggctttaaaaggtatctcccatgtctctacctgattcttagaatatattaaagaccattatgataactattgtaatgcccgtgtctgctaattctgacatctctgtcagttttcgattgagttcagttgtttgatttgtcttgtcattatggtttctattttttcaattttttatatgtctggccatcttggattatatactaggtattttgaattttacttcgttgggatctgaatgtttttatatttctgtaaatgtttttgagattttgcgtttgttttagagacagagtctcactcagtcatgcaggctggagtggagtggcacaatcacagcttactacagcttcaacttcccgagctcaagtggtcctcccttctcagccccccaggtagctgggaacacaagcatgcaccaccatgctcatctaatttttgtatttttttgtagagatgggatcttgccatgttgcccatgctgtttttgaacgcctgacctcaagcagtcctcccaccttgaccgcccaaagtgtgtttttgagttttgttctgggatacagttaaattactttgaaat

SEQ ID NO: 23834 - DNA, 1088 bp, Homo sapiens
cccccaatctctctctccaagaacagaagttttagagtctgacacacccagacacaatctttgcctccctatttactgcctgcatgatcctagaaaagtaactttacttatttgagcttcatgtcccttaagtaatatggaaatgatagtaaggcctcatgaggccactgctaggattaagtgaagtaatagaaaaagaaaaggccaattatggggttgatgtcattaaaccagcaaacagcttttgagctgacagctctccactccaactcagggatttatgtgcacaggtgctgtctgttttcatcccaacccaagtgcacaccctggcacctctcacagtccccaaagaggcttttcctagcaccatttgtgagtagtggagactgcattacgagaaacagtgataccacttactttgcaaccaacctcaaaactctaggagacttatgtttcctccattgtcactctgaggtttctttattgctttttctctctttattaactcttcccccttctgcatgtggtgggcagcctctctctcctgctccctcgcagtggtgatgcaaatctggcacttcacactctgcagccagttagcagccagcttttgctcttgagttttcctttcctgcctcaccctcctcttgatgtcatctagccttttgatgtcatctagccttttgatgtcatctagcagatttcctccaagcaggcacaaggctctcaccgagaggaattctgtggaagttgattttctgcttatccttactctgtgtgatagggcccaaaacacttgcatgtaggatactcatttacattaatccttacagcaactctgtgatgcagggattgttagtactcccattcacagatgaggaaactggggcttaaaagaacccctacaaatccacaaggaaatgatctacagtccaatagaaaaggaattttcaaaaggatctgtaaaatatggtacccatcatataaaactttaagcctgtgaaagcagcatatatttttatacagaggttcccccaacctttttggcaccagggactggtttcgtggaagacaatttttccatggac

SEQ ID NO: 23835 - DNA, 1026 bp, Homo sapiens
gaagaggattgttttagctaattgttaacctttcaattcttctttcaaaaaagggtgataggaagtaactataatgcaatgtttatgtctttaatgctagtggaaaatacatgagtacctcatatataaatgtaaagattatatataaatacttgttacatagttctctgaaatattttgtcaataaactgagacattttaagaaaaaagagattaaataacctcttaagatcacccagctgggaagaggcagatttcaagggttagatttgaactcaagtccatcagaccccagagataaactcataaccacacaccttatgtctcccttaatttattgacataagtattcaattaatggtctttctctttgtgtctcatctgagagtttataaacaagagtagaagtgagtccctgggacccagtgttccccacaggccctgctggtgtcaagcagttttgctcaggcagtcctcagcagtttcctgggttctgtccattcatgtacagaagaagactcaggcctgcccccagggttcactgacaccatagggtccatcagaagacaatgcaacagccaggtgcggtggctcatgcctgtaattccagcactttcagaggccgaggcaagtggatcacctgaggtcaggagttcgagaccagcctggccaacatggtgaaaacccatctctactgaaaatacaaaaattagctgggcatggtggtgggcgcctgtaatcccagctacttgggaggctgaagcaggagaattgcttgaatccaggaggtggaggttgcagtgagctgagattgtgccactgtattacagtctgggtgacaagagtgaaactccgtcttgaaaaaaaaaaaaaaaaggcaacataagatgctggcaaacagaatatgtcaagatgcctaaacgtaaccttgacatctcaacaggcctggtgtgaagacaatggcctagggtcgtgcagaggcatgggctccatatgggtccttttagactttgtggagccacccag

SEQ ID NO: 23836 - DNA, 1047 bp, Homo sapiens
actgttgcttctgttctaaaatcactgagaactgactaacatttcatacacactcagtaaatccttttcctgggattttttttccctggccacacaggtagctccattttccagcttcccttgcagttggttggtcatgtgacaaagctccagccaattgaataagagtaaaagtgccgttttcttggtcagaggcgccaatttgactcacaggcagggcatgatggtggtgggtacagacacctcactggcgatctcctccctcctgtccctgctgctcttcactgggatgcagatgtagatccatcagctggcctccaccgagtggcttaccatccagggtggcctgcatggctcaggtctcttcgtgctctccctcactgccttcaagattctggagaatcttgtgtttggcaaaggatcccaagcaaagaccttccctgagattctcctgtgcctcctgttggctctctttgcatctggcctcatccaccgagtctgtgtcaccacctgcttcatcttctccgtggttggtctgtgctacatcaacaagatctccactctgtatcaggcagcagctgcagtcctcacaggaccttggctcttgccaaggtcacaggcaagagcaagaagagaaattgaccttgaatgttcaataaagttgattatttgtttaaaaaaaaaaaagagtaaaagtgtaccacttctaaaccggcccccacctcacacctcccatgcctgtcctccacactcgttacttatccagcaactaagtgcaaaggattctaaggtcctaggtgaggatggaaccatttgataaaagagcctgggtccttgaatctccctgtgggaaaccacctgctcaccggaagcactcctattgaacttttgggtgggtgaaaaataagcttatgttttggaatttatttgttacagtgacaccttatgtagtcttttttcctgttctttacctcaactccatctgggttggaagctgacctgtgttgggcagattttgagtttgaggtaggtttttgttgacatgct

SEQ ID NO: 23837 - DNA, 1023 bp, Homo sapiens
gtccatcagcataattataggtgaggaaattgctaagagaggtccctgagcagttggaggccagaaggaaatattttcaattaattaatggctgggcaggtaaatttttttagtattaaaaaaattaagaattccctagtgtaagatgtcatggctgctaactgtctagaaaggggtacatatcagaagagggtaagctgagattcatggatgttcaaactttggttgtaagcacttttcttctttaaaatattattttaaagatactgtgttaggtttttcttctttttttcccccttaaccccaaaacaaactctaataaaataaccattctgtgagtttataagttgcactggctagaatttagcaaaatgaaaagaatttaacttggatgaatatattatgcctaaggaattgagcatcagtctgggctttgttaatggtgaatgcctaaaccaccaaatgattctgttgtttttgtgggtttcttgaaagagaccaagtatttagactctccctgacttatgtaacacttcagctattgcattggtaagtcaagaaaaataaggaacagagaacaggtttgaaataaagcttcctatctgggttgcaaggatacactttctaattatttgttatgataattttatcaattgcacctactgcaagtgctccttgtccttggatcaatgtgcattagccagagactctcttatcagtaagcttctgaattgcctgtatgaggcacaaatcgttggttgctcatccacaacataagagacttgatgttggccttttgggagctcatgtttcaaatcagattagagctaatgtggccagaacataagaacacaaggaaaaatgaacaaaatgttgtaggtatgaatgtgctgtggggcgtgctttgtttaaagcaaacctcataaaagaagagcagggttaaagaagcctattaagttagggatcacttatttgctttacaagaagggagggacttaagcacagctcttgtggcacattcgg

SEQ ID NO: 23838 - DNA, 1055 bp, Homo sapiens
cctaaatcaaggtgttggcagggccatgttccctctgaaacatgtcggggagttttttcttgtcatttccaccttctggtagccccaggtactcctgggcttgtgttagcaccgctctgctccctgctctgcctttacagggcccttttcctctccctgtcttctcctcttcttataaggacagtcattgaattagggcccaccctaatgacctcatctgaacttgattactctgcaaaggccatatttccaaatcaggtcacattcatcagtaccgagggctaggacttctacatacatttttaggggacacaattcaacccataaaaccatttgtcctcaagatgcttccaattcagtgagggagactgatggaaaagatgatggaatcagtgctacaaggggccggagcactgtgctgaagagtccaagggaggacacacacacacacacacacacccatgcacacacacccccacacacaccccactccaccccacactaaacacacatctatcacatgatgtagaatcggtccattctaaatgctctgtgggtgagtttgccctggcatgtgggctcgagggatgagtggaattttagttgtagagaagtgagccgtgcagggtgtttcaagctgaacctgagcaatgtcatggatgcacttttggtctggcctgggaaggaagatgcttctggtaacaatgtgtaagggaaggattggacgctggagacttgaggctgactgagagattctgcagggggccaaggtggctcaggaggcctgaacttggaagtggtggtgggatgagaagtcaggaacagatcctgaggagtgcggggtaggggagtgaagtaggtgggaggtggcaatggatgggtgggtgggagaaggtcagaggcgaccctcagacttcctgaaagggccgattgggagaaaggtgaagactttatttaggcaagatagggggttcaggcagagagtaaacttgaaaggaagataagtttgcttgtaaagatgttgaatctgagatcattaaagctccagtgtagat

SEQ ID NO: 23839 - DNA, 1865 bp, Homo sapiens
tgagctgagatcgcaccactgcactccagcctgggtgacagagcgagactgtctcaaaaaacaacgacaacaacaaaaaacaatacaaagatgacttatgcacttgaaaatgggagtcctccgctcagatacagatgtggaaatctacctggttttagtagctggtaaggaggctttagtgttgggcagcccggaatactagtcccagctcttgggcaagctattagcctttctgcacctgtgaaatggggatgatcatgcctacccactacaatcagttttcatagtgatgatcagctgagagagcatctgtaaactgcctagtctattgtgtgtgttatagaaggcgctcggtcagcatggtcagttttacttgcatgtgtttatcctgagcggtggactttatgcctcctgaaggctgattgttgggattacttcaagcatccagttctgtacctggttccataaacatttgttgaataactattgattgagatttagtcactgttttaccatagtgatatctaaatcactattatatagtagaacccttcttttttttcccccaaaataaagctctaggggtaccccagcatataaagtgaatctaagaagagcttctgctattgcaagcaggacacgaaccacctctcttttccatttctttccttcactgttcctcagacataccctacaaggagccatttgaacaccttactctgggagtagaagggctaaaagctctgctagaactgaagtttgaaaagagtcattccacagaaagacttctgggcttagtgttccggagatcagctgctaaggccatagctaacagcctcggcagataacagcctttcctattatcaagttttcttgagaaagccttttttccccccccgtcaggaagtcagtccttattcctaactaaaagttgtaaaatttagctgtccttagtaaaggtggaacacatggtcctcagcttctgttttatttattttttttttttgtatttctgatggctgttgttatgtcactcctacctgagttagaggccacagtgctgtttgctttcctcctatattttattctctagcccttaaaggaataatcaaaactccttgggctgggtgtggtggctcacatctgtattcctagcactttgggagcctgaggcaggaggatcacttgaggccaggagttcaagatcagactggtcaacatagtaagacccccatctctaaaaataatttgaaaaatgtagccagacatggtggcatgtacttgtagtcccagctactcgggaggccaaagtgggaggattgtttgaacccctaagtttgaggctgcagtgagctgtgatcacaacactgcactctagcctgggtgacagagtgagaccttgtctctaaaaaaaaaagaataaagaaaagaaaagaaaaaaaaaggaagctcattgacggtagaggcaccttttttttggagtctccagagaaccttgcacttgaaggacaaacatgggctctctgcatggaactgattcttctttggattttcctttattgtcctaaatagacatcatcatttgttcttgtgaaggttctttcctagaacatttcttttgttttggtttttaaaagacaataattgggcttctgtcacattctttggaaaactatctttaactatgcagcctgttcactcataacaaaaaaattcctattctctcatccatatgctcacagaagataaagctaaaatagcttgttttatattactggtattgaaatgacaaatatgtctccaaatagcaaatgggtagagtaatgcagatttaaatttcacctgggttaggaggcattatttct

SEQ ID NO: 23840 - DNA, 1029 bp, Homo sapiens
tgattgtaacctgggtgtggagtggggccttttgtcagttgctttaagttagatatctgcttcggagctctgtgtctggctctgttccccaggtcatagtagccaacaaagggacctggtcccctgcagttggcccttgaattttttctattgtttgagaactagaaattatttctgccagagatttcacctgagaatacatccaggtgagttcttgaggttagggtaggatgagaagcagtagaagccctgggggaaaagaattctgagttgatgctggggtaggaatgccacaggactggccaggagaatagtttcacagctgctgttgtagttggcaagagaaagaggctgtgaaatgaaatattacacaggattgccttagacactcaatggaaaacttttttccctccttccaccagaggaaatgaatgcatgctgatggtaatgagaaaatgaggctctgaaagtgcctgcttttccttcattttcatctttcccttcttttctctgaatcctccctgcccttgtgtcaagcttcattcctggttctcccaggtcggaggaacttgaagcagtgtttgtcaaccagtcttgactgagaggtgtctgagaagactgggctctacccttgcaggagtcagattgggttccagaatgatctttgctcttgtttctgctttgaatgaatggtttgcacatgtctcaatctctggcatcacatcccagcagtatcttctctcctgtttatcctgaggcaggattttgtattggccgcctgatagtttggccccccacaatgaattaaatttcaggagcaggaaaatgggaacccctgtcttctgtgtgtaagagaatctaagaatactgcatgtgactcatggtaagagatttgatcatcaatagcaagaaatacctttcatttgaactgtgtcttttagttaccagagtcctttctcattccttattcctgtgagaaggcaactggggcagagggtggttaagtgatttgctcaagatcccaaacag

SEQ ID NO: 23841 - DNA, 1050 bp, Homo sapiens
ttttaaaaaatcattcttcatttgaagaagggatccactggcatttctttaaataggaaaccatggctgtttttaggttgaggagttaaaacctacctaataatgaatgtgatgggccaagaagggggaaggcagaaaagcctaaagatgtggtattagtttccactcatggtaaatgagaagtgaagataaaacacccctgaaaaagtgcatctctctagaaatagatctggatttgcaggcattccatttatgggcacctgtttcagaagtaggtctgtggttataacagagagatacccataacaatcttcatttacacaaaggacttttattctataaagcattggtttgcaaacttttgcatttcttgagacagtaaaatgtctcttccttcaacccccacacctccaaaagggaagggcattgacataaagttatgttcttttaattttaccaagtaagaatttgagcaatacatttactgtcataattatttcatgaacagagcattttacttcaataattaaataagcattttttgagatccagtagccccaaacactgtgctaagtagtggctgtttaatggcagacacgataggcatggcccctgctctgatgggacttagagtcggatggaggaggggcatgaaacaagccaatacataagaacacatagaaagggtactctgaagagagacacagagctaagatcaaggtgaggggagatggcttgccttttggtggcatggtcagggaaggactgtcctacaaagatgcaataaacagggacaatgacattgagacacaaagggagagaaggagctgagtaaggaaagggaaataagtgttccaggaagaggaaactgcacttgcagaggccatgaggtgggaaaagaacttgatgtgctcaaggtcaaaaagcaggacagacacatctcaggatacagaatggctctttaaatgaaacacattcagctttatgaaaacttatgacagtgagtgtctttctgtcttgctttctgctttctttccttgctttcctcct

SEQ ID NO: 23842 - DNA, 1049 bp, Homo sapiens
tgctcctacctcagcctcccaagtagctgggaccatgggtgtgtgccaccacacctggctagaattttttgtagagacaaggtctcaccgtgttacccaggctggtcttgaactcctgggctcaaggtatcctcccaaagtgctaggtttacagacatgaaccagtgtacctggccaattcctggagctttttactgctacagactgccatgtgattcaaattaggctttcagaatgacctcctactccacagaactccattttcactgtcagccacagtcctagaaattccacccttagaaagtctttcctgtaagttaaaccttgttatgagtagttaaaatacagatgtcctagagaagggccataccatcttatcagtcatgtgaacctcagtataaatgaaatttatgagagcttttttttggaacagactgtcattggagagggaggaaagaatatgggggccctggacatcctagggcaggcaaagggctccatgtcgggaggctagggacagacatgtctcagggactcaggtttttctataggtgagccctgaatgccattttaagtacattctacccaggttgttagtgttaaaatatttggatatgttgaggttcttcatatgttagtatcaactcacagggcagatttatgtttcagagtacctatcatataaccaggagcttactaaataatgaaatacagtattattggtcattacctgtattaaataggtttattcatccattgatatccacctttttgaaaaaaggtttgaagtcagtctataatatatattatatgttttacttatagcttactttgggcagtagtagtagtggtaacaataatcattataatatcttagatgctgcttcctccaggaagtcttcccggatcctccaaatccagctacacatagctttctatgtgcatctgtagtgtgttgcctgcaccttcctcagccagcacctaacacactatttggtattttcctatttgtttatctgtctctttcactatctttctcaaataagatt

SEQ ID NO: 23843 - DNA, 1054 bp, Homo sapiens
caagtctgccatatctcccaccactagaggtttccagcttgagttagacatcgtcctcctgatgcaggctctcctttggctcagagtcctcagagactatcacttccatatgaacaaatatatctcggaactgtttagttgcaaaaaggaacaatcaaagcagctgtaagacagcttgtagtacagtttggggtcaagaccatagactttgggtttgaattttgcctcctccatggattagctttggtcaccataggcaagtcatttgacttttctgtacccaggctccatcacctgtaaaatggtggtaatggtagcattcacctcatagcattgttttgcagattaagtgaagtggtgccgaggtgcctggcacaggcctgtgtgagtgttggctcttagcagatttgtggaagggaaaggagctcagggagatgggaagtggcaggaaagcaaagtgttggaggaaccaaagagaaaataactcttagaacatgaacattttgtgcacttgtctgaaggtgcacatgggaatgaatgaggaaggcaagccggatccttattctggggaacatagacgccaggcaggaggtaaggatgagaggataaaggccaaggctttcattcttgagttgcggagggttgtggagaaaggaaattaatgctaatttgacaactactatgtgctaggcactgtgccaagtcttcctatatattgtcccatgtattttttaccatctgacatacacattttctttttctttttttgagagagagtctcaccgtcacccaggctggagtacagtggtgggatctcagctcactgcaacatccgcctcctgggtttaagcaatcctcccacctcagctaccagagtacctgggattacaggtgtctgccaccacactcagctgatttttgtatttttagtagagacaggttttcaccatgttggctgggctggtcttgaactcctggcttcaagtgatctacccacctctgcctcccaaagttttgggattacaggtgtgagccactgtgcctgaccgacata

SEQ ID NO: 23844 - DNA, 2698 bp, Homo sapiens
ctggataaatcaggaactcccaaacactcttcaaggagtcatccctcactccccaccctgcctgaagccaggcggaatcaggcctgccagtcctggaacacgctgtgctcttcttcggagcactcagacatccactacctgtccagcctttgtgcgggtgggaacagtgtccccattcacgaagcgggagacccggagtggggctgatttgccaacggcccggggctcctcctcgcaactgcccagcggaggacctctcggctccttttctgcctctttccaggtgtatcctctcgcctgtgatgtgtagatgttccccaagcgtctgccctacctggcccccttctcccctggagccttaagacacagaatgtcagggtggagtcaggtccaatcacatgctctctgcatgtccccttgccctcaggtgtgctctccttgctctgtccacagagcttgtcttgcccggggccctccctcacctccacctggggcctaagactcaccccctctgctgacttgcgtacattgccaagtgcttcttggacatttcaacctggacatcgccccaagttcaacaaaaccaggaacaaatttacatccctcccccaaccttagcaccccttcctgattatacagcacctccattcttccatctccctggcttgaaccctttgtttcattccttttccccatgtgctcaacacctcctggcaggtcctgacagcctcctatgccagcgtcctcctctccacagtcctgctgcaggcgacgcaaaccttttgtctgggctcttggaattttctcctaactggcctccctgctgccaatctctcccacctctagcttcatcctgcaactattaccagatttacagttttaattatgttaattaaaatcattaattaacatagttttaatgatgttatttttcagggttttctctttgctttagcattaagcaatgacttcttgcatagcaactagagccttttatggcatttacccagtctttctgacttaatttctttacacctgtagataaagtacacttcagccagaagagctgatttgctgttttcttcttaagctgtgtatttccttcctctctgcctttgctcatgccttgccttccccgaaatgcccttcctcctctcctccactgtttgaaatcccactgttttcagataacctgtcttcaagggtctttttctgatttttgcaaccagacgtgttttctctttcttttggattgcctttatgatggagattatatcttgtcattctttatataaccacagatcttagccttgtacgttgttctcagtattggctgaattgtactgaatttgagcatcttgggaaggatcagtgtgagtttctatgagggcctaaggtgtgaataactctgagatgtttgattgtcatatatggcctaagtgttttgcttttaaccttacagttattgggcattaagatatgacagctcttaaaagtacaggattggaaagcatgtttctagagactgaaatagatgaattttaatatccaacagctatgtagtttttacacggctcaatcacagctgttatttcgtgatcttcaccacacttcaaagtaataggtagttcatgcattatttttattaagcaaattaaggggcagtgttggttcatgtaccagtccaaggatagatggaagcaaagtgggatgacagtgctcatatgaagtcatcatattgctgtcattgtccctccaggctgctgtcttctggctggctgtattctcagacaagatcttcccaagtggtggcacaaatggccaccagcctctccaggcttaaattcaactattaatattttaggaacctacagaatgatacgagagggtatctctcctggtagctttagcagaagtcactgggaaggcccgtctttggtccactgctgtggctgggtctggacatcattggacagaggagaaaattatgagccttggaaaagctaagtgacttttctaagatcacacagaagactgaagtgcctgtcttgtgaccaagagtgtccctgtgtgagcccttttttgagtttaggggcagctgttgactcagtcgcaaagggaacagattgtatatttggggtttcaactttcctttttctgtacccttttacagcctgcagaggactcagctaattctgaagactcatctaatgtccagtctcttaaaattctgtttcctcccttcctttttaaaaacctgacgtttatataaaaaaaattatgttcagtgaaagaagccagactgaaaaggctatatactgtattatctcatgtatgtggctctctggagaagacaaaattctagggttaggaaatagatcaatggctgccaggagtggggtgggggtacaagattgagtacaaaggggcccagggaattttttgaggcatgaactgtttagatcttgatggtggtggtggttacaagactgtatatatttgtcaaaatccacagaactctacactaaaaagggaaaatttcacagtatgtaaattatacttgaataaaaacaacaaaaaaccttaaatcctctttaggcctgtttgacaatgggatttgcatcttaatgagcatcaatactgtagctgtgatgaactaagtagctttgagatacaccataatctaatatcaagaaca

SEQ ID NO: 23845 - DNA, 1058 bp, Homo sapiens
cacatttcattagttgggttccccctttcatgatttctcattttggttgagaaatgaaggacattttagctttcccttccctcttttccttctgtaaaaacttaagtctctgatagttggccagggggctcgatgggtaggggagagttaggaggggacagtgagggctgggagatgatgctaggtgctcttttccttctcacctgagccctacctgaacaatgggccagacagagaatggatattgagcaattatgctgttttctttctctgtttatccaaatgctctgtctttcacatgcgagatgaaggaaaacccatttctactactgattttctctcccttctctgaatatgtgtaggaattatagtctttaccatgcagcttaacacacattttacatctatctgttggctaatgcttaattatatccaaatgttgtgtctccaccttgcagtaggctactggaggcccagaactcaatggacaacttcatatctccacgttaccaggacagggcttagccacagatatttatggatcacctgattgttctgctactgacatgttcacctcctcaaaacctgctttcaaagcttggcaaattccgggccattttggcagcagagctgtgggacaagatttaaattgtttgttgccatttattggtgaactggacaatcaatccaaatttaaaattctctaatcagattagtttatttttaatcatctggagtctggctgggtttgttctgtgtgggagccagtgagacccaactgtttcattgacttcctttgtatactcttgacaaaagtcttttcatcctcgcccaccttatgccttcaaaactgtgagtcaagctgcatttcctttttttctccttcctccccatggatacatcttagttgccattttttcttacaccccttttgttaggtgttagggcttcagtcatgctgcctccctttggcagggctgggaggggtgtgtgtgtatgtacatatctgcatctgtgtgtgtgtggctttttgcatgcgtatctgatggttgtgtgta

SEQ ID NO: 23846 - DNA, 1059 bp, Homo sapiens
ccaaatgctgtgtttaggggttgctccttgttcagataacttgcaaacttacatagtgtactgatccatgtaactctggccttctccttttcagagaggatgggtggagtcagaggaagggaattgtgcctttgggagctgaggttttagacttgtagctggggccccctgatgggctggcactcctctgaaggcagatttctagggtgagaacagaatttcccaggccattttctttgcccttctgtatggttgctgtcaagtttactgctttttcaaaccctgttagcttttgctttgttactataggaacaagagctggtagtctgggggaaatatatgtgcatgtgagtgctggggagggggtgtagtggctgtggtggctgtggactgaagggagtgaggacagcagaagatgttcaccgctgaagtctctctgggggccctgcccactttggccagtgctctcttcagagagtttttgactttgcatggtacactcttggggaacaggcatccctttgtagatctgcagcactctcctggcacccatccagtccttcagtggaacatctggaaagcctcggcccctccccatgccaaagccactgagccctggagacagagatcaatgacctcttctttgctgctccttaacccgtgtcccagacaagtgtttttctgggaaccagtgaataacgcagatctttgatgccagcgcttgtgtgctgttgcagtaacactttcacttttgatgatagggtgggggcagaggaagggcctcggtagggagagcaacgagaatttggcttttcaggaaatcagaactcaagtggggaggcttgcttcctactcactggttttctggctgggaaaacagcaggctgagccattgcctgatgtgaatgctccttcgtgctggggctggtattaggggtaggggtgggcttgaggctagagactaatttggttctaacctccacaggcaatccttgtaactcctgggagataatgctgaaaaagtgcatggtgatttttcatgcatgtagtttataacac

SEQ ID NO: 23847 - DNA, 1062 bp, Homo sapiens
aaatacttcagtacatagtactctctgttccttctgtttctcagtatcttttcaaaacttttgtgtgtgtgagacagagtctcactctgtctcccagactggattgcggtggtgtgatctcggctcactgcaacggtcacctcccaggttcaagcaattctcgtgcctcagcctcctgagtagctggtattacaggcgcccaccaccacacctggctaatttttatatttttagtagagatgggattttcaccatggtggccaggctggtctcgaactcctggcctcaagtgatctgcctgcctcagcctcccaaagtgctgggattacaggtgtgagccaccacacctggtcttttcaaaactttctaaacatcatagtaatatgtacttaactcatgaggggcttttcagatttttgcctagaatgaataaattcagatagctctacaagtatatggagtgcctaccctgcacaaggcactatgctggttgagggatgggttaaggtcagattttgttggatagagtggaattatgcaatggaagtggatttagaagatgttaggcccctgtcctgacagcacgcatggtctagttggaccttggaatgttggctaacagaaaggaacataagttaggtgctcaatgaagtcgcttgctttgtctgctcagcagagctggaggctgtgtcgtctgagtatttgaagatgagggcttttaggaagggcgtagatattgggttgggtttgatattgtggttagtcagttgtcagccagcagtggaaagtgaaagtggcatgtgcttgagcaaagctggcctaatgggatatagatttacccgacacacactgatagcaaatagattgtccttacagcctttaccaatatagaactttgatacgtaccattctgtttgcagaaagagcgaccagaaatgtgcagcagtcagtaatgtaccccctagggttgctgttcattctgactcaaggaactttttggaagcccattgcataactaaaaaagaaatgggcagtctggtgtattgttggcaaagcacaccc

SEQ ID NO: 23848 - DNA, 2038 bp, Homo sapiens
ctggagttcagtgggctctgtggccaaataagtttggatagtgcttgagtgagcactgggagtttctggactgcaagactactcaggcctttgtatgctgatgtacagtgactttcccagatgggcatatatagcatacaacttcctgcttatttgattgtggaattatgtattttccccccaggaggatcctacgtgaatatagtttagttccaaataatataattgagttgaggaaatgctagtctaaatgatttcacttcagtatgtgttttagtgtgaatcactatcaatagtcatgttttcagtggtctcagtgcccgagggagttgattggaaggaagtcagagggacttcattaaataagtcagtgaatgaggagtcctccaagggatccctgcctggcaagaaataccctcaggccatcttggttcagaagttattcctccatacattaacaggcacataacacaggctttaaaaaatactaattttgtgaatattatggctactccatagacagagcatccccttttcttcacttgagatacagggaaggattttgtgtcaatggtatggcgtcaccatccccatgggacagggttgcagcagctggggctgtgagggaagatgaggccgaaagacccagcaagattagggttgcaggtaagatacaggacaccgttaaatttgaacttcagatcaactctgtataatattttggtataactatgttccaaatattgcatgtcacatagttataaagaattattttttctggaattgaaacttaaacagtcatcttgtatttttatctcctgtctggtaaccccatgtaagatgttcagggaagcctagacacacagaccagaaagtgatgtagaatgtacaaggcaaggcagtgaggaatgattccaagttttagagagcccaggtcttccttcttggaaatgggttaatacatcctcaaaccctcttcccacctcatcactttcatcatatccccctcagtttgggagcatttgtatatgagagcttgtagcctggcagtttttttttgtttgtttgtttgtttgtttgtttgttttttttggcagggtctcactctgttgcccaggctggagtgcagtggcatgatccctgctcactgcaacctcccattgctgagttcaagcgattctcgtgcctcaccctttggagtagctgggattacaggcacgcactaccacacccaggtaatttttgtatttttagtagagacagggttttgctatgttggccaggctggtctcgaactcttgatctcaagtgatctgccctcctcggcctcccaatatgctgggattaaatcaagtgcaagatccaaaatgttactaaaaaagcttttcagctttttagattctcttaaaaatgcaaacaaacagacaaaacagtttcttagaaagaagccggttgcgtgcgaaccgagaagtcttgaaaccaaaagaactccaagttccctgcctgtgctgaacactatgggggtggcacgtgcccatccagggcaaatcacagggggagaagatgaggtttcttaacagtaccacctctcacttttggtatttgtaatggagaacacagacttatatcacatgtgaaaatgaaacaatggtttaaaaagtcatgtctctgtgctggctctggatgagatgagccttttgagaaggcagaggcgtgctcggtgggttgggctctgggcatttcttcccctgccaagaagcgaaatgtcttagctccatgtgcgttgatgattactaactggccagggcttactgtaagtgggctgtgctcggggatctcaccaggaagaaaaagaatcaaactaatccctttctggaaaccgtctcccccggttgcctgggccacctgtcccagatgcgctcctctttcccaagactcttgctgtctccccgctgccccagaagcctgccttttctccagccctgcatgggacattctcctgatggcagggacccatgagaggggggctgggtgagcc

SEQ ID NO: 23849 - DNA, 1033 bp, Homo sapiens
gatccacccgcctcggcctcccaaagtgctaggattacaggcgtgaaccaccgcgcccggccaagcatgctgcattttaatcatcaattagcatcagtaaacatttactgtgtacctaggatacatccatccgagtagtgaacccaagggagaattctagagcataagctcggggagctcacaagctggccaaggatcacctagactgagctgacttctattaggactcttctaagacctgtgatgttgatgacagaaggctgctttcaatcatcgtgggctgggcaaactctggcaggcttccagcaacagtgggacttgagctaggactcaaaggttttgcataagcagataaaatattggggtagtcattcctggcccaggccagggataacctgagggtgcgattcggtgggggaggcaaggctaacttcagtgggtagaatcaggttgggagaattcagtggggctgaatattcgaagcctcagtgccacccactttggcttgggaatttctagaatattgtgccagtttttttctacatcccaggaaatgggggacttgcatctcacagacttgtgaagtataaataactcaaatgttgagaaatgacaaagttggcaagcatgaattttcggcctgctgctcagcggctgactgctgaggcctgcaatgatatgcaagggaacttggctggctaattttgaattttcctttctccagggccatggcaagaggaatatgggcagaggggggaatcagtgctttgtttcagggcaactgccatacataaccactgtcttcaaataaaagcctttcacaagtaggtttccattacacagcaagtcgaggaggagctggtgaaatcagtgagttaggtgagtcccccccatcctcaggatcttttgttatggtggtggtggtaatggcggtgatagtggtgataaagaggaggggatgttgcccttaacgtagtactggcatattacatagctcttccatacaggtcatcttatttgatcctaaagcaaa

SEQ ID NO: 23850 - DNA, 1048 bp, Homo sapiens
ttatctttgatgagcccagggccgaggaagagtatctggctattgtttgttcttttgggctctaagatagtacccctagcactaaactccttgacttcaaggattccctttcacctccctccaagctttcctaggctgtagttctgtaagaaactgcttctagttgttctgtgttgtgatctatgggaagaggtggctgagtcccagtgacctctacaaattttgcttgtggtgtgtgaccatgggtatagttcagactcaaagctataatgctttacatttgaatataactttatacttctttttgagatagaatctccctctgttccccaggctggagtgcagtggtgccatctcaactcactgcaacctccgcctcgcgggttgaagcaattctcatgcctcagcttcccgagtagctgggattacaggcacacaccaccatgcccagctaattttttgtatttttagtagagatggggtttcgtcatgttgcccagactggtctccaacttctgagctcaggcaattctgcccgcctcggcttcccaaagtgctaggattacaggcgtgagccactgtgcccggcccataactttacacttctctggacgtactgtttcattttagtccttccacaacaatgtgtatagaagtaatggtagatatttttaacagaaggatgccgaagcgtctttgctagaatggcaagaatcgagacagagatgaggctgggacaagccttcctcagtccttcttcatgctttttcctgccccccactaatagtgtggatggactttttttttcctagaaaggtccgcagctcatgcatataatgcatgcacataatccatgcacaaccagaattagactattctgcagctgatggagcacctggagccttttgtaccccgaggctgggagtctgggggcccctctgtcagcgctgaggtccacctgtctgagttgtgcttattgtaggcgggagcagccttttcctattagctgtgccacagttcaatttggaattgtgcgttctttcttctt
